United States Patent Application Publication US 2024/0327476 A1 - sequence listing, part 111

SEQ ID NO: 212240 - DNA, 2430 bp, synthetic construct
  misc_feature 1..2430: note = Description of Artificial Sequence: Synthetic coding sequence
  source 1..2430: mol_type = other DNA
atgggccccctgaccttcatggacgtggccatcgagttctgcctggaggagtggcagtgtctcgatatagcacagcagaatctatataggaatgtgatgctggagaattataggaacctggtgtttctgggcattgcagtttctaaaccagacctgatcacttgcctggagcaagagaaggaaccgtgggagccaatgaggcgccacgagatggtggcaaagccccccgttatgtgttcacacttcactcaggacttttggcctgagcagcacatcaaggaccccttccaaaaagcgacgttaagacgatacaaaaattgcgagcacaagaatgttcatctcaaaaaggatcataaaagcgtcgacgagtgtaaagtgcatagaggcggctacaacggtttcaatcagtgccttcctgctacgcagtcaaagatcttcctgttcgataagtgcgtcaaggcgttccacaaattcagtaactccaacagacataagatttctcacactgagaagaaattattcaaatgtaaagaatgcggtaagtcattctgtatgctccctcatctcgctcagcacaaaataatccacacacgcgtgaacttctgcaagtgcgaaaaatgcggcaaagctttcaactgtccttcaatcattacaaaacacaagaggatcaatacaggtgagaaaccgtacacatgcgaagaatgcgggaaggttttcaactggagcagccgtctcactacacataagaagaattataccaggtacaaactgtacaagtgtgaagagtgcggaaaggcgttcaacaagtccagcatcttgaccacccataaaatcattcggacaggggagaagttctataagtgtaaggaatgcgccaaggccttcaaccagagcagtaatttgaccgagcacaagaagatacacccaggtgaaaaaccatacaagtgcgaggaatgcggcaaagcattcaactggccaagtaccctcacgaagcataagagaatccatactggtgaaaaaccttacacctgcgaggagtgtggcaaggccttcaaccagttttccaacttgacaacccacaagcgaatccatacagccgagaagttttataagtgtactgaatgcggtgaagctttttcacgctcttcgaacctcaccaagcacaaaaaaatacacaccgaaaaaaaaccctacaagtgtgaagagtgtggcaaggccttcaagtggtcatccaaacttaccgagcacaagctgacccacaccggagaaaaaccttataagtgtgaggaatgtggcaaagccttcaactggccatccacgctgaccaaacataaccgcatacatacgggagagaagccttataagtgcgaggtgtgcgggaaggccttcaaccagtttagtaatcttacaactcacaagcgcattcataccgccgaaaaaccctataaatgtgaagaatgcggcaaggcatttagcaggtctagcaatttaactaagcacaaaaagatccacatagaaaaaaagccgtataagtgtgaagaatgcggtaaggcctttaagtggtcatccaagcttaccgagcataagattacccacaccggggaaaaaccgtacaaatgtgaagagtgtggcaaggccttcaaccacttctccatccttactaagcataagaggattcacactggcgagaaaccctataagtgtgaggaatgtggaaaagcttttacccagagctccaacttaacaacccacaaaaagattcacacaggagaaaagttctacaaatgtgaggagtgtggcaaggccttcacacagagctctaatcttactactcacaagaagatccacacagggggaaaaccgtacaaatgtgaggagtgcggaaaagccttcaatcagttctcaactctgaccaagcacaaaattattcacacagaggagaagccatacaagtgcgaggagtgcggtaaagccttcaaatggtctagcaccctgactaaacacaagataatccatacaggtgagaagccctataagtgtgaggagtgcggtaaagcttttaagttatccagtacccttagcacccataaaattatccacacaggcgaaaagccttataagtgcgagaagtgtgggaaagctttcaaccgctcatccaacttgatcgaacacaagaaaatacacacaggagagcagccatacaagtgcgaagaatgtggtaaggccttcaactattcatcacatttaaacacacacaagaggatccacactaaggaacagccatacaaatgtaaagaatgtggtaaggcgtttaaccaatacagcaatttgactacccataacaagattcatacgggcgaaaaattgtataagcctgaggatgttacggtgatactgaccaccccccagacattctctaacatcaaatag

SEQ ID NO: 212241 - DNA, 2427 bp, synthetic construct
  misc_feature 1..2427: note = Description of Artificial Sequence: Synthetic coding sequence
  source 1..2427: mol_type = other DNA
ggccccctgaccttcatggacgtggccatcgagttctgcctggaggaatggcagtgcttagacatcgctcagcagaatctctacagaaacgtgatgttggaaaactataggaacctggtgttcttaggtatagccgtaagtaagccggacttgataacgtgcctggagcaggagaaggagccgtgggaacccatgaggaggcatgaaatggtcgccaagccaccagtcatgtgcagtcacttcacacaggacttctggccagagcagcacatcaaggacccgtttcagaaagcaacactccgccgctacaaaaattgcgaacacaagaatgttcaccttaagaaggatcataaatcggtggacgagtgtaaggtgcaccgaggaggctacaatggattcaaccagtgcctgcctgccactcagtctaaaatcttcctgttcgacaagtgcgtcaaagcattccacaaattcagcaactcaaaccgccataaaatcagccacaccgaaaaaaaacttttcaagtgcaaggagtgtggcaaatccttttgtatgctcccacatcttgcccaacataagattattcatacacgggtgaatttttgcaagtgcgagaaatgcggaaaggccttcaattgccccagcattatcacaaaacataagcggatcaatacaggggaaaagccttacacatgcgaagaatgtggaaaggtattcaactggagtagccgacttactactcataagaagaactacaccagatataaactctataagtgcgaggagtgcggcaaggctttcaataagagctccattctcactacacacaagattattcgaacaggggagaaattctataaatgtaaagagtgcgcaaaggcatttaatcaatctagcaacctcactgagcataaaaaaattcaccccggggagaagccttacaaatgcgaggaatgtgggaaggccttcaactggccaagcacactcactaaacacaagcggattcatactggtgagaagccttatacatgtgaagaatgcggcaaggcttttaatcagttctctaacttaaccactcacaaacgcatacacaccgcagaaaagttttacaagtgcaccgaatgtggagaggcgttttcccgatcctctaacttgaccaaacacaaaaagatccatacagaaaaaaagccttataagtgtgaggagtgtggcaaagcctttaagtggtcgtccaagctaaccgagcacaagctaacccataccggtgaaaaaccttataagtgtgaagaatgtggcaaagcattcaattggccaagtacccttaccaaacataaccgaatccacactggggagaaaccgtataaatgcgaagtgtgtggcaaggcttttaatcaatttagtaatttgacaacccacaaaagaattcacactgccgagaagccctataagtgcgaagagtgcggcaaggccttctcacgctctagcaatcttacaaaacacaagaaaatccatattgagaaaaagccctataaatgtgaggaatgtggaaaagcgtttaagtggagctctaaactgaccgaacacaagattacccataccggggagaaaccttataagtgcgaagagtgcgggaaggccttcaaccacttcagtattcttaccaaacacaaacgcattcacaccggggaaaagccctacaagtgtgaagagtgcggcaaggcatttacacagagcagcaatctgaccacccacaagaagatccatacgggggaaaaattctacaaatgtgaggaatgtggaaaggcttttacacagtcttctaacttgaccactcacaagaagatacacaccgggggcaagccttataaatgcgaggaatgcggtaaggccttcaatcagtttagcacgttgactaagcacaaaattatccatacagaagagaagccatacaagtgcgaggagtgtggaaaagctttcaagtggagctctacgctgacgaaacacaagattatacacaccggagagaagccatataagtgcgaagagtgcggcaaagccttcaagctgagctctactcttagcacccacaagattattcacacaggcgagaagccctacaagtgcgagaagtgtggaaaagcttttaatagaagtagtaacttaatcgaacacaaaaaaattcataccggtgagcaaccttacaaatgcgaagaatgtggcaaggccttcaactacagctcacatctgaatacccacaaacggatccacacgaaggaacagccatataaatgtaaggagtgtgggaaagcttttaatcaatacagtaacctgacaactcacaataaaatccatactggcgaaaagctatataaacccgaggacgttacagtgatccttactaccccccagacgtttagcaacattaagtag

SEQ ID NO: 212242 - DNA, 2412 bp, synthetic construct
  misc_feature 1..2412: note = Description of Artificial Sequence: Synthetic coding sequence
  source 1..2412: mol_type = other DNA
atggacgtggccatcgagttctgcctggaggagtggcagtgcctggatatcgcccagcagaacctgtacaggaacgtcatgctcgaaaattacagaaacctagtgttcctgggcatcgctgtgtccaagccagacttaattacatgcctggagcaggaaaaagagccctgggagcctatgcgcaggcatgagatggtggctaaaccaccagtcatgtgcagccacttcactcaagacttctggcccgagcagcatatcaaggaccccttccagaaagcgacattgcggagatataaaaactgcgaacataaaaatgtccatctgaagaaagatcacaagtcggtcgacgagtgcaaggtgcatagggggggatataacggctttaaccagtgccttcccgccactcaaagcaagatctttctattcgataagtgcgtgaaagcattccataaatttagcaacagcaatcgacacaagattagccacactgaaaagaaattgtttaaatgcaaagagtgcgggaaaagcttttgcatgctgccacatttggcccaacataaaatcatccacacccgagtcaacttttgtaagtgcgagaagtgtggaaaagcctttaactgcccatccatcatcaccaagcataagaggatcaataccggtgagaagccgtacacttgcgaagaatgcggcaaggtgttcaattggagctcaaggctcactacccataagaagaattacacccgctacaaactgtacaaatgcgaggagtgtgggaaggcttttaataagtcaagtatccttaccactcacaagatcatacgaaccggagagaagttttacaagtgcaaggagtgtgcaaaggcctttaaccaaagtagcaatttaactgagcataaaaagatccaccctggcgagaagccatataaatgtgaggaatgcggtaaggctttcaactggccatctacactcaccaaacacaaacgtattcacacgggggaaaagccctacacctgcgaggagtgcggcaaggctttcaaccagttttctaatttgacgactcacaagagaattcacaccgcagaaaagttttacaaatgcacagaatgcggggaagccttctctcggagcagcaacttgacaaaacataagaagatccacaccgagaagaagccttataagtgtgaggaatgtggcaaggcttttaagtggagctctaagctgaccgaacacaagctgactcacacaggcgaaaaaccctataagtgcgaagagtgcggcaaagcctttaactggcctagcacactgacaaagcacaaccgaatccacaccggtgagaaaccttacaagtgcgaagtctgcggaaaagcgttcaatcagttttccaacctaactacacataagcgcattcacacagctgagaaaccgtacaaatgtgaagaatgtgggaaggcattttcaagatcctccaacctgaccaaacacaagaaaatacacatcgaaaaaaagccctataagtgcgaggaatgcggtaaagcctttaagtggagcagtaaactcactgagcacaagatcacccatactggcgaaaagccgtataagtgcgaagagtgtggcaaggcgtttaatcacttttctatcctgacaaagcacaaacggatccataccggagaaaagccctacaagtgcgaagagtgtggcaaggccttcacgcaatcaagcaacctcaccactcataagaagattcatacaggcgagaagttttacaagtgtgaggaatgcggaaaggcattcacccaatcttccaatctcaccacccacaaaaagatccacacaggcgggaagccttataagtgcgaagagtgtggaaaagcattcaaccagttcagtacacttactaaacacaagattatccacactgaggagaagccatacaaatgcgaagaatgcgggaaggcgtttaagtggtccagtaccctcaccaaacataaaataattcataccggcgagaagccttataaatgtgaggagtgtggcaaggcattcaaattgtccagcacattatccactcataagatcatccacactggggagaagccatataagtgtgagaaatgtggcaaggccttcaataggtcctctaaccttatcgagcataaaaagatccacacaggagagcagccatacaagtgtgaggagtgtgggaaggcgttcaattactcttcccacctaaatacccacaagaggattcacaccaaagagcagccgtataaatgcaaggaatgcgggaaagcattcaatcagtactcaaaccttacgacccataataaaattcatacaggcgagaagctatacaagcccgaggacgtgactgtgatcctgaccaccccacagacgttttctaacataaaatag

SEQ ID NO: 212243 - DNA, 1713 bp, synthetic construct
  misc_feature 1..1713: note = Description of Artificial Sequence: Synthetic coding sequence
  source 1..1713: mol_type = other DNA
atggagaacctgaagagcggcgtgtaccccctgaaggaggccagcggatgcccaggcgctgaccgcaatctgcttgtgtattccttctacgaaaaagggcctctaacttttcgcgatgttgccattgaattctctctcgaggagtggcagtgcttggatactgctcagcaggacctctataggaaggtgatgctggaaaactaccgcaatctggtcttcttagctggtatcgccgtgagtaaacctgacctgatcacgtgtctcgaacaggggaaggaaccttggaatatgaaaagacatgcgatggttgaccagccaccagtaacctatagtcattttgcacaggacctgtggccggagcagggcattaaggattcatttcaagaggttatcctgaggcgctatggcaagtgcgggcatgaagatcttcaactgagaaccggttgcaagagcgttgatgagtgtaatttacacaaagaatgttacgacgaactcaaccagtgcctgaccaccactcagtcagaaatctttcaatacgataagtatgtgaacgtgttttacaaattcagcaatccaaacatacagaaaattagacataccggaaagaagcctttcaagtgcaaaaagtgcgacaagagcttttgcatgctgctgcacttgacacaacacaagagaatccatattagagagaactcctaccagtgtgaggaatgcggaaaggtgttcaactggttcagtaccctgactaggcaccgccgcatccacacaggtgagaaaccttacaagtgtgaacagtgtggcaaagcattcaaacaatcctcaacccttacgacccacaaaatcattcacacaggagaaaagccctatcgttgtgaagagtgcggaaaaaccttcaatcggtctagtcacctgacaacccacaaacgaattcacaccggagaaaaaccataccgctgtgaggagtgtggacgggccttcaaccggtccagtcacctgaccacgcacaagatcattcacaccggtgagaagccttataagtgcgaggagtgtggcaaagctttcaatcagagttctaccttgacgacccacaaaataatccacgcaggcgaaaagccatacaagtgcgaagagtgtggaaaggccttttatcgattttcctacctgactaaacacaagatcattcatacgggtgaaaaattttataagtgcgaggagtgcggcaaggggtttaactggagctcgaccctcacaaagcacaagcgaattcacacaggagaaaaaccttacaaatgcgagcaatgcgggaaagcattcaatgagtcttcaaacctgaccgctcacaagatcattcatacaggagaaaagccgtacaagtgtgaagagtgcgggaaggcatttaatagaagccccaagctgactgctcacaaggtcattcactctggcgagaaaccgtataaatgcgaggaatgtggcaaagccttcaaccagttcagcaatctcaccaagcacaagataacacatattggagacacgagctacaaataccttgaatgtgataaggcattctcccaatcgagcacacttacaaagcacaaagtcatccacacaggggaaaaaccttacaattgcgaggaatacggcaaggctttcaaccagtccagcaacctgatcgaacagtcaaactcttattggcgcgaaactttgcagatgtag

SEQ ID NO: 212244 - DNA, 1413 bp, synthetic construct
  misc_feature 1..1413: note = Description of Artificial Sequence: Synthetic coding sequence
  source 1..1413: mol_type = other DNA
atggccgccaccctgctgatggccggcagccaggcccccgtgaccttcgaagatatggctatgtaccttacccgggaggagtggcgacccttggacgcggctcaaagagatctttaccgcgatgtgatgcaggagaattatggtaacgtcgtgtcgctggattttgaaattcgatctgaaaacgaggtaaatccgaagcaggaaattagcgaagatgttcagttcggtaccacgagtgagcgccccgccgagaacgcggaggagaacccagaatctgaggaaggtttcgaaagtggagaccgcagcgagaggcaatggggggatctcactgctgaggagtgggtatcctatccgctccagcctgtgaccgatctgcttgtgcacaaggaggtacatactggcatccggtatcatatctgcagccattgtggcaaggccttctcgcaaatatctgatctgaaccgtcaccagaagacccataccggggaccgcccgtataaatgctatgaatgtggaaaggggtttagccgcagctcccacttgatccagcaccaaagaacgcatacaggggaaagaccctatgactgcaacgagtgtgggaaatcgtttggcagaagtagtcacctgattcagcatcaaacaattcataccggtgagaagccccacaaatgcaatgagtgtggcaaaagtttctgccgtctctcacacctcatccagcatcagaggactcacagcggggaaaaaccatatgagtgtgaagaatgcggaaaatctttttccaggtcctcgcacttggcacagcatcagaggacacatactggggagaagccatacgagtgcaatgagtgcggaagaggcttttccgagagatccgacttgatcaagcattacagggtgcacacgggcgaaaggccttataaatgtgatgaatgcggaaagaacttttctcagaactcagatctcgttcgacacagacgcgcccacactggcgagaagccttatcattgtaatgagtgtggggaaaatttcagtcgaatctcacacctagtccagcaccagagaacccacactggggaaaaaccttatgagtgcaatgcctgcgggaagtccttcagtaggtccagccatctcatcacacaccaaaaaatccacactggggaaaaaccctacgagtgcaacgagtgctggagaagcttcggggagcgctcagacctaattaagcaccagcgtactcacactggcgaaaagccatacgaatgcgttcagtgcggaaaaggattcacccagagctccaatctcattacccaccagagagtacacacaggcgagaaaccctatgaatgtaccgaatgcgaaaaaagtttctcccggtccagcgctctgataaagcataagcgtgttcataccgattag

SEQ ID NO: 212245 - DNA, 1413 bp, synthetic construct
  misc_feature 1..1413: note = Description of Artificial Sequence: Synthetic coding sequence
  source 1..1413: mol_type = other DNA
atggccgccaccctgctgatggccggcagccaggcccccgtgaccttcgaggacatggctatgtacctgactagggaagaatggcgtcctcttgatgcggcacagagggacctgtatagggatgtcatgcaggaaaactatggaaacgtggtgagcctagattttgaaatacgctccgaaaatgaagtgaaccccaagcaggaaatatccgaggacgtgcagtttggaacaaccagcgaacgccctgccgaaaacgcagaggaaaatccagagtcggaagaggggttcgagagtggtgaccgcagcgagaggcagtggggagatttgactgccgaagagtgggtgagttaccctctacaacccgtaacagacctgctggtccacaaggaagtgcacacgggcattcggtatcatatctgctcacactgtggaaaagccttttcccaaattagtgacctgaacaggcaccagaaaactcacaccggggataggccgtataagtgttacgaatgtggcaaaggatttagtcggtcgtcacatctgattcagcatcagaggacccacaccggcgaaaggccttatgactgtaacgagtgcgggaaatcattcggccgatcctcacatctcatccagcaccagaccatacacacaggtgaaaagcctcacaaatgcaatgagtgtggcaagtcgttttgtcgtctgtctcacctgattcagcatcagagaacccacagcggcgaaaaaccatacgagtgtgaagaatgtggaaagtccttctctagaagctcacatctggcccagcaccagaggacacataccggagagaagccttatgagtgcaatgagtgtggacgcggtttctccgagcggtctgatttgattaagcattacagagtgcacacaggcgagcgtccatataagtgcgatgagtgcgggaaaaacttcagccagaacagtgacctggtccggcacaggcgggctcacactggtgagaagccctaccactgtaatgaatgcggcgaaaatttttcaagaatcagccatctcgtgcagcatcaaaggactcacaccggagagaagccttatgagtgtaatgcgtgtgggaagtctttctccaggtcttcacatttaatcacgcaccagaagatacacactggtgagaagccatacgaatgcaatgaatgctggcgatctttcggagaacggtccgacttaataaagcatcagcgaactcacaccggagaaaaaccgtacgaatgtgtgcagtgcggtaagggtttcacacagagtagcaaccttatcacacatcaacgcgtgcacaccggagagaaaccttatgagtgcactgaatgcgaaaaaagcttctcacgttccagtgcattgatcaagcacaagagagtgcatacagattag

SEQ ID NO: 212246 - DNA, 909 bp, synthetic construct
  misc_feature 1..909: note = Description of Artificial Sequence: Synthetic coding sequence
  source 1..909: mol_type = other DNA
atggccgccaccctgctgatggccggcagccaggcccccgtgaccttcgaagacatggcgatgtacctgacccgcgaggagtggagaccgcttgatgcagcccagcgggatctgtaccgggatgtcatgcaagagaactacggaaatgtggtgtcccttgacttcgagatcagatccgagaacgaggtcaaccccaagcaggagatttccgaagatgtgcaatttggcacgacatctgagcgacctgccgaaaacgcagaggagaatcccgagagtgaggagggcttcgaatctggagaccggagcgagaggcagtggggggatctgactgctgaagaatgggtgagctatccactgcagcccgtgacagaccttctggtgcacaaagaggtgcataccgggattcgttatcatatttgcagccactgcggcaaagccttcagccaaatatcagatctgaatcgtcaccagaagacacacaccggggacagaccgtacaaatgctacgagtgcggaaagggcttctccaggtcctctcacctcattcagcatcagcgcacccacacaggagaacgcccgtatgattgcaatgagtgcggtaaatcattcgggaggtcgtctcatctgatccaacatcagactattcatactggcgaaaaacctcataaatgcaatgagtgtggaaaaagcttttgcaggcttagccacttgattcaacatcagagaacacattctggagagaaaccttacgagtgcgaagaatgcggcaaaagttttagccggtcttctcatcttgcccagcaccagcggacccatacgggcgagaagccctacgaatgtacggagtgcgaaaaaagctttagtcggagcagtgccctgatcaagcataagagggtgcataccgactag

SEQ ID NO: 212247 - DNA, 1848 bp, synthetic construct
  misc_feature 1..1848: note = Description of Artificial Sequence: Synthetic coding sequence
  source 1..1848: mol_type = other DNA
atggacagcgtggccttcgaggacgtggccgtgaacttcacccacgaagagtgggccttgttagggccatcacagaaaaacctctaccgcgatgtaatgcgcgaaaccattcgaaaccttaattgtatcggcatgaagtgggaaaaccaaaacattgatgaccagcaccagaatctccgacgcaatccaagatgcgacgtggtcgagcggtttggaaagtctaaggatggaagccaatgtggggagactttgtctcagatccgcaattctatagttaataaaaatacacctgccagggttgatgcttgtgggtctagcgtgaacggcgaggtaatcatggggcactcctcactcaattgctatatcagggttgacacaggtcacaaacatagagagtgtcatgagtacgccgaaaagtcctacacccataaacagtgcgggaagggactcagttatcggcactcttttcagacatgcgagaggccccacacagggaagaagccttacgattgcaaagaatgcggcaagaccttttccagtccggggaatctccggaggcatatggtggtcaaggggggcgacgggccttacaaatgcgaattatgtggcaaggcttttttttggccctcactccttcggatgcatgaacgcacacataccggtgaaaaaccatacgaatgtaaacagtgctcgaaggcatttccggtgtactcctcctatttacgccacgagaagattcacaccggggaaaaaccgtatgagtgcaaacagtgctctaaggctttcccggactacagctcctacctgcgccatgaacgcacccacacaggcgagaaaccatacaaatgtaaacagtgcggaaaagccttctcagtatctggctccctgagggtccatgaaaggatacacacaggcgagaaaccgtatacgtgtaagcagtgtggcaaagccttttgtcatctggggtccttccagaggcatatgattatgcactcaggcgatgggccccacaagtgtaaaatctgcggaaagggttttgatttcccaggatccgccaggattcacgagggcacacacaccctggagaagccttacgagtgcaagcagtgcggtaagttgctgtcccaccgctccagtttccgtcgtcatatgatggcacacaccggggatggtccccataagtgtacagtatgcgggaaagcatttgactctccaagtgtattccaaagacacgaacggacacacacaggtgagaagccttatgaatgcaagcaatgtggcaaagccttccgaacctcctcttccttgagaaagcatgaaaccacccatacgggcgagcagccctacaaatgtaaatgtggcaaagcatttagtgatttgttttcctttcagagtcacgagaccacccattcggaggaggaaccatatgagtgcaaggagtgtgggaaagctttttcgagcttcaagtacttttgcaggcacgagagaacgcatagtgaagagaaatcatacgaatgtcagatctgtgggaaagcatttagtcgattttcgtacctgaagacccacgaacggactcataccgctgagaaaccatatgaatgcaagcagtgccgtaaggcatttttctggcctagtttccttctccgtcacgaaagaactcatactggcgagcgcccctatgagtgcaagcactgcgggaaagctttcagccgatctagcttttgtcgggagcacgaacgaactcataccggggaaaaaccatatgagtgtaaagaatgcggtaaggccttctcctcactatcatcttttaaccgacacaagcgaacccactggaaagatatactttag

SEQ ID NO: 212248 - DNA, 1992 bp, synthetic construct
  misc_feature 1..1992: note = Description of Artificial Sequence: Synthetic coding sequence
  source 1..1992: mol_type = other DNA
atggccctgtgctacggcaccttctggggctaccccaagatgctggaggcagccaatctgatggaggggctggtcgacataggcccttgggtgacgcttccccgtggccagccagaggtacttgagtggggcctgcctaaagatcaggatagtgtcgccttcgaggacgtcgcagtgaattttacccacgaggaatgggcgctattggggccttcacagaagaacctctaccgtgacgtcatgagagagacgatccgtaatctgaattgcattggcatgaaatgggagaatcaaaatatcgatgaccagcatcagaatttgaggagaaaccccaggtgcgacgtggtagagagattcggtaaatccaaagacggttctcagtgtggcgaaaccctgtctcaaatccggaattccatagtgaacaagaatactccggccagggttgacgcctgcggttcttctgtgaatggggaggtcattatgggccacagctcactgaactgctatatccgagttgatacgggtcacaagcatcgagagtgtcacgagtacgctgagaaaagttatacccacaaacagtgcggtaagggactgtcttatcgtcatagctttcagacctgcgagaggccacataccggcaaaaaaccttacgactgcaaggagtgtggcaagacattttcgtctcccggcaacctccggcggcacatggtcgtcaaagggggcgacggaccctacaaatgcgagctttgtggcaaggcttttttttggccttctctactaaggatgcatgaacggactcataccggggagaaaccctacgaatgcaaacagtgttcaaaggcctttcccgtatattctagttatctgcgccatgaaaagatccatacaggtgaaaagccttacgagtgcaagcagtgcagtaaggccttccccgattactcctcttatctccgccatgagagaactcatactggagagaaaccttacaagtgtaagcagtgtgggaaggcctttagcgtgagtggctcattaagagtgcacgaaagaatccatacaggtgaaaagccctatacgtgcaagcagtgtgggaaggctttctgccatctgggatctttccagcggcacatgatcatgcactctggggatggaccacacaaatgtaaaatatgtggcaaaggcttcgacttcccaggcagcgctcggattcacgagggaacccacacactggagaaaccatatgagtgtaagcagtgcggcaagctactctcacatagatcttctttccgtagacacatgatggctcataccggtgatggtccgcataagtgcacagtgtgtgggaaggcgtttgactcaccaagcgtgttccagcgtcatgaacgaactcataccggagagaagccctacgaatgtaagcagtgcggcaaagcgttcagaaccagctcgtcgctgcgaaaacatgaaacgactcacactggcgaacaaccatacaagtgtaaatgtggtaaagcgttttccgatctgttttctttccagtcacacgagactacccactctgaggaggagccttacgaatgcaaggaatgcggcaaggctttctcatccttcaagtacttttgtaggcatgagagaactcacagcgaggaaaagtcgtacgaatgtcagatttgcggaaaagcattttcccggttctcttacctcaaaactcatgaacggacacatacagccgaaaaaccatacgagtgtaagcaatgtaggaaggcttttttttggccaagctttctgctccggcatgagagaactcacacaggggaacgaccttatgaatgtaaacattgtggcaaggcctttagccggagttcgttttgcagagagcatgagcggactcataccggggagaaaccttatgaatgcaaagaatgcggcaaagcgttttcctctctgagctcattcaatagacacaaacggacccactggaaagacatattatag

SEQ ID NO: 212249 - DNA, 1914 bp, synthetic construct
  misc_feature 1..1914: note = Description of Artificial Sequence: Synthetic coding sequence
  source 1..1914: mol_type = other DNA
atggccctgtgctacggcaccttctggggctaccccaagatgctggaagctgctaatctcatggaaggcttggtcgatatcgggccttgggtgacccttccacgcggccagcccgaagtcctggaatggggcctccccaaggaccaggattctgtcgcctttgaggatgttgcagtgaattttacacacgaagaatgggccctgctgggcccctctcaaaagaatctttatcgcgatgtgatgcgggagacaattagaaatctcaactgtatcgggatgaagtgggagaaccagaatatcgacgatcagcatcagaatcttcgaaggaatccccgctgtgatgtggtggaaaggtttggcaagagtaaggatgggtcccagtgcggtgaaactctcagccagataaggaatagcatcgtgaacaaaaacacacctgcccgcgtggacgcctgcggttcctctgtcaacggagaggttatcatggggcattcatcactgaattgctacataagggtggacactggccataagcatcgtgaatgtcatgagtatgcggagaaatcctacacacacaagcagtgcggaaaagggctgtcttataggcattcctttcagacctgcgaacgcccacataccggcaagaaaccctatgactgtaaagagtgcggaaaaacctttagcagcccagggaacctaaggcgccatatggtagtcaaagggggcgacggaccttacaagtgtgagctctgtggcaaggcctttttttggccctctctgttacggatgcacgaaaggacacataccggcgagaagccatatgaatgcaaacagtgtagtaaggcgttcccagtgtattccagttacttgcgtcatgagaagattcacactggcgagaagccatatgagtgcaaacagtgcagcaaggccttccccgactactcatcctatcttcgtcatgaaaggacccataccggggagaagccctacaagtgtaagcagtgtgggaaagcgttctcagtgagcggaagtcttagggttcatgagaggatacatactggggagaagccttacacctgcaaacagtgcggcaaggcattttgccacctaggctcatttcagaggcacatgataatgcattctggcgatggaccccacaaatgtaagatctgtggaaagggattcgactttccaggctccgctcgtatccacgagggaactcacacactcgaaaagccctacgagtgtaagcagtgcggaaaacttttgtctcatcgttcctccttcaggcgacacatgatggctcacacaggcgatggtccacacaaatgcaccgtgtgtgggaaggcattcgacagcccaagcgtcttccagcggcatgagcggacgcacaccggcgaaaaaccatacgagtgcaaacagtgcggtaaggccttccgtacttcaagcagcttacgtaagcacgaaacgacacacacaggagaacagccatataagtgtaagtgcggaaaggccttcagcgacctgttcagcttccaatctcatgagaccacccactctgaggaagagccatacgaatgcaaggagtgtgggaaggcattctcttctttcaagtacttttgcagacacgagcggacacattccgaagagaaatcgtacgagtgccagatctgcggcaaagcgttctccaggttcagttatctgaaaacccatgagcggacccacacagcagagaagccatatgaatgcaaacagtgtcgcaaggccttcttctggccatctttcttgcttcgccatgaaagaacgcacacaggcgagaggccatacgagtgcaaacattgcggaaaagccttttcccggtcatccttctgtcgtgaacatgagcggacgcacacaggagagaaaccttacgagtag

SEQ ID NO: 212250 - DNA, 1770 bp, synthetic construct
  misc_feature 1..1770: note = Description of Artificial Sequence: Synthetic coding sequence
  source 1..1770: mol_type = other DNA
atggacagcgtggccttcgaggacgtggccgtgaacttcacccacgaagaatgggctctgctcggtccatctcagaagaacctgtatagagacgttatgcgggaaacaatccgtaacctgaactgcattgggatgaaatgggaaaatcagaacatcgacgatcagcaccaaaaccttaggcgcaacccccgatgcgatgtcgtggagcgtttcgggaagagcaaagatggaagccagtgtggagaaacgctatcacagatacgcaattccatcgtgaataagaacacacccgcccgcgtcgacgcctgtggaagcagtgtcaacggcgaggtgattatgggccactcgagtttgaattgttacatccgagttgacacgggtcataagcatcgagagtgccacgaatacgctgaaaaaagttatactcacaaacagtgcggcaagggcttaagctatagacactcgtttcagacatgtgaaagacctcacacaggcaagaagccatacgattgtaaagagtgcggtaagaccttcagtagccctggtaacttgcgacgtcacatggttgtcaagggtggtgatggcccctataaatgtgagctgtgcgggaaggccttcttctggcctagcttactcagaatgcacgagagaacccacacgggtgaaaaaccatatgaatgtaaacaatgctccaaagcctttcccgtgtacagctcctacctccgacatgagaaaatccatacaggtgagaagccttatgaatgcaagcagtgcagcaaagctttccccgattattcaagctatctcagacatgagcgtacgcacaccggtgagaagccctacaaatgcaagcagtgcggaaaagctttctccgttagcggttctctgcgggttcatgaacgtattcatactggcgagaagccttatacctgcaaacagtgcgggaaggcgttctgccacctggggtcctttcaacgccacatgattatgcattccggcgacggccctcataaatgtaagatatgtgggaagggctttgacttcccggggagtgcacggatccacgaaggtacacataccctggagaaaccctacgaatgtaagcaatgtggaaaactgctgtctcatagatcatctttcaggcgccatatgatggcacacactggcgacggtcctcacaaatgcactgtgtgcgggaaggcgtttgattcaccaagtgtgtttcaacgacacgaacgcacacatacaggggagaaaccctatgagtgtaagcagtgtggaaaggcattcaggacaagcagctctctccggaagcacgagaccacacataccggggagcagccctataaatgtaaatgcgggaaagccttttccgaccttttttcttttcagagccacgaaactacccatagcgaggaggagccatacgaatgcaaagagtgtggaaaagcattcagctctttcaaatatttttgtagacatgagcgaacccacagtgaggaaaagtcctacgagtgccaaatttgtggaaaagccttctcccggtttagttacctcaaaacacacgagcgaacacacaccgctgagaagccctatgagtgcaaacagtgcagaaaggccttcttctggccaagtttccttctacgccacgagaggacccacacaggtgagcgtccttatgagtgtaagcattgcggtaaagcttttagccgctcgagtttctgtagggaacacgaaaggacccacaccggtgagaaaccctatgaatag

SEQ ID NO: 212251 - DNA, 1623 bp, synthetic construct
  misc_feature 1..1623: note = Description of Artificial Sequence: Synthetic coding sequence
  source 1..1623: mol_type = other DNA
atgggcatcgtggagaaggccagcagcagcagcgacagcgtgacctttgaggacgtggcagtcaatttcacgcaggaagagtggactctgcttgatccgagtcagaaaaagttgtatagagacgttatgtgggaaactttccggaacctggcgactattggcactaaacaaaaagagtggaatatagaggaacagtacaagaatcaagggaggaatttgcggaatcacatggtggaacgtctgtgtgagtccaaagaaggctcccatggtggtgaaggattttctcagatagcaaatctgtccctgaacaagaaaacaccgtccggtggaaaactatgggagtccagcgtatgtggcaaggttctgagtcaccacagcagcttgaatcggcatatccgaagttatactcggcacaagctttacaaatgtcaggaatacggcgaaaagccatataagtgtaaaaaatgcggaaaacccttcagctacctgcagtccttcaaaaaacacaaaaggacccatagtgcaggtatcgtgtacaagtgtaaggcgtgcgggaaagcattcagctgccagagatccttccagatacacgggcgcacacacacaggagacaagccattcaaatgtaaagaatgcggcaaggcatttcgctatcaccagtctgcccagaagcatgagaaagcacataccggagagaaaccatacaaatgcaaggagtgcggtaagccatttatatatcgtcactctgcgagggcgcatgagagaaaccatactgtgcaaaaaagatatgagtgcaaacagtgtgggaaaacgtacatttcatcagtgggcttccaggcgcacgaacggacacacaccggcgaaaagccttatgaatgcaagaagtgcggtaaggtgtttgtataccacaacagtgcacagcggcacgaaaagacacacacgggtgagaagccctacaagtgcaaagagtgtggcaaggcattttcttaccattgcaccgctcagaaacatgaacgaaatcataccgcccaaaagcactacgagtgtaaattatgtggcaagacatacttgtctcccctgggattccaggcacacgaatcaacacataccggcgacaagccgtttgagtgcaagaagtgcggcaaagcgtttaggtattattactcagcgcagcgccacgaacgcacccacactggggagaaaccatataagtgcaaggaatgtggaaaggctttttactgctgtagctccgctaggaggcatgagcggatgcacactgccaagaagcagtatgaatgcaagaagtgtggaaaaacatacatcacgctggccggttttcaaattcacgagaggacgcataccggtgaaaaaccatacgaatgtaaacagtgcgggaaggccttttcttctagttcgtacatacacatacacgagcggatacacaccggggaaaaaccatacgagtgcaaggagtgcggcaaaccattcagttttctcaccggatttagggtgcatatgagaatgcacaccggggagaaaccttacaaatgtaaggactgcggtaacgctttcatttggcgagctagcctccagtaccatgtaaaaaaggtccacgcggaatag

SEQ ID NO: 212252 - DNA, 1848 bp, synthetic construct
  misc_feature 1..1848: note = Description of Artificial Sequence: Synthetic coding sequence
  source 1..1848: mol_type = other DNA
atggacagcgtggccttcgaggacgtggccgtgaacttcacccacgaggagtgggccctgcttgggcctagccagaaaaatctgtatagggacgttatgagggaaacaattcggaatctgaactgcatcgggatgaaatgggagaatcagaatattgacgaccagcaccagaatctccgccgcaatcctaggtgcgatgtagtcgaacggttcggaaagtctaaggatggatcacagtgtggggaaactctctcccagattagaaattctattgtcaacaaaaatactcccgctagagtggatgcttgtgggagctctgtgaacggtgaggtgattatgggtcactcgtccctaaattgttacatcagggtggataccggtcacaaacatagagaatgccacgagtatgcagaaaagtcctatacacataagcaatgcggaaagggcctctcgtataggcactcttttcagacatgcgaacgacctcacacaggaaaaaagccttacgattgtaaagagtgcggcaagaccttctcctcaccaggcaacctgcgtcgccacatggtggtcaagggcggtgacggaccctacaagtgtgaattatgcggaaaagccttcttttggcctagtttgctccgaatgcatgagcggacgcatacaggtgaaaaaccatatgaatgtaagcagtgttctaaggcatttcctgtgtatagctcgtatctccgccacgagaaaatccacaccggcgagaaaccgtacgagtgtaaacaatgctctaaagcgttcccagattactcttcatatctaaggcacgaacgaacccacacgggggagaagccttataagtgtaaacagtgtggtaaggcgtttagcgtgagcgggagtttacgggtgcacgagcggattcacactggcgagaagccttacacttgtaaacagtgcggcaaggccttctgtcacctcgggagtttccaaagacacatgatcatgcacagcggcgatgggcctcacaaatgcaaaatctgcggtaaggggtttgacttcccagggtctgcacggattcacgaaggcacgcacacactcgagaagccgtatgaatgtaagcaatgtggtaagctgctgagtcaccgctcaagctttagacggcacatgatggcacatacaggcgacggaccccataagtgtacagtatgtggcaaggcgttcgatagcccttctgtgtttcagagacatgagaggactcacaccggcgagaagccgtacgagtgcaagcagtgtggaaaggcctttcgcaccagtagttccctgaggaagcatgagactacccacacaggagaacagccctacaagtgcaagtgcggcaaggcgttttccgacctgttctccttccaatcacacgagaccactcatagcgaggaagagccctacgaatgtaaggagtgcgggaaggccttctccagtttcaagtacttctgtcggcacgagcggacccactctgaagagaaatcttatgagtgccaaatctgcggcaaggccttttcgagattcagctatctgaaaactcacgaacgcacgcatactgctgagaagccctatgaatgtaaacagtgtcgtaaagccttcttctggccaagcttcctgctgcggcatgagagaacgcacacgggggaacgaccgtacgaatgcaagcattgcggtaaagctttttcaaggagttccttctgccgagagcatgagagaactcacacgggtgagaagccatacgagtgtaaggagtgcggaaaagccttttccagcctcagctcattcaacaggcacaaacgaactcactggaaagacatactgtag

SEQ ID NO: 212253 - DNA, 984 bp, synthetic construct
  misc_feature 1..984: note = Description of Artificial Sequence: Synthetic coding sequence
  source 1..984: mol_type = other DNA
atggaggtggccgtgcccgtgaagcaggaggccgagggcctggccctggatagtccttggcataggttcagacggtttcatctcggtgacgctcccggtccccgggaagctctgggtctgctaagagctttgtgtcgcgattggctgcgaccagaggtccatactaaggagcagatgttggagctgttggtcctcgaacagtttctgtcagcactcccagcagacacccaggcctgggtttgctctcgccaacctcaaagtggtgaggaggcagtggctctgctcgaggagctgtgggggcccgctgctagccctgacggctcatcagccactcgtgtaccgcaggatgtgactcaggggcccggagccacaggtggaaaggaggattccggtatgatacccttggctgggaccgcacctggcgccgagggacccgcaccaggggattcgcaggccgtcaggccttataagcaagaaccttcttcgcctcccctggctcctggacttccagcatttctagccgcaccaggtaccacaagctgcccagaatgcggcaagacaagcctgaagcctgctcacttactgcggcatcgtcaatcacatagcggtgagaaaccacacgcatgcccagagtgtggcaaggctttcaggcgaaaagagcacttgcgtaggcaccgggacacgcaccccggctccccaggaagccctggcccagctttgagaccactgcctgcgagggagaaaccacacgcttgctgcgagtgtggcaagactttctattggagggaacatctggtgcgacaccggaagacccactctggtgctcggcctttcgcctgttgggagtgtggtaagggcttcgggagacgggagcacgtattgcgccaccaacggatccacggccgggctgcggcatcagcccaaggagccgtggctccaggccccgatggtggcggaccatttccgccatggccattgggctag

SEQ ID NO: 212254 - DNA, 1557 bp, synthetic construct
  misc_feature 1..1557: note = Description of Artificial Sequence: Synthetic coding sequence
  source 1..1557: mol_type = other DNA
atggccgtggccctgggctgcgccatccaggccagcctgaaccaggggtctgttttccaggaatatgataccgattgcgaagtgttccggcagcgcttccggcagttccagtaccgagaggccgcaggcccccacgaggcatttaacaaactctgggaattgtgctgccaatggttaaaacccaagatgagaagtaaggaacagatactcgagctgttagtgctagagcaattcctcactattctccccacagaaatcgagacctgggtgagagaacactgtccggaaaacagggagagggttgtctctctgattgaagatctgcagcgagaactggagattcccgaacaacaggtggatatgcacgatatgttgttggaggaactcgccccagttgggacagcccatattccccccacaatgcatctggaatctcccgccctgcaagtcatggggcccgctcaagaggcacctgtcgccgaagcctggatccctcaggcagggcctccagagcttaactatggagccactggggagtgccagaactttctggacccggggtacccactgcctaaactggacatgaatttttctcttgaaaaccgcgaggagccctgggtcaaagaactgcaggactccaaagaaatgaagcagcttctggattccaagataggattcgagatcgggatagaaaatgaggaggacacctcaaagcagaaaaaaatggaaacgatgtatccttttattgtgacgcttgagggcaatgcactccagggccctatcctacagaaagattacgtgcagcttgaaaatcaatgggagactccaccagaagatttgcagacggatctggctaagttggttgatcaacagaacccaacgctcggcgagacccccgaaaacagcaatctcgaagaaccgctgaatcctaagccacataaaaaaaagtctccaggcgaaaagccacaccgctgtccccagtgcgggaaatgttttgcacggaagagccagctgactggccaccagcgaatccacagcggcgaagaaccacataaatgtcccgagtgtgggaaacgattcctgcgcagctccgatctataccggcaccagcgcctacacactggcgaacgcccctatgagtgcaccgtgtgcaaaaagagatttacaagacgcagccatctgattggccatcagagaacgcactctgaggaggaaacgtataaatgcctggagtgcgggaagagcttttgtcacggtagttccctgaagaggcatctgaagacccatacaggagagaagccacaccgatgccacaactgtggcaagagtttcagcagactgaccgcgctgacattgcaccagcgaactcacactgaagaaaggcctttcaaatgtaactattgtggaaagagttttcgccagcgcccctctctcgtcattcatttgaggattcatacgggtgaaaaaccctacaaatgtacacattgcagcaaatcattccgacagcgggcaggtctgataatgcatcaagtaactcatttccgcggacttatatag

SEQ ID NO: 212255 - DNA, 384 bp, synthetic construct
  misc_feature 1..384: note = Description of Artificial Sequence: Synthetic coding sequence
  source 1..384: mol_type = other DNA
atggccgtggccctgggctgcgccatccaggccagcctgaaccagggctcggtgttccaagagtatgacacagattgtgaggtgtttagacagcggtttcgacagtttcagtaccgggaggctgcaggcccccatgaggcattcaataagttatgggagctttgctgccagtggttgaagcccaagatgcggtcaaaggagcaaatcttagagttgctggtgctcgaacagtttctgacaatcttgcctactgaaatcgaaacatgggttagggagcactgcccagagaatagagaaagagtagtcagcttgatcgaggacttacagagagaactggaaatcccagagcaacagacgtttgctgctgaatacagtcactactag

SEQ ID NO: 212256 - DNA, 495 bp, synthetic construct
  misc_feature 1..495: note = Description of Artificial Sequence: Synthetic coding sequence
  source 1..495: mol_type = other DNA
atggccgtggccctgggctgcgccatccaggccagcctgaaccaggggtctgtgttccaagagtacgacaccgactgcgaggttttccggcagcgttttcggcagtttcagtatagggaggctgctggacctcacgaggcattcaataagctttgggaattgtgctgccaatggctgaagcctaaaatgcgatcaaaggagcagattctggagctgctggtcctggagcagttccttacaattctgccgacagagattgagacatgggtcagggagcactgccctgaaaaccgtgagagagtggtgtccctcatcgaggaccttcaacgtgaactcgagatcccggagcagcaggttcgaaaagagtgcggcatttttgtcatcgggccgaaggaagtagcagaagccgccggaacacgacctcacatctgcctgtatgtgatccctcaaccccaagacttttccagagtgctctttctgttcctgttctgctag

SEQ ID NO: 212257 - DNA, 2049 bp, synthetic construct
  misc_feature 1..2049: note = Description of Artificial Sequence: Synthetic coding sequence
  source 1..2049: mol_type = other DNA
atgaccaagagcaaggaggccgtgaccttcaaggacgtggccgtggtgttctctgaagaagaattacagttattggatctggcccagcggaaactttatcgggacgtgatgctcgaaaacttcaggaacgtggtatccgtcggacaccagtccacacctgatgggttgccacagcttgaacgggaagaaaagctgtggatgatgaagatggcaacacagagggataattcttctggagcaaagaatctgaaagagatggaaaccctgcaggaagtggggttgagatacctgccacacgaggagctcttttgttctcagatttggcagcaaattacccgagaattgataaagtatcaagactccgtggtgaacatccagcgcacaggatgccagttggagaaacgcgacgatctgcattataaggacgaagggttttctaaccagtccagccatttgcaggtccaccgggtccacactggggaaaagccttataaaggggaacattgtgtgaaatctttttcttggtcttcgcatctgcaaatcaaccagagagctcacgctggggagaagccttataaatgcgagaagtgtgataatgcatttcggcgattttccagcctgcaggcccaccagcgagtgcactcacgggcgaagagctacaccaatgacgcatcctatcggtcgtttagccagcgaagccacctccctcatcaccagcgcgtacctactggtgagaacccatacaaatatgaagagtgtgggaggaatgtcgggaagtcttcgcattgccaggcacccctgatagtccatacgggggaaaagccttacaagtgcgaagaatgcggtgttggtttcagccagaggtcttacctgcaggtgcatctgaaggtacacaccggtaaaaagccttataagtgcgaagaatgcgggaaatcattttcgtggaggtcgcgcctgcaggcccacgaacggatacacaccggggagaaaccctacaagtgtaatgcgtgcggcaaatcattcagctatagctcccacttgaacatccactgccgcatacacacgggcgagaagccatataagtgtgaagagtgcggaaaaggtttctctgtcgggagtcatctgcaggcccatcagattagccataccggcgagaaaccgtacaaatgtgaggagtgcgggaagggcttctgccgtgcatctaatttgctagatcaccaacggggacacaccggtgaaaagccttaccagtgcgatgcttgtgggaaggggttttcaaggagcagcgattttaacattcacttccgggtgcacactggggaaaagccgtataagtgcgaggagtgcggcaaaggctttagtcaggcgtctaatctgttggcacaccagagaggccacaccggcgagaagccgtacaaatgtggaacatgtggaaagggcttttctcgatccagtgatctgaacgtgcattgccggatccacaccggggaaaagccgtacaagtgcgaacggtgcggtaaggcattctcccagttctccagcctgcaggtccatcagcgagtgcacacaggagaaaagccataccagtgcgcagagtgcggcaaaggattttccgtgggctctcagttgcaagcacaccaacgatgccacaccggagaaaagccttaccagtgtgaagagtgtggaaagggtttctgccgagcttccaatttcctggcacacagaggggtccacaccggtgagaaaccttatcgctgcgatgtgtgcggtaaacgctttaggcagaggagctacctccaagctcatcaaagggtgcatactggtgagagaccatataagtgcgaagagtgtggtaaggtgttttcttggagctcttatctgcaggctcaccagcgagtacatactggcgagaagccctataaatgcgaagagtgtggaaaagggtttagctggtcatcgtctctcattattcaccaaagagtgcacgctgatgatgagggggataaagacttcccgtcctccgaagacagtcatcgtaagacacgatag

SEQ ID NO: 212258 - DNA, 1617 bp, synthetic construct
  misc_feature 1..1617: note = Description of Artificial Sequence: Synthetic coding sequence
  source 1..1617: mol_type = other DNA
atgaccaagagcaaggaggccgtgaccttcaaggacgtggccgtggtgttctctgaagaggaattgcaattgctcgatctcgcacagagaaaactgtaccgggatgtgatgcttgaaaactttcggaatgtcgtgtcagttggccatcaaagcaccccggacggcttgccccaactcgaaagagaagagaagctgtggatgatgaaaatggctactcagcgtgacaactccagcggtgctaaaaacttaaaggagatggagactcttcaagaagtagggttgcgatacctcccccacgaggaacttttttgctcacagatttggcagcagattacccgagaactgataaagtatcaagactcggtggtaaacattcagcgcacaggctgccagctggagaagcgggacgacctccattataaggacgaaggtttctctaatcaaagctcccacttacaagtccacagagttcatacaggcgagaagccttacaaaggggagcattgtgtgaaatccttttcgtggagcagccacttacagatcaaccagcgggcccacgccggcgaaaagccatataagtgcgagaagtgtgacaacgccttcaggcgtttctcctctttacaggctcatcagagagttcattctcgcgctaaatcctacactaacgatgccagctaccgctctttcagtcagagaagtcaccttccgcatcaccagcgcgtgccgaccggagagaacccctataagtacgaagaatgtgggcgtaatgtcggcaaaagttcccactgtcaggcacctctgatcgtgcatacaggagagaagccatataagtgtgaagagtgtggagtcggattcagccagcgatcatatctccaggtgcacctgaaggtgcacacaggcaagaagccctacaagtgcgaggaatgtggaaaaagcttctcctggcggtctcgtctgcaggctcatgagaggatccatacaggtgagaaaccctacaaatgcaatgcctgcgggaagtctttttcttattcctcccacctcaatatacactgtagaatccatacaggcgagaaaccctacaagtgcgaggagtgtggtaaaggcttcagcgtcgggtctcatctacaagcccatcagattagccacacaggcgagaagccatataagtgtgaagagtgcggaaaaggcttttgccgagcttccaatttactagaccaccaaaggggccatacaggcgaaaagccatatcaatgcgatgcttgcgggaagggatttagcagatcttccgacttcaacatacactttagggtgcacaccggcaaaaatccaatcaatgtgcggtccgttgcacgggctagcgcacgtccccagattttctggcctattaaggaagccacacttgagcgaaatcctacaaatgtcgtgcacgtagggcgcgcttccgtgggagctcagatcttgatgtatacagtagaatccacacaagaaagaaacccgatcaacgcccgaggcgtggtcagaccatctgtttcatctcccgccttccgctgcatcagagagttcactctggagcgtaatcacatctccgtgcagtccgtgggcagggcctcagtgtag

SEQ ID NO: 212259 - DNA, 1689 bp, synthetic construct
  misc_feature 1..1689: note = Description of Artificial Sequence: Synthetic coding sequence
  source 1..1689: mol_type = other DNA
atggccgccgcctggatggcccccgcccaggagagcgtgaccttcgaggacgtagcagtgaccttcacgcaggaagagtggggtcagttggacgttactcagcgcgcactatatgtggaggttatgttggagacttgcggattgctcgtagcactgggagatagcacaaaacctgagacagtggaacctatcccgagtcatcttgctctcccggaagaagtgtcattacaggaacaactggctcaaggggtgccacgctactcctatttaggtcaggccatggaccaggacgggccctcagaaatgcaggagtattttctcaggccaggcaccgatccacagtctgaaaaactgcacgggaaaatgagcttagaacatgaggggctggctacagccgatggaatctgtagcatgatgatccagaaccaagtgagcccagaagacgccctctatggcttcgatagctatggaccggttactgacagcctgatacatgagggcgaaaacagttacaaatttgaagagatgtttaatgagaattgtttccttgtgcagcatgagcagatcctacccagagtcaagccctatgactgcccagagtgtgggaaggcctttggtaagtctaaacatctgctccagcatcacataattcatacgggggagaaaccctacaagtgcctagagtgtggaaaggacttcaacagacggtctcatctgacgaggcaccagcgcacacacaacggcgataaaccttttgtgtgtagcgagtgtggcaggacctttaacaggggttcccatctcacaaggcaccaacgggtacactccggtgagaaaccatttgtttgtaatgagtgtggtaaggcttttacctacaggtccaacttcgtcctgcataacaagtcccataacgaaaagaagccctttgcctgcagtgagtgcggcaagggattctatgaatccaccgcactgattcagcactttatcatacacaccggcgagcggcccttcaagtgtctggaatgtggaaaagcttttaattgtaggtcccacctaaaacagcacgagcgcatacacacaggcgagaagcctttcgtgtgctcacagtgtggcaaagcctttacacattatagcacatacgttctccatgaaagagctcacactggggagaaaccattcgagtgtaaggagtgtgggaaggccttttctattagaaaagacctcattaggcactttaacattcatacgggtgagaaaccatacgaatgtttgcagtgtggaaaagcgttcacgagaatgtcaggtctaacaaggcaccaatggatccatacaggcgagaagccttatgtctgtatccagtgcggtaaggccttctgcaggactactaacctgatccgtcacttctctatccacacaggggagaagccctacgagtgtgttgaatgtggaaaggcgttcaaccgccggtctcccctcactcgtcatcaacgaatccatactgctgagaaaagccatgaaccgatccagtctggaaacgtgagctgtgaaagcaccgacctgatccagcattccatcattcataccgagtcctctcccgtctcagctgttaatatggagactccatctatcgccgcccattcctcttccctcgacataaatggattcatcgtggaggaaacccttccactctag

SEQ ID NO: 212260 - DNA, 1566 bp, synthetic construct
  misc_feature 1..1566: note = Description of Artificial Sequence: Synthetic coding sequence
  source 1..1566: mol_type = other DNA
atgctggagacctgcggcctgctggtggccctgggcgacagcaccaagcctgagactgttgagccgattccctctcacctcgccctgcctgaggaagtaagcctgcaggagcaattggctcaaggtgtccccaggtatagctatctgggccaggccatggatcaggacggaccatctgaaatgcaggagtactttctacgccccggcaccgatccccagtcagagaagcttcacggtaagatgtctctcgaacacgagggcttagctacagcagacggaatttgctccatgatgatccagaaccaggtctcgcctgaggatgccctgtatggttttgatagttacggtcctgttaccgactctctaatccatgagggggaaaactcgtacaagtttgaggagatgtttaatgaaaactgtttcctcgtacagcacgagcagatcttacccagagtgaagccatatgactgcccagaatgcgggaaagcgtttggcaagtcgaagcacttgttacagcaccatattattcacaccggtgagaagccgtataaatgtcttgaatgtgggaaggattttaacagacgaagccatctgaccaggcatcagcgcacacacaacggagacaaaccattcgtgtgtagtgagtgcggacgaacgttcaatcgcggctctcacctgacccgccaccagagagttcattctggggagaaaccgttcgtatgcaatgagtgcggaaaagctttcacctatcggagcaattttgtgttacacaataagtcgcataatgagaagaaacctttcgcctgtagcgagtgcggcaaaggcttctacgagagcaccgcactgatccaacattttattattcatactggcgagagaccttttaagtgcctcgagtgtggaaaagcatttaactgcaggagtcatttgaagcagcacgagcgcattcacacaggcgaaaaaccctttgtgtgttcgcagtgcggcaaggcattcacacattattcaacttatgtccttcatgaacgcgcacacacgggcgaaaaaccattcgaatgtaaagagtgtggtaaggctttttcaatccgcaaggacctgatcagacactttaatattcatactggcgagaaaccctatgagtgcttacagtgtggtaaggccttcacccgcatgtcaggactgacacgccaccagtggatccatactggtgaaaaaccctacgtgtgcatccagtgtggcaaggcattttgtcggacaaccaatctcatccggcatttctcgattcatacgggggagaagccttacgagtgcgtcgagtgcggaaaagcgtttaaccggcggtcccccctcaccaggcatcagcgcatccatacagcagagaagtcccacgagcccatccagagcggcaacgtcagttgcgaatctaccgatcttattcagcactctataattcataccgagagcagcccagtgagtgccgtgaacatggaaaccccttctatcgcagcccacagttcaagcctggatataaatggctttatcgtggaggagaccttacctttatag

SEQ ID NO: 212261 - DNA, 1623 bp, synthetic construct
  misc_feature 1..1623: note = Description of Artificial Sequence: Synthetic coding sequence
  source 1..1623: mol_type = other DNA
atggcccacgagctggtgatgttccgggacgtggccatcgacgtgtcccaagaagaatgggaatgcttaaacccagcccagcggaacctatacaaggaagtcatgctggagaactacagcaacttagtcagtctgggcctcagcgtgagtaaacccgctgtcatctccagccttgagcagggaaaagagccatggatggtcgttagggaggaaacagggcggtggtgcccagatctcgcttccagggacgagcctcagaagctctctcccaagcgcgatatatacgagactgaactgtctcaatgggtgaacatggaagaatttaagagccattcccctgaacggtctatcttcagcgctatatgggagggcaattgtcacttcgagcagcaccaggggcaggaagagggctattttagacagctcatgattaatcacgagaacatgccaattttttcccagcataccctgttaacccaggagttttatgacagagagaagataagcgaatgtaaaaagtgtcgcaagatattctcataccacctgttcttctcccaccacaagagaacccattccaaggaactgtctgaatgcaaggagtgtacagagattgtgaacaccccttgcctgttcaagcaacaaaccattcagaacggagataaatgtaacgaatgcaaagagtgttggaaagcttttgtgcactgttcccagctgaagcatttgcgaattcacaacggggaaaaaagatacgagtgcaatgaatgtggaaaagctttcaattacggcagtgagttaacacttcaccaaaggatacatacaggcgagaaaccttacgaatgcaaagagtgcggtaaggctttccgccagcgtagtcagctgacacagcaccaacggcttcacaccggcgagaagccttatgaatgtaaacagtgtggaaaggcgttcatcaggggattccaattgacagagcatttgcgcttgcatactggagagaagccttacgaatgcaaagaatgcgggaagaccttccgtcatagatctcacctcacaatccatcagcggattcataccggcgagaagccctacgaatgccgcgaatgcggaaaagcgttttcgtaccactcctctttttctcaccaccagaagatccacagcgggaaaaagccttacgagtgtcatgaatgtggaaaagctttctgcgacggtctccaattgacccttcaccaacgaattcacaccggagagaaaccctatgagtgcaaggaatgcggtaagaccttccggcagtgtagccacctgaagcggcatcagcgaatccacacaggagagaagccacatgagtgtatgatctgcggcaaagctttcaggttgcacagccacttaatacagcaccaaaggattcacactggcgaaaagccatatgaatgcaaagagtgcggcaaggcgttcagttatcactcatcattctcacatcatcagcgaatccactccggcaagaagccctaccagtgcggaaaggcattcaatcaccgattacagctgaatttacatcagacacttcacaccggcgaaaagcctgtccgattccctctgctcccccctcacccttccctcgcaagctag

SEQ ID NO: 212262 - DNA, 741 bp, synthetic construct
  misc_feature 1..741: note = Description of Artificial Sequence: Synthetic coding sequence
  source 1..741: mol_type = other DNA
atggtggtgcgggaggagaccggccggtggtgccccggcacctggaaaacgtggggattccacaataattttctggacaataatgaagcaacagatattaacgcagatctggcatctcgggatgaaccccaaaaactctcccctaagcgggatatatatgagacagagctgtcccagtgggtaaatatggaggagtttaagagccacagtcccgaacgaagtatttttagcgccatctgggagggcaactgccactttgagcaacaccagggccaggaggaagggtactttcggcagctaatgatcaatcatgaaaacatgcctatcttcagccagcacactttactaacccaggagttctacgaccgggaaaagatcagtgaatgcaagaagtgtaggaagatattctcttaccacctgttttttagccatcacaagtgttcccacctgaaacggcaccaacgtatccacactggggaaaaaccacatgagtgcatgatctgcggtaaagctttccgtctgcattcccacctgatccagcaccagcgcatccacaccggcgaaaagccgtacgaatgcaaagagtgtggtaaggcattcagctatcacagcagcttttctcaccatcagcgcattcattcaggaaagaaaccttatcagtgcggcaaagcctttaaccatcgtctccagttgaaccttcatcagacactgcacaccggggagaagcccgtaaggttctag

SEQ ID NO: 212263 - DNA, 1692 bp, synthetic construct
  misc_feature 1..1692: note = Description of Artificial Sequence: Synthetic coding sequence
  source 1..1692: mol_type = other DNA
atggcccacgagctggtgatgttccgggacgtggccatcgacgtgagccaagaagagtgggagtgtctcaatccagctcagcggaacctgtacaaggaagttatgctcgaaaactacagtaatctggtgagcctaggactgtcagtctccaagccagccgtgatcagctctctagagcaggggaaggaaccttggatggttgttcgagaggaaacaggtagatggtgccccgggacttggaaaacctgggggttccataataacttcctggataacaacgaagccactgatattaatgctgacctcgcctcaagggatgagccccagaaactatcacccaagagggatatttatgaaacggagctttcccaatgggtgaacatggaggagttcaagtcccacagccctgaaaggagtatcttcagcgccatctgggagggaaattgccacttcgagcagcatcagggccaagaggagggctactttagacaactgatgatcaatcatgaaaacatgcccattttctcgcaacacaccctcttgactcaagagttctacgatcgagagaaaatcagcgaatgtaagaaatgcaggaagatcttctcctaccacttattcttttcacatcacaaaagaacacattctaaagagctgagcgaatgcaaagaatgtacagagatcgtgaacacaccatgtttatttaaacaacagacgattcagaatggagataagtgtaacgagtgcaaggaatgctggaaagctttcgtacactgtagccagctcaagcatctaagaatacacaatggcgagaaacggtacgagtgcaatgaatgtggaaaggccttcaattatggttccgagcttaccctgcaccagagaatccataccggtgagaagccttacgagtgcaaagagtgcggcaaggcgtttaggcagcggagtcagctgactcagcaccagaggctgcacactggggagaaaccttacgaatgcaagcaatgtggcaaagcgtttataaggggatttcaactgactgaacatttacggctgcacaccggagaaaagccatacgaatgtaaggagtgtggaaagactttccggcacagatcacacctgactatccatcagagaattcataccggagaaaagccgtatgaatgtcgggagtgcgggaaggccttcagctaccactctagcttttcccatcaccagaagatccactcagggaagaagccctacgaatgtcacgagtgtgggaaggctttctgtgacggccttcagttaaccttgcaccagaggattcacacaggagagaagccgtacgagtgcaaagaatgtgggaaaacctttcgtcaatgctcgcatctgaagcgccaccagagaattcacacgggagagaaacctcacgagtgcatgatttgtgggaaagctttccggctgcatagtcacctaatccagcatcagaggatccacacgggcgagaagccatatgaatgtaaagaatgcgggaaagccttctcctatcactctagcttctcccaccaccagaggatacattctgggaagaagccctaccagtgcggaaaggcctttaatcaccgcttgcaactcaacttgcatcagacactgcatacgggggaaaagcccgttaggttccctctccttcctccacacccctctttagcctcttag

SEQ ID NO: 212264 - DNA, 777 bp, synthetic construct
  misc_feature 1..777: note = Description of Artificial Sequence: Synthetic coding sequence
  source 1..777: mol_type = other DNA
gagaagcggtacgagtgcaacgagtgcggcaaggccttcaactacggctctgagctgacccttcaccagaggatccatacaggggaaaaaccgtatgagtgcaaggaatgcggcaaggcttttcgccaaagatctcagctgacccaacatcagagattacatactggggaaaagccttatgaatgcaagcagtgcggcaaggctttcatccgtggattccagcttacggaacacttacgcctacacaccggcgagaagccttatgagtgtaaggagtgtggcaagacattcagacatcgatcgcacctgacaatccaccagaggatccacactggagaaaaaccgtacgaatgtcgagaatgtggaaaggctttttcgtatcatagctccttcagccaccaccagaaaatccattccggcaagaagccctatgaatgccacgaatgcggaaaggcgttctgcgacggcctgcaactgactttgcaccaacggatacacacaggagagaagccgtacgaatgtaaggaatgcggtaaaacattccgacagtgctctcacttaaagaggcaccagagaatccacacaggggagaagccacatgagtgtatgatttgtggaaaggcatttcggctacacagccacctgatacagcatcaacgaattcatacaggagaaaaaccttacgaatgcaaggaatgtggaaaggccttttcctatcattcctccttcagtcaccaccaacggattcactctgatgcaacaaccgccatttcctag

SEQ ID NO: 212265 - DNA, 1311 bp, synthetic construct
  misc_feature 1..1311: note = Description of Artificial Sequence: Synthetic coding sequence
  source 1..1311: mol_type = other DNA
atggaggagttcaagagccacagccccgagcggagcatcttcagcgctatatgggagggtaactgtcactttgagcagcaccaggggcaggaggaaggatatttcaggcaacttatgataaaccatgaaaacatgccaatttttagccaacacactctactgacccaagagttctatgatcgtgaaaagatctcagagtgcaagaagtgcaggaaaatattttcataccacctgttcttctcccaccacaagaggacccactccaaagaactaagcgagtgcaaagagtgtactgagatagtgaacacaccatgccttttcaaacagcagactatacagaacggcgataaatgtaatgagtgtaaggaatgttggaaagcttttgttcactgcagccagctgaagcatctgcgaatccataatggagagaagaggtacgaatgcaatgaatgtggaaaggccttcaactacggtagcgagctgacattacatcagcgaatccatacaggggaaaaaccgtatgaatgtaaggagtgcggcaaagcatttaggcaaagatcccagctcacccaacaccaaaggctccatacgggcgaaaagccatatgagtgtaagcaatgtgggaaggcgttcatacggggcttccagctaaccgagcaccttaggctgcacacaggtgaaaaaccctacgagtgcaaggaatgtgggaagacctttcgccaccggtctcacctgacgattcaccaacgcatccatactggcgaaaaaccttatgaatgtagggagtgcggaaaagccttcagttaccatagtagcttcagccaccaccagaagatccactctgggaagaaaccgtacgagtgccacgagtgcggcaaggctttttgcgacggcctccaactcaccttgcatcaacggatacataccggcgaaaagccctacgagtgcaaggagtgtgggaaaacttttagacagtgctcgcatcttaagcggcaccagcggatccatacaggcgaaaagccacacgaatgtatgatatgtggaaaggctttccggctgcattcacatctcatacagcatcagcggattcacaccggagaaaagccatatgaatgcaaggaatgcggtaaggcattcagctatcactctagtttttcacaccaccaaagaatacatagcggcaagaagccctaccagtgtgggaaagcatttaatcatcgcctgcagctgaacctgcaccagacactgcacactggcgaaaagccagttcgttttcccctgctgcccccacacccatctctagcctcctag

SEQ ID NO: 212266 - DNA, 1692 bp, synthetic construct
  misc_feature 1..1692: note = Description of Artificial Sequence: Synthetic coding sequence
  source 1..1692: mol_type = other DNA
atggcccacgagctggtgatgttccgggacgtggccatcgacgtgtcacaagaggagtgggagtgcttgaacccagcccagaggaacctatacaaagaggtgatgctggaaaactatagcaacctggtgagcctaggactttctgtgtccaagccagccgtgatctccagtcttgaacagggtaaggaaccttggatggtggtacgggaggaaactgggagatggtgtccaggaacttggaagacctggggattccacaataattttttagacaacaacgaagctaccgacattaacgcagacttggctagccgcgatgaaccccagaagctctctcctaagcgagacatttatgagaccgagctcagccagtgggtcaatatggaagagttcaaatcccactctcccgaacggagcattttcagcgccatttgggaaggcaactgtcactttgagcagcatcagggtcaggaagaggggtattttcgacagctcatgataaaccacgagaatatgccaatttttagccagcatacactgctgacacaggagttttacgacagggagaaaatctcagaatgcaagaaatgtaggaagatcttctcatatcacctgtttttcagccatcacaagcgcacccactcgaaagaactgagtgagtgtaaagagtgtactgaaatagtgaatacaccgtgcctctttaagcagcagaccattcagaatggggataaatgcaatgagtgcaaggagtgttggaaagctttcgttcactgctcccaactcaagcacttgcggatccataacggagagaagcgctacgagtgtaatgaatgtggaaaagcattcaattacggatctgagctgactctgcaccagcgtatacacaccggggagaagccatacgaatgcaaagaatgtggaaaagcattccggcagcggtctcagctcacacagcatcagaggttacacaccggggagaagccctatgagtgcaaacaatgcggcaaagcattcattcggggattccaattaaccgaacatctccgtctacacactggggagaagccatacgagtgtaaggaatgcggtaagacttttcggcacagatcccaccttaccattcaccagcgcatccatacaggggaaaaaccatacgaatgcagggagtgtggcaaggctttctcctaccacagctccttttcccaccaccagaaaattcatagtggaaaaaagccttatgagtgccatgaatgcggaaaggctttctgcgatgggctgcaactcacactccaccagagaattcacacaggagagaaaccttatgagtgcaaggagtgtggcaaaacattccgccagtgcagtcacctcaaaaggcaccagaggattcacacaggagagaagccacacgagtgtatgatctgtgggaaagcatttcgtctccatagccatctgattcaacaccagcgcattcatacaggagaaaaaccatatgagtgtaaagagtgtggtaaagccttctcataccacagtagtttcagccaccaccagcgaatccacagcggtaaaaaaccataccaatgtggaaaagccttcaaccaccgactccaactaaatttacaccaaaccctgcacactggtgagaagcctgtacgatttcccttactacccccacacccaagtttggcttcatag

SEQ ID NO: 212267 - DNA, 1788 bp, synthetic construct
  misc_feature 1..1788: note = Description of Artificial Sequence: Synthetic coding sequence
  source 1..1788: mol_type = other DNA
atgcgggagaccctggaggccctgagcagcctgggcttcagcgtgggtcagcccgaaatggccccacagtcagagcctcgggagggctcacacaacgctcaggagcagatgagcagctcccgggaagaaagagccctgggtgtatgttctggtcacgaggccccgacacccgaagagggcgctcatactgaacaggccgaagccccttgccgcggccaagcctgttctgctcaaaaggctcagcctgtaggcacctgccctggtgaggaatggatgatccggaaggtgaaagtggaggacgaggatcaggaggctgaagaagaggtcgaatggccacagcacctgtctctgctgccatctccttttccagctcctgacctagggcacctggcagctgcttataagttggagccaggggcacctggagctctgagcggactggcgctaagtggctggggtcctatgccagaaaagccttacgggtgtggcgagtgtgagaggagattcagggaccaactgacgcttcggttgcatcagcggctccaccgaggcgaaggaccatgtgcatgtcctgattgtggaaggagcttcactcagagggctcacatgctactccaccagagatcccacagaggggagcgcccattcccatgttccgagtgcgacaagcggttctccaaaaaagctcatctcactaggcaccttcggacccacaccggagaaaggccctacccttgcgcagaatgcgggaaaaggttctcccagaaaattcacctggggtcccaccaaaagactcataccggagagaggccatttccctgcaccgaatgtgaaaaacgcttcagaaagaagactcacttaatacgccaccagagaattcatacgggcgaacggccttaccaatgcgcccagtgcgctcgctcattcacacataaacagcacctggttcgacatcagcgagtccaccagactgccggcccagcaagacccagccctgactcttcggctagcccgcacagcaccgctccctcccctacccccagctttccaggcccaaaaccttttgcttgctccgattgcggcttgagcttcggctggaagaagaacctggctacccatcagtgtcttcaccgttccgaaggacgaccgtttggctgcgacgaatgtgctctgggggccactgtcgacgccccagcagctaaacctctcgcaagtgccccaggtggcccaggctgcggtcccgggtcagacccagtcgtgcctcaacgcgctccttccggcgaacgcagcttcttctgtcctgactgcggcagagggttcagccacggccagcatctggccagacatccgagggtgcataccggagagaggcctttcgcctgtacacagtgtgaccgacggtttggaagcaggccaaatctggtcgcacacagccgggcccactccggcgcgcgccccttcgcatgtgcacagtgcgggcggagattttcacgcaaatcacacttaggtaggcaccaggctgtccacactggctcccgcccacacgcttgcgccgtgtgcgctcgatcgttctcctccaagactaacctggtaaggcaccaggctatccatacaggctcacgcccctttagttgccctcagtgcgggaagtctttctcccggaaaactcacctagtcaggcaccagctgattcatggggaagcagctcacgcggcccctgacgccgccctggctgcgcccgcatggagtgctccccccgaagttgctccgccgcccctgttcttttag

SEQ ID NO: 212268 - DNA, 11778 bp, synthetic construct
  misc_feature 1..11778: note = Description of Artificial Sequence: Synthetic coding sequence
  source 1..11778: mol_type = other DNA
atgcccggcgagcggccccggggcgcccccccccccaccatgaccggagatctgcagcctcgccaagttgccagctccccgggacacccatcccagccccccttggaggacaacactccagccactagaactacaaagggggcgagagaagccggggggcaggcccaggcaatggagctgcctgaagcccagcctaggcaggcacgagatggggaattgaaacctccaagtctgagaggccaggcaccatcatcaactccggggaagaggggaagtccccagactccacccggaagatcacccctgcaggccccatccaggctggctggtagagctgaaggatccccgcctcagaggtatattctgggaattgcctcctccaggaccaaaccaaccctggacgagacgccggagaatccacagcttgaagctgcccagctgcctgaagtcgacacccctcagggacccggtacaggggcccccctgcggcctgggctccctcgtaccgaagcgcaaccagccgctgaggaactcgggttccatcgctgtttccaggagccaccatcctctttcacatccactaactacacttcgccttctgcaacgcctaggccgcccgcgcctggccctcctcaaagtcgtggcacgagcccactgcagcctggatcctacccagagtaccaagcatcaggcgcagacagttggcctccggccgccgagaatagctttcccggagctaactttggggtgccacccgcagaaccggagcctattccaaaggggtctagaccaggagggtcacctagaggagtgtcctttcaatttccatttccagcattgcacggcgcttctaccaaacccttccccgccgacgtggccggccacgcttttacgaacggaccccttgtttttgcgtttcatcagccccagggggcatggcccgaggaagctgtcggcacaggtccggcatatccattacccacccagcccgcaccaagcccgttaccgtgttatcagggccaaccaggaggcctcaaccgacattccgacttatctggggccctgtcttccccaggggccgcgcattccgcgcccagacccttctcggattccctccacaaaagtttgactaagatcctccccgaacgccctccgtcagcccaggacggcttggggagtacacggggccccccctccagtcttccccagcggcactttccagggcaggcatatcgggctagcggggtggacacttctccaggcccccctgatactgagttagctgctccaggacctcccccagcgagattgccacaactttgggatccaaccgcggcgccctatccaaccccacccggaggtcccctagctgccacacgcagcatgttcttcaatggccagccgtcgccggggcagagactatgcctgccgcagtcagcgcccttaccttggccccaagtgctgcctaccgctcggccttccccacacggaatggagatgttgtccagattaccctttcctgcggggggacctgagtggcagggggggagccagggtgccttgggcacggcaggaaagactccaggtcctagggaaaagctgcccgccgtaagatcctctcagggcggctcccctgcactgtttacgtacaacggcatgaccgatccaggagcccagcctctgttcttcggggtagcccaaccccaggtgtcaccccatgggaccccttctctgccccctccacgggtcgtgggcgcctcgccgtcagagagcccattgcccagcccagccacaaacacagcagggtcgacctgctcctctctttctccaatgtcatcttcccctgctaacccctcttcggaggagagccaacttcccgggcccttgggtccctctgcattctttcatccccccactcatcctcaggaaacgggctcacccttcccaagccccgaacctccccactctttgcctacacactatcaacccgagcccgccaaagcttttccgttcccggcagatggactaggggcagagggggcttttcagtgcttggaggagaccccctttcctcacgagggaccggaggtcggcaggggagggctgcagggctttccccgcgctcctcctccttaccctacccaccacttctctctctctagtgcctccctggatcagctcgacgtgctactcacctgccgccaatgcgaccgcaattattcaagcctggccgcttttctagctcaccggcagttttgtggactattgctagccagagctaaggatgggcatcagaggagccccggaccccctggactgcccagcccccccgcagccccacgcgtccccgcggacgcacacgctggactcctgtcacatgcaaagacctttctcctagctggcgatgcgcaggcagagggcaaggacgatcctctacgtactggatttctgccctccttggccgcgacaccattcccactgccagcctctgatcttgatatggaagatgatgctaaactcgacagcctgatcacagaggccctaaacggcatggagtatcagtccgataacccagagattgactcttcatttattgatgtattcgccgacgaggaaccgtcaggtccccgcggtccttccagcggacatcccctgaagtccaaagccggcgttacgcccgaatccaaagctcccccgcccctccctgccgcaacacctgacccacagacccctagacccggcgatagaggatgccccgctagaggccgcccgaagaccagatcattggggttggcccctacagaagccgacgctccatcacagggtcgccagcagcggaggggtaagcagcttaagctattcagaaaggatctcgactccggtggcgctgccgagggatcggggagcggcgggggcggaagggctagcggcctccgccctaggaggaacgacggacttggggagagaccgccaccaaggccccggcggccaaggacccaggcgcctggttcacgagccgatcccgcacccagggtgcctcgtgctgctgcgctgccagaagagacacgcagctcgaggcggaggagactgccccctcggaaagacccaagaaagaggaaggcccgaggcggagcatgggggaaagaattaatattaaaaattgtgcagcagaagaaccggctccgcgagtacgatttcgcttccgagtccgaggaagatgagcagccgccaccaagaggtcccggcttccgcggacggaggggtcggggggaaaagcgaaaggaggtggagctgacccaggggccacgcgaagatgagccgcagaagccaaggaaagccgccaggcaagaggcagggggagatggagctcctgccaatccggaggagcccggggggtcccggccgggtcctggccggtcaccacaagcgaggggaccctctcgcagcctggagacaggtgctgctgcccgcgagggggggccgaagtgtgccgatagacctagtgtcgctccaaaagacccacttcaggtcccaacgaacaccgaaacctccgaggaaactcgacccagtctggacttcccacaggaggccaaagaaccggaaaccgccgaggagagcgccccagattctaccgagtttacagaggccttaagatcacctcccgcagcttgcgcaggcgaaatgggggccagcccaggattgttgattcccgagcagccccccccatctagacacgacaccggtacaccaaaaccttctggaagtctggcaaatactgctccccatggcagtagccctactcctggagttgggtccctgctggggggccccgggggaacccaggctcctgtcagtcacaattccaaggacccccctgcccgccagcctggagaattcctggcccctgtggccaatccttccagcactgcatgcccgaagccaagcgtcctgtcctcaaaaatcagttctttcggctgcgaccccgccggcttcaacagagaccctctgggcgtgccggtcgcaaagaagggaccccaaccctactcttccccccattcagaactgttcctgggcccaaaggacttggccgggtgctttctggaggaactgcaccccaagccctctgctcgcgatgcaccccctgcctcttcctcctgtctgtgtcaggatggagaggacgcagggagcctggaacctcaacttcctagatcaccacccggcacggccgagacagaaccagggagggccgcctcacctcctacattagagtccagctctctgttccccgacctccccgtggacaggttcgacccccccctttacgggtccctcagcgcaaatcgtgacagtggacttccttttgcgtgcgctgaccctccccagaagacggtaccttcggacccgccatacccatcttttttactgttagaggaggtctcaccaatgctcccatctcactttcctgacctgagcggcggcaaggttttgagtaagacctgccccccagaacggaccgttgtcccaggcgccgctccttcactgcctggcaagggatcaggctgcagcgttgctctaatgagccatctgtcggaggatgaattagaaatccagaagctagtgacggagctcgaaagtcagctgcagcgctcaaaggacacgcgaggagcgccgagggagttagcggaagccgaatctgttggtcgagtggagctcggaaccggcaccgagcctccttctcagaggagaacatgtcaggcgaccgtaccacacgaggatacatttagcgctgccgatctgactcgcgtgggagaatctaccgcccatcgcgagggcgccgagtccgcagtggccactgtggaggccgtccagggccgccctggcgggacgtggccttgtcctgccagctttcaccccggacacgccgctctccttccctgcgcccaggaggatctggtgtccggggctccattctcgccacgcggggccaactttcatttccagcccgttcagaaagcgggcgctagcaaaacgggcctctgtcaggccgagggtgattcacgccccccccaggatgtctgcctgcccgagcctagtaagcaaccaggaccccaactggatgctggctccttagctaaatgcagcccagatcaggagttaagcttcccgaagaacaaagaagccgcaagttcccaggaatcagaagattcgctgagactgctgccgtgcgaacagagagggggattccttcctgagcccggcactgcggatcagccccaccgaggagcccccgcccctgaagcatttggctcccctgctgtccacctggcacccgatctggccttccagggagatggtgcaccccccctggatgcaacttggcctttcggcgcatctccatctcatgctgctcagggtcacagcgctgggagggccggaggccacctacatcccaccgccggaaggccagggtttgaaggtaatgagttcgctcccgctggggccagttcactaacagctcctagagggcgggaggcgtggctggtgccggtgccttcccctgcgtgtgtgtccaacacgcaccccagcaggagatcgcaagaccctgcactgtctccccccataagacagctgcagcttcctgggcccggggtcgctaaatcgaaagatgggatactagggcttcaggaactgacacctgctgcccagtccccgccaagggttaaccctagtggactggaagggggcaccgtggaaggagggaaagtggcctgcggccccgcacagggttcccctggtggtgtgcaggtgacaacactccctgccgtggcaggccaccagttaggcctcgaggccgatggacactgggggctcttggggcaagcagagaaaactcagggccagggcacagcaaaccagcttcaacccgagaatggggtcagtcccggtggcacagacaaccatgccagtgtgaatgctagtccaaagaccgcactgacaggacctaccgagggtgcagttctgttggaaaaatgcaagggctcccgagcagctatgagcctgcaggaggaagctgagccaacacctagcccgccttccccaaacagagaatccctcgccctagccttaaccgctgcccattccagatccggatccgaggggcgcactcccgaaagagcctcttctcctgggttgaacaagccattgctggcaacgggagactcaccagctccctctgttggtgatttagctgcttgtgccccttcccccacctcagcggcgcatatgccctgcagcctgggaccactgcctcgcgaagacccactcacaagcccgagcagagcgcaaggaggcctcggcggccagctgccagccagtccctcctgccgggaccccccaggcccacagcagctgctcgcatgtagtcctgcttgggcccctctggaggaagcggatggcgttcaggcaacgactgacactggtgcggaagattcccccgtcgcaccgccgtcactcaccacgagtccctgtgatccaaaagaagcattggctggctgcttgcttcaaggcgaagggtctcctctagaggatccctccagttggccacccggatctgtctccgccgtgacttgtacccattccggcgacacgccaaaggatagcaccctaaggattcctgaggattcgcgcaaagagaagctgtgggaaagccccggtcgggctacctccccaccactggccggagctgtgtctccctcggtggccgttcgcgcaaccgggctgtccagcacaccaaccggtgacgaagcccaggctggtagaggcctccctggccccgatccacagagccggggtgccccacctcacacgaaccctgatagaatgcctagggggcacagctcttatagccctagcaacaccgcgcggctcggacatcgcgaaggtcaagcagtcaccgctgttcccaccgagccacctacactgcagggcgccggtccagactcacctgcctgtctggaaggagagatgggcacgtcaagcaaagagccagaggacccaggaacacccgagaccggtcgctccggcgcaaccaaaatgccccgcgttacctgcccgagcacagggttgggattggggcgaaccaccgctccatcttccacagcctctgactttcagagcgatagtcctcagtcccacagaaatgcgtctcaccaaaccccccagggtgatccactcggcccacaagatcttaagcaacgaagccggggatacaagaagaaacctgcctccacggagaacggccagtggaaaggtcaggcccctcacggaccagtgacatgtgaagtgtgtgcagcctcgttcaggagcggacccgggctctctagacacaaagcccgaaagcacaggccgcaccccggggcaccagccgaaccgtcccccgcagcactgcctgcccaacagccgctggagccattagcgcagaaatgccagcctccacggaagaagtctcatagagtatccgggaaggagcgccctaatcactcaaggggggatccgagccatgtgactcagccgcctcccgcccaaggctccaaagaggtgcttcgggcccctggctcgccccacagccagcagctacaccctccatcacccaccgaacatgaagttgacgtaaaaactcccgccagtaagcctaggcctgaccaggcaagagaagacgagttgcaccccaaacaagccgaaaaacgggaaggtcggcggtggcgcagggagcccacagtggactccccttctcactccgagggcaagagtaataagaaacgggggaagttgagaggacgcagattacgcgaggagagcattctgcctgttagcgccgacgttatctcagacggccgcggcagccgaccttctcccgctatggcctcgtacgccgcctcccctagtcattgtctatccgtcgaggggggtccagaagccgatggtgagcagccccctcgccttgccaccctgggacccggcgtgatggagggagccgccgagacggaccaggaagccctgtgcgcaggcgaaacaggagcacagaagccccctggagatcgcatgctctgccccggacgaatggatggcgccgcccttggggaacaaccaacaggtcagaagggggcgagtgcacgcggcttttggggccctagggagacaaaagccctgggggtgtgtaaagagtctggttctgaaccagcagaggactcctccagagcacactcccgttcggaagaaggcgtatgggaggagaatacccctcccctgggaccgctgggattccccgaaacctcctccagccctgctgactccactaccagttcatgcctgcaggggctccccgataatccagatacacaaggaggtgtgcagggcccagaaggtcccacacctgacgcatcggggtcttctgctaaggaccctccttccctatttgacgacgaggtgagtttcagtcagctatttccacccgggggcagactgactcgaaagcgcaacccacatgtctatggcaagcgctgtgagaagccagtcttgcccctgcctacccagccatcgtttgaagaaggcggggatcccacgctcggtcccgcaaggttgccaacagacctgagtgattccagctctctttgcctgtgccacgaggatccttgggaggatgaagaccctgctggattgcctgagtcatttctgctggacggattcctgaacagtagggtgcctggcattgacccctgggcgccagggctgtctctgtgggctctggaaccatcacgggaagctggggctgaaaaactgccctctcattgtccagaggatgacaggccagaggccattccagagcttcacatggtgccagccgcatggagaggtttggagatgcccgcacctgctgatgactcctcctcctccttaggtgatgtgtctcccgaacctcctagtctggagcgggaaagatgtgacggaggattgcccggtaacacccatctgctgcctttacgcgcgacagatttcgaggtgttgtctactaagttcgagatgcaggacctgtgctttttgggacctttcgaagaccctgtagggttaccaggcccgtcctttctggatttcgagggtaccgcttctagtcagggtccgcagagccggcggacagaagaggcagcaggagcagggcgggctcaagggaggggtagaccagctaagggacgccgggccagctataagtgtaaggtctgttttcagcgatttcgtagtttgggcgagctggacttgcataaactcgctcatacgcccgccccaccgcctacctgctatatgtgtgtggaacgccgctttggcagtcgcgagctattaagaggtcatctgcaagagcgccacgcacagtccaaggcaggcccatgggcatgcggcatgtgtctcaaagaagtcgcagatgtgtggatgtacaacgaacatcttagagagcacgctgtgcgcttcgcaaggagggggcaggctcgccgtagcctgggtgatctacctggcggtctcgaaggctctagtgcagtggcccacttactgaattccattacggaacctgcccccaagcatcaccgtggaaagagaagcgcagggaaggccgctgggtctcctggcgatccctggggccaagaaggggaggcaaagaaagactcccccggcgaaagagcaaagccgcgtgcacgctcaaccccctccaaccctgatggggcagcgacaccagattcagcatcagctaccgccttagccgatgccgggagcccgggtccgccccgaactactccgtcccccagccctgatccctgggcaggcggcgagcccctgctacaggctacccctgtccacgaagcctgcaaggatccttctcgcgactgtcatcattgtggaaagagattccccaagccgtttaagctccagcggcatctggctgtacactccccacagagagtttacctctgcccaaggtgtcccagagtttaccccgagcatggagaactgctcgcgcatctgggaggagctcatggactcctcgaaagacctgagctgcaacacactcctctgtatgcttgtgagctgtgcgcaactgttatgcgcatcatcaagaagtcctttgcgtgtagctcgtgtaattatactttcgcaaaaaaggaacagtttgatcggcacatgaataaacatctgcgaggcgggagacagccgtttgcatttaggggcgtgaggagacccggagcacccggccagaaggcacgggccctggagggcacccttccatccaagcgccgaagagttgccatgcctggtagcgctcctggccccggggaggaccgaccaccgcctagaggtagctctccaattctctcagaaggatccctgccagctctactccacctctgtagtgaggttgctccctcaacgactaagggttggccagagactctcgagagacccgtggaccctgtgactcaccccatccgaggctgcgaactcccttctaaccaccaagagtgcccacctcccagcctctcgcctttccctgccgctcttgcggacggtcggggtgattgtgcccttgacggcgcactggagagacctgagaacgaggcttccccagggagtcccggacccttgcttcaacaagctctgccactaggggcctcgctgccccggcccggcgctagggggcaagacgccgaaggcaagagagctcctcttgtgtttagcgggaagcggagggccccaggcgcgcgcggcaggtgcgcgcctgatcacttccaggaggatcatttactgcagaaggagaaggaggtgtcttcatctcatatggtgagtgaaggaggacccaggggcacatttcacaagggcagcgcaactaagcccgcaggctgtcaatcttctagtaaggacagatcagccgcctctaccccttcaaaggcgcttaagtttcctgtgcaccctagaaaggctgtaggatcccttgcacccggggagctcgcacggggcaccgaaaacggcatgaagcccgccacacccaaggccaaacccggtccaagctcacaggggtcaggatcaccccgaccagggacaaagacagggggtggaagccaaccccagccagcaagcgggcaattgcaaagtgaaactgccactacaccagccaagccatcattcccgtcccggagccccgcaccagaaaggctgcccgcaagggcgcaagcaaaaagttgcaccaaaggcccccgcgaagcaggagaacagggcccccacggcagcttgggtccgaaggaaaaaggcgaatcctccacaaagaggaaaaagggacaggtcccagggccggcccgaagcgagagcgtggggtcttttggcagggccccttccgctcccgataagccacccaggactccaaggaagcaggctacaccttccagagtgctgcctacaaaaccaaaaccgaacagtcagaacaaacccaggccaccaccctccgaacagagaaaagctgagccggggcatactcagaggaaggataggctcggcaaagcctttccacaggggcgccccctcctccgcccaccgaaacggggcacggctgtgcatggggccgagcccgccgagccccacacccaccggacagccgaggctcaatccgacctattgagtcaactgttcggccaaaggctgaccggattcaagattccccttaagaaggacgcttctgagtag

SEQ ID NO: 212269 - DNA, 1479 bp, synthetic construct
  misc_feature 1..1479: note = Description of Artificial Sequence: Synthetic coding sequence
  source 1..1479: mol_type = other DNA
atgctgtgcgacgagaaggcccagaagcggcggaagcggaaggccaaggagtctggcatggcacttcctcagggtcatttaacttttcgcgatgtcgccattgagttttcacaagcggaatggaaatgtcttgaccccgcacagagagcattgtacaaagatgtgatgctggagaactaccggaacttagtttcattgggatcctcgtacgccctgggctctaacgccgaagataaacccataaagaagcaattgggtgtgtccttccatcttcatttgtccgaacttgaactcttccccgatgagagagtgattaatggctgcaaccaggtcgagaactttatcaaccattcctcaagcgtgtcttgccttcaggaaatgtcaagttctgttaagactccaattttcaaccgaaacgactttgacgacagctcattcctgccccaggagcagaaggtacacctaagggagaaaccctatgagtgtaatgagcattcgaaagtgttccgcgtgagctcatcccttacaaagcatcaagtgatccacaccgtcgagaagccctacaagtgtaacagctgcgggaaggtgttttcccgaaacagccacttggccgaacactgcaggatacacactggcgagaagccttataaatgcaatgtgtgtggcaaggtgttttcctacaactcgaacttcgcaagacaccaacgaatccacacaagagagaagccgtatgagtgcaatgagtgcggcaaggtattttccaataatagctacctcgcccggcaccagcgcatccacgccgaggaaaaaccatataaatgcaatgagtgtggtaagggattctctcataagtcctctctagcaaaccattggcggatctacacgggtgaaaagccttacaaatgtgacgagtgcgggaaagccttctataggattgctctcttagttcgacatcagaaaattcatactggagaaaagccatataaatgtaacgaatgtggcaaagtctttatccagaattcccatctggcccagcattggaggattcatacgggagagaagccttataagtgcaatgagtgcgggaaagtgttcaaccagctgagtaatcttgcaaggcataggagaattcacaccggggagaaaccgtataagtgcaatgagtgcggaaaagccttttcagaatactctggcttgagtgcgcacctagtgatccacacgggcgagaaaccctacaaatgttcggaatgcggaaaagcattcaggcataagctaagcttgacaaatcaccaacgcattcacacaggcgagcgaccctacaagtgtaacgagtgtggaaaagtctttaaccgcattgctcacctggcacgccaccggaaaattcatactggcgagaaaccgtacaaatgcaacgagtgtggcaaggctttctccaggatctcgtatctagcccagcactggactatccacatgggttag

SEQ ID NO: 212270 - DNA, 1377 bp, synthetic construct
  misc_feature 1..1377: note = Description of Artificial Sequence: Synthetic coding sequence
  source 1..1377: mol_type = other DNA
atgctggagcagcggcgggagccctggagcggcgagagcgaggtgaaaatcgcaaagaattccgacggacgagagtgcatcaaaggcgttaatactggcagcagctatgccttaggcagcaatgctgaggacaagccaataaagaagcagctgggtgtgtcttttcacctccatctgtcagagctcgaattatttcccgacgagagggtcattaacggatgtaatcaggtggaaaacttcattaaccattcaagtagtgtcagttgcctacaggagatgtctagtagtgtcaagaccccaatattcaaccgaaatgacttcgatgactcaagcttcctgccccaggagcagaaagtacacctgagggagaaaccgtatgagtgcaatgaacattccaaagtctttagggtgagtagctcattaacgaaacaccaggtgattcacacggttgagaagccgtacaaatgcaacagctgcggtaaggtgtttagcaggaattcccacctggctgagcactgccgaatacatacaggggaaaaaccctacaagtgtaatgtgtgcggaaaggtgttcagttataattccaacttcgctcgacatcaacgcattcacacacgagaaaagccttacgagtgtaatgagtgcggcaaagtcttctccaataacagctacttagcacgccaccagcgaatccacgctgaggagaagccctataagtgcaatgagtgtgggaagggtttcagtcacaagagttcactggccaaccactggaggatctataccggtgaaaaaccatataagtgtgacgagtgcggcaaagccttctaccgcattgcacttttggttaggcaccagaaaatccacaccggcgaaaaaccttataagtgtaatgaatgcggaaaggtgttcatccagaactcacacctagcacagcattggcgtatccacaccggggagaaaccatacaaatgtaatgagtgcggaaaagtctttaatcagctgagtaatctggcccggcataggcggatccataccggtgagaaaccctataagtgcaacgagtgtgggaaggccttttccgagtattcagggctgtctgcacatttagttatacacacaggcgagaaaccgtataagtgctctgagtgcggcaaggccttccgtcacaagctctcactaactaatcaccagagaattcacacgggagaacggccatataagtgtaacgagtgtggtaaggtgttcaaccgcatcgctcatttggccagacatagaaaaatccatacaggagagaagccatacaagtgcaacgaatgcgggaaggccttcagcaggattagctatctcgcgcagcattggaccatacacatgggctag

SEQ ID NO: 212271 - DNA, 537 bp, synthetic construct
  misc_feature 1..537: note = Description of Artificial Sequence: Synthetic coding sequence
  source 1..537: mol_type = other DNA
ttcccccagacccggaagcggatcgcctggagcgagggccacgccgctgctagactgactagcaaagaaagctgctgtgagaaggcacagaagcgccgtaaaaggaaagcgaaagagagtggaatggccttaccacagggccatctgaccttccgcgatgtcgccatcgaattctctcaggccgagtggaagtgtttagatcccgctcagcgtgccctgtataaagatgtgatgctggagaactaccgcaatcttgtttcacttggtatcagtttgcccgatctgaatataaacagtatgctagaacagcgcagagaaccttggtcaggggagtccgaagtgaagattgccaagaatagtgacggtcgcgagtgtatcaagggcgtcaacaccgggtcctcatacgcactcgggtcaaacgcagaagataagcccataaagaaacagctgggcgtgagctttcaccttcacttatccgagttggagctgtttccagatgagcgagtgataaatggatgcaatcaggtggagaattag

SEQ ID NO: 212272 - DNA, 1608 bp, synthetic construct
  misc_feature 1..1608: note = Description of Artificial Sequence: Synthetic coding sequence
  source 1..1608: mol_type = other DNA
atgctgtgcgacgagaaggcccagaagcggcggaagcggaaggccaaggagtccggtatggcgttgccacagggacacttgaccttccgcgatgtagcaattgagttctcccaggccgaatggaagtgtctggacccagctcagagagcgctttataaagacgtgatgctggagaactaccgaaaccttgtgtccctgggcattagcttaccggatttaaacattaactccatgctggaacagagaagggagccttggagcggagagtcagaggtaaagattgcaaaaaattccgatggacgcgagtgcattaagggagtgaacaccgggagcagctacgcgctgggttcgaacgccgaagacaaaccaataaaaaagcagctgggagtcagcttccatcttcacctgtccgaactggaacttttccccgacgagcgagtcattaacgggtgtaatcaagtggaaaactttatcaaccactcttcttcagtgtcctgtctacaggaaatgagtagctcagtgaagacaccaatctttaaccggaacgactttgatgacagcagtttcctgccacaggagcagaaagtgcacttgagggaaaagccgtatgagtgcaatgagcactctaaagtgttccgggttagcagcagcctaacaaaacatcaggtcatccatacagtagagaaaccctataagtgcaactcatgcggcaaagtcttttcccggaactctcacctggcagagcactgtagaattcacaccggtgagaagccatataaatgcaacgtctgtggcaaggttttttcctacaacagcaacttcgcccgacaccagagaatccacacccgcgagaaaccctatgagtgtaacgaatgtggaaaagtattctctaacaattcatacctggcccgccaccagagaattcatgctgaggagaaaccatataagtgcaacgagtgtgggaaaggtttttctcacaagtcttctctcgctaatcattggcgcatatacaccggcgagaaaccttacaagtgtgacgaatgtggtaaagccttttatcgtatagctctgttagtcaggcaccagaagatacacactggagagaagccatacaaatgtaacgagtgtggcaaggtgtttatccaaaactcccacctcgcccagcactggaggatacataccggcgagaaaccctacaaatgtaatgaatgtgggaaggtgtttaaccagctgtccaacctggcccgccacaggaggatccacacaggcgaaaaaccgtacaagtgtaacgaatgtggcaaagcatttagcgaatacagtggcctttctgcgcacctggtcatccacaccggggagaagccctataagtgctcagaatgtgggaaagccttcaggcataagctctcactcactaaccatcaaaggattcacactggagagcggccctacaaatgcaatgaatgcggtaaggtgttcaaccgcatcgcacatctcgcgaggcacaggaaaattcacacaggagagaagccatataagtgtaatgaatgtggtaaggccttttccagaattagctacttagcgcagcattggaccattcacatgggttag

SEQ ID NO: 212273 - DNA, 1608 bp, synthetic construct
  misc_feature 1..1608: note = Description of Artificial Sequence: Synthetic coding sequence
  source 1..1608: mol_type = other DNA
atgctgtgcgacgagaaggcccagaagcggcggaagcggaaggccaaagaaagcggaatggccttgccccagggacacctgacttttcgcgacgtcgctatagagttctcccaggctgaatggaagtgtctggatccagctcagcgagccctctataaagacgtgatgttagaaaactatcgtaacctggttagtctcggcatatctctgcccgatctgaacatcaatagtatgttagagcagcggcgggagccttggtcaggggaatccgaggtgaagattgcgaagaacagcgacgggagggaatgcatcaagggagtgaacacggggagctcctatgcattgggctccaatgccgaggacaaacctatcaagaagcagctcggagtctcctttcacctccacttgagtgagttggagctattccctgacgagagggtcatcaatggctgtaaccaggtggaaaacttcattaaccatagttcttccgtgtcctgcttacaggaaatgtccagttccgtaaagacaccgatttttaaccggaatgacttcgacgatagcagctttttgccccaggaacagaaggtgcacttacgggaaaagccctacgaatgtaacgagcacagcaaggtctttcgcgtctccagctctctgactaagcatcaggtgatccacaccgtggaaaaaccatacaaatgtaacagctgcgggaaagttttcagccgaaattcccatctggccgagcactgcaggattcatacaggagagaagccatataaatgtaatgtgtgcggaaaagtattctcctataattccaactttgcaaggcaccagagaattcacacccgcgagaagccttacgagtgcaacgaatgcgggaaggtattttcgaacaacagttacctagctagacaccagcgcattcatgccgaagaaaagccgtacaagtgcaatgaatgtggtaagggatttagccataagtcgtccctagctaatcattggcggatctatactggcgaaaaaccttacaaatgcgacgaatgcggaaaagcgttctaccggattgccctgctggtgagacaccagaaaatccacacaggtgagaaaccttataaatgcaatgagtgcggaaaagtgtttatccaaaatagccacctcgctcagcactggaggatccacactggggagaaaccttacaagtgcaacgaatgtggcaaagtgttcaaccagctgagtaatcttgctcgccatagaaggatacataccggtgagaagccgtataaatgcaacgagtgtgggaaggctttctctgaatacagcggcctctccgcgcaccttgtgattcatacaggcgagaagccctataagtgcagcgagtgcgggaaggcctttcggcataagctgagcttaacgaaccatcagagaatccataccggtgagaggccatataagtgcaacgagtgcggcaaagtgtttaacagaatagcacacctagcacgacatcgaaaaatccacaccggggagaaaccctacaaatgcaacgagtgcggaaaagcattcagccgtattagctacttggctcagcactggaccatacacatgggctag

SEQ ID NO: 212274 - DNA, 1764 bp, synthetic construct
  misc_feature 1..1764: note = Description of Artificial Sequence: Synthetic coding sequence
  source 1..1764: mol_type = other DNA
atgcccaccgccctgtgcccccgggtgctggcccccaaggagagcgaagagcccaggaagatgagatctcctcctggggagaacccttcgccccagggcgagctcccttctcctgaatcttcccggagactgttccggcgattccgctaccaagaagcagctggtcctagggaggcgctgcagcgtctgtgggatctttgtggggggtggctgagacctgagcgacacacaaaggagcagatcctagagctgttagtgttggagcagtttttagcaattctccctcgggagatacagtcctgggtgcgggctcaggagcccgaaagtggggagcaggccgtggctgccgtggaggcacttgagcgtgagccaggccggccatggcagtggctgaagcattgcgaggaccctgtggttatcgacgacggagacagtccattagatcaggagcaggaacagctccccgtggaaccccacagtgacttggcaaagaatcaggatgctcaacctataacacttgcacagtgtcttggcctaccctctcggcctcctagccagctgagtggtgatccagtgcttcaggacgcattcttactccaggaagagaatgtccgggatacccaacaggtcacaactctccagctgcccccatctcgagtatctccttttaaagatatgattctttgtttcagcgaagaagattggagcctccttgatccagcccagacaggattctacggggaatttattatcggtgaagactacggcgtgtcgatgcctccaaacgaccttgcagcacagccagatttgtcacagggtgaggaaaacgagccaagagtgcctgaattgcaggatcttcaagggaaggaagtgccgcaggtgtcctacctggattccccatcgcttcagcctttccaggtcgaagagagaagaaagagggaggagctgcaagtgcccgaatttcaggcgtgtcctcagaccgtggtgcctcagaacacttatcccgccggggggaatccccgctcactcgagaacagcctggacgaagaggtgaccattgaaatcgttctttcatcctcgggcgacgaggattctcaacatgggccatactgtacagaggaactcggctcaccgaccgaaaaacagcgaagtttacccgcctcccacagaagctccacagaggccggcggggaggtgcagaccagtaagaaaagctacgtatgtcctaattgtggaaaaatatttagatggagggtcaactttattagacatcttcggtcgagaagagagcaggaaaagccccacgagtgctccgtgtgtggcgaactgttctccgactcagaggatttggacgggcacctggagtcacacgaagcacagaagccttataggtgtggagcatgcggcaagtctttccgtctgaactcccatctgctgagccaccgcagaattcacctgcagccggaccgcctgcagccagtggaaaagagagagcaggcagcctctgaagatgcagacaagggccccaaggagcctttggaaaacggcaaagctaaactctctttccagtgctgtgaatgtggaaaggcttttcagcgtcatgatcacctggctcggcacaggtcgcactttcacctgaaggacaaggcacggccattccaatgtcgttattgcgtgaagtcctttacacaaaattacgatctcctgcgacacgaaaggctgcatatgaaacggcgctccaagcaggcattgaatagctactag

SEQ ID NO: 212275 - DNA, 1872 bp, synthetic construct
  misc_feature 1..1872: note = Description of Artificial Sequence: Synthetic coding sequence
  source 1..1872: mol_type = other DNA
atgcccaccgccctgtgcccccgggtgctggcccccaaggagagcgaagagccgcggaaaatgagatcaccgcctggggagaacccgtcaccacaaggggagctaccatcccccgaatccagcagaagactgtttcggaggtttcgttatcaagaagccgctggccctagggaggctttacagcggttatgggacctgtgtgggggttggctgaggccagagagacacaccaaggagcagatccttgaactgctggtgcttgagcagttcttggccattctgccccgcgagatccagagctgggtgcgcgctcaagagcccgagtcaggggaacaagcagtagccgcggtagaggccctggagcgagaaccgggccgcccctggcagtggctcaagcactgtgaggaccccgttgtgattgatgacggtgatagccccctggaccaggagcaagagcaactaccagtagaaccacattcggacctggctaagaaccaggatgcccagcccatcacccttgcgcagtgtctgggcctcccgtctagaccaccgtcccagctgtctggggatcccgtgctacaggacgcctttttacttcaggaggagaatgtgagggacacccagcaggtgaccactcttcagctgcctccccggatcttccagtttaacaatcaccgcagcaatggatatattttagaaatgctcgggagtggggggaaaaaggcccagatcataagtgttctcagccagatctacgtgtcaagagtgtcgccattcaaggatatgattctctgcttcagtgaggaagactggtccttgcttgatccggcacagacaggcttctacggggagttcattatcggcgaggattacggcgtgagtatgccaccgaacgacctagccgctcagcctgatctctcccagggggaggagaacgagcctcgtgtgcctgaactgcaagatttgcagggcaaggaagttcctcaggtgagttacctggattcacctagtctgcagccattccaggtggaggaaaggcgaaaacgtgaggaactgcaggtgcctgaatttcaagcctgcccccagactgtggtgccacagaatacatatccagcaggggggaacccaagaagcctggaaaatagtttggacgaggaggtgactatcgaaattgtgctcagcagcagcggtgatgaagatagccagcatggcccatactgtacggaagagttagggagtcccacagagaaacagcggtccttgcccgcaagccacaggtcgagcacagaagccggcggggaagttcagacatcaaaaaaaagttatgtatgtcccaactgtgggaaaatatttcggtggagggtgaatttcatccgccatctgaggagcagaagggagcaggagaagcctcacgagtgcagcgtctgcggagaacttttctctgacagcgaggacctggacggacatttagagagccatgaggcgcagaaaccatacagatgcggagcttgtggaaagagcttcaggctaaatagccatctgctgtcccacagaagaattcacctgcaacctgacaggctacaacctgtagagaaaagagaacaagctgcaagcgaggatgccgataaagggcccaaggagccactcgagaatgggaaagctaaactgtcttttcagtgctgtgaatgtggaaaagcattccagaggcatgaccatctggcccgccatcggtcacatttccaccttaaggataaagctaggccttttcagtgtcggtactgcgtgaaatccttcacgcagaactatgacctcctgagacatgaaaggctgcatatgaaacgcagaagtaaacaggcacttaacagctattag

SEQ ID NO: 212276 - DNA, 1830 bp, synthetic construct
  misc_feature 1..1830: note = Description of Artificial Sequence: Synthetic coding sequence
  source 1..1830: mol_type = other DNA
atgagcaccgcccccagcctgagcgccctgcggagcagcaagcactctggcggcgggggtggagggggaggcggcggaggggcggacccggcttggaccagcgccctctccggcaactcatccggcccgggtccagggtcctcccccgctggctctaccaaaccttttgttcatgccgttcccccgagcgaccctttgcgccaagccaataggctaccaatcaaagtactcaagatgctgaccgccagaacggggcacattctacatccggagtatctgcaaccactgccatccacgcccgtgtccccgatcgagctcgatgctaaaaagtctccgttagctctgttggcacagacttgctctcagatcggcaagccagatccctccccctccagcaagcttagtagtgtggccagtaatggaggcggagccgggggtgccggcggcggcgccgctggtgacaaggatacgaagagcggacctttgaaactgagcgatatcggagtcgaagataaaagtagcttcaagccatactcgaagccaggaagcgataagaaggaacctggtggtggtggcgggggaggcggcggcggaggaggaggcgggggaggcgttagctccgagaagtcgggattccgggtgcccagcgctacttgtcaaccattcactccccggactggcagcccatcaagttctgccagcgccgaaggaggacccaccgggcttgcccacggccgcataagctgcggaggcggcattaatgtcgatgttaaccagcaccccgatggaggaccaggtggaaaagccctcggatccgattgcggagggagctctggctcgtcatccgggagtgggcctagcgccccaacttctagttccgtgctgggatccggtctggtagcacccgttagcccatataaacctggccagaccgtattccctctgccacccgcaggtatgacgtaccccgggtccctcgcgggcgcatacgccgggtacccaccacagtttctgcctcatggggtcgcactggaccctacaaagccaggctcactggtgggagctcaactcgcagccgccgccgcgggtagccttggctgcagcaagcctgctggttcgtctccactggccggcgcttcccccccttccgtgatgacagctagcctctgcagagacccatattgcctgtcctaccactgtgcatctcatctggctggtgccgcagctgcatccgcctcttgcgctcatgatcctgccgccgccgccgccgctctgaagagtggctatcccctggtctacccgacacaccccctgcatggtgtgcattcttccctaactgccgctgcagctgctggagccaccccaccctctctcgccgggcaccctctgtacccctatggtttcatgttgccgaacgatccattgccccatatttgtaattgggtgagtgcaaacggcccttgcgataaaaggttcgcaacaagcgaggagcttttgagtcacttacgcacacacactgccttccccggtacagataagctgctctcaggttatcctagttctagttctctagcctcagccgctgcagccgccatggcatgtcacatgcatatacccaccagcggagcccctggaagcccagggactctagccctcaggtccccccaccacgcactcggactcagcagccggtatcacccgtatagtaagtccccactgcccacccctggagcgccggtcccggtgccggctgctaccggtccctactactccccttacgcactctatgggcagagacttacaacagcttcagccctggggtatcaatag

SEQ ID NO: 212277 - DNA, 1941 bp, synthetic construct
  misc_feature 1..1941: note = Description of Artificial Sequence: Synthetic coding sequence
  source 1..1941: mol_type = other DNA
atgagcaccgcccccagcctgagcgccctgcggagcagcaagcactccggaggcggcggcggaggtgggggcgggggtggtgcagaccccgcttggacatctgcactgtccggtaattcctctggacccggcccgggttcctcaccagccggtagcaccaagccgtttgtgcatgcggtgccgccaagcgatcccctgcgacaggccaaccgcctccctattaaggtcctcaaaatgctgacagcacgaactggccacattctgcaccctgagtatctacagcccctcccaagcacccctgtgagcccaattgaactggacgcgaagaagtcccccttggccctgcttgcacagacttgcagtcaaattggcaagcctgatccatccccgagctcgaagttgtcgagcgtcgcttctaacgggggcggtgctggcggcgctgggggcggcgctgcaggtgacaaggatacaaaaagtggccccctcaagctctctgatatcggcgtggaagataaatcttccttcaagccatacagcaagcccggatctgataagaaagagcctggcgggggtggcgggggtggaggtggcggcggaggtggaggcggcggcgtgagctcagaaaaaagtggtttccgcgtgccgtcagccacatgtcaaccatttactccgcgcacagggagccctagttccagcgcgagcgcctgtagtcctggtggaatgctcagttccgccggaggcgcccccgaaggtaaggacgataagaaagacacagatgtgggagggggcgggaaagggacagggggagcttctgcagagggaggaccaacaggacttgcccatgggagaatctcctgtggggggggtatcaatgtagatgtgaaccagcatcctgatggcggccctggtggtaaagcgttaggatctgattgtggcggcagctccggaagctcttctggtagcgggccctccgcgccgacctcctcctctgtacttggctcggggctcgtggcacctgtgagtccttataagccgggccagacggtgtttccacttccccccgctggaatgacatacccagggtccctcgccggcgcttacgctggttatccaccccagtttcttccccacggcgtagccctggaccccaccaaacctgggtccttggtgggagcacaactggccgccgccgcagccgggtctctggggtgtagcaaaccagcaggttcatctcctttggccggcgcttctcctcctagcgtgatgaccgcctccctgtgtcgtgatccatactgcttatcataccactgtgcgtcccaccttgccggagcagccgcggcctctgctagctgcgcacacgatccagcagctgcggcagcagccctaaagagtggttacccattggtgtatcccactcaccctctccacggtgtccactctagcctgacagctgctgctgccgcaggtgctacaccaccatctcttgctggacaccccctctacccttacggatttatgctgcccaacgatcctttgccgcacatttgcaactgggtgagtgccaatggaccttgtgacaagcgctttgccacgtccgaagaactgctctctcacttacgcacgcatactgctttccccggcacggacaagcttctttctggctacccatccagtagctccctcgccagtgcagccgcagcagctatggcatgccacatgcacattcccacaagcggggcaccgggatccccaggaaccctagccctgcgttctccccatcacgcgcttggactgagttcacgctatcatccatacagcaaatcccccctacccacacccggcgcacccgtacccgtaccagccgctacaggcccctactacagtccgtacgccctctacggtcaacgactgaccacagccagcgcattaggttaccaatag

SEQ ID NO: 212278 - DNA, 1941 bp, synthetic construct
  misc_feature 1..1941: note = Description of Artificial Sequence: Synthetic coding sequence
  source 1..1941: mol_type = other DNA
atgagcaccgcccccagcctgagcgccctgcggagcagcaagcacagtgggggggggggaggaggcggcgggggcggcggggccgaccctgcgtggacttctgccctaagcgggaattcgtcaggccccggaccagggagctcacccgctggtagcacaaagccctttgtgcacgcggtgcccccaagcgatccactgagacaggccaacagattacctataaaagtactgaagatgttaactgccagaaccggacacattctacatccagaatatcttcaacccctgccctcaactccagtctctccaatcgaactggacgctaagaagagtccacttgcactactagcccagacctgctcccagatcgggaagccagacccatctccttcatcaaagttgtcctccgtcgcctcaaatggcggtggggctggaggagctggcgggggcgccgcaggggacaaagatactaagtccggacccctgaaactaagcgacataggggtcgaggataagtcctccttcaagccttattctaaacccgggtccgataaaaaagagccaggcgggggtgggggaggaggcgggggcggcggaggagggggcggtggagtgtcatccgaaaagtccggtttcagagttccatccgccacttgtcagccttttacaccaaggaccgggagccccagctccagcgcctctgcatgttcgcccggagggatgctgtcatccgctgggggggcacccgagggcaaagacgacaagaaagacaccgatgtaggtggaggcgggaagggcactgggggcgcttctgccgaaggaggccccaccgggctggctcacggtcggattagctgcggagggggaataaacgtggatgtgaatcagcatccagacggagggccaggaggaaaggctttgggatcggattgtggcggctcttccggatcctcaagcggatcaggcccctcagctcccactagctcctccgtgttaggaagcggcctagttgctcccgtctccccctacaaaccaggtcaaaccgttttcccgttaccacctgctggaatgacttaccccgggtcactggccggcgcctatgcaggatatccgccccaattcttgccccatggagtggccctggatcctactaagcctggtagtcttgtcggggcgcaacttgctgccgcggccgctggatcactgggctgttcaaaaccagctggcagtagcccactagctggcgccagcccaccctctgtgatgactgccagcctgtgccgtgacccttattgcctttcctaccattgcgcttcacacctggccggcgccgcagccgcctctgcgtcctgcgcccatgatcctgctgccgcagcagcagctctgaagagcgggtaccctctggtgtaccccacccacccactgcatggagtacattcgtccttaacggccgccgctgccgccggggccacgcctccatccctggccggacaccccctgtatccttacgggtttatgttgcccaacgatcccctcccacatatctgcaattgggtgagtgccaatgggccgtgcgacaaaagattcgccacttcagaggaactcctgtcccacctgaggacacatactgcgtttcccggcacagacaagctcttgagcggctatccaagtagttcatcactcgcttcagcagccgccgctgccatggcttgtcacatgcatataccaacatccggagcacccggatctccaggtacgctcgcccttagaagtccacaccatgccctcgggctgtcatctagatatcacccctactctaaaagcccactaccaacacccggcgctcctgtgccagttcccgctgctactggcccatactactctccatacgcgctgtacggccagcggttgacaactgccagcgctcttggctaccagtag

SEQ ID NO: 212279 - DNA, 1626 bp, synthetic construct
  misc_feature 1..1626: note = Description of Artificial Sequence: Synthetic coding sequence
  source 1..1626: mol_type = other DNA
atgccccggcggaagcagagccacccccagcccgtgaagtgcgagggagttaaggtggacaccgaggattctctagatgagggccccggtgcgcttgttctcgagtcggatctactccttggccaggacctcgagttcgaggaggaggaggaagaagaagagggagatgggaattcggatcagctgatggggttcgagcgggactctgagggcgattccttgggggcacgacctggtctgccctatgggctgtctgatgatgaaagcggtggggggagagcccttagcgcagagagcgaggttgaggagccagcccggggccccggggaagcaaggggtgagcgcccaggccccgcatgtcagctctgtggaggccccactggcgaaggtccatgctgtggcgccggaggacccggtggcggccccctcttaccccctcgcctgttgtatagttgtcgcctttgtacattcgtctcccactatagcagccacttgaagcggcacatgcagacccattcaggcgagaagccattcagatgcggacgctgcccatacgcttcggcgcaattggtcaacctcactcgccacacgaggacccacaccggggaaaaaccctatcggtgccctcattgcccgttcgcctgctcttctctaggcaatcttaggcgccatcaacggacccacgcaggccctcctacccctccctgccccacttgcgggttccggtgttgtacaccacgtccagctaggcctccaagtcctacagaacaagagggtgccgtgcccagaagaccagaagatgcattgttgttgccggatctctcgctccacgttccccccggtggggcaagtttcctgccagattgcggacagctgcggggagagggcgaggggctctgcgggacaggctctgagccattgcctgaactgttatttccttggacatgccgcggttgtggacaggagttagaagagggcgaaggctcgcgactgggcgccgctatgtgcggcagatgtatgcggggggaggccgggggcggagccagcggcggccctcaaggcccatcggacaagggcttcgcctgtagcctgtgcccgttcgcaacccattacccgaaccatctggctagacatatgaaaacccactcaggggaaaaacctttccggtgcgccaggtgcccatacgccagcgcccacctcgataacctgaagagacatcagcgcgtacatactggtgagaagccgtacaaatgccctctttgtccctatgcgtgtggtaatctcgcaaaccttaagcgtcacgggcgcatccattcaggagacaaaccgtttcgctgctccctctgcaattacagctgcaaccagagcatgaacctcaagaggcatatgctccgacacactggggaaaaaccattcaggtgcgccacttgtgcctacaccaccggccactgggacaactacaaacgccatcagaaggttcacggacatggtggagcaggcggacccggactgtctgcgagcgagggatgggcccctccacattcccccccatcagtcctgagtagccggggtccgcccgcgctcggaacggccgggtctagggccgtgcacaccgattccagttag

SEQ ID NO: 212280 - DNA, 1440 bp, synthetic construct
  misc_feature 1..1440: note = Description of Artificial Sequence: Synthetic coding sequence
  source 1..1440: mol_type = other DNA
atgggcttcgagcgggacagcgagggcgacagcctgggcgcccggcccgggctcccgtacggcctatcagatgacgagtccggcggagggagggctcttagcgcggaatccgaggtggaagaacctgcgcgaggtccaggcgaagccagaggagaacgacctggacctgcatgtcagctgtgcgggggacccactggagaaggaccctgttgcggtgccggagggcccggggggggtcccttgttacctccaagactgctgtattcctgccggctctgcacatttgtgagtcactattcctctcatctgaaacggcacatgcagacacatagtggagagaagcccttcaggtgtggccgctgcccttacgccagcgcacagctcgttaatctgacccgccatactaggactcatacaggcgagaagccctaccggtgcccccattgccctttcgcgtgctcctcccttgggaaccttcgtaggcaccagaggacccacgctgggccccctactcctccatgcccaacatgcggcttccggtgctgcacacctcgccctgcccgaccaccatcacctactgaacaggagggcgcggtgcccaggaggcctgaggacgccctcctgctgccagaccttagtctgcacgtaccgcctgggggggctagtttcctgcccgattgtggacagctcagaggggagggggaaggactgtgtgggactgggtccgagccactcccggagctgctgtttccctggacttgtcggggctgcgggcaggaactggaagaaggggagggttctcgcctaggcgccgcaatgtgcggcagatgtatgcggggcgaggcaggcggaggcgcgtcaggaggacctcaggggccatcggataaaggtttcgcatgctcgctgtgtccattcgctacgcattacccaaaccatttagcaaggcacatgaagacccactctggcgagaagccattccgatgtgcccggtgcccctacgcctcagcccatctggataacctgaaacgacatcagcgggtgcacactggcgagaagccttacaagtgtcccctgtgcccatatgcatgtggaaacctcgcgaatcttaaaaggcatggcaggatccattccggggataagccctttcgctgcagtctgtgcaactattcctgcaatcaatcaatgaatctgaagcgccacatgcttcgacacactggtgagaagccattccgatgtgccacttgtgcttatacaactgggcattgggataactataagcgccaccaaaaggttcacggacatggcggagcagggggtcctggcctctctgcctctgaggggtgggcgccaccccattcccccccctcagtgctgagttctcgcggtccacctgctctgggaactgcaggttcccgcgctgtacatacagactccagctag

SEQ ID NO: 212281 - DNA, 3936 bp, synthetic construct
  misc_feature 1..3936: note = Description of Artificial Sequence: Synthetic coding sequence
  source 1..3936: mol_type = other DNA
atgagccggcggaagcaggccaagccccggagcctgaaggaccccaactgcaagctggaggataaaactgaagacggcgaggccctggactgtaagaaaagaccggaggacggggaagaactggaggatgaagctgtccacagctgcgactcatgtcttcaggtatttgagagtctctcagatattacagagcacaaaattaaccagtgccagttaaccgacggggtcgatgtcgaggatgatcctacttgctcgtggcccgcctcatcaccctcttctaaagaccaaacctcgccttctcatggagagggctgtgattttggggaggaagaaggcggccccgggctcccttatccgtgtcagttttgtgacaagtccttttctcgcctctcatatctaaaacaccatgaacaatcacatagtgataagttgccattcaaatgcacgtattgtagtcgactgtttaagcataaacgaagccgcgatagacacattaagcttcacaccggggataaaaaatatcattgcagtgagtgtgacgcagccttctctaggagcgatcacctcaaaatccacctgaaaactcacaccagtaacaaaccctacaagtgcgccatttgccgccggggattcctaagctcgtcatcattgcacggccacatgcaggtccacgaacggaacaaagatggttctcagagcggctctcgtatggaagactggaagatgaaggatacccagaagtgctctcagtgcgaggagggctttgacttccccgaggatctgcagaagcacattgcagagtgtcaccccgagtgttcaccgaacgaagatcgagccgcactgcagtgcgtgtactgtcacgagttgttcgtggaggagacctccctcatgaaccatatggaacaggttcattccggggagaagaaaaacagctgctcaatctgttccgagtcctttcacacagtggaggagctctatagccatatggattctcatcagcagccggaatcatgtaatcactctaatagcccatcactggttacagtgggttacacaagcgtgagcagtacaacacctgattctaaccttagcgtcgacagctccaccatggtcgaggccgccccgcctataccaaaaagcagggggaggaagcgcgcagctcagcagacacctgacatgacaggtccgtcctcaaagcaagccaaggttacatacagctgtatttactgtaacaaacagctattctcaagcttggcggtccttcagattcatctgaaaaccatgcatttagacaagcctgaacaagcccatatctgccaatactgccttgaagttctgccgtcactgtacaatctgaacgagcatctgaaacaggtgcacgaagctcaggacccaggcctcatcgtgtccgccatgcccgctatcgtctatcaatgcaacttctgctccgaagtcgtcaatgaccttaacacattgcaggagcatatccggtgctcccatggctttgcaaatcctgcggctaaggattccaacgcctttttctgtcctcactgttatatgggcttcttgaccgactcctcactggaggagcatatcagacaggttcattgcgacctgagcggcagcaggtttggtagtccagtgcttgggacgccaaaggaacccgtcgtcgaagtatactcttgttcatactgtaccaacagccctatcttcaattctgtcctcaagcttaataaacacattaaagaaaaccacaagaatatccctttggccctgaattacatccacaacgggaaaaaaagccgtgctctgagccccctgtctccagtcgcgatcgagcagacaagcctgaaaatgatgcaagctgtgggaggagcaccagcaaggccgaccggtgaatacatttgtaatcagtgtggtgccaagtatacttctctggattcctttcaaacacacctgaagacacatttagacacagttcttcctaagctgacctgcccacagtgcaacaaggaatttcctaatcaggagagtctcctcaaacacgtgaccattcacttcatgataacaagcacatactacatctgcgagagctgcgacaagcagtttaccagtgtggacgatctgcagaagcacttactcgacatgcataccttcgttttctttcgctgtactctctgccaagaggtattcgactctaaggtgagcatccagctgcatttagccgtgaagcactctaacgagaagaaagtgtaccgctgcacaagttgcaactgggactttaggaatgagaccgatttacagctgcacgtgaaacacaaccaccttgaaaatcagggaaaggtccataagtgcatcttttgcggggaatcatttggcaccgaggtggagctgcagtgccatataactacacactcaaagaaatacaattgtaaattttgctccaaagcttttcatgcaatcatattactcgaaaagcacttgagggagaagcattgcgttttcgagacaaaaactccaaactgcggaaccaacggcgcttccgaacaggtgcaaaaagaagaggtggaactgcaaaccctcctgactaacagtcaggagagtcataattcccacgatgggtccgaggaggatgtggatacctcggaaccaatgtatggctgcgacatctgcggcgccgcatataccatggaaaccctcctgcagaatcaccagcttcgtgatcacaacatacggcccggagagtcagccatcgtgaagaagaaagccgaacttatcaaggggaactataagtgtaacgtctgcagccggaccttctttagcgagaacggactgcgcgagcacatgcagacccacctgggcccagttaaacactacatgtgccccatctgtggggaaaggtttccgtcgttgctgacattaaccgagcacaaggttacccattctaagtcactggacactggcaactgtcgtatctgtaagatgccactgcagtcggaagaagagttcctcgagcattgccaaatgcatcctgatttaaggaatagcctgacggggtttcgctgcgtcgtgtgtatgcagacagtgacaagcactctggaacttaagatccacgggactttccatatgcagaagactggcaacgggtccgctgtgcaaacgactggcaggggccagcatgtgcaaaagttatataagtgcgcctcctgtttaaaagaattccgatccaaacaggacttagttaaattagatatcaatggtctcccatacggattatgtgctgggtgtgtgaatctaagcaaatcagcctcacccgggatcaatgtccctcccggcaccaatcgcccaggcctgggtcagaacgaaaacttgtcggccatcgaagggaaggggaaggtgggaggcttgaaaactagatgtagcagctgcaatgtcaagttcgaatcagaaagcgaactgcagaatcacatccagaccattcaccgtgagctagtgccagattctaactctacacagctgaagactcctcaagtgagcccaatgcctcgcatctcaccgtcccagagtgatgagaaaaaaacataccagtgcatcaaatgccaaatggtcttctacaacgagtgggatatccaggttcatgtagccaatcatatgatcgatgaggggctgaatcacgagtgtaaactctgcagccagaccttcgacagccctgccaaactacagtgtcatctgatcgaacattctttcgagggaatgggcggaacattcaaatgtcctgtctgtttcacagttttcgtccaagcaaataagctccagcagcacatcttctccgcccatggccaggaggacaagatctatgattgcacccaatgtccacaaaaattctttttccagacggaacttcaaaaccatacaatgactcagcacagctcgtag

SEQ ID NO: 212282 - DNA, 3936 bp, synthetic construct
  misc_feature 1..3936: note = Description of Artificial Sequence: Synthetic coding sequence
  source 1..3936: mol_type = other DNA
atcagccgggcccagaaggcccagacccggcggctgaacgaccccaattgtaagttggaagacaaaacggaagacggagaagcccttgattgtaaaaaaagacccgaggacggcgaggagctggaggatgaggccgttcactcctgcgactcatgcctgcaggtgtttgagagcttgtccgacattaccgagcacaagattaatcagtgtcaactaaccgacggcgtggacgtggaggatgaccccacctgtagctggcctgcctcttctccttcgtctaaagatcagacctctccttcacatggagagggctgtgacttcggtgaggaggaaggaggcccggggcttccatacccctgccagttttgcgacaaaagcttctctcgtctgtcctatttgaagcaccatgaacaaagtcattcagataagctgcccttcaaatgcacatattgttccagactgttcaagcacaagaggtcaagagataggcatattaaactgcataccggagacaaaaaataccattgttcagagtgtgatgcagctttcagcaggtccgatcacttaaaaatccatctgaagactcacacctccaataaaccctataaatgtgctatatgccggcgcggatttctgagtagttcatcactgcacggccacatgcaagtgcatgaaagaaacaaagacgggtctcagtctggtagtagaatggaggactggaaaatgaaggatacacaaaaatgctcacagtgcgaagagggattcgacttccccgaggatttgcagaaacacatagccgaatgtcaccccgaatgctcccccaatgaagacagggccgccctgcagtgtgtttattgccacgaactgtttgtggaagagacaagtttgatgaaccatatggaacaggttcactccggggagaaaaagaattcttgcagtatatgttccgaatcctttcatactgtggaagaactgtactcgcacatggactcccaccagcaaccagaatcctgcaaccattctaacagcccaagcttggtgacggtggggtatacatctgtatccagcaccacgcctgattctaatcttagcgttgactcttcaacaatggttgaggcagctcctcctatccccaagtcaagaggaaggaagcgggccgctcagcaaactccagacatgacgggcccaagctcgaaacaagccaaagttacatacagctgcatctattgtaataagcagcttttcagcagcctggcagtcctccagatccatctaaagactatgcatctagacaaacctgagcaggctcatatctgccagtactgccttgaagtgctgcctagcctctataacctcaacgagcatttgaaacaggtgcacgaggcccaggatccaggccttatagtgtccgcaatgcctgccatagtgtaccaatgcaatttttgctcagaggtggttaatgacctgaacactctccaggagcacataaggtgttctcacggatttgcaaatccagctgctaaagacagcaacgccttcttctgcccccactgctacatgggcttcctgaccgatagctcattggaagagcacataagacaggtgcactgcgaccttagtgggagtaggtttggatcgcctgtattgggtacccccaaagagccagtagtggaagtgtactcctgcagctattgtactaattcgccgatctttaattcagtcctgaagctgaacaagcatattaaagaaaatcataagaatattcctctggctcttaattatatccacaatggaaaaaagtctcgggctctgagcccgctttcgcccgtagcaatcgagcagactagcttgaagatgatgcaggctgttgggggcgctcccgcccgccccaccggagagtatatttgtaaccagtgtggtgccaaatatactagcctggatagtttccaaacacatttgaagacccacctggacacggtgttgcctaagttgacgtgtccacagtgtaataaggaattcccaaaccaggaaagtctgctgaagcatgttactattcattttatgataacctctacctactatatctgcgaatcctgcgataaacaatttacatctgtggacgacctccaaaagcaccttctggacatgcacacttttgtgtttttcaggtgcaccctgtgtcaggaggtgttcgattcaaaggtgtccatccagctccatctcgcggtgaaacacagtaatgaaaagaaggtataccggtgcaccagctgcaactgggatttccgcaatgagacagacctgcagctgcacgtcaaacacaatcatctagagaatcagggaaaggtgcataagtgcatcttttgtggagaaagctttggcaccgaggtggagctgcagtgtcacatcacaacccatagcaagaagtacaactgcaagttttgctcaaaggcgttccacgctatcattttgctggagaaacatctgcgcgagaagcattgcgtcttcgaaacgaaaacaccaaactgcggaacgaatggcgcatcagaacaggtgcagaaggaagaagtggagctgcagacccttctgactaacagtcaggaaagtcataatagccacgacggaagcgaggaggatgtagatacatctgaacctatgtacggatgcgacatctgtggtgcggcctatacaatggagaccctattgcaaaaccatcaacttcgcgaccataacattaggccaggagagagtgccatagtgaaaaagaaggcggaattgattaaggggaactataagtgcaatgtatgctctcgaactttcttttcggaaaacggcctgcgtgaacacatgcagactcacctcggacccgtgaagcattacatgtgtcctatctgcggggagaggttcccatcactgctgactttgacagaacacaaagtgacccacagcaagagtctcgatacggggaattgtcgtatctgtaagatgccactacaaagcgaagaagaatttctggaacactgccagatgcaccctgacttgagaaatagcctgaccggattcagatgcgtcgtgtgcatgcagacggttacctccacgcttgaactaaagattcacggcacctttcacatgcagaagaccggcaacggtagcgctgttcagaccacaggccgtggccagcatgtgcagaaactatataagtgtgcctcatgcctaaaggagttccgatctaaacaggacttggtgaagcttgacatcaacggactcccatatggactctgcgcgggctgtgtcaatttatccaaaagtgctagtcctggtattaacgttccacctggtacaaatcgccccggactgggtcagaatgaaaatttgagtgcaattgagggcaagggaaaagttgggggccttaaaactaggtgttctagttgtaatgtcaagtttgagtcagagagtgagctccaaaaccacattcagacgatacatagggagttagtccccgattcgaatagcactcagctgaaaacacctcaagtgtcccccatgcctcgaatcagcccatcacaaagtgatgagaagaagacttaccagtgcataaaatgccagatggttttctacaatgagtgggatatacaggtccatgtcgcaaaccacatgattgacgagggcctcaatcatgaatgcaagctgtgttcccaaacctttgatagtcctgccaagctccagtgccatctgattgagcattcatttgaagggatggggggcactttcaaatgtcccgtttgcttcaccgtgtttgtgcaggcaaataagttgcaacaacatatctttagcgcccatggacaggaagataagatttatgactgcacccaatgcccacagaagtttttcttccaaacagaactgcaggtgcacaccgccaccccccgacagtcttag

SEQ ID NO: 212283 - DNA, 4038 bp, synthetic construct
  misc_feature 1..4038: note = Description of Artificial Sequence: Synthetic coding sequence
  source 1..4038: mol_type = other DNA
ttcctgagcgactacgtgcagagcgagagcctgcgggtgcggggccctctgtggtctcatcccgatggttttggcgggctggccagcatcttccactattatgtcgattatagaagcgactctgccgtgcaggacctggccgacccaaattgtaaactggaggataaaactgaagacggggaggctctggactgcaagaagcgaccagaagacggtgaagagctggaggatgaggcagttcattcttgcgatagctgcttacaggtgttcgaaagtctatcagatatcaccgagcacaagatcaatcaatgccagctgaccgatggtgtcgatgtcgaagatgatcctacctgctcctggccagcttcttccccctcatccaaggatcagacatctccgtcacacggtgaaggttgtgactttggcgaagaagaaggcggacccgggcttccctacccctgtcagttctgcgacaaaagcttctctcggctgtcctaccttaagcatcacgagcagtcacattccgacaagttaccatttaagtgtacttactgctcaagactgtttaagcacaagaggagcagagaccggcacatcaagctgcacacaggcgacaagaaataccattgtagcgaatgcgatgcagcttttagccggtcagatcacctgaagatccacttgaaaacccacactagcaacaagccatacaagtgtgccatatgtcggcggggattcctgtcctcaagcagcttgcacggacacatgcaggtgcacgaacgcaataaggatggtagtcagtccggcagtcggatggaggactggaaaatgaaggatactcaaaaatgctctcagtgcgaggaggggttcgacttccctgaggacctgcagaaacatattgcagaatgccatccagaatgttccccaaatgaggatcgggcggccttgcagtgtgtgtattgtcatgagttgttcgtggaggaaacttctttaatgaaccacatggagcaggtccactcaggggagaaaaagaacagctgttctatatgttcggagagctttcacactgtagaggagctgtactctcatatggactcacaccagcagccggagtcttgtaaccattcaaactctccatctctggtgaccgtgggctacacatccgtctcatccactacacccgactctaatctatcagtagattcctcaacgatggtcgaggcagctccacccattccaaaaagtagaggcaggaagagagccgcccagcagacacccgacatgaccggcccaagctcgaaacaggctaaggtgacttacagctgtatttactgtaataaacagctgttcagctcactggccgtgctccagatccacctgaaaaccatgcacctggataaaccagaacaggctcacatatgccaatactgcctggaggttctcccatccctttataacctgaacgagcaccttaaacaggtccacgaagcccaagatccaggactgattgtgtcagctatgccagccatcgtgtaccaatgcaatttctgttcagaggtagttaacgacctgaatacactccaggagcacattcgctgtagtcacggtttcgctaacccagcagccaaggactcaaatgctttcttctgcccacactgttatatgggttttctcacagacagcagtcttgaagaacatatacgccaggtgcactgtgacttgagtggcagccgttttggttcacccgttctaggcacccccaaggaacctgtcgtggaggtttactcctgctcctattgtacaaattccccaatcttcaacagcgtactcaaattaaacaagcatatcaaagaaaaccacaaaaacattccacttgcactgaattacatccataatgggaagaaatctcgcgcactctctccactctccccggtcgctatcgaacagacatccctgaagatgatgcaggccgtaggaggcgcccctgccaggccaacaggcgagtatatttgtaaccagtgcggagccaaatataccagcctggatagttttcagacccacctcaaaacccaccttgacaccgtgctgcccaaactgacctgtccccagtgtaataaagagtttccaaaccaggagagccttttgaagcatgtgactatccactttatgattacatccacttattacatttgtgaaagctgtgataagcagtttacttctgtggatgacttgcagaagcacctgttggatatgcacacctttgtgttcttccggtgtactctgtgccaggaggtcttcgactccaaagtctcgatccagttacatttggctgtgaaacactccaatgaaaaaaaagtatacaggtgtactagctgtaattgggatttccggaacgaaaccgacctgcagttacatgtgaaacataaccatctagaaaaccagggtaaggttcacaaatgcatcttttgcggagagagttttggtactgaggtcgaactgcagtgccatattacgacccattccaagaaatataactgcaagttttgttctaaggcctttcacgccatcatcctgctcgagaagcacctccgggagaaacactgcgtgttcgagacaaagactccgaattgtgggactaacggtgcctccgaacaggtccaaaaggaggaagtggaattacagaccctgcttactaattcccaggagagtcacaactcgcatgatgggagcgaggaagatgtggataccagcgaaccaatgtatgggtgtgatatctgcggggcagcatacacaatggagactctgctgcaaaatcaccagctgagggaccataatattcggcccggagagagcgctatagtgaaaaaaaaagcagaattgattaagggcaactacaagtgcaacgtctgtagtaggactttcttttctgagaatggcctgcgagaacacatgcagacacatcttggcccggtgaaacactatatgtgcccgatctgtggcgaacgtttcccgtctctcctcaccctgaccgagcataaggtcacgcattcgaaatccttggacactggcaactgccggatttgcaaaatgccactgcagagtgaggaagagtttctggagcactgccaaatgcatcccgacctccggaactctctgactgggtttagatgcgtcgtctgtatgcaaacagttacttccacactggaacttaaaatccacgggacttttcacatgcagaagaccggtaacgggagcgccgtgcagactaccgggagaggccaacatgttcagaagttgtataaatgcgcgtcatgcctcaaggagttcagaagcaagcaggatttggtcaaactggatatcaacgggctgccatacggtctttgtgcaggatgtgttaatctatctaagtccgccagccccggaattaatgtgccccccggtacaaaccgacctgggttgggtcagaacgaaaatctgagcgctatcgaaggtaagggaaaggtggggggcctaaaaactcggtgttcctcctgtaacgtgaagtttgaaagtgaatccgaactgcaaaaccatatccaaacaatccatcgcgagttggttcccgattctaactccactcagcttaaaacccctcaggtctcccctatgcctcgtatctccccctcacagtctgatgaaaagaaaacctaccaatgtattaaatgccagatggtgttctacaatgagtgggacattcaggtccatgtcgcgaaccacatgatcgatgaggggctgaaccacgagtgtaagttgtgttctcagactttcgattcccctgcgaagctgcagtgccatctcatcgaacactcattcgagggaatgggcggaacatttaaatgcccggtttgtttcacagtctttgtgcaggccaataagctacaacagcacatctttagtgctcacggacaggaagacaagatatacgattgcacccagtgtccacaaaaattctttttccagactgaactccaggttcatactgccacaccacgacagagctag

SEQ ID NO: 212284 - DNA, 2013 bp, synthetic construct
  misc_feature 1..2013: note = Description of Artificial Sequence: Synthetic coding sequence
  source 1..2013: mol_type = other DNA
atggccgaggtggtggccgaggtggccgagatgcccacccagatgtcgcctggcgccgttgagatgtctacaccgatgagcgcagagatgatggaaatgagtacagaggtcaccgaaatgacccctggggaggccctggcttcctctcttttttttcagcatcaccaatttatgtgcagtgagtgcggatctctgtacaacacacttgaggaggtgctctcacaccaggaacagcacatgctggccgtgtctgaagaagaagcactgaccacacagaatgtgggtctcgagcccgaactggtgcccggcgccgaaggcccttttcagtgcggtgagtgtagtcagctgattctgtcccctggcgaattgcttgcccaccaggatgcccaccttagagaatcagccaaccaaatacagtatcagtgttgggactgtcaggaacttttcccatcgcccgagctttgggtggctcatcgaaaagcccagcatctctcagctacagtggcagagcctccagtccccccgcctctgcccccacccacaccgctgcctccaccgagtcccccctcagaggttaagatggagccttacgagtgtccggagtgcagcacactttgcgcaacccctgaggaatttttggaacatcagggcacacacttcgattctttagagaaggaggagcggaacggtctggaggaggaagaggaggatgatgaggaagacgaagaagacgatgaggaaatggaggacgaggaggctatggctgaggtgggagacgatgctgtaggaggcgatgaatccactgctggatgggcccagggatgcggggactgcccccagcaccagccatcggccggtgctagaagacagcaccgccggacagcccattctcccgcaagtgctacgcacccattccattgctcccagtgccagagaagtttttcttcagccaataggctgcaagcccacggacgcgcccatgtgggggggacacatgagtgcaccacctgtagtaaagtgtttaaaaaggccgcctccctcgagcagcacttgcgactgcatcgcggagaagcccgttatctgtgtgtcgattgcggacggggttttggtaccgagttgacactcgttgcacacaggcgggcgcacacagccaaccctctccatcgttgtcgctgtggcaaaacattctcaaacatgacaaagttcctgtaccaccggagaacacacgcagggaagtctggggcacccccaacgggagcgacagctcctcccgcccctgctgaaccaactcccccccctcccccaccggccccccccgcccagcttccatgcccccagtgttccaagtcttttgcgagcgcgtcccgtctgagtcgtcaccgccgtgccgtgcatggtcctccggaaaggaggcacaggtgtggggtctgcggcaagggatttaaaaaactcatacacgtgaggaatcatcttagaacccacaccggcgagaggccttttcagtgtcacagttgcggcaaaacatttgcgtcgctagctaatctgagccgtcaccaactcactcataccggcgcccgaccttatcagtgtttagactgtgggaagcggtttacccagtcgagtaatctgcagcaacacagacgattgcacctcagacccgtggctttcgccagggccccacgtctccccatcacagggctgtataacaaaagcccctactactgtgggacttgtgggagatggtttagggctatggcaggcctacgactgcaccagcgtgttcatgctcgtgctaggactctgacattacagccaccacggagccccagccccgctcccccccccccaccggagccccagcagacaatcatgtgcactgagctgggcgaaactatagcaatcatcgaaacgagtcagcctctggcactggaggacaccctccagctttgccaagccgccctgggagcctcggaggctggcgggctgctgcagcttgatactgcattcgtgtag

SEQ ID NO: 212285 - DNA, 1581 bp, synthetic construct
  misc_feature 1..1581: note = Description of Artificial Sequence: Synthetic coding sequence
  source 1..1581: mol_type = other DNA
atggccgaggtggtggccgaggtggccgagatgcccacccagatgtcccccggtgcagttgaaatgagcaccccaatgagcgcggaaatgatggagatgagcaccgaggtcaccgaaatgaccccatctccccctagtgaggttaagatggagccgtacgaatgtccagagtgctccactctctgtgctacaccggaggagttccttgaacaccagggcacacactttgatagtctcgaaaaggaagaacgcaatgggcttgaagaagaggaggaggatgatgaggaggacgaagaggacgacgaagaaatggaggacgaggaagccatggctgaagttggggacgatgcagtcggcggagatgaatcgacagctgggtgggcacagggatgtggcgactgtccacagcatcagccctctgcaggggccagaagacagcacagacggaccgcccatagcccagccagcgccacccatccttttcattgcagccagtgtcagagatccttctcctcagccaatcgacttcaagctcacggccgggcccacgttggcgggacacatgagtgcactacctgctccaaggtattcaaaaaggcagctagcctggagcagcacctgaggctacacaggggagaggccagatacctctgtgtcgattgcgggaggggttttgggaccgaactcaccctggttgctcacagaagggcccataccgcaaatccactgcaccgctgtaggtgtggaaaaaccttttctaacatgacgaagttcctgtaccacaggcgcacccatgccggaaagtctggcgcacctcccaccggagccactgcaccccccgcaccagctgaaccgactccacctcctcctccaccagcacctcctgcccagcttccatgtcctcaatgcagtaagtcattcgcctcggcgtccagattaagtagacatcggcgagccgtgcacggccccccagagcggcgccaccgatgtggggtttgcgggaagggctttaaaaagcttattcacgtgagaaaccacttgcggactcatacaggggaaagacctttccagtgccactcttgcgggaagacattcgcttcactcgctaacttgtctcgacaccaactaacccacacaggggcccgaccttatcagtgtttagattgtggcaagcgttttacacagtcctctaatctgcagcaacaccgtcgcctgcatctccggcctgtggcattcgcacgggcaccccgcctacctattacgggtctgtataacaaatccccttattactgcgggacctgtggccgctggttccgagctatggcaggactccgccttcatcagagagtgcatgcacgcgctcgaacacttaccctgcaacctccccggagccccagtcccgccccaccccctccaccagaaccacagcagaccattatgtgtactgaactgggggaaaccattgccataattgaaacatcccagcccctcgcactcgaggacacccttcaattgtgccaagccgcactcggcgccagcgaagccggtggccttctgcagctggacacagcctttgtgtag

SEQ ID NO: 212286 - DNA, 1983 bp, synthetic construct
  misc_feature 1..1983: note = Description of Artificial Sequence: Synthetic coding sequence
  source 1..1983: mol_type = other DNA
atggcccacgccctggtgaccttccgggacgtggccatcgacttcagtcagaaggagtgggagtgccttgacactacacagcgaaagctgtatagggacgtgatgctggagaactataataatcttgtcagcctgggctacagcgggtctaaacctgatgtcattaccttgctagaacagggcaaggaaccttgcgtcgtcgctcgggacgtcacagggcgacaatgtccaggactgctcagcaggcataaaacaaagaaactgagtagtgagaaggatattcacgaaatctccctctccaaggaatctattattgaaaaaagtaagactcttaggctcaaaggaagcatcttcagaaacgaatggcagaataaaagcgaatttgagggccagcaaggcctcaaagaaaggagtattagccagaagaaaatcgtcagcaagaaaatgagtactgaccgcaagcggccctccttcactttaaatcagagaattcataacagcgagaagagttgcgattcacatctggtgcagcatggaaaaatcgactccgacgtcaagcacgattgcaaagagtgcgggagcactttcaataatgtttaccaactgacgctccaccaaaagatccacaccggtgagaagagctgtaaatgtgagaagtgcggaaaagtgttctcacattcctaccagcttactctgcatcagagattccacaccggggaaaaaccatacgagtgtcaggagtgcggaaaaacattcaccctgtacccccagctcaaccgacatcagaagattcatacaggcaagaagccttacatgtgtaagaaatgcgataaaggctttttctctcgcctggagctcacccagcataaaaggatccataccggaaagaagtcatacgaatgcaaggagtgcggtaaggtgttccaacttatcttttactttaaggagcacgagcggattcacactggtaaaaagccatacgagtgtaaagagtgtgggaaagcattctccgtctgcggacagcttacccgccaccagaaaatccataccggtgtcaagccatacgagtgcaaggagtgcggcaagacctttaggttgtcattctatctgaccgagcacaggagaacccacgctggaaaaaagccttacgaatgtaaggagtgcggaaagagttttaatgttcgggggcagctcaacaggcataagaccatccacactggaatcaaacccttcgcttgtaaagtgtgtgaaaaggcgttcagctattctggcgacctgagagtacattcaagaatccacaccggcgagaagccgtacgaatgcaaagagtgtggaaaggcatttatgctcagatccgtgctgactgagcatcagaggttgcacactggtgtcaagccttatgaatgcaaagagtgtggtaagacctttcgcgtccgttcacagatctccttgcacaagaagattcacaccgatgtgaagccatacaagtgcgttcggtgtggtaagaccttccgcttcggcttctacctcaccgaacatcagcggatccatacaggcgaaaagccatataagtgcaaggagtgcggcaaggcattcatccgtagaggcaatctgaaagaacacctgaagatacacagcggcctgaagccatacgattgtaaagagtgtggcaaaagtttctcaagaagagggcagtttactgaacatcagaagattcataccggcgttaagccctacaagtgtaaggaatgcgggaaagccttcagcaggagcgtggacttacggatacatcagaggattcataccggggaaaagccatacgaatgcaaacagtgtgggaaggcatttcggttgaattctcacttaacagagcaccagcgtattcatacaggagagaaaccgtacgaatgcaaggtctgcagaaaagcttttaggcagtactcgcatctgtaccaacaccagaagacacacaatgtgatctag

SEQ ID NO: 212287 - DNA, 1887 bp, synthetic construct
  misc_feature 1..1887: note = Description of Artificial Sequence: Synthetic coding sequence
  source 1..1887: mol_type = other DNA
atggcccacgccctggtgaccttccgggacgtggccatcgacttctcgcagaaggagtgggagtgtttagatactacacaacgaaaattatatagagatgtgatgctcgaaaactacaacaatctggtgtcgcttggtctgctgagcagacataagaccaaaaaacttagttcggagaaggatatacatgagatctctttatccaaagagagtatcatcgaaaagtcaaaaactttgcggctcaagggctccatatttcgaaacgaatggcagaacaaatctgaattcgaaggccagcaaggcctgaaggagcggtctattagccaaaagaaaatcgttagtaagaagatgagcactgaccgaaaaaggccctcctttactcttaaccagagaattcataattccgaaaagtcctgcgactctcacctagtgcaacatggaaaaattgacagcgacgtcaagcatgattgtaaagagtgcgggtcaacattcaataacgtgtaccaactgactttacatcagaaaatccataccggtgaaaaatcatgtaagtgtgaaaaatgcgggaaggtgttctcgcatagttatcagcttaccctgcatcagcgtttccacacgggggaaaaaccttacgagtgtcaggaatgcggaaagacgtttactctgtatccacagttgaatagacatcagaaaatccatactggcaaaaaaccctacatgtgtaaaaaatgtgacaagggttttttcagcaggttggagctgacccagcacaaacgtatccacaccggtaaaaagtcctatgagtgcaaggaatgcggaaaagtgtttcagctgatattttatttcaaagaacacgaaagaatacacactggaaagaaaccttacgaatgtaaagaatgcggcaaagcctttagtgtctgtgggcagctgactcgccatcagaagattcatactggagtgaaaccatacgagtgtaaggaatgcggcaagacctttagactcagtttctacctaacagagcaccgtaggacacatgctggaaagaaaccatatgagtgcaaggagtgcggcaagagctttaacgtgcgcggacaattgaatagacacaaaaccatacacacagggatcaaacccttcgcttgtaaggtctgcgaaaaggccttttcctattcaggggatctgagagtgcacagccggatccataccggagagaagccatatgaatgcaaggagtgcggcaaggctttcatgctgaggtctgttctcaccgagcaccagcgcttgcataccggcgtaaaaccttatgaatgcaaggagtgcggaaagaccttccgggttagaagccaaatctctctacacaagaaaatccatacagatgttaagccatataaatgtgtacgatgcgggaagacctttagattcggattttatcttacggagcaccaaagaatacacaccggtgagaaaccctataagtgtaaagagtgcggaaaggcatttataagaagaggaaatctgaaggaacacctcaagatccattccggcctaaaaccatatgattgtaaggagtgcggtaagtccttcagtcggaggggacagtttaccgaacaccaaaagattcacacaggggttaaaccttataaatgcaaagagtgtggcaaagccttctctagatctgtggacctccgtatccatcaaaggatccatacgggcgagaagccatacgagtgtaaacagtgcggaaaagcgttccggctaaatagtcatctgaccgaacaccagcggatccacaccggtgaaaagccctatgaatgcaaggtctgtcgtaaggccttccgccagtattctcatctgtatcagcaccaaaagacccacaacgtgatctag

SEQ ID NO: 212288 - DNA, 1887 bp, synthetic construct
  misc_feature 1..1887: note = Description of Artificial Sequence: Synthetic coding sequence
  source 1..1887: mol_type = other DNA
atggcccacgccctggtgaccttccgggacgtggccatcgacttcagccagaaagaatgggaatgcctcgacaccacacaacggaagctctaccgcgacgtgatgctcgagaactataacaacctcgtgtccctgggtctgctgtcccggcacaagaccaaaaaactctcaagcgaaaaagatattcatgagatcagcctgtccaaggaaagtatcatcgagaaatcaaaaacgttacggttaaagggttcaatcttcagaaatgagtggcagaacaaatcagagttcgagggccaacagggcctgaaggagaggagcatatcccagaagaagatcgtgagcaagaagatgagtacggaccggaagcgtccatcctttacactcaaccaacgaatccataatagcgagaaaagctgtgactcccatctggttcagcatggaaaaatcgattccgatgtgaaacatgactgtaaggaatgtggaagtacgtttaataacgtgtatcaactcaccttgcaccaaaaaattcatacgggcgagaagtcttgtaagtgtgaaaagtgcggaaaagttttctcccactcttatcagcttaccctccatcagagattccatactggagagaaaccctacgagtgccaggagtgtgggaagacttttacactttatcctcagctgaaccggcatcagaagatccataccggtaagaaaccatatatgtgcaagaagtgcgataagggattcttttccaggctggaactcacacagcacaagcgcatccacactggaaagaagagctacgagtgcaaggaatgcggtaaggtattccaactgatcttttatttcaaggagcacgaacggattcacacaggcaagaaaccttatgaatgcaaggagtgcggcaaagcattttcagtctgtggccagctgaccaggcaccagaagattcacacgggcgtcaagccatacgaatgcaaggaatgtggaaaaacattccggctttccttttacctcacagagcaccggaggacccatgccggaaaaaaaccatatgaatgcaaggagtgcgggaaaagttttaacgtgaggggacaactaaacaggcacaagacaatccataccgggataaagcctttcgcctgtaaagtgtgcgagaaggccttttcctatagcggtgatctgagggtgcactcgaggatacatactggagagaagccctacgagtgcaaagaatgcggaaaagctttcatgttacgctcagtgctcaccgagcaccaaagactacacacgggagttaaaccatatgagtgtaaggaatgcggcaagacattccgggtgcgttcacagatttcactacataaaaagatccataccgatgttaagccttacaaatgtgtgcgctgtggaaagacctttcgatttggattttatctaaccgaacatcagagaatacataccggcgagaagccatacaaatgtaaagagtgtggtaaggctttcatacgccggggcaatctgaaggaacacttgaagatacacagtgggctgaaaccctacgactgtaaagagtgtggcaaatcgttctccaggcggggacagtttacagaacatcagaagatccataccggcgtgaaaccatataaatgtaaggaatgtggtaaagcattctctcgtagcgtggacctgcgaatacaccagaggattcacacaggcgagaagccttacgaatgcaaacagtgcggcaaagcctttcggctgaactcccatctgaccgaacaccagagaatccatactggcgagaagccttatgaatgcaaagtttgccgcaaggcgttcagacaatatagtcacctgtaccagcaccaaaaaactcacaacgttatctag

SEQ ID NO: 212289 - DNA, 1983 bp, synthetic construct
  misc_feature 1..1983: note = Description of Artificial Sequence: Synthetic coding sequence
  source 1..1983: mol_type = other DNA
atggcccacgccctggtgaccttccgggacgtggccatcgacttcagtcagaaagagtgggaatgccttgacaccactcagcgtaagctttatagggacgtcatgctggaaaattacaataatctggtcagcctgggctactccggatctaagcctgacgtcattacgctgcttgagcaagggaaagaaccatgcgtagtggcgagggacgtgaccggaaggcagtgtccaggattgctgtcccggcataaaacgaaaaagttgtcctcagagaaggacatccatgaaatctcactctctaaggaatcgatcatcgaaaagtcaaagacactccggctgaaaggaagcattttccgcaacgagtggcagaataagagcgagttcgaaggtcagcaaggcttaaaagagaggtcgatatcccagaagaaaatcgtaagtaagaaaatgtccaccgaccgcaaacgtcctagcttcaccctaaatcagaggattcacaactccgaaaagtcctgcgatagccatcttgttcagcatggcaagatagactcagacgtaaagcatgattgtaaggaatgtggttccacctttaacaatgtgtaccagttaacactccaccagaaaatacatacaggagagaagagctgcaagtgcgaaaagtgcgggaaagttttctcgcattcataccagttgactctgcatcagcgattccacacaggagaaaagccatacgaatgccaggagtgcggcaaaacgtttaccctttacccacagcttaaccgccatcaaaaaatccatacagggaagaaaccttatatgtgtaagaagtgcgacaagggatttttttcgagactagaactgacccagcacaaacgcatccacacaggaaagaagtcatatgagtgtaaagagtgtgggaaggtatttcaattaatcttctactttaaagagcacgaaaggattcacacaggtaaaaagccttatgagtgtaaggaatgcggaaaggctttctcagtgtgtggccaactcacacggcatcagaaaattcatacgggcgtgaaaccctacgagtgcaaggaatgtggtaagacattcaggctttccttttatctcactgagcacaggaggactcacgcgggaaaaaaaccttacgagtgcaaggaatgcggtaagtctttcaatgtccgcggccagttaaacagacataagactatacatacaggtatcaaacctttcgcctgcaaggtctgcgaaaaggctttttcctactcaggagatctgcgggtccacagcagaatccataccggtgagaagccatacgagtgcaaggaatgcggtaaggcattcatgctgagaagtgtattgacagaacaccagcgcctccacactggcgtcaaaccttatgaatgtaaggagtgcggcaagaccttcagggtgcggtctcagatatctctgcacaaaaagattcacacagacgtgaaaccatacaagtgtgtgcgttgcggcaaaacctttcgatttggcttctacctaaccgaacatcaaagaattcatacgggtgagaagccctacaagtgtaaagagtgtggaaaggctttcattagaagggggaatttaaaagagcatttgaaaattcactctggtcttaaaccatatgattgcaaagagtgcggaaagagcttctcccgcaggggtcagttcaccgaacatcagaagattcacaccggcgttaagccatacaaatgtaaagagtgcggcaaggcgttcagccgctctgtggatttgcgcatacaccagagaatccacactggagaaaaaccttacgagtgcaaacagtgtggcaaggccttccggctgaattcccatttgaccgagcaccaacgaatacacacgggggaaaaaccttacgagtgtaaagtctgccgcaaagcgttccgtcagtatagccatctctaccagcatcagaagacacacaatgtgatatag

SEQ ID NO: 212290 - DNA, 1500 bp, synthetic construct
  misc_feature 1..1500: note = Description of Artificial Sequence: Synthetic coding sequence
  source 1..1500: mol_type = other DNA
atggcccagggcctggtgaccttccgggacgtggccatcgagttctctctcgaggaatggaagtgtctggaaccggctcagcgggacctttaccgtgaagtgaccctggaaaatttcggccacctcgcctccctgggactttcaatcagcaaacccgatgtggtgtcactgcttgagcaggggaaagagccctggatgatagctaatgacgtgactggtccttggtgccctgatctagagagtagatgcgaaaagttcctgcaaaaagatatctttgagattggcgcttttaactgggagatcatggagtctctgaagtgtagtgatctcgagggttcagattttcgagcagattgggagtgcgagggccagtttgagcgccaggtcaatgaagaatgctactttaagcaggtgaacgtgacttacggtcatatgccagtgttccagcatcacacttcccacaccgtgcggcagagtcgggaaaccggagagaaacttatggaatgccacgagtgtggtaaggcgttctccaggggttctcatctgatacaacaccaaaagatccataccggcgaaaaacctttcgggtgtaaagaatgcggcaaagccttttcaagggcttcccatctcgtccagcatcagagaatccatactggagagaaaccgtatgactgcaaagactgtggcaaggctttcggacggacatctgaattaatcctccaccagagactgcacactggcgtcaagccctacgaatgcaaagagtgcggcaagaccttcagacagcatagccagctgattctgcaccagcgaactcacacgggggagaagccctacgtctgcaaggactgtggcaaggcctttatccgaggaagccaacttactgtgcatcgcagaatccacacgggagcccggccctatgaatgtaaagagtgtgggaaagccttccgccaacactcccagcttactgtacaccagcgaatccacactggggaaaagccttatgagtgtaaggaatgcggcaaaggcttcatccactcttcggaagtgacgagacaccaacgcattcactctggagagaagccctatgagtgcaaagagtgcggaaaagcttttcgacagcacgcccagctgactcggcatcaaagagtgcacaccggggatcgcccttacgagtgcaaagactgcggcaaggctttttctagaagcagctatttgattcagcatcagcgcatccataccggagacaaaccatacgaatgcaaagagtgtggcaaggcctttatccgggtctctcaactgacccaccaccagcgtatccacacatgcgagaaaccatacgagtgccgcgagtgtggcatggcatttatccgctcttctcagctgacagaacatcagcggattcaccccggtattaagccatatgaatgcagggagtgcggccaagcattcattctcggatcccagcttatagaacactaccgcatccatacgggttag

SEQ ID NO: 212291 - DNA, 1620 bp, synthetic construct
  misc_feature 1..1620: note = Description of Artificial Sequence: Synthetic coding sequence
  source 1..1620: mol_type = other DNA
atgcggcggggcccctgggagcggtggagcctggccagccaccggctggacgcagggctatgtacatgtccacgggaggagtcgagagaaatccgagccgggcagatagtcttgaaagccatggcacagggcctcgtcactttcagggatgtcgccatcgaattctcactggaagagtggaaatgtctcgaacccgcacagcgggatctctaccgcgaggtcacgctggagaatttcggccatctagcctccttaggtctttcgatcagcaaacctgatgttgtgtctttactggagcaaggcaaagagccttggatgatagcgaacgacgtaacgggaccctggtgtcccgacctggaaagcagatgtgagaagttcctgcagaaagacatctttgagatcggtgcttttaactgggagattatggaaagtctgaagtgcagtgacctcgagggatctgattttcgcgctgactgggagtgcgagggccagttcgagagacaagtcaatgaggaatgttatttcaagcaggtcaatgtgacgtacggccatatgccagtgttccagcaccacaccagtcacacagtacgacagtctcgggaaaccggcgagaaacttatggagtgccacgagtgcggtaaagcattcagcagaggatcccatctcatccagcatcagaagattcacacgggcgaaaaacccttcggatgtaaggagtgcggcaaagccttctcccgagcctcccatctagttcaacaccaacgcattcatacaggagagaaaccttatgattgtaaagattgtggtaaagccttcggccggacatcagaactcattctgcaccagaggctgcacaccggagttaaaccatacgaatgcaaagagtgcgggaagacatttcgccagcattcacagttaatcctccaccaacgcactcacacaggcgagaagccatacgtgtgcaaggactgcgggaaggcttttatacgggggtctcagctgactgttcataggcgtatccacaccggggcccgaccctatgagtgtaaggaatgtgggaaggctttcagacaacacagccaactgaccgtgcatcaaagaatccacacgggggagaaaccgtatgaatgcaaagaatgtggaaaaggatttatccacagttctgaagtgacgaggcaccagcggatccactccggcgaaaagccgtatgaatgcaaagagtgtggcaaggccttccgccagcacgcccagctgactcgccatcagcgggtacacaccggagacagaccttatgaatgtaaagactgtggtaaagccttctctcgcagctcatacctcattcaacaccagcgcattcacacgggcgataagccttatgagtgcaaagagtgtgggaaggcctttattcgagtgagccagttaacccaccatcagcgaatccatacttgcgagaagccctacgagtgcagggaatgtggaatggcatttatcaggtcttcccagctgactgagcatcagcggattcatcctggcattaagccatacgagtgtagggaatgtggtcaggcgttcattctgggctcccagctgattgagcactacaggatccacaccgggtag

SEQ ID NO: 212292 - DNA, 1500 bp, synthetic construct
  misc_feature 1..1500: note = Description of Artificial Sequence: Synthetic coding sequence
  source 1..1500: mol_type = other DNA
atggcccagggcctggtgaccttccgggacgtggccatcgagttctcgctggaggaatggaaatgcttagagccagcacaacgggatctctaccgggaagttacgctcgagaacttcggccacctagccagtctgggcttatcaattagcaagcccgatgtcgtgagcctgctggagcagggaaaggagccttggatgattgcaaatgatgtaacaggtccgtggtgccctgatctggaaagccgctgtgaaaagtttctgcaaaaggatatattcgaaattggcgccttcaattgggaaataatggagagccttaaatgttcagacctggagggcagcgatttccgggccgattgggaatgcgaaggccaatttgagcggcaagtaaatgaagaatgctactttaagcaggtgaatgtcacctacggccatatgcccgtgttccagcatcatactagccataccgttaggcaatctcgtgaaacaggggaaaagctgatggaatgtcatgagtgtggcaaagcctttagccgggggagccatttgattcaacatcaaaaaatccacactggggagaaaccttttggctgcaaagagtgtgggaaagccttcagccgggcatctcatctcgtccagcaccaaaggatccacaccggagagaaaccttacgactgcaaggattgtggtaaggcgtttggacgcaccagcgaactgatattacaccaacgccttcatactggagtcaagccctacgagtgcaaagagtgtggtaagaccttccgccaacatagccagttaatattgcatcagaggactcacacaggggaaaagccatatgtgtgcaaggactgtggtaaggccttcataaggggctctcagctgactgtgcaccggagaattcatacaggggctcggccatacgagtgtaaagaatgcggcaaggcctttaggcaacactcccaattgacggtgcaccagagaatccacacgggcgagaaaccttacgaatgtaaggaatgtggcaaggggtttatccactccagcgaagtgactcggcaccagcggattcacagcggagagaagccctatgagtgtaaggaatgtggaaaggcatttaggcagcacgcgcaacttaccaggcaccagagggtccacacgggggacaggccatatgaatgtaaagattgcggcaaggccttcagcagatcctcctacctgatccagcatcagcggatccataccggtgataagccgtacgagtgtaaggagtgcggcaaggcattcatccgtgtgtcccagctgactcaccaccagcgcatccatacatgcgaaaagccctacgagtgccgcgaatgcggtatggcttttatccgatcaagccaattaactgaacaccagcgcatccatccagggatcaagccctatgagtgtagggagtgcggacaggcttttattctgggcagccagctaattgaacactacagaattcacacaggctag

SEQ ID NO: 212293 - DNA, 2061 bp, synthetic construct
  misc_feature 1..2061: note = Description of Artificial Sequence: Synthetic coding sequence
  source 1..2061: mol_type = other DNA
atgaccgagagccagggcaccgtgaccttcaaggacgtggccatcgattttacccaggaggagtggaagcgactcgatcctgcccaacgaaagctctaccgcaacgttatgctcgagaattataacaacctgatcactgtgggctatccgtttaccaagcctgacgtaatcttcaagctcgaacaggaagaagagccctgggtgatggaggaggaggtgctaaggagacactggcaaggggaaatttggggtgtagacgagcaccagaaaaatcaggaccgcttactgcgtcaggtagaggtgaaatttcagaagaccctgacggaagagaaaggcaatgagtgtcaaaagaagttcgccaacgttttcccattgaacagcgatttcttcccatctaggcataatctatacgaatacgacttgtttggaaaatgtcttgaacataatttcgattgccacaacaacgtaaaatgcctgatgaggaaggaacattgcgaatacaacgaacctgttaagtcatatggaaatagttcctcccattttgtgattaccccttttaaatgtaaccactgcgggaaaggctttaaccaaacactagatctgatcaggcacctgaggattcacacaggcgaaaagccatacgaatgctctaactgcaggaaggcgttctcccacaaagaaaagctgatcaagcactacaagattcattcaagggagcagtcttacaaatgtaacgaatgcggcaaggccttcataaaaatgtcaaacctgatcagacaccagcggatccacactggggaaaaaccctacgcttgtaaggaatgcgagaagtctttttcccagaagagtaacttgattgaccacgagaagattcacaccggcgagaaaccatatgaatgcaatgagtgtggaaaggccttttctcagaagcagtctctgatcgctcatcaaaaggtgcatacaggggagaagccctacgcgtgcaatgagtgtgggaaggcatttcctaggattgcctctctcgctctgcacatgaggtcacacacgggcgagaaaccatacaaatgtgacaagtgtggaaaggcattcagccagtttagcatgttgatcatccacgtgaggatccacactggcgaaaaaccttatgagtgcaacgaatgcggaaaagccttctcacagtctagtgccctaacagtacacatgcgtagccatactggagagaagccatacgagtgcaaagaatgcagaaaagccttttctcataagaaaaattttatcacccatcagaaaatccacacgcgggaaaagccatatgaatgtaatgagtgcgggaaagcatttattcagatgtctaatctggtcagacaccagaggatacatactggcgaaaaaccttatatatgcaaggagtgcggtaaggccttttctcaaaagtccaatctgatcgcacatgaaaagatacacagcggcgagaagccatacgagtgtaacgagtgcggcaaggcctttagccagaaacagaacttcatcactcaccagaaggttcacactggtgaaaagccatatgactgcaatgagtgtggcaaagccttctctcagatcgcctccctgaccctgcaccttcgaagtcatacaggggagaagccatacgagtgtgacaaatgcggaaaggctttctcccagtgtagcttgctgaatttgcatatgcggtcccatacaggcgagaaaccatatgtctgcaacgaatgtgggaaagccttcagccagcggactagcctcatcgtacacatgcgaggccacacaggtgaaaagccatatgagtgtaacaagtgtggaaaagcattcagccagtccagcagcctcacaatccatattcgtgggcacaccggcgagaagccctttgactgcagcaaatgtgggaaggctttctcccagatcagtagcttgaccctgcacatgcggaagcacaccggcgagaaaccttaccactgtattgaatgtggtaaggccttcagccagaaatcccatctcgtgcggcaccaacggatccacacccattag

SEQ ID NO: 212294 - DNA, 1029 bp, synthetic construct
  misc_feature 1..1029: note = Description of Artificial Sequence: Synthetic coding sequence
  source 1..1029: mol_type = other DNA
atgcggagccacaccggcgagaagccctacaagtgcgacaagtgcggaaaggcttttagtcagttctctatgctgattatccacgttcgcattcataccggcgagaagccttatgagtgtaacgagtgtggtaaggcattttcacagagctcagcacttacagtgcatatgaggtcacatacaggggaaaagccttacgaatgcaaagagtgtagaaaggcattcagccacaagaaaaacttcattactcatcagaagattcatacgagggagaagccgtacgagtgtaatgagtgcggcaaagctttcattcagatgtcaaatctggttcgccatcagcggattcacaccggtgaaaagccatacatttgcaaggagtgtggaaaggcgttttcgcaaaaatctaacctaatagctcatgagaaaatccatagtggcgagaaaccttatgagtgtaatgagtgcggaaaggcattctcccagaagcagaactttataacacatcaaaaagtccacaccggcgaaaagccatacgattgcaacgaatgcggcaaagccttcagccagattgccagcctaacactgcacctcaggtctcacactggagaaaaaccgtacgagtgcgacaagtgcggcaaagccttttcacaatgtagtctgctcaatctgcacatgaggtctcatactggggagaaaccgtatgtctgcaacgagtgcggaaaagctttctcacagcggacatcgctcattgtgcacatgcggggacacaccggcgagaagccttacgaatgcaataaatgcggcaaggcttttagccaatctagtagtctcacaatccacattcgcgggcacactggggaaaaacccttcgactgtagcaagtgtgggaaggccttctctcagatcagctcgctgacactccacatgaggaaacataccggagaaaagccctatcactgcatcgagtgtgggaaggcattcagtcaaaaatcacatctggtccgccatcagaggattcatacacattag

SEQ ID NO: 212295 - DNA, 1584 bp, synthetic construct
  misc_feature 1..1584: note = Description of Artificial Sequence: Synthetic coding sequence
  source 1..1584: mol_type = other DNA
atgcggaaggagcactgcgagtacaacgagcccgtgaagagctacggcaattcttcctcacacttcgttatcactccgttcaaatgtaaccactgtggcaaaggctttaaccagaccctcgaccttatccgccacctcaggatccatacaggagaaaaaccctatgaatgcagcaactgtcgcaaagcgttcagccacaaagagaagctgatcaagcattataaaatccattcaagagaacagtcatataaatgcaacgaatgcggaaaagcctttatcaaaatgtccaaccttattcggcatcaacgtatccataccggtgaaaaaccttacgcatgcaaagagtgtgaaaagtccttcagccagaagtccaacctgatcgatcatgagaagatccacactggcgaaaaaccatatgagtgcaatgagtgcggcaaggctttcagccagaaacagagtctcatagcgcaccaaaaggtgcatactggagaaaagccatatgcatgcaatgaatgtggtaaagcgttccccagaatcgctagcttggctcttcatatgcgcagtcatactggagagaagccctataaatgtgataaatgtggtaaagctttttcacagtttagcatgctgattatacacgtcaggatccacacgggagagaaaccttatgagtgtaatgagtgtggaaaagcatttagccagagttctgctctgaccgtccatatgaggagccacacgggcgagaagccttacgaatgcaaagaatgcaggaaggcttttagccataagaagaatttcatcactcatcaaaaaatccacactcgggagaaaccctatgaatgcaacgagtgcggcaaagccttcatacaaatgtcaaatcttgtgcgccaccagcgcatacacacaggtgagaaaccgtacatctgcaaagagtgtggcaaagcgttttcacagaagtccaacctgatcgcccacgagaagatccactctggtgaaaagccatacgagtgtaacgaatgcggtaaggcattttcccaaaagcaaaactttattacacaccaaaaggtccataccggggaaaaaccctacgactgcaacgagtgtggaaaggccttcagccagatcgcatcgttgaccttacatctgcgtagccacacgggcgagaaaccttacgaatgtgataagtgcggaaaagccttctcacaatgcagcttgctgaacctgcatatgcgttctcacacaggcgagaaaccatatgtgtgcaacgaatgcggaaaggcctttagtcagcgcaccagcttgattgtgcatatgaggggtcataccggcgagaaaccttatgaatgcaacaaatgcggaaaggcttttagtcagtcgagttccctcaccattcatataagaggccatactggtgagaagcccttcgattgcagtaagtgcggaaaggccttctcccaaatatctagtttaactctgcacatgcggaaacacaccggtgagaagccttaccactgtatcgaatgcgggaaggcttttagtcaaaagtctcaccttgtaaggcatcagagaatacacacccattag

SEQ ID NO: 212296 - DNA, 1551 bp, synthetic construct
  misc_feature 1..1551: note = Description of Artificial Sequence: Synthetic coding sequence
  source 1..1551: mol_type = other DNA
atgttcgagcagctgaagcccatcgagccccgggactgctggcgggaggctcgcgttaaaaagaaaccggttacgtttgaagacgttgccgtgaattttacccaagaagagtgggactgtttagacgccagccagcgggtgctgtaccaggatgtcatgtccgagacatttaaaaacctgactagcgttgcgaggattttcctgcataaacccgagctgatcacgaagctggaacaggaggaagagcagtggcgagaattcgtgcatctgcccaacaccgagggcctgagtgagggcaagaagaaagaactgcgagaacagcaccccagcctgagggatgagggaacaagcgacgataaagtctttttggcatgccggggagcaggccaatgtcccctctcagcccctgccgggaccatggatagaaccagagtgctgcaagcgagtcaagcaggccctccgttcttctgctatacctgtgggaaatgtttcagccgacgctcttacctctactcgcaccagtttgttcataatcctaagctgacaaactcatgtagccaatgcggaaaactgttcagatcccccaaatctttgtcttatcaccgaagaatgcacctaggggagcgccccttttgctgcaccctctgcgacaagacctattgtgacgcatccggcctctcccgacaccggcgggttcacctcggctatcggccccattcgtgctccgtgtgtggcaagagctttcgcgatcagtctgagctcaagcggcatcaaaagattcaccagaaccaggaacccgtggatgggaaccaagagtgcaccctacgcattcccgggactcaggctgagtttcaaacccctattgccagaagccagaggtcgattcagggtcttttagatgtcaatcacgcccctgtggcgcgaagtcaggagcccatctttcgtactgagggacccatggctcagaatcaggcatcggtgctgaaaaaccaagctccagtgacaaggacccaagcaccgattacaggcacactgtgccaggacgcccgttctaactcccaccccgtcaagccctcaaggctcaacgtgttttgctgccctcactgttccctgacattttccaaaaagagctatcttagcagacatcagaaggctcatctgactgaacctccaaattactgtttccactgctcaaaaagtttcagttccttcagcaggcttgttcggcatcagcagacacattggaaacagaaatcatatctatgtccaatctgcgatctgagcttcggggagaaagagggcctcatggaccactggcgaggctacaaaggaaaagacttatgtcagagctctcaccataaatgccgtgtcatcctgggacaatggctggggttctctcatgatgtcccgacgatggccggcgaggagtggaaacatggtggggatcaaagtccacccaggatccacacaccacgacgacgcgggcttcgagagaaggcgtgcaagggagacaagactaaggaagccgtctcaatcctgaaacacaagtag

SEQ ID NO: 212297 - DNA, 1551 bp, synthetic construct
  misc_feature 1..1551: note = Description of Artificial Sequence: Synthetic coding sequence
  source 1..1551: mol_type = other DNA
atgttcgagcagctgaagcccatcgagccccgggactgctggcgggaggccagggtcaagaaaaagcccgtgacttttgaggacgttgccgtgaatttcacccaggaggagtgggattgtctggacgcttcacaaagagttctatatcaggacgttatgtccgaaacattcaagaatctgacatcagtggcaagaatcttcctacacaagccagagctgattaccaaactggagcaggaggaggagcagtggcgcgaattcgtgcacttgcccaacaccgagggtctcagcgaggggaaaaaaaaggaactcagagagcaacacccctccttaagggacgaggggacgagcgacgataaagtgttcctggcatgtaggggcgctggacagtgcccgctgtctgccccagccggaacaatggacagaacgagagtcttacaagcctctcaagccgggcctccatttttttgttatacgtgtggcaagtgcttcagtcgaaggtcctatctgtactcgcaccaatttgtccacaatccgaagctgactaattcatgtagccaatgcgggaaactgttccggtcgcctaagagcctctcctaccaccgtcgaatgcatctaggcgagcgcccattttgctgtaccctatgtgacaagacatactgtgatgccagtgggctgtcacggcaccgacgtgtccatctgggatacaggccgcactcctgtagcgtgtgcggaaagagttttcgcgaccagtccgaactgaaacgccaccaaaaaatacatcagaatcaggagccagtcgatggcaatcaggaatgcactttgcggataccaggtacccaggctgaatttcagactcccatcgcccgatcacagcgttctatacagggtctgttggatgtgaaccacgccccggtagcacgaagccaggagcccatcttcagaacggaaggtccgatggcgcagaaccaagccagcgtgttgaagaaccaggcacccgtgacacgaacgcaagctcccattaccgggaccttgtgccaggacgcccgttcaaactcacaccctgttaaacctagtagactgaatgtcttttgctgtccgcattgtagcctgacatttagtaagaagtcctatctgtctcggcaccagaaagcacacctcactgagccacctaactattgtttccattgctcaaaatctttcagctcattctctcggttggttaggcaccagcagacccactggaagcagaagagctacttgtgcccaatctgtgacttaagcttcggagaaaaggagggcctgatggaccattggaggggatataaagggaaggacctctgccaatcgtcccatcataagtgtagagttatcctgggtcagtggctgggattctctcatgatgtccctaccatggccggcgaggagtggaagcatggtggagaccaatcccctcccagaattcacactccaaggcgcagaggcctgagggagaaggcttgtaagggagacaagaccaaggaagcggtgagtatcttgaaacataaatag

SEQ ID NO: 212298 - DNA, 1551 bp, synthetic construct
  misc_feature 1..1551: note = Description of Artificial Sequence: Synthetic coding sequence
  source 1..1551: mol_type = other DNA
atgttcgagcagctgaagcccatcgagccccgggactgctggcgggaggcccgcgttaaaaaaaagccagtcacattcgaggacgttgctgtaaattttacccaggaagagtgggactgtctcgacgctagccagcgggtgctgtaccaggatgtaatgagtgaaactttcaagaatttaacctctgtggcccggatctttctccataagccagagctcatcacaaagttagaacaggaggaagaacaatggcgcgagtttgtgcacctgcccaatacagaaggcttaagtgagggcaagaagaaggaactgcgtgagcagcatccttctctgcgtgatgagggaacatctgatgacaaagtcttcctagcctgtcgcggtgcaggccagtgtcctctcagcgctccagccggaactatggatcggacacgcgtactgcaggctagccaggcgggccccccattcttctgctacacttgcggaaagtgcttttcacggagatcatacctgtactcccaccaattcgtgcataatcccaaactgacaaatagctgctcacagtgtggtaaattattccgatctcctaagtcactgagctaccatcggcgcatgcacttaggcgagcggcctttttgttgcactctgtgcgacaaaacgtactgcgacgcaagtggcctgtccaggcataggagagtgcatttgggataccggccccatagctgctccgtatgcggaaaatcgtttcgggatcagagtgagctcaaacgtcaccagaagatccaccaaaaccaggaacccgtcgacgggaatcaagaatgcacgctccggatcccaggaacacaagcggagtttcaaacgcccatagcccggagccagcggagtatccagggtctgctagacgtgaatcatgcccctgtcgccaggtctcaggaaccaattttccgcactgagggcccaatggcccagaaccaggcgtccgtcctgaaaaatcaggctccagtgactcgaacacaggcacctatcacaggcacgctgtgccaggatgctcgttctaatagtcaccctgtgaaaccatcaaggctgaacgtgttctgctgtcctcactgcagtttaactttctcaaagaagtcttatctgtcacgccaccaaaaggctcacttgaccgaaccccctaactactgctttcattgctcaaagtcgttttcttccttctcaagattggttcgacaccagcagacccattggaagcagaagtcctatctgtgtccaatatgtgatttgtcttttggggagaaagagggccttatggatcattggcgtggatacaagggcaaggatctttgccagagcagtcaccacaaatgtagggttattctggggcagtggcttgggtttagtcatgatgtccctactatggccggtgaggaatggaaacacggaggagaccagtcccctccaagaatccacacacccaggcgccgtgggctgcgggagaaggcttgtaagggagataaaacgaaggaggcagtttctatccttaaacataagtag

SEQ ID NO: 212299 - DNA, 1551 bp, synthetic construct
  misc_feature 1..1551: note = Description of Artificial Sequence: Synthetic coding sequence
  source 1..1551: mol_type = other DNA
atgttcgagcagctgaagcccatcgagccccgggactgctggcgggaagccagggtgaaaaaaaagcccgttaccttcgaagatgtggctgtaaacttcacccaagaagagtgggattgcctcgacgcgtcgcagagagtgctttaccaggacgttatgagcgaaacctttaaaaacctgacgtccgttgcaagaatcttcctgcacaaacccgagttgatcactaaactggaacaggaggaggaacagtggagggagtttgtgcatctgccaaacaccgagggcttaagcgagggtaagaagaaagaactgcgggagcagcaccccagtctaagagatgagggtacttcagacgacaaagtgtttcttgcctgccggggagctgggcagtgccctttaagcgcccctgctggtaccatggaccggacaagggtgctgcaggcctctcaggcaggccccccattcttctgttatacgtgcggaaaatgtttcagcaggcggagttacctgtacagtcaccaattcgtccataaccccaaattgacaaatagttgctcccagtgcggcaaactattccgcagccctaagtctctgagctaccatcgtcgaatgcatctaggcgaaagacccttctgttgcactttgtgtgacaagacctattgtgatgcctctggcctttcgcggcaccggcgggtgcacttgggctatagaccacattcttgcagtgtgtgcggtaaatcctttcgagaccagtcagagctcaagagacaccagaaaatccaccagaaccaagaaccggtggacggtaatcaggaatgtacgttgcggatccccgggacgcaagcagagtttcagacccctatagcaaggtcgcagagaagcatccaaggactccttgatgtgaatcatgcaccggtggctcggtcccaggagcccatcttcagaacggagggtccaatggcacagaaccaagctagtgtgctaaaaaaccaggctccagtcacaagaactcaggccccaatcactggcaccctgtgccaggatgccaggtccaactcacatcctgttaagccctcaagattaaacgtgttctgctgccctcattgcagcttaaccttctctaaaaagagttacctgagtaggcaccagaaagcccacttgactgaacccccaaattattgctttcattgttctaagagtttctcctctttttcccggttggttcggcatcagcagactcattggaagcagaagtcatatctgtgtcctatctgcgacctgtcattcggggagaaagagggcctgatggaccactggcggggctacaagggaaaagatctgtgccagtcttctcatcataagtgtcgagttattctgggacagtggcttggcttcagccatgacgtccctactatggccggggaagagtggaaacatggtggggatcaaagcccccctaggatacacacacctcggaggcgcggtctgagagaaaaagcttgcaaaggtgacaagacaaaggaggccgtgtccatcctaaagcataagtag

SEQ ID NO: 212300 - DNA, 636 bp, synthetic construct
  misc_feature 1..636: note = Description of Artificial Sequence: Synthetic coding sequence
  source 1..636: mol_type = other DNA
tgagcccggagccaggagcccatcttccggaccgagggccccatggctcagaaccaggcatcagtgctgaaaaaccaggcgcctgtgacccgcacgcaggcgccaattaccggcaccctgtgccaggacgcgcgcagtaattcccaccctgttaagccatctcgcttgaatgtgttctgttgcccccactgtagcctgacattttcaaaaaaatcatatctttctcggcaccagaaggcacacttaaccgagcctcctaactactgcttccactgctcgaaatcttttagttccttctctcgcttggttaggcatcaacagacccactggaaacagaaatcttacctgtgcccaatatgtgatttatctttcggcgagaaagaggggctgatggaccattggcgtggctacaaaggcaaagatttgtgtcagtcctcccaccataagtgtagggtcatcctgggacagtggttgggtttctcacacgatgtccctaccatggcgggtgaggaatggaagcatgggggtgatcagtccccccctcggatacatactccacggcgcaggggactcagggaaaaggcatgtaagggtgataaaaccaaagaggctgtatccattttgaaacataagtag

SEQ ID NO: 212301 - DNA, 1551 bp, synthetic construct
  misc_feature 1..1551: note = Description of Artificial Sequence: Synthetic coding sequence
  source 1..1551: mol_type = other DNA
atgttcgagcagctgaagcccatcgagccccgggactgctggcgggaggctcgtgtgaagaagaaacccgtgaccttcgaggacgtggcagtgaactttacccaggaggaatgggattgcctggacgccagccaaagggttctttatcaggatgtgatgagtgaaaccttcaaaaaccttaccagcgttgctcgtatcttcctgcacaagcctgagcttataacgaagctcgagcaagaagaagagcaatggagggaatttgtgcatttgccaaataccgagggtctgagcgagggaaagaagaaggagctgcgggagcaacaccccagcctccgagacgaaggaacgtccgatgataaggtgttccttgcgtgtcgcggagccggacagtgtccattgtcggcccccgccggaacgatggacaggactcgcgtcttacaagcaagccaggccggcccccccttcttctgttacacgtgtggtaagtgcttctccagacgttcttacctttactcccatcagtttgttcataaccctaagctcacaaatagctgttcccagtgcgggaaacttttccgaagccccaaatcattgagctaccacagacgtatgcacctgggggagcggcctttttgctgtaccctgtgcgacaaaacctactgtgatgcaagcggactgtcccggcataggcgcgtccacttgggctatagaccccacagttgcagcgtttgcgggaagtcatttcgcgatcagtcagaattgaaacgccatcagaagattcaccagaatcaggagccagtcgacgggaatcaggaatgtacgcttcggatccccggtacccaagctgagttccagacaccaattgcaaggtcacaaagatccattcagggcctccttgatgtaaatcatgcgccagttgctcggagtcaagaacccatcttccgcaccgaaggacccatggcccaaaatcaggctagtgtgctgaagaaccaagccccagtgaccagaacgcaggctcccataacggggactctgtgtcaggatgctcggtccaactctcatcctgtcaagccttccaggctcaacgtcttttgctgtccccactgtagtctgacattcagcaaaaagtcatacctatccagacatcagaaggctcatctgactgagcccccaaattattgtttccactgcagcaaaagtttttcttcattctctaggctggtccgccaccagcaaacgcactggaaacagaagtcctacctctgccctatttgcgatctgtcatttggggagaaggagggcctaatggaccactggcgcgggtacaagggcaaagatctgtgccagtccagtcatcacaagtgtcgagtgatcctgggacagtggcttggcttctcccatgacgtacccacaatggctggagaagagtggaagcatggcggcgaccagagtcctcccaggatccacaccccccgcaggcgcggcctacgcgaaaaggcctgtaagggggacaaaactaaagaggcggtgagcattttgaaacacaagtag

SEQ ID NO: 212302 - DNA, 1551 bp, synthetic construct
  misc_feature 1..1551: note = Description of Artificial Sequence: Synthetic coding sequence
  source 1..1551: mol_type = other DNA
atgttcgagcagctgaagcccatcgagccccgggactgctggcgggaagcccgggttaagaaaaagcccgtaaccttcgaggatgttgcggtcaactttacccaggaagagtgggactgcctcgacgcctctcagcgggtgctgtatcaggatgtgatgtcagagacatttaaaaatctgacctcagtcgcccgcatttttctccacaagcctgaactcatcacgaaactggagcaggaggaggaacagtggagagagtttgtgcacctaccgaacacggaaggcttgagtgagggaaagaaaaaagagctgcgcgagcaacacccttcattgcgtgacgaaggcacttccgacgacaaagtgttcttggcatgtagaggagccggccagtgccctctgtctgcccccgcaggcaccatggatagaactcgggtcctgcaagccagccaggccggtccacccttcttctgctacacgtgtggaaaatgtttctcacgtcgctcctacctgtatagtcatcagttcgttcacaacccaaaattgactaacagctgctcacaatgtgggaaactgtttcgttctcccaagagcctatcatatcatagacggatgcacctgggagaaagacctttttgctgtactctgtgtgacaaaacttattgcgatgcgagcggacttagcaggcatcggagagtacacctgggatacaggccacactcctgctctgtgtgtggtaaatcttttagagatcagtccgagttaaaacgccaccagaagatccatcaaaatcaggagccagtggacggcaatcaagagtgcaccctgagaatcccgggcacgcaggccgaattccaaacacccatagcccgttcgcagaggtccattcagggccttctcgacgtgaaccacgcacctgtggcccgatcacaggagccaatatttagaactgaaggtcctatggcacaaaaccaagcctcggtacttaaaaatcaggcccctgtcaccagaacgcaagctcctataactggcacactgtgtcaggacgccagatcgaatagccatcctgtcaagccctcccggcttaacgtgttttgctgtccacactgcagcctaacatttagtaagaagtcttatctgtcgcgccaccagaaggcgcaccttacggagccccctaattattgcttccactgctcgaagtcttttagctccttcagtcgactcgtccgccatcagcagacccattggaaacagaaatcttacttatgtcccatctgcgacctctcattcggggaaaaagaagggctgatggatcactggagggggtacaaaggcaaggacttgtgtcagtcaagccaccataagtgtcgggtcatcctgggacagtggctcggtttctctcacgatgtaccaactatggctggggaagagtggaagcatgggggcgatcagagtccaccccgcatccacacgccacggaggcgggggctgcgcgagaaggcgtgcaagggggataaaacaaaggaggccgtgagcatcctgaagcataaatag

SEQ ID NO: 212303 - DNA, 1551 bp, synthetic construct
  misc_feature 1..1551: note = Description of Artificial Sequence: Synthetic coding sequence
  source 1..1551: mol_type = other DNA
atgttcgagcagctgaagcccatcgagccccgggactgctggcgggaggctagagttaaaaaaaagccagtgacattcgaagacgtcgcagtaaacttcacacaggaagagtgggactgccttgatgcctcccagcgagtactctatcaggacgtcatgagcgaaacattcaagaacctaaccagcgtggccaggattttcttacacaagccagaattaataaccaagctggagcaggaggaggagcagtggcgcgaattcgtacacctccccaatacagaagggctgagcgagggaaagaagaaggagctccgcgagcagcacccctctctccgcgacgagggcacctccgatgataaagtctttttggcttgccgaggagcaggacaatgccccctgagtgctccagcagggacgatggaccgtactagagtgctgcaagcctcacaggcaggtccaccttttttctgctatacttgcggaaagtgcttttccagacgctcttacctgtacagtcatcagttcgttcataaccccaaactgacaaattcatgtagccagtgcgggaaactgttccgcagtccaaaatcactgagttaccaccgcagaatgcaccttggcgagcgacccttctgttgtactctgtgtgacaaaacctattgtgacgcctcaggactgagtcggcatcggagggtacacctgggatacaggcctcattcatgttctgtatgcggtaaatccttcagagatcagagcgaattaaaacgacatcagaaaatccaccagaatcaagaacccgtcgatggaaatcaggaatgtacattgcgtattccgggcacacaggccgaattccaaaccccaatagcccggtcccagcgctcaatccaggggctgctcgacgttaaccatgctcccgtggccaggtcccaagaaccaatctttagaacagaagggcccatggcccaaaatcaggcaagtgtcctgaagaatcaggcgcccgttactcgcacacaggcccctattactgggacgttgtgccaagatgccagaagtaatagtcaccctgtgaagccgtcacggttgaacgttttctgctgcccccactgctcactgacatttagcaaaaagtcttacttgtctagacaccagaaggcccatcttactgagcctcccaattactgtttccattgctcgaaatcattttccagcttttctaggctcgtgcggcaccagcagactcattggaagcaaaaaagttacctgtgccccatttgtgacctgtcattcggggaaaaggagggtcttatggatcactggagaggctataaaggcaaggacttgtgtcagagctcgcatcataagtgcagggtcatcctggggcagtggctgggattttctcatgatgtcccgactatggccggcgaggaatggaagcacggtggcgatcaatccccaccaaggattcatactcctcgtagacgagggctgagagagaaggcatgcaagggcgataaaaccaaggaggcggtgagtattcttaagcacaaatag

SEQ ID NO: 212304 - DNA, 1551 bp, synthetic construct
  misc_feature 1..1551: note = Description of Artificial Sequence: Synthetic coding sequence
  source 1..1551: mol_type = other DNA
atgttcgagcagctgaagcccatcgagccccgggactgctggcgggaggccagagtaaagaaaaaacctgtcacatttgaggatgtagcagtcaatttcacccaggaagagtgggattgtctcgacgcctctcaaagagttttgtatcaggacgtgatgtcagaaaccttcaagaacctgaccagtgttgcaaggatctttctgcacaagccagaactgatcaccaagctggaacaagaagaagaacagtggagagaattcgtgcatctccctaacaccgagggcttgtcagaaggcaagaagaaagagcttagagagcagcatccctctttacgtgacgagggtacgtccgatgacaaagtgttccttgcctgtcgcggagctggacagtgccctctgtcagctcctgccggcactatggaccggacacgggtgctgcaggcgtcccaggcgggccctccttttttttgctatacctgcgggaagtgcttttctagacgaagctacctttattcacaccagtttgtccataaccctaaactcaccaacagctgtagccaatgcggcaagctgttcaggtctccaaagtccctgtcttatcaccggcggatgcacctgggcgagagacctttctgttgtaccttatgcgataaaacttattgcgatgcatccggcctcagtaggcaccgcagagtgcacctggggtacagaccccacagctgtagcgtgtgcggcaagagttttcgggatcaatcagagttaaagcgccaccagaaaattcaccaaaaccaagagccggtggacgggaatcaagaatgcacactccgcattcccggcactcaggcagagttccagactcctattgcccggagtcagcggtccatccagggtctgttggatgttaaccatgcacccgtagcccgcagtcaggaaccaatctttcgcacggagggtcctatggcccagaaccaggccagcgtgcttaagaatcaggccccagtgacacggacacaggctcctatcaccggtactctgtgtcaggacgctcgaagcaactctcaccctgtcaaaccttctcgcctgaacgtcttctgttgtccccactgttcattgaccttttcgaaaaaaagctatctgtcccggcatcaaaaagcacacttaacagagcctccaaactattgtttccattgcagcaagagtttttcgtcgttctcccgcctcgtaaggcatcagcagacccactggaagcagaagtcctacttatgcccaatatgtgacctgtcctttggagaaaaggagggccttatggatcactggagagggtacaaaggtaaggatctgtgccaatctagtcatcacaagtgcagggtgatcctgggccagtggctcggcttttctcacgatgtccccaccatggcaggggaggaatggaagcacggaggagatcagagccccccccgtatacacacaccccggagaagaggcctccgggagaaggcttgtaagggggataagacaaaggaagccgtcagcatcctcaaacataaatag

SEQ ID NO: 212305 - DNA, 1611 bp, synthetic construct
  misc_feature 1..1611: note = Description of Artificial Sequence: Synthetic coding sequence
  source 1..1611: mol_type = other DNA
atgttcgagcagctgaagcccatcgagcccgtgcagaagaccctgccatgggtgggcgaggtcgccgccaccctgcaggaggctatgaagcgagattgttggcgagaagcccgcgtcaaaaaaaaacctgtgaccttcgaagatgttgcagttaatttcacacaggaggagtgggactgccttgatgcttctcagcgagtgctgtatcaggacgtgatgtccgagacattcaaaaacctgaccagtgtggcccgcatctttctgcacaaacctgagctgatcaccaaactagaacaggaagaggagcagtggcgcgagttcgtccacctcccaaataccgaaggcctctcagagggaaagaagaaggaactgagagagcagcacccttcactccgggatgaagggacctctgatgacaaagtgttcctggcctgtcggggtgctggccagtgtcccctttcagctcccgctggcaccatggataggactcgtgtgttacaggccagccaagccggacctccatttttctgttatacttgcggcaagtgcttttccagaagatcttatctttactcccatcagttcgttcacaaccctaagctgaccaattcatgctcacaatgtggcaaactgtttaggagccccaagtctctctcctatcacagacgcatgcacctgggagagaggcccttttgttgtacattgtgtgacaagacatactgtgacgcatccggattatcaaggcaccgccgggtgcacctggggtatcggccccactcctgttccgtttgcggcaaatctttccgagaccagtcagagttaaaacgacaccaaaaaatccaccagaatcaagaacccgtggacggcaaccaggaatgcacactgaggatcccgggcacccaagccgaatttcagacccccatcgctaggagccagcggtccattcagggactgctagacgtgaatcacgctcccgtggctcgctcccaggaaccgattttccgaactgaggggcccatggcccagaaccaggcctctgtgttaaagaaccaggcccccgtcacacgcactcaagcacctataactggcacgttgtgccaggacgcccggtccaatagccatccggtgaaaccatcaagactcaacgtcttctgctgtccccactgcagcctgaccttctctaaaaagtcttacctaagtcgccaccaaaaggcccatctaaccgagcctccaaattactgttttcattgctctaaaagtttctcgtctttctctagattagttcggcatcagcagactcattggaagcagaagtcttacttgtgccccatctgtgacctgtcctttggggaaaaggagggattaatggaccattggcggggatataaggggaaagacctgtgccaatctagccatcacaaatgccgggttatcctcgggcaatggctcggtttttcccacgatgtgccaacgatggcaggagaggaatggaagcacggcggcgaccaatctcccccaaggattcatactcctagaaggcgtggtctgcgagagaaggcatgcaagggcgataaaactaaagaagcagtgtccatcctaaagcataagtag

SEQ ID NO: 212306 - DNA, 1551 bp, synthetic construct
  misc_feature 1..1551: note = Description of Artificial Sequence: Synthetic coding sequence
  source 1..1551: mol_type = other DNA
atgttcgagcagctgaagcccatcgagccccgggactgctggcgggaagcacgggtgaaaaagaagcctgtgacctttgaggacgtagcggtgaattttacacaagaagagtgggattgtctagatgcatcacagagggtcctataccaggacgtcatgtccgagacttttaaaaacctgacaagcgtcgcacggattttcctccataagcctgagctgatcacaaaactcgaacaggaagaagaacaatggcgggaatttgtgcatttgcccaacactgagggtctgagcgaaggaaaaaagaaggagctgagagaacaacatccaagtcttagagatgaaggtacctctgacgataaggtgttcttggcatgccggggcgctggccagtgtccattgagcgctcctgcaggtactatggataggacccgggtgctacaagcctcgcaggcgggcccaccattcttctgctatacttgtggcaagtgctttagtagacgctcatacctgtattcacatcaatttgtgcacaatcctaagttgactaattcttgttcacagtgcggcaagttgttccgctctccgaagtctctgtcctatcatcgaagaatgcacctaggtgaaaggcctttctgctgtacactctgcgataagacttactgtgacgcaagcggcttgtcccgtcaccgccgtgtgcacctcgggtacaggcctcattcttgctctgtttgcggaaaatcttttcgcgaccaatctgagctcaagcgacatcagaagattcatcagaaccaagagcccgtagacggaaaccaggagtgtacccttcgcattcctggcacgcaggccgagttccagacccccatcgctcgatctcagaggtctatacagggcctgctagatgtgaaccacgctcctgttgcacgcagtcaggagccgatctttaggactgaagggcctatggcacaaaatcaggccagcgtgctgaaaaatcaggccccagttacacgcacccaggcaccgataaccggaacattgtgccaggatgccaggtctaactcccacccggtgaaaccctctcggctgaacgttttctgttgcccacactgctcgttgactttctccaagaaaagctacttgtctagacaccagaaagcacatctcacagagcctcctaattactgctttcattgcagtaaatccttttcttcttttagtcgactggtgaggcatcagcaaactcactggaagcaaaaaagttacctgtgccctatatgcgacctgtcctttggcgaaaaggagggcctgatggatcattggcggggttataaggggaaagatttgtgccagagttcacatcacaagtgtagggtgatcctgggccagtggctcggattttcacacgatgtgccaactatggccggagaggagtggaagcacggaggcgaccaaagcccccctcggatccatacccctcgcagacggggactgagggagaaggcctgtaagggcgataaaacaaaagaggcagtgtctattctgaagcataaatag

SEQ ID NO: 212307 - DNA, 1356 bp, synthetic construct
  misc_feature 1..1356: note = Description of Artificial Sequence: Synthetic coding sequence
  source 1..1356: mol_type = other DNA
gccggcggcagccccgagagcctgctgttcttccagaagcccgtgacgttcgaagatgtggccgtgaacttcacccaggaggaatgggactgtctggatgcctcacagagggtgctgtaccaagatgtgatgtccgaaacctttaaaaatctgacatcggttgccaggatcttcctgcataagcccgaacttattacaaagctggagcaggaagaagagcagtggcgtgaaaccagagtacttcaagcgtcacaggcgggcccaccgttcttttgctacacctgcgggaagtgcttctctagacgctcgtacctgtattctcaccagttcgtccataatcccaaattgaccaattcatgtagtcaatgcggaaaactttttcggtcgcctaaatcactatcatatcatcgtcgcatgcacctgggggagagacctttctgttgcactttgtgtgacaagacctattgcgacgctagtggcttgagcagacaccgccgggtgcacctcggatacaggcctcacagttgcagcgtgtgcggcaagtccttcagagaccagagcgagcttaagcggcaccagaaaattcatcaaaatcaggagcctgtcgacggtaatcaagagtgtacgctccggatcccgggaactcaggccgagttccagacccctattgctagatctcagaggtccattcagggcctgttggatgtcaaccatgccccagtggcgcggagtcaggaaccgatattcaggacagaagggcctatggctcagaatcaggcttctgtgctcaagaaccaagcccctgtaacacgcactcaagccccaattacagggacactctgccaagatgcgcggagtaacagccatcccgtgaagccttctcgccttaacgtattctgttgccctcactgttccctgacctttagcaagaaatcttacttatcacggcatcaaaaagcacacttaacagagccacctaactattgtttccattgttccaagtcctttagtagcttcagtcgactagtgagacaccagcagacgcactggaagcagaagtcttacttgtgtccgatctgtgacctgagctttggggaaaaggaggggttgatggatcactggagaggctacaaaggtaaagatctctgccaaagttcccaccataaatgccgcgtgattctgggacagtggctgggattctcccatgacgttcctacaatggccggcgaagaatggaaacacggaggcgatcagagcccaccccggatccacacaccacggcggcgtggtctgcgcgaaaaagcctgcaaaggggacaaaactaaagaagccgtgagtattttgaagcataagtag

SEQ ID NO: 212308 - DNA, 1551 bp, synthetic construct
  misc_feature 1..1551: note = Description of Artificial Sequence: Synthetic coding sequence
  source 1..1551: mol_type = other DNA
atgttcgagcagctgaagcccatcgagccccgggactgctggcgggaggcccgcgtcaaaaaaaaaccagttacgttcgaagatgttgctgttaacttcacacaggaggaatgggattgtctcgatgcctctcagcgggtcctttaccaggacgtcatgagcgagacctttaagaatctgacatctgtggcccggatattcctgcacaaacctgagctgatcacaaaattggaacaggaggaggagcagtggcgggagttcgtgcacctcccaaatacagaggggctctctgaaggcaagaagaaggaactgagggaacagcacccatctttacgcgacgaggggacatctgatgataaggtttttctggcatgcaggggcgctggacaatgccccctgagtgcacccgccggcaccatggatagaactcgggtcctgcaggcatcccaagcaggaccacctttcttttgttacacttgcgggaaatgcttttcacggaggtcttacctttattcccaccagttcgttcacaatccgaaattgaccaacagctgctcacagtgcggcaaactgttccggtcacccaaaagcttaagctatcaccggcgcatgcaccttggcgagaggcccttttgttgcactctttgtgacaaaacctattgcgatgccagtggactgagcaggcataggagagtccacctggggtatagacctcattcttgtagtgtgtgtgggaaatcttttagggaccagtcagaactcaaacgtcatcagaagatccatcagaaccaggagcccgtcgacggtaaccaggagtgcacactaaggatacccggtactcaggccgagttccagacccccatagctagatcccagagatcgatacaggggctgttggacgtgaaccacgcccctgtggccagaagccaggagcctatctttaggacagaaggtccgatggcccagaatcaagccagcgtgctgaaaaatcaggcacctgtcacccggactcaagcacctattacaggcactctatgccaggatgcccgctctaatagccatccggtcaaaccctctcgtttgaacgtgttttgctgtccccattgctcactgacctttagtaaaaagagctatttgtctcgccaccaaaaagcgcacctgaccgaaccccctaattactgcttccactgtagcaagagtttctcatcattttcccgacttgtgcgccaccaacagacacattggaagcagaagtcatacctgtgcccgatatgcgatctgagcttcggggagaaggaaggattgatggaccattggagaggctataagggcaaggacctgtgccagagttcccaccacaaatgcagggtgatcctgggtcagtggcttggctttagccacgacgtccccaccatggccggggaggaatggaaacatggtggggaccagagcccaccacgtatccacacacccagaaggcggggtctgagggaaaaagcatgtaagggtgataagacgaaagaggcagttagcatattgaaacacaaatag

SEQ ID NO: 212309 - DNA, 1611 bp, synthetic construct
  misc_feature 1..1611: note = Description of Artificial Sequence: Synthetic coding sequence
  source 1..1611: mol_type = other DNA
atgttcgagcagctgaagcccatcgagcccgtgcagaagaccctgccctgggtgggtgaggtggccgccacgcttcaggaagccatgaagagggattgttggcgagaggccagagtgaagaagaaaccagtgacattcgaggacgtcgccgtgaacttcacccaggaagaatgggattgcctggatgcgtcccaaagggttttataccaagacgttatgtccgagactttcaaaaatctcactagtgtcgccagaatttttctccacaagcccgagctgatcaccaaattggagcaggaagaagaacaatggcgcgagttcgtccatcttccaaacactgaaggactaagcgagggtaaaaagaaagagttacgcgagcaacacccctcacttcgggacgagggaacatcggacgataaggtctttctggcatgtcggggggcaggtcagtgccctctgtcagcgccagcagggactatggatcgcactagggtactccaggcctctcaggctgggcccccctttttctgttacacatgtgggaagtgcttctctcgaagaagctatttgtacagccatcaattcgtccacaatcccaaactgacaaactcttgcagtcagtgtggtaaactgtttcggtcgcccaagagcctgtcttatcaccggcggatgcacctgggtgagaggccattttgctgcaccctgtgtgataagacttattgcgatgcttctggacttagccgacacagaagagtgcatctaggatatcggccacattcttgttccgtgtgcggtaaatctttccgggatcagagtgaactaaagagacaccaaaaaatccaccagaaccaggagcctgtggatggcaatcaggagtgtaccctgaggattccgggcacccaggcagagttccagactcctatagctaggtcccagcgctctattcagggccttcttgatgtgaatcacgcaccagtagctcgcagccaggagcctatttttagaacagagggaccgatggctcagaatcaagcctccgttctgaaaaaccaggctcccgtgacacgaactcaggctcctatcacgggaacactgtgccaggatgcccgctctaactcgcatccagtcaagccttcacggctaaatgttttctgctgcccgcattgcagccttactttctccaagaagtcatatctgtctcgacaccaaaaggcacatttaaccgagcctccgaattattgcttccactgttccaagtcatttagcagcttctctcgcctagtgcgacaccaacaaacacattggaagcagaaatcctatctgtgtcccatttgtgacctctcatttggggagaaagagggacttatggatcactggcggggttataaagggaaagatctttgccaaagttctcaccataagtgccgggtgatactggggcaatggctgggattctcacacgacgtgccaacgatggcaggagaagagtggaagcacgggggggatcagtcaccgccccggatacataccccccggcgaagaggcctccgggaaaaagcatgtaaaggcgacaagactaaggaggcagtcagcattctaaagcacaaatag

SEQ ID NO: 212310 - DNA, 1611 bp, synthetic construct
  misc_feature 1..1611: note = Description of Artificial Sequence: Synthetic coding sequence
  source 1..1611: mol_type = other DNA
atgttcgagcagctgaagcccatcgagcccgtgcagaagaccctgccctgggtgggcgaggttgccgctacccttcaggaggccatgaagcgcgattgttggcgggaggccagagttaagaagaagccagtgactttcgaggatgttgcagttaattttacccaggaggagtgggactgtctcgatgcaagtcagagggtcctttaccaggacgtgatgtccgagacttttaagaatctgacctcggtggcaaggattttcctgcacaaacctgagttgattaccaaattggagcaggaggaagagcagtggagagagtttgtgcatttgccaaacacagagggtctgtccgagggcaagaagaaagagctcagggaacagcatcccagcctgcgggatgaaggaacgtctgacgataaggtattcctggcttgtagaggtgccggccagtgcccattatcggctcctgccggaactatggacaggaccagagtgctgcaggcttcccaagcggggcctcccttcttctgttatacttgcggcaagtgtttcagccgcagaagctacctgtatagtcaccaatttgtgcacaacccaaaactcactaacagctgcagtcagtgcggcaagctctttcggagcccaaagagcctgtcgtatcatcgacggatgcacttgggcgaaaggcccttttgttgcacattatgcgacaaaacctactgtgatgcgtccgggttgtccagacatcgccgagtgcatctaggatacaggcctcactcctgcagcgtctgcggaaagtcattccgagatcagtcagaattgaagagacaccagaagattcaccagaaccaggaaccagtggatggaaatcaggagtgcacactgagaatccccggcacccaggccgagttccagacccccatcgcccgaagtcagaggtccatccagggcctactcgacgtgaaccatgccccagtagccaggtcgcaagagcccatatttcgtaccgagggcccaatggcacagaatcaggcctccgtgcttaagaatcaagcgccggtgacacgtacccaggcacccattaccgggaccctgtgtcaagacgccaggtctaatagtcacccagtgaagccatctcgattaaatgttttctgttgcccccactgcagtctcactttcagtaagaagagctacctgtcgcgccaccagaaggctcacttgaccgaaccacctaactactgctttcattgctctaagtcttttagctcttttagtagacttgtaaggcatcagcagacacactggaaacagaagtcctacctgtgcccaatatgcgatctcagttttggagagaaagagggactaatggaccactggagaggctacaagggaaaggacctctgccagagtagccaccacaaatgccgcgtaattctgggacagtggttgggcttcagccacgatgtccctactatggcaggcgaggagtggaaacacggtggcgaccagagtccacccaggattcacactccacggagaagaggactgcgcgaaaaagcctgcaagggtgataaaactaaagaggcggtatcgattctcaagcacaagtag

SEQ ID NO: 212311 - DNA, 1611 bp, synthetic construct
  misc_feature 1..1611: note = Description of Artificial Sequence: Synthetic coding sequence
  source 1..1611: mol_type = other DNA
atgttcgagcagctgaagcccatcgagcccgtgcagaagaccctgccctgggtaggtgaagtggcggccacacttcaggaagcaatgaagagagactgttggcgtgaggcacgcgtaaaaaaaaaaccggtgacctttgaggacgtggcagtaaattttacacaggaagagtgggactgtcttgatgcgtcacaacgggtgctctaccaggacgtgatgtctgagacctttaagaacttgacttcagtagctcgcatctttctgcacaaacctgagctcattactaagctcgaacaggaagaagagcagtggcgcgagtttgtccacctgccaaataccgagggcctctctgaggggaaaaaaaaggagcttcgtgagcagcaccccagtcttagggacgaaggcacaagcgatgataaggtttttcttgcatgtcggggagccggacagtgtccgctgagtgctcccgccggcacaatggatcgtacccgcgttctccaggcctcacaagcgggcccacccttcttttgctatacgtgcggcaagtgctttagccgcaggagctacctctacagccatcagtttgtacataacccaaaacttacgaacagctgcagccagtgcggtaagttatttaggagccccaaatccctttcttaccatcgcagaatgcatcttggggaaaggcccttttgctgtacactctgtgacaaaacctactgcgacgcatccggtctgtccagacacaggagagtccacctggggtacaggccgcattcttgtagcgtttgcgggaagtcttttcgggaccaatccgagttaaagcgccaccagaaaatccaccagaatcaggagcctgtggacggaaatcaagagtgcaccctgcggattcctggcacacaggccgaattccagacccctattgctcgcagccagcgcagcatacagggtctgctagatgttaatcacgcccctgtggcaagatctcaggagcccatctttcgcaccgaagggcctatggctcagaatcaagcatcagttctgaagaaccaggcccctgtgactcgcacccaggctcccattacaggcacgctctgtcaggatgcccggtctaacagccaccccgtgaaaccatccaggttgaatgtcttctgttgtccacactgcagtctgacattcagcaagaaaagctacctgagcagacatcagaaggctcacttaacagagccaccaaattattgctttcattgttctaagagcttctccagcttctcaagattggtgaggcaccagcaaacgcactggaagcagaaaagctacctgtgtccaatctgtgacttgtctttcggtgaaaaagaggggctgatggatcactggcgcggttacaagggaaaggacctctgtcagtcaagtcatcataaatgtcgagtgatcctgggacaatggctgggattcagccacgacgtaccgaccatggctggcgaggaatggaaacatggcggggatcagtctcccccgcggatacacactccacggcggcggggtctccgcgagaaggcctgcaaaggagacaagacgaaagaagcagtaagtattttgaagcataaatag

SEQ ID NO: 212312 - DNA, 1611 bp, synthetic construct
  misc_feature 1..1611: note = Description of Artificial Sequence: Synthetic coding sequence
  source 1..1611: mol_type = other DNA
atgttcgagcagctgaagcccatcgagcccgtgcagaagaccctgccgtgggttggcgaagtagccgcaacactgcaggaagccatgaagagagactgctggcgcgaagcacgcgtgaagaagaagcctgtaacttttgaagacgtagcagtaaacttcacccaggaggagtgggactgtctggatgcctcccaacgtgtgttgtatcaggacgttatgagcgaaacatttaaaaacctgacttccgtagcacggatctttctccacaagccagagttgattactaagcttgagcaggaagaggagcaatggcgcgagtttgtccatctgccaaacacagagggattgagcgagggaaagaagaaggagctgcgagagcagcatccatcccttagggatgaagggacaagcgatgacaaggtgttcctcgcctgcagaggtgctggccagtgtcccctgagtgccccagcaggtacaatggaccggactagggtcttacaggccagccaggctggtcctccttttttttgttacacatgcgggaagtgttttagcagacgctcttacctgtatagtcaccagttcgttcacaacccgaagttgactaacagttgttcccaatgtggtaagctatttcggtcacccaagagcctgagctaccaccgccgcatgcatctcggtgagagacctttttgttgtaccctttgtgataagacctattgtgatgcgtctggactcagtaggcatcgccgcgtgcatctcggttacagacctcattcctgctcagtctgtggtaagtcatttagagatcaatccgaattaaagagacatcaaaagatccatcagaaccaggaacccgtggacggaaatcaggagtgtactcttcggattccgggtacccaagcagaatttcagacaccgatagcacgaagccagcggtcgatacaagggctgttagacgtgaaccacgcaccagtggccagatctcaggaacctattttccgcacagagggacccatggctcagaatcaggcatccgtgctgaaaaaccaggctcccgtgacccggacacaggcccctatcactgggacactctgccaggacgccaggtccaactcccatcccgtgaagcccagtagactcaatgtcttttgctgcccccattgtagccttacattcagcaagaaaagttacctgagtcggcatcaaaaggctcacctgaccgagcctccaaattattgttttcactgcagcaaaagtttctcttccttctcaaggctggtgcgacatcagcagacacactggaaacagaagtcttatttatgcccaatctgtgatctctcttttggggagaaagagggtttgatggatcactggcgcggctacaaggggaaagatctgtgtcagagcagtcatcacaagtgcagggtgatcctgggacagtggttaggcttctctcacgatgtgccgacgatggctggcgaggagtggaagcacggaggggaccagtctcctcctagaatacatacgccacggagacgggggctccgcgagaaggcctgcaaaggggacaaaaccaaggaagctgtgtctatcttaaagcataagtag

SEQ ID NO: 212313 - DNA, 1551 bp, synthetic construct
  misc_feature 1..1551: note = Description of Artificial Sequence: Synthetic coding sequence
  source 1..1551: mol_type = other DNA
atgttcgagcagctgaagcccatcgagccccgggactgctggcgggaagcccgtgtaaagaaaaaacccgtgacatttgaagacgttgccgtcaatttcacccaggaggaatgggactgcctggacgcgagtcagcgcgtgttataccaagatgtgatgtcagagacttttaaaaacctaactagcgtcgccaggatctttttacacaagccagagctgattaccaaactggagcaagaggaagaacagtggcgtgaatttgtgcatcttccaaacacagaaggactatctgagggcaagaagaaagaactcagagagcagcatccatcactgcgggatgagggcacttccgatgacaaggtcttcttggcatgtaggggagcggggcagtgcccattgagcgctcccgcgggtactatggaccgcaccagggttctacaggcctcgcaggccggtcccccgttcttctgttacacctgcggcaagtgtttctcaagaagaagctacctttactcccaccagtttgttcacaatcctaagttgacaaactcctgttcacagtgcggcaaattgttcagatccccgaagtctctttcctatcataggcgcatgcacttgggggagcgacccttttgctgcaccctgtgcgacaagacttattgtgatgcctcaggtctgtctcgacacagacgcgtgcatctggggtacaggccccactcgtgttctgtgtgtggtaagagctttcgggatcaaagcgagctgaagcgccatcagaaaattcaccagaatcaggaacccgtggatggcaaccaggagtgtaccttacgaattcctgggacacaggccgaatttcaaacacctattgctcgttcacagcgcagcatccaaggcctattagacgtgaaccatgccccagtggctagaagtcaagaaccgatcttcaggacggagggacctatggcccagaaccaggcgagcgtgttaaagaatcaggcacccgtcactcggactcaagcgccaatcacaggcactctgtgtcaggacgccaggagcaacagtcaccctgtgaagccttcacgcctcaacgtgttctgttgtccacactgctcactgaccttcagtaagaaatcatacctgtcaaggcaccagaaagcacacctaaccgaaccccccaactactgcttccactgctctaagagtttttcctccttctcccgcctcgtgcgccatcaacagacgcactggaaacagaagtcatatttatgtcccatctgcgacctatcttttggggaaaaggaaggacttatggaccattggagggggtataagggaaaagacctgtgccagagctcccatcataagtgccgggtaatcttgggtcagtggctgggtttttcccatgatgtgccaacaatggccggagaggaatggaagcatggaggcgatcaaagccctcctaggatccataccccacgacgcaggggcctgagggagaaggcatgtaagggagataaaaccaaggaggccgtgtcgatccttaagcacaaatag

SEQ ID NO: 212314 - DNA, 1551 bp, synthetic construct
  misc_feature 1..1551: note = Description of Artificial Sequence: Synthetic coding sequence
  source 1..1551: mol_type = other DNA
atgttcgagcagctgaagcccatcgagccccgggactgctggcgggaggcgcgggtgaaaaaaaagcctgtgacttttgaggatgtggcagtaaactttacgcaggaggaatgggactgcctcgatgcttctcagcgcgtattgtaccaggacgtcatgagcgaaacatttaagaacctaacctccgtggcccgtatctttttgcacaagcccgaactcataaccaaactcgagcaggaggaggagcagtggagggaattcgtgcacttaccaaacaccgaggggttatccgagggaaagaaaaaagagttgagggagcaacacccttctctccgcgatgagggaacctccgatgacaaagtctttctcgcatgtagaggggctggccaatgtcctctcagtgcccctgctgggactatggaccgtacgcgggttttgcaggcttcacaggccggcccccccttcttctgctacacatgcggaaaatgtttttctcgcaggtcttatctctattcgcaccagtttgtgcacaaccctaagttaactaattcttgtagccaatgcggcaaactgttcaggagtcctaaaagcctgagttaccataggcgaatgcacctgggggaacggcccttctgctgtaccctgtgcgacaaaacatactgcgatgcctcgggcttgtcacgacaccggagggtgcacctcggctatcgtcctcacagttgtagcgtgtgtgggaaatcatttcgcgatcagtcggaattgaagagacaccagaagatccaccaaaaccaggagccggtggatggcaaccaggagtgtacactgaggatccctggcacccaagcggaatttcagacgcctattgcccgctcgcagagatccattcaaggcttactagatgtgaatcatgccccagtagccaggagtcaggagcccatcttccggacagagggccccatggcacaaaatcaagcaagcgttctcaagaatcaggcgccagttactcgcactcaagcaccaattacaggcacactatgccaggacgcccgatctaacagccaccctgtgaaacccagccggctgaatgtgttttgttgtccacactgttctctgacattctctaaaaagtcctacttgtctcgccaccagaaagctcatctgactgagcccccaaattattgtttccactgttctaaaagtttttcctccttttcccgcctagttaggcaccagcagacacactggaaacagaaatcttatctgtgtccaatttgtgacctgtcatttggtgaaaaggaaggcctgatggaccactggaggggatacaagggcaaagatttatgccagtcctctcaccacaaatgccgggttatactaggtcagtggcttgggttctcacatgacgttcccacgatggctggcgaggaatggaaacacgggggggatcagtccccaccgcgcattcatacaccgagacgcagagggcttcgggagaaagcgtgcaagggagacaaaacgaaggaggccgtcagcatcttgaaacacaagtag

SEQ ID NO: 212315 - DNA, 1611 bp, synthetic construct
  misc_feature 1..1611: note = Description of Artificial Sequence: Synthetic coding sequence
  source 1..1611: mol_type = other DNA
atgttcgagcagctgaagcccatcgagcccgtgcagaagaccctgccctgggttggcgaggttgcagccacccttcaggaagctatgaagagggactgttggcgtgaggcccgggtcaagaagaagcctgttaccttcgaagacgtggcagtgaactttacccaggaggagtgggactgtcttgatgcctcacagcgagttctatatcaggacgtcatgtctgaaactttcaaaaacctcactagcgtggctaggatattccttcataagccggagctgatcaccaagctagaacaggaagaagagcagtggcgagagttcgtgcatctgcccaacaccgaggggcttagcgagggaaaaaagaaggagctccgggagcaacaccccagcctgagagatgagggcacctcagacgataaagtctttctcgcatgtaggggcgccggccagtgtcctttgtctgccccggccggtacaatggatagaaccagggtgctgcaggctagccaggcagggccacctttcttttgctacacgtgcgggaaatgcttctcaaggcggtcatatctttattctcatcagtttgttcacaatcctaagctgaccaacagctgttcccagtgcgggaaattgtttcggagccctaagagtctgtcttaccatcgccgtatgcacctgggggagcggccgttctgctgcacattgtgcgacaaaacatactgtgacgcatccggcttatccaggcaccgccgggttcatctgggatatcgaccccattcctgttccgtgtgcggaaagtcattccgcgaccagtccgagctcaaacggcatcagaagatccatcagaaccaagaaccagtggatgggaatcaggaatgcactctcaggatccccgggactcaggccgaattccagactcctatcgcaagaagccagcgatccatccaagggctgctcgacgtcaatcacgcgccggtcgcacggtcccaggagccaatttttagaaccgaaggccctatggctcaaaaccaggccagtgtgctgaaaaatcaggccccagtcacgcgtacacaagccccgatcaccggtacgttgtgtcaggatgcacgctctaattcacaccccgtgaaaccaagcagactgaatgtcttttgttgcccacactgtagtctgacctttagtaagaaatcttacctgtcgcgccaccagaaagcgcacctgactgagcctccaaattattgcttccattgttctaaatcattctcctctttctcccgtttagtgaggcatcagcagacccattggaaacagaaatcctacctgtgccctatctgcgatctatcctttggcgaaaaggagggactgatggatcactggcgggggtacaagggaaaggatctctgtcaaagttctcaccataagtgccgcgtgattctcggccaatggctgggcttcagccacgacgtcccaaccatggcgggcgaagagtggaaacacgggggagaccagtctccgcctcgaatccacacaccccggagaagaggcctgcgtgagaaggcttgcaaaggtgataaaacgaaagaggcagtctctatcctcaagcacaagtag

SEQ ID NO: 212316 - DNA, 1551 bp, synthetic construct
  misc_feature 1..1551: note = Description of Artificial Sequence: Synthetic coding sequence
  source 1..1551: mol_type = other DNA
atgttcgagcagctgaagcccatcgagccccgggactgctggcgggaggcgcgagtaaagaaaaaacccgttacttttgaagatgtcgcggtaaactttacacaggaggaatgggactgccttgacgcttctcagagggtactctatcaggatgtcatgagcgaaaccttcaagaacttaacatcagtagctcggatctttctgcacaagccagaacttatcactaaacttgagcaggaagaggagcagtggcgcgagttcgtgcatctcccaaacaccgaaggcctgagcgaaggcaaaaagaaggagctccgtgaacagcacccatcactaagagacgagggcaccagcgacgacaaggtcttcctggcctgccgtggcgccggtcagtgccccctctctgcccctgctggaacaatggacaggacaagggtgctacaggcctcacaagctggtcctccttttttttgttacacctgcggaaagtgcttctcccgaagatcatacctgtactcccatcagttcgtgcataatcccaagttaaccaacagctgctcccagtgcggaaagttattcaggagcccgaagtctcttagctaccataggaggatgcacctgggcgaacgcccattttgctgtacactttgtgataagacctactgcgacgcctccggcctgagtagacacagacgagtgcacctgggataccgcccacactcttgcagtgtgtgcggaaaaagcttcagagaccagtctgagctgaagcgccaccagaaaatccaccagaatcaagagccagtggatggcaaccaggaatgcacattgcggattcccggtacccaggccgaattccagacgcccatcgctagaagtcagaggtcgatacaggggctgctggacgttaatcacgcccccgtggctcgatcccaggagcccatcttccgcaccgagggtcccatggcccagaatcaggcttcagtccttaaaaatcaagcgccagttacccggacacaagctcctattactggaactctgtgccaggacgccaggtccaactcacatccagtgaagcccagtcgactcaatgttttctgctgcccccattgctctttaacctttagcaaaaaatcgtatctgtcacgacaccagaaggctcacttgacagaaccccccaattattgctttcactgttcgaaatcgttcagtagtttctcacgcctcgtgcgccaccagcagacgcattggaaacagaagagctacctttgtccaatctgcgatttgagttttggcgagaaggaaggtctgatggatcactggcgcgggtataaaggcaaggatctgtgtcagagctcccaccacaaatgcagagtgattctggggcagtggcttgggttctcacacgacgttccaactatggctggggaggagtggaaacatgggggtgatcaatcgcctccacggatacatacccccagaagacgtggtctccgggaaaaggcatgcaagggtgataagactaaggaagcggtgagcatactcaaacacaagtag

SEQ ID NO: 212317 - DNA, 1551 bp, synthetic construct
  misc_feature 1..1551: note = Description of Artificial Sequence: Synthetic coding sequence
  source 1..1551: mol_type = other DNA
atgttcgagcagctgaagcccatcgagccccgggactgctggcgggaggccagggtcaaaaaaaagcctgtcacatttgaggatgttgccgtaaacttcacccaggaggagtgggattgcctggacgcaagccagagagtgctgtaccaggacgttatgtccgaaacctttaagaacctgacctcagtggcccgcattttcctccacaagcccgaattgattactaaactcgagcaagaggaggagcagtggcgagagtttgtgcatcttccaaacacggagggactgtccgagggtaagaagaaagaactacgggagcagcacccatcacttagagacgaaggcacctcagacgataaagtgttcctagcctgtagaggcgccggtcaatgcccactgagcgcccctgcaggaactatggacagaacaagggtcctgcaggccagccaggctggccccccgtttttttgctatacatgtggcaagtgcttctcacgacggtcctatctgtactcacaccagtttgttcacaatcctaaactaaccaactcctgctcccagtgcgggaagcttttcaggtcccctaagtcgctctcttatcaccgcaggatgcacttgggggaaaggccattctgctgcaccttgtgcgataagacatattgcgacgccagcgggctctcccgccataggcgcgtccacctaggatacaggccgcattcatgttcagtgtgcgggaagtcgtttagagaccagtccgagcttaagaggcatcagaaaatccaccagaatcaggagccagtggatggcaaccaggaatgtactctgaggattcccggaactcaagcagagtttcagactcccatagctcgttcccaaaggtctattcagggcctccttgacgtcaatcatgcccccgtcgcccgcagccaggagcctatttttcgcactgaaggaccgatggcccaaaatcaggcctcagtcctcaagaaccaggctccagtcaccaggacacaggcccctatcactggcaccctgtgccaggacgcccgatccaattctcaccccgtgaaaccctcccgcctgaacgtgttttgttgcccccattgctcccttacattctctaaaaagtcatacctttcccggcaccagaaggcacatttgacagagccgcccaactattgcttccactgcagtaagtccttctcatctttttcacgtctggtgaggcatcaacagacgcattggaagcagaagagctatctgtgccccatttgtgacctgtctttcggtgagaaagaaggtttgatggaccattggagaggttacaaggggaaggatctctgccagtcctctcatcataagtgtcgcgtgatcttaggccagtggctgggtttctcgcatgacgttccaacaatggccggggaggagtggaagcatggtggagaccagagtcccccaagaatccacacacctaggaggaggggactgagggaaaaagcgtgtaaaggcgataaaacgaaggaagcagtttccattctcaagcacaaatag

SEQ ID NO: 212318 - DNA, 1611 bp, synthetic construct
  misc_feature 1..1611: note = Description of Artificial Sequence: Synthetic coding sequence
  source 1..1611: mol_type = other DNA
atgttcgagcagctgaagcccatcgagcccgtgcagaagaccctgccatgggtaggcgaggttgcggctaccctccaggaggccatgaaaagggactgctggcgcgaagcccgagtcaagaagaagcctgttactttcgaggacgtggccgtgaattttacgcaagaagagtgggattgcctggacgcctctcagagagtgctgtatcaggatgtcatgagtgagacattcaagaaccttacctccgtcgcccggatcttcttacacaaaccagaactcattacaaagctcgaacaggaagaagagcaatggcgggaatttgtgcatttgccgaataccgaaggtctcagtgagggcaaaaaaaaggaactgcgggaacagcatccatcgctacgggatgaaggtacctccgatgataaggtgtttctggcttgcagaggtgccggtcagtgccccctgtcagcacctgccggaacaatggatagaacgcgagttttacaagcctcccaggccggtccaccatttttttgttatacgtgtggaaaatgctttagccgcagatcatacctgtactcacatcagttcgttcacaacccgaaactgaccaatagttgttcacaatgcgggaagctttttagaagccccaagtctctaagttaccacaggagaatgcacctcggcgaacggcccttttgttgtaccctgtgtgataagacgtattgtgacgcgtccgggcttagtcgccacaggagggtacacctgggatatcgtcctcatagctgctctgtgtgtgggaagtccttccgagatcagagcgaactcaagcgacatcaaaagattcatcaaaatcaggaacccgtggacggtaaccaggagtgcacattaagaatcccaggaacacaagctgagttccaaacccctatcgctaggagtcagcgatcaattcagggactgcttgacgtaaatcacgccccagtggcgcgcagtcaagagcctatttttcgtacagagggaccaatggcccagaaccaggcctccgtgctgaagaaccaggctcccgtcactcgtacccaggcacccatcaccggcaccctgtgccaagatgctagatccaatagccatcccgtgaagccgtcacgcctgaatgttttttgttgcccgcattgctctctgactttttctaagaagtcatatctgtctagacatcagaaggcacacctcacagagccgcctaactattgtttccattgctcgaagagcttctcttccttcagtaggctagtccggcaccaacagacccattggaaacaaaagagctacttatgtcctatttgcgacttaagtttcggtgagaaggaggggctgatggaccactggcgggggtacaagggcaaagacctctgccagtcatcacaccataagtgcagggttatcttaggccaatggttggggttcagccatgacgtgccaaccatggcaggagaggagtggaagcatggcggcgatcagtccccaccacgcattcatactcctcgcaggagaggactgagagagaaagcctgtaagggggacaaaaccaaagaagcagtgtccatcctgaagcacaagtag

SEQ ID NO: 212319 - DNA, 1725 bp, synthetic construct
  misc_feature 1..1725: note = Description of Artificial Sequence: Synthetic coding sequence
  source 1..1725: mol_type = other DNA
atggccgccgccgtgccccggcggcccacccagggcaccgtgacctttgaggacgtagctgtgaacttctctcaggaggaatggtgtcttctctccgaagctcagcgctgcctctaccgcgacgtcatgctggaaaatctagcactgatctcctcactcggctgttggtgcggctctaaggatgaagaggccccatgcaaacaacgcatctccgtgcagagggaaagtcagagcaggaccccacgtgccggagtgtccccaaaaaaagcgcacccttgtgaaatgtgtggcctgattctggaggatgtctttcacttcgcggaccaccaggaaactcaccataagcagaaactgaaccgcagtggcgcatgtggtaaaaatttagacgataccgcttacctgcaccaacatcagaagcagcatatcggggaaaagttctacaggaaatcagtgagggaagcttcctttgtgaaaaaacggaagctccgcgtgtctcaagagccatttgttttcagagaattcgggaaagacgtcctgccatcttcgggactctgtcaggaagaggcagcagtcgagaagacggacagtgaaaccatgcacggaccgccttttcaggaaggtaagaccaattactcctgtggcaagcggactaaagcattctctaccaagcattctgtgattcctcaccagaaactgtttactcgggatgggtgctatgtgtgtagcgattgtggcaaaagcttttcacgctatgtgtctttctcaaaccaccagagagaccatactgcgaagggcccctatgactgcggcgagtgtggaaaaagctattcccgaaaatcttcattgatacaacatcaacgggtgcacaccggccagactgcttacccatgtgaggagtgcggcaagtcttttagccagaagggtagcctcatttctcaccagctcgtgcataccggagagggaccatacgaatgtagagagtgtggaaagtcctttggccagaagggcaatctgattcagcatcagcaaggccacacgggtgaacgagcctatcactgtggggagtgtggaaaatctttccgccagaaattctgcttcataaaccatcagcgagttcatactggggaacgcccctacaaatgtggagagtgcgggaagtcctttggacagaaaggaaaccttgtccatcaccagcggggacacacaggggaacggccatatgagtgcaaagagtgcggaaagtcctttcgctaccggagtcatctcaccgaacatcaacggcttcacacgggcgagcgaccttacaactgccgcgagtgcggcaagctgtttaataggaaataccatctcctcgtgcatgagagagtccacactggcgaaaggccctacgcatgtgaagtgtgtggtaagctctttgggaataagcactctgtgacgattcaccaaaggatccacacaggagaaaggccatacgaatgctccgagtgcggaaaatcctttctgtcaagctcagcactgcacgtgcacaaaagagttcactccggacaaaaaccatacaagtgcagtgaatgcggaaaatcctttagcgagtgctcctctctgatcaagcacaggagaattcataccggggagcgcccttacgagtgtaccaaatgcgggaaaacattccagaggtcctccacacttctacaccatcagtccagccaccgtcgcaaagccctttag

SEQ ID NO: 212320 - DNA, 3804 bp, synthetic construct
  misc_feature 1..3804: note = Description of Artificial Sequence: Synthetic coding sequence
  source 1..3804: mol_type = other DNA
atgggcgacatgaagacccccgacttcgacgacctgctggccgccttcgatataccagaccctacttccctggacgccaaggaggctattcagacccccagtgaagaaaacgagtcccccctgaagcccccgggcatttgcatggatgagagtgtgagtttgtcccactccggctcagctccagatgtcccggccgtcagtgttattgtaaagaatacaagtaggcaagagtcgttcgaggctgaaaaggatcacatcaccccttctctgctgcataacgggtttagaggatccgacttacctccagacccccataattgcggcaaatttgatagcacctttatgaatggcgacagcgcccggtcctttccggggaaattagaacccccaaagagcgagccactgcccactttcaaccagtttagtccaatatcctccccggaacccgaggatcccatcaaagataatggcttcggcattaagcccaagcattctgactcctacttccctccacctttgggctgcggagcggtaggaggcccagtgctcgaggcattagccaagttcccagttccagaacttcatatgtttgatcacttctgcaagaaagagcccaagccagaaccactgcccttagggtctcagcaggagcatgagcagagcgggcagaatacagtggaaccccataaagatccggatgctacccggttttttggtgaggcactcgagtttaactcccacccatccaacagcatcggcgagtccaagggcctggctcgagaattagggacttgcagctctgtaccaccacgtcaacgcctgaagcccgcgcatagcaaattatcctcatgcgtggctgcactcgttgccctgcaggcgaaacgggtagcttccgtgaccaaggaagaccaacccggacatacgaaagacctttccggacctacaaaggaatcctcgaagggctcacctaagatgccgaagtcacctaagagcccacgcagcccgctggaagccacaaggaaatccataaaacctagtgactccccacgatcaatctgctccgacagcagctcaaagggcagcccatctgttgcggcttcctctccacccgcaatcccaaaggtaagaataaaaaccattaagacgagctctggggaaatcaaacgaacagtgactagaatcctacccgacccagatgatccaagtaaaagccctgtgggatcccctctagggtctgccattgccgaggccccttctgagatgcctggtgacgaagttccagtggaggagcatttccctgaggctggaacaaatagcggttctccacaaggtgctcggaaaggtgatgagtccatgaccaaagcatcagattcaagttctccttcctgcagctccggtccccgagtcccaaaaggagctgccccaggctctcagactggaaaaaaacagcagtctaccgccctgcaagctagcaccttggccccggcaaacctccttcctaaagccgtgcacctagcgaacctcaacctagtgccccacagtgtggccgcaagcgtgaccgcgaagtcttcagtacaacgcagatcacagccccagttgacccagatgagcgtgccactggtgcaccaggtgaagaaggccgcaccactgattgtagaagtgttcaataaggtgctgcactcttctaacccagttccattgtatgcccccaacctgtcacctcccgcagattctagaatccacgttcccgccagtggatattgctgcctggaatgcggcgacgcatttgctctggaaaagtccctgtcacagcattacggtaggaggtcagtgcacattgaggtgctgtgcacgctgtgcagcaagaccttgttatttttcaacaagtgttcattactccgacatgcgcgggaccataaatcgaagggtctagtcatgcagtgctcccaattactggtcaagcccatttccgctgatcagatgttcgttagcgcaccagtgaattctactgctcccgccgcccctgctccctcttcaagcccaaaacacggattaacaagtggctccgcctcacctccgccgcccgctttgccactctatcccgatcctgtgaggctcattcgatactctattaagtgtctggagtgtcacaaacaaatgcgcgactatatggtgctggccgctcactttcagcgcaccaccgaggagactgaaggccttacttgccaggtctgccagatgttattgcctaatcaatgtagtttctgtgcccatcagcggatccacgctcacaagtcaccctactgctgtccggaatgcggagtgttgtgtagatcagcctatttccagacacacgtcaaagagaattgtctgcattacgccaggaaagtgggctaccgctgtatacactgcggagtcgtgcacttgaccttagccttactgaagagtcatatacaggagcggcattgccaggtgtttcacaagtgcgcgttttgcccaatggccttcaagaccgctagcagtactgccgaccacagtgcgacccagcacccgacacagccccacagaccaagccagttaatctacaagtgtagctgtgaaatggtctttaataagaaacggcatatacaacagcacttctatcagaatgtcagcaaaactcaagtcggagtgtttaaatgccccgagtgccccctccttttcgtacagaagcctgagttgatgcagcacgtcaaatctacccatggtgtgccaagaaacgtggacgagctctctagtctgcagtctagcgcagacacctcatcgagtagacccggttcacgcgtaccgactgagcctcccgccacgtccgtggccgcccgatctagctcccttccctctggccgctggggtcgccccgaggctcacagacgagtggaagcacggccgaggcttcggaacacgggctggacctgtcaggagtgtcaggagtgggtgccagatcgtgaatcctacgttagccacatgaagaaatcacacggccgcacgctcaagaggtatccttgtcgccagtgtgagcagtcttttcatactcctaactctttgagaaaacacattagaaataatcatgacaccgtaaaaaaattctatacttgtggctactgcacagaggatagtccgtctttccccagaccaagcctactggaatctcatatatcgctgatgcatgggatccgtaaccccgatctcagccagacctctaaagttaagccacccggcggccatagtccacaggtgaatcatcttaagaggccggtgtccggcgtgggtgatgcgccaggtacatccaacggcgctacagtgtcttccacaaagcgacataagtcgctgtttcagtgcgctaagtgctcattcgcgactgactccggcctggaatttcagtcacatattcctcagcaccaggtagactcaagtaccgcccagtgtctgctctgcggtctgtgttacacatccgcctcctcgctcagtagacatctctttatagtgcataaagtgcgtgaccaagaggaagaggaggaagaggaggcagccgcagcagaaatggccgtagaagtggcagagcctgaggagggaagcggggaggaagtaccgatggagactagggagaacggcctggaagagtgtgcaggcgagcccttgagcgctgaccccgaggcgcgcagacttttgggtccagctccagaggacgacggcggccacaacgaccacagccagccccaggcatcgcaggaccaggacagccacaccttaagtcctcaggtttag

SEQ ID NO: 212321 - DNA, 3804 bp, synthetic construct
  misc_feature 1..3804: note = Description of Artificial Sequence: Synthetic coding sequence
  source 1..3804: mol_type = other DNA
atgggcgacatgaagacccccgacttcgacgacctgctggccgccttcgatattcctgaccctacgagtctcgatgccaaagaagctattcagaccccctcagaagaaaatgaaagccccctcaaaccccctggtatatgcatggacgagtctgtaagtctttcacattccggttctgctccagacgtcccagctgtcagcgttatcgtgaagaacacctctcgacaagagagctttgaggccgagaaagatcatatcactccttccttactacataatggatttcgagggagtgacctacctccggatccacataattgcggcaagttcgactcgacctttatgaacggcgactcagccaggtctttcccgggaaagctggaacccccaaagtctgaaccactgccgacatttaaccagttctccccgatatcctctccagagcccgaggacccaatcaaggacaacgggtttgggatcaaaccaaagcatagcgacagctactttccccctccattggggtgcggggccgttggcggccctgtgctcgaggctttggcaaagtttcccgttccagaattgcacatgttcgatcacttctgtaaaaaagaaccaaaacctgagccactacctctcggaagtcagcaggagcacgagcaatctgggcagaacaccgtggaaccccataaagacccggatgctactagattctttggtgaagcactagagttcaactcacatcctagtaattcaatcggcgagtccaagggactggcccgcgaacttggaacatgttcaagcgtccccccaaggcaacgcttgaaaccagctcactctaagctttcatcatgtgtcgcggctctggtcgccctacaagcaaaacgggtggcatctgtcactaaagaagaccagcccggacacaccaaagacctgtccgggccaaccaaggagtcttctaaaggctctccgaagatgcccaagagtcccaagtccccacgctcgccgttagaagcaacacgaaaaagcattaagcctagcgacagtccacgctcaatctgcagcgactcttctagcaaaggatccccttcagttgccgcaagcagtccccccgctatccccaaggttaggattaagacaattaaaactagttccggggagataaagagaactgttacacggattcttcctgaccccgatgacccttcgaagagccctgtcggtagccccctcgggagcgcaattgccgaagcgcccagcgaaatgccaggcgatgaagtgcccgttgaagagcatttccctgaggcgggaaccaattcaggcagccctcagggcgcccggaaaggagatgagtcgatgacaaaagccagcgatagctccagtccgtcttgctcctcaggtccccgggtgcctaaaggcgcagcccccggcagccagactggtaaaaaacagcagtctacagctttacaagccagtacactcgctccagctaacctcttacccaaggcagtgcatctcgccaatctgaatctggtgcctcactcagtggctgcttccgtcactgcaaagtcctcagtgcaaagacgctcacagcctcaactgacacaaatgtccgtgccactggtccatcaggtgaagaaggccgcaccactcatcgtagaggtcttcaacaaagtcctccattctagtaacccggtgcccctgtatgcccctaacctttctccgcccgcagatagccgcatccacgtgcccgcgtccggctactgctgcctggagtgtggggatgcctttgcgttggaaaagagcctatcccaacattacgggagacggtctgtacatatcgaagttctctgtacactgtgttctaaaactctgctgttcttcaacaaatgttccctactccgacacgctagggaccataagtcgaagggactagttatgcagtgttctcagttacttgtcaaacccatttctgcagaccagatgttcgtgagtgcccccgtcaacagcaccgcaccagctgcccctgcaccatctagttctccgaagcatggcctgaccagtgggtccgcctctccaccgcctcctgcactcccactctacccagacccagtgagattaatccgctactcaattaagtgcctggaatgtcacaaacagatgagagattatatggtcctcgctgctcacttccaacgaacgactgaggagacagagggtcttacctgtcaggtctgccagatgctgctgcccaatcaatgtagcttttgcgcccatcagcgtattcacgcacacaagtctccttactgctgtccagaatgcggtgtgctgtgtaggtcagcctattttcagacacacgtgaaagaaaattgcctgcattatgccagaaaggtcggataccggtgtatacactgcggagtagtgcatctgacgttggccctgcttaagtctcacatacaggagaggcactgccaggtgtttcataagtgcgctttttgccctatggcttttaaaactgcttcttccactgcggaccactctgctacacagcaccccacgcagccccaccgcccgtctcagcttatctacaagtgtagttgcgagatggtgttcaataaaaaacgtcatatacagcagcatttttaccaaaatgtatctaagacgcaggtcggagtctttaaatgcccagagtgtcccctgctgtttgtgcagaagcccgaactaatgcagcatgtgaaatctacacatggcgtgcctcgtaacgtggatgagctgagttctttgcagtccagcgccgacaccagcagcagccgccccggaagtagagtgccaaccgagcctcctgcaacatctgtggctgctagaagcagtagcctaccaagcggcagatgggggcggcctgaggcccaccggcgggtggaagcgaggcccaggctcaggaataccgggtggacttgccaggaatgtcaggagtgggtgcctgatcgagaatcctatgtcagtcacatgaagaaatcgcatggaagaacccttaaacggtatccctgtaggcaatgcgaacagtccttccatacacctaactctctacgaaagcacattagaaacaatcacgataccgtgaagaaattttacacctgcggctattgtacagaggatagcccctcttttcctcgcccatcactcttggaatcgcatattagtctgatgcatggcatccggaacccggatctttctcagaccagcaaagtgaagccacccggagggcactcaccccaagtgaatcacctaaaaaggcccgtatctggcgtcggcgacgctccaggaacctctaacggggccacagtgagttcaacaaagcgccataagtcactgtttcagtgtgcaaaatgttcttttgccacagactctggcctcgagttccagtcgcacatcccacagcaccaggttgactcctccactgctcagtgtctattgtgtggtctatgttacacgtccgcttccagcctgtcacgtcacctctttatcgttcacaaagtacgagatcaggaggaggaagaggaagaggaggccgcggcagcggaaatggccgtcgaggttgccgaacccgaggagggcagtggcgaagaggtgcccatggagacaagggagaatggacttgaggagtgtgctggcgagccccttagtgctgaccccgaggcccggcgcttgctgggacccgcacctgaggacgatggaggacataatgatcactcacaaccacaagccagccaggaccaggatagtcataccttatcccctcaagtatag

SEQ ID NO: 212322 - DNA, 2379 bp, synthetic construct
  misc_feature 1..2379: note = Description of Artificial Sequence: Synthetic coding sequence
  source 1..2379: mol_type = other DNA
atggccgccatcaacccctgggccagctggggcgccctgaccgaccagtcttggggaatgaccgctgtcgatccttgggcaagttgggcgctgtgtccccagtaccctgcctggcacgttgaaggtagtctggaggagggcaggagggcaaccggcctcccagccgcccaggtgcaggagcccgtgactttcaaagatgtggccgttgatttcacccaggaagaatggggccagctggatctagtgcagcggaccctctatagagacgtaatgctcgaaacatatgggcacctgctcagcgtggggaatcaaattgcgaaaccagaggttataagcctgcttgagcagggtgaggagccttggagcgtggaacaagcttgtccgcaaaggacctgccccgagtgggtgagaaacctcgagtctaaagctcttatacccgcccagagcatttttgaagaagaacaatcacacgggatgaagctcgaacgatatatttgggatgacccatggttctctagactggaagttttgggttgcaaggaccaactcgagatgtatcacatgaaccagtcgactgccatgagacaaatggtgtttatgcagaaacaggtgctgtcacaaagatcttcagaattctgcggcttaggggctgaattttcccagaatctgaatttcgtcccctcccagagggtctcacagatagagcatttctacaaaccggatacacacgcgcagagttggcgctgcgacagtgcaattatgtacgctgataaggtaacttgtgagaacaacgattatgacaaaacagtgtaccagagtatccagcctatttaccccgcacgcattcaaactggggataacctgttcaagtgcaccgacgccgtcaaaagtttcaaccatattatccatttcggcgatcataaaggaatccatactggcgaaaagctgtacgaatataaggaatgtcaccagatctttaaccagtctcccagcttcaatgaacatcctaggctgcatgtgggagaaaaccagtacaactacaaggagtacgagaatattttctatttctcttctttcatggagcaccagaagatcgggaccgtggaaaaagcctataagtacaacgagtgggagaaggtattcggctatgactctttcttaacgcaacatacaagcacttatactgcagagaagccatacgactacaatgagtgtggcacttccttcatctggtcaagctatctgatacagcacaagaagacacacactggcgaaaagccctacgagtgcgacaagtgcgggaaggtttttcgcaacaggagcgcattgacaaagcacgagagaacacacacaggcattaagccctacgaatgtaataagtgtgggaaggccttttcctggaactcccacttgattgtgcacaagcggatccacactggggaaaagccttacgtctgcaacgaatgcggaaagagcttcaactggaattcgcatctaattggccaccagcgcacgcacacaggcgagaaacctttcgagtgtaccgaatgtggtaagagctttagctggtcttctcacctgatagcacatatgaggatgcataccggggagaagcccttcaaatgtgatgaatgcgagaaggcgtttcgtgattattctgcgctttctaaacacgaaaggactcacagtggcgccaaaccatacaaatgtacggagtgtgggaagtcattttcatggtccagtcacctgatcgcgcaccagcgaacacataccggcgaaaagccctacaactgtcaggaatgcgggaaagcttttcgcgagcggagcgcattaaccaagcatgagattatacattctggaatcaaaccttatgagtgtaacaagtgtgggaagagctgtagtcagatggcccatcttgtcaggcaccagagaactcatacaggcgaaaaaccttatgagtgcaataagtgcggtaagtccttcagccagtcttgccacctagtggcccaccgaagaattcataccggggagaagccatacaaatgtaatcaatgcgagcgcagcttcaactgcagctcacacctcatagcccatcggcgtacccacaccggagaaaaaccttatcgttgcaacgagtgcggtaaggctttcaacgaaagttccagcctgatcgtccacctgaggaaccacacaggggaaaaaccttataaatgcaatcactgcgaaaaagcgttctgcaaaaacagtagtctgattattcatcagcggatgcattcaggggagaagcgattcatctgtagcgagtgtggaaaagccttttccgggcattccgccctgctacagcatcagagaaatcatagcgaggagaaactgaactag

SEQ ID NO: 212323 - DNA, 2109 bp, synthetic construct
  misc_feature 1..2109: note = Description of Artificial Sequence: Synthetic coding sequence
  source 1..2109: mol_type = other DNA
atgctggagacctacggccacctgctgagcgtgggcaaccagatcgcaaagccagaagtcatctctctgctggaacaaggcgaagaaccctggagtgtggagcaggcctgccctcaacggacatgcccagagtgggtaaggaacctggaatctaaagcacttattccggcgcaaagtatattcgaagaagagcaaagtcacggaatgaagcttgaaaggtacatttgggatgatccgtggttcagccgtctggaggtgctcggttgcaaggaccagctggaaatgtaccacatgaatcagtcaaccgcaatgcgacagatggtcttcatgcagaaacaggtgttgagccagcgtagcagtgagttctgtggtctgggtgcagagttctcacaaaaccttaacttcgtgccaagccagcgggtttctcaaatagagcatttttacaagcccgacacccatgcacagtcgtggcggtgtgactctgccatcatgtacgctgacaaagtgacttgcgagaacaatgactatgataaaactgtgtaccaatccattcagcccatctatccagcccgcattcaaacaggagacaacttgttcaagtgcaccgacgcagtcaaatcttttaatcatattatccactttggcgaccataagggcatccatacaggtgagaagttgtacgaatataaagagtgtcaccagatctttaaccagagtcccagttttaatgagcatccgagattgcatgtgggcgaaaaccagtacaactataaggaatatgagaatattttttacttcagttcatttatggagcaccagaaaatcgggaccgtggaaaaggcgtataaatacaacgaatgggaaaaagttttcggctatgacagcttcctgacacagcatacaagcacatatacggccgagaagccttacgactacaatgagtgcgggaccagttttatttggtccagctacttaatacagcacaaaaagacacacactggcgaaaaaccctacgagtgtgacaagtgtggcaaggtgtttcggaatcgatcagctctcaccaagcatgagcgcacgcatactgggattaagccctatgaatgtaataaatgtggaaaggcgttcagctggaatagtcaccttatcgtgcataaacgtatccacacaggtgaaaagccttacgtctgtaatgaatgcgggaagtcttttaattggaattctcacctgattggccatcagaggactcacaccggcgagaagcccttcgaatgcactgaatgtggaaagtccttcagctggagctctcatctgatcgcccacatgagaatgcacactggcgaaaagccttttaagtgcgatgaatgcgagaaagcattccgggactacagcgctctgtccaaacacgagagaactcatagcggcgccaagccctacaaatgcactgaatgcggaaagtcattctcatggtctagccacctgatagctcaccaacggactcataccggtgaaaagccttataattgccaggaatgtggaaaggcatttagagagaggagcgccttgacaaaacatgagatcatccatagtggaattaaaccctacgagtgcaataaatgcggcaaaagctgcagccaaatggcccacctggttcgtcaccagcgaactcacacgggcgagaagccttacgagtgcaataaatgcggaaagtctttcagtcaatcatgtcacctggttgcccacaggaggatccacactggtgaaaaaccatataagtgtaatcagtgtgagaggagtttcaactgcagctcacatctcatcgcgcaccgccggacccacacaggtgagaagccttaccggtgcaacgagtgcggcaaggcattcaatgagagttccagcctcattgtgcacctcaggaatcacactggtgagaagccttacaaatgtaaccattgcgagaaggccttttgtaaaaattcctccttgataattcaccagcggatgcatagcggagagaagaggtttatctgttccgaatgcggcaaagcctttagcgggcattccgccctgctgcagcaccagcgtaatcactcggaggagaagctaaactag

SEQ ID NO: 212324 - DNA, 1527 bp, synthetic construct
  misc_feature 1..1527: note = Description of Artificial Sequence: Synthetic coding sequence
  source 1..1527: mol_type = other DNA
atggccgccatcaacccctgggccagctggggcgccctgaccgaccagtcctggggaatgactgcagtcgatccatgggcgagttgggcgctgtgccctcagtacccagcttggcatgtggaggggtcactggaagagggtcgcagagccaccgggctgcccgccgcacaggtgcaggagcctgtgacgttcaaggacgtcgcggtcgactttacgcaagaagaatggggtcagttagatctagtgcagcgcaccctctatagggatgtcatgcttgagacttatggccacctgctctccgtgggaaaccagatcgctaaacccgaagtgattagcctattggagcaaggtgaagagccttggagcgttgaacaggcatgtccgcagagaacatgccctgagtgggtgaggaaccttgagtcaaaggctctgattcccgcccagagtatcttcgaggaagaacagtcacatgggatgaaactggagagatacatatgggatgatccttggttttcccgcctggaggtgctgggatgtaaggaccagttggaaatgtaccatatgaatcagtccactgccatgcgacagatggtgttcatgcaaaagcaagtgctctctcaaaggtccagcgagttctgcggactcggagccgagttttcacaaaacctgaattttgtcccttcacagagggtaagccagatcgagcacttctacaaacctgatacccacgcccaatcatggagatgcgactctgcaatcatgtacgctgacaaagtgacatgtgagaataatgactacgacaaaacagtataccagagcatacagcctatctaccctgccaggatacaaactggggataacctctttaaatgtaccgacgcagtcaagtctttcaaccatattatccattttggagaccacaaaggaattcacactggggagaagctttatgagtacaaggaatgtcatcagatttttaaccaaagtccgtcattcaacgaacatccaagactacacgtcggcgaaaaccaatataactataaggagtacgagaacatcttctatttcagtagctttatggagcatcagaagataggcacagtcgagaaggcttataaatacaatgagtgggaaaaagtttttggctacgacagcttcctcacgcagcatactagcacttatacagctgaaaagccctatgattataatgaatgcgggacctccttcatctggagttcatacctgatccagcacaaaaagactcataccggtgagaaaccatacgagtgcgacaaatgtggaaaggttttccgaaatcggtctgctctgactaagcatgagaggacccacaccggtataaagccttacgagtgtaataagtgcggcaaagctttctcatggaactcccacctcatcgtccacaaacggatccatactggagaaaagccatacgtatgcaacgaatgcgggaagtcattcaattggaactcacacctgatagggcaccagcgaacacataccggatag

SEQ ID NO: 212325 - DNA, 2523 bp, synthetic construct
  misc_feature 1..2523: note = Description of Artificial Sequence: Synthetic coding sequence
  source 1..2523: mol_type = other DNA
atgaaggaggacaagagcagcatccgggaggccatcagcaaggccaaatccactgcaaacatcaagacagagcaagagggtgaggcctccgagaaatctctgcacttgtctccccagcatattacccaccagacaatgcccataggacagaggggctctgaacagggaaaaagggtggagaatatcaacggaacatcctacccgtcattgcagcagaagacaaatgccgtcaaaaagctgcacaagtgcgacgagtgcggaaaatccttcaagtacaatagccgcctggtgcagcataaaataatgcacacaggagagaaaaggtatgagtgcgatgattgcggggggacctttcggtccagctccagcctgcgtgtccataagaggattcacaccggggaaaagccctacaaatgtgaggaatgcgggaaggcatacatgtcatactcaagcctcatcaatcacaagtctacccatagtggggaaaaaaactgcaagtgcgatgagtgcggcaaatcgtttaattattctagcgtgcttgaccagcacaagaggatccacacgggcgaaaaaccctacgaatgcggcgagtgtggaaaggccttcaggaatagcagtggtctgcgcgtccataagaggatccacaccggcgagaagccctacgaatgcgacatttgtggcaagaccttctccaacagctctggcctgcgcgttcacaagcggatccataccggcgaaaaaccttacgaatgtgacgaatgtggaaaagccttcatcacttgtcgtacccttctcaatcacaagtcaatccacttcggtgacaagccatacaaatgcgacgagtgtgaaaagtcctttaattattctagcctgctaattcagcacaaggttatacacacgggagaaaagccctacgaatgtgatgagtgtggaaaggcatttcggaattcgagtggcctcattgttcacaagagaatccacaccggagagaaaccatacaagtgcgacgtgtgcggtaaagctttctcttattcatccggtcttgccgttcacaagagcatccaccctggaaaaaaggcccatgagtgcaaggagtgcggcaaaagtttttcgtataatagcctgctcttacagcataggactatccataccggtgagagaccatacgtgtgtgacgtgtgtgggaaaacattccgaaacaatgctggcctgaaagtgcacagacggctgcataccggcgaaaaaccatataaatgtgacgtttgtggcaaagcttatataagccggtctagtcttaaaaatcacaaaggaattcatcttggcgaaaaaccatataaatgttcctactgtgagaagagctttaactattcaagcgctctggaacagcataagcgcattcatacccgcgagaaaccttttggatgtgacgagtgtggcaaagcttttagaaacaattctggattaaaagtgcataaacggatccataccggagagagaccttacaaatgcgaagagtgcggaaaagcatatattagcttatcgagtcttattaaccataagtccgtccaccctggagaaaagcccttcaaatgcgacgagtgcgagaaagctttcataacataccgcacactgactaatcacaagaaggtccacttgggcgaaaaaccctacaagtgcgatgtgtgtgagaaatcctttaactacactagtttgcttagccaacaccggcgagtgcatacacgcgagaaaccttatgaatgtgatcgctgtgaaaaggtcttcaggaataattcatcactgaaagtgcataaacgcatacacacaggtgaaagaccttacgaatgcgatgtctgtggaaaagcatacatctcgcactcgagtttaattaaccataaaagtacacaccccgggcgtactccccatacctgtgacgaatgtggtaaagccttctttagcagtcgtactctgatctcacataagagagtccacttgggcgaaaagcccttcaaatgcgtggaatgcggaaagagctttagctatagttccctgttatcccagcacaagcggattcacacgggcgagaagccatacgtttgtgataggtgtggcaaggctttcaggaatagcagcgggctaactgtgcataaaaggatccatactggggagaagccctacgaatgcgatgagtgcggaaaagcatatatctctcattcctctctaataaaccataagagcgtccaccaaggcaaacaaccctataactgtgagtgtggcaagagcttcaactatagatccgtgctcgaccagcataaaaggatccatactgggaagaaaccttaccgttgcaatgagtgtggaaaagcgttcaatatcagatctaacctcacaaagcacaagcgcacccatacgggagaagagtccctcaacgtcatctacgttggaagttacagcggcacctcccagaagagaacatacgaaggcggaaatgccctggatggagggaggatgcgaatgccattgtag

SEQ ID NO: 212326 - DNA, 1497 bp, synthetic construct
  misc_feature 1..1497: note = Description of Artificial Sequence: Synthetic coding sequence
  source 1..1497: mol_type = other DNA
atgagctacagcagcctgatcaaccacaagagcacccacagcggcgagaagaactgcaaatgcgatgagtgcggaaagagctttaactattcatcagttctcgaccagcacaaacgcatacacactggggaaaagccgtacgagtgtggagaatgcggaaaggcatttagaaacagcagcggattaagggtccataaaaggatccacactggagagaagccatacgagtgcgatatatgtgggaaaacattctctaactcgagtgggttaagggtgcataaacgaattcatacaggagaaaagccgtatgaatgtgacgaatgcggaaaagcctttattacatgccgtacgctactcaaccacaagagtattcacttcggggataagccatataaatgcgacgaatgcggtaaagcattccggaataactcaggactcaaagtgcacaagagaattcacacgggcgaacggccgtacaaatgtgaagagtgcggaaaggcttacatcagcctatcatctctgattaatcataaatccgtgcacccgggcgagaagccttttaagtgtgatgagtgtgaaaaagcctttataacctacagaaccctaactaatcacaaaaaagttcacttaggcgagaaaccctacaaatgtgacgtatgcgaaaagagctttaactacacttcattgctcagccagcaccggcgggtgcatactcgggaaaagccttatgaatgtgatcgatgcgagaaggtgttcaggaataactccagcctcaaagtccataaaagaattcacactggtgaacggccctatgaatgtgacgtgtgcgggaaggcttacatctctcactcttctctcatcaatcataagtcaactcatccagggagaacccctcacacatgtgatgaatgtggaaaagccttcttctccagccggacattgatttcccacaagagggtccacctcggggagaaaccatttaagtgtgtcgaatgcgggaagtccttctcatattcctcgctgctgtcccagcacaagaggattcatactggagagaaaccctacgtctgcgatcgctgcgggaaagccttcagaaattcatccggtctcactgtacataaaaggattcatactggcgagaagccctatgagtgcgatgaatgcggtaaagcttatatctcacactccagtctgatcaatcacaagtcggtgcatcaaggtaagcagccatacaattgcgagtgcgggaagtcctttaactaccgttcagttctagatcaacacaaacggattcacaccggcaaaaaaccctatcggtgcaatgagtgcgggaaagcatttaacatccgctcaaacctcacgaagcataaaagaactcataccggcgaagagagcctcaacgtgatttatgtggggtcttactctggaacctcacagaagcgaacctatgaaggggggaacgcgttggacggcggccgaatgcggatgcctctctag

SEQ ID NO: 212327 - DNA, 2703 bp, synthetic construct
  misc_feature 1..2703: note = Description of Artificial Sequence: Synthetic coding sequence
  source 1..2703: mol_type = other DNA
atgagccacctgaagaccagcaccgaggacgaggagcccaccgaggaatacgaaaatgtcgggaacgcagcaagcaagtggccaaaagtggaagacccaatgccagaatcaaaagtgggggatacatgtgtatgggattcaaaagtggaaaatcagcagaagaagccagttgaaaaccgaatgaaagaagacaagagcagcattagagaagcaatctctaaagctaaaagcaccgccaatatcaaaaccgagcaagaaggcgaagcctctgagaaaagtctccatctgagcccacagcacatcacacaccagactatgcccatcggacagaggggaagcgagcagggcaaacgcgttgaaaacatcaacggcacatcatatccttcattgcaacaaaagaccaacgctgtgaagaagttgcataaatgcgatgaatgtggaaaaagctttaagtataacagtcgcctcgttcaacataaaatcatgcacactggcgaaaagagatatgaatgcgatgattgcggcggaacgtttaggtcttcttcgagcctccgcgtgcataaacgcatccatacaggggagaagccgtataagtgcgaagagtgcgggaaggcgtatatgtcgtatagcagcttgatcaatcacaagtctacacattccggagagaagaattgcaagtgcgatgaatgcggcaaatcattcaattatagttccgtccttgaccagcacaagaggattcacaccggagagaaaccctatgagtgcggcgaatgtggaaaagcattccggaactcctccgggctgcgggtgcataagagaattcacacaggtgaaaagccatatgagtgcgacatatgcgggaagacctttagtaatagttcagggctaagagtgcataagagaatccataccggggagaaaccatatgagtgtgatgagtgcgggaaagcatttatcacatgccggaccctgctgaatcacaagtccatccactttggtgataagccctataagtgtgacgaatgtgaaaagagcttcaattattctagtttgctgattcagcataaagtgatacatacaggtgaaaaaccatatgagtgcgacgagtgcgggaaggccttcaggaactcctctgggttaatcgtccacaaaagaatccacacaggggagaagccctataagtgcgacgtgtgtggtaaggcatttagctattcctccgggctggccgtgcataaatccatccatcccggcaagaaagctcatgaatgcaaagagtgcggaaaaagtttctcctataatagccttctgcttcagcatcgaacgatacatacgggcgaacgcccttacgtgtgcgatgtttgtggtaagaccttccgcaataatgcggggctcaaggtgcacaggcggctacataccggagagaagccatataagtgtgacgtgtgcggtaaagcttatatctcccggtcaagcctcaagaatcataaaggtatacacttgggcgaaaagccatacaaatgttcatattgcgagaaaagctttaattactccagcgccctcgaacagcataagaggattcacaccagagaaaaaccgtttggttgcgacgaatgcgggaaagcctttcgtaataacagtggtctaaaggtacacaagcgaatccatacaggggagcgcccatacaagtgtgaggaatgtggcaaggcttacatatccctgagcagcctgattaatcataagtctgtgcatccaggcgagaaaccgtttaagtgcgacgaatgcgaaaaggcgttcatcacctaccgcaccctaaccaatcacaagaaagtgcacttgggggaaaagccctacaagtgtgacgtttgtgagaaatcatttaattacaccagccttttgagccagcatcgccgggtccacacacgggagaagccctatgagtgtgatcgctgcgagaaggtattcagaaataattcctctctcaaggtgcacaagaggatacataccggcgagcggccatacgaatgtgatgtatgcgggaaggcgtacattagccattcctccctgatcaatcataaatcaacccatcctggtaggaccccccatacatgcgacgagtgcggtaaggcattttttagctcgcgtactttgatttcacataaacgcgtgcacctcggggaaaagccgtttaaatgcgttgagtgtggaaaatcctttagctactcttcactcctctcccagcacaaacgcatacacactggtgagaagccttatgtatgcgatcggtgtggcaaagcattccgaaactccagcggcctcactgtccacaagagaatacataccggcgaaaaaccttatgaatgtgatgagtgcggaaaggcatatatttcgcacagctctttgatcaatcacaaatctgtgcaccagggtaagcagccttataactgtgagtgtgggaagtccttcaattaccggtccgtgctcgatcagcacaaaaggatacataccggaaagaagccttaccgctgtaacgagtgtggaaaggccttcaacatccgctcaaacctgactaaacataaaaggacccacacaggagaagaatctcttaatgtgatctacgtggggtcatattccggcacgagtcagaagcgaacttatgaaggtgggaatgctttggacggcggaagaatgcgcatgcccctctag

SEQ ID NO: 212328 - DNA, 483 bp, synthetic construct
  misc_feature 1..483: note = Description of Artificial Sequence: Synthetic coding sequence
  source 1..483: mol_type = other DNA
atgcccgagagcaaggtgggcgacacctgcgtgtgggacagcaaggtagagaaccagcaaaaaaagcccgtcgagaaccgtatgaaggaggacaaatcctcaatcagagaggccatctctaaggccaaaagcaccgcgaacattaagaccgagcaagagggtgaggcaagtgagaagtcactacatctatccccacagcacataacccatcagaccatgccgatcgggcagcgaggctccgagcaaggaaagcgcgtggagaacattaacggaacttcttatccttcgctccagcagaagacaaacgcggtgaagaaattgcacaaatgcgacgagtgtgggaaatcatttaagtataattccagactggtacaacacaagattatgcacaccggagagaagcgatatgagtgtgacgattgtggggggacctttcgcagtagcagttcgcttagggtgcacaagcggattcacactggatag

SEQ ID NO: 212329 - DNA, 315 bp, synthetic construct
  misc_feature 1..315: note = Description of Artificial Sequence: Synthetic coding sequence
  source 1..315: mol_type = other DNA
atgcccgagagcaaggtgggcgacacctgcgtgtgggacagcaaggtagagaaccagcagaagaaacccgtcgaaaacaggatgaaggaggataaaagctctataagggaggctatctcaaaggctaagtctactgctaatataaaaactgaacaggagggagaggctagcgagaagtcactccatctgtctcctcagcatataacacatcagaccatgccaattggacaacgcggatcagagcagggtaagagagtggagaacatcaatgggacatcttatccaagtctgcaacagaaaaccaacgcagtctag

SEQ ID NO: 212330 - DNA, 237 bp, synthetic construct
  misc_feature 1..237: note = Description of Artificial Sequence: Synthetic coding sequence
  source 1..237: mol_type = other DNA
atgcccgagagcaaggtgggcgacacctgcgtgtgggacagcaaggtagagaaccagcagaagaagcctgtggaaaataggatgaaagaagacaagtctagcatccgagaagctatctctaaagccaagtcaacagcgaacatcaagaccgagcaagaaggggaggccagcgagaaatccctccatctcagcccacaacatattactcatcaaaccatgcccatcgggcaaaggtag

SEQ ID NO: 212331 - DNA, 2604 bp, synthetic construct
  misc_feature 1..2604: note = Description of Artificial Sequence: Synthetic coding sequence
  source 1..2604: mol_type = other DNA
atgcccgagagcaaggtgggcgacacctgcgtgtgggacagcaaggtcgaaaaccaacagaagaaacccgtagagaatcgaatgaaggaggataagagcagcattcgtgaagcaattagcaaggctaagtctaccgcgaatatcaagacagagcaggagggagaggctagcgaaaagtcactacacttgtctcctcaacacattacacaccaaaccatgcccattggtcagaggggtagtgaacagggaaaacgggtggagaatattaacggtacctcatatccaagtctgcagcagaaaaccaacgcagttaagaagttacataagtgcgacgagtgcgggaaatcctttaaatacaactcgcgcctggtgcagcacaagataatgcataccggcgaaaagcgctatgaatgtgatgactgcggcggcacatttcgatccagcagcagtcttagggttcacaagcgcattcatactggtgagaagccgtacaagtgcgaagagtgtggtaaggcctatatgagctattccagtctgataaaccataagtccacgcactctggagagaaaaattgcaagtgcgacgagtgcggtaaaagttttaattattcgagtgtgttggaccagcataaacgcatccacacaggggaaaagccctacgaatgtggggagtgtggcaaggcctttcggaactctagcggactgcgagtccataaacgaatacatacaggtgaaaagccctacgagtgtgacatatgcggcaagacattctcgaattcttccggactcagagtgcacaagagaattcacaccggggaaaagccgtatgaatgtgacgagtgtgggaaggcatttatcacttgtagaacactgttgaaccataagagcatccacttcggagacaagccttataaatgtgacgagtgcgagaagagtttcaactactctagcttactgatccagcacaaggtgatccacactggcgaaaagccttacgaatgcgacgaatgtggcaaggcattcagaaattctagtggtctaatcgtccataagaggatacacactggtgaaaagccatacaagtgtgatgtgtgcggtaaggcattctcttacagcagcggtttggctgtacacaagagcatacacccaggcaagaaggctcatgaatgcaaagaatgcgggaagtcctttagctacaactcactgctcctgcagcacagaactatccacaccggagagagaccttacgtctgtgatgtctgcggaaaaacatttaggaataatgccggactgaaagtgcatagacggctgcacacgggagagaaaccctataaatgcgacgtttgtgggaaggcctacatttccagatcctctctcaagaatcacaagggtattcatttaggcgagaagccatataaatgttcctactgtgaaaagtcatttaactattcctcagccctcgagcagcacaagcgcatccacactagggaaaagcctttcgggtgcgatgagtgtggtaaggcttttcgaaacaatagcgggttgaaggttcacaaacgcatccacacgggcgagaggccatacaaatgcgaggagtgtgggaaggcatatatctcgctatcatctttaattaaccacaaaagtgtacaccctggagagaaaccattcaaatgcgatgaatgtgagaaagcatttatcacttatcgcaccctcactaatcacaaaaaagtccaccttggggagaaaccgtataaatgcgatgtatgtgagaaatcttttaattatacatctttgctctcgcagcataggagggtgcacacaagagaaaaaccgtacgagtgtgatcgctgtgaaaaagtatttaggaataactctagcctcaaggttcacaagcgtattcatacaggcgagcgaccttatgagtgcgacgtttgtgggaaagcctatatctcacactcgtcactgatcaatcacaagtcaacacacccaggaaggaccccacacacttgcgatgagtgcggtaaggcattcttctcatcccggactctgatcagtcataaacgtgtgcacttaggagaaaagccatttaagtgtgttgaatgtgggaaatccttcagttattcaagcctgcttagccagcacaagcgcattcataccggcgagaagccctatgtgtgcgatcggtgtggcaaggcctttaggaattcttctggtctcacagtccacaaaaggatacacaccggcgaaaagccttatgagtgcgatgaatgcggcaaagcttatataagccactctagcctcatcaatcacaagagtgttcaccaggggaagcagccttataattgcgagtgcggaaagtctttcaactatcgctcggtgctcgatcagcataagagaatacatactggtaaaaagccctatcggtgtaacgagtgtggtaaagccttcaatatccgatctaacttgaccaaacacaaaagaactcacacaggggaggagagcctcaacgtcatatacgtggggtcttattccggcactagccagaaacgcacatacgagggaggtaacgcactcgacggtggtcgcatgcgaatgcctttgtag

SEQ ID NO: 212332 - DNA, 1386 bp, synthetic construct
  misc_feature 1..1386: note = Description of Artificial Sequence: Synthetic coding sequence
  source 1..1386: mol_type = other DNA
atggacagcgtggccttcgaggacgtggccgtgaacttcaccctggaagagtgggcgctgttagatcccagtcagaagaatttatatcgggatgttatgcgcgagactttccgtaacctggcctcagtcggaaaacaatgggaggaccagaatattgaggaccccttcaaaataccacggcgtaacatctcgcacatcccagagcgtctttgtgaaagcaaggagggcggccagggagaggaaacgttctcacagatccctgacggaatcctgaataaaaaaacgcccggtgtgaagccttgtgagtcctccgtgtgcggcgaagtaggcatgggacctagttccctgaaccgtcatatacgggaccacactgggcgggaacctaacgagtaccaggagtacgggaaaaagagttatacacgtaaccagtgcggacgggctctgagctatcatcgcagcttcccagtacgagagcgcacccacccggggggaaaaccgtatgattgcaaagaatgcggagagacattcatttccctggtgtccatcaggcgacacatgctcactcaccggggcggtgtgccctacaaatgcaaggtctgtggcaaagccttcgactacccgagtctcttcagaatccacgagagatcccacaccggggagaagccatatgaatgtaaacagtgcggaaaagctttttcatgctcaagctacattcgcatccacgaaaggactcacacaggtgacaagccgtatgagtgtaagcagtgcggcaaggcgttttcgtgcagtaagtatatcagaatacatgagagaactcacactggagagaagccctacgagtgcaagcaatgtggaaaagcgtttaggtgcgcgtcgagcgtaagatcccacgagcgaacacacaccggcgagaaattgttcgagtgcaaagagtgcggaaaggccctgacttgcctggctagtgtgaggcgccatatgatcaagcataccggcaacggaccctacaaatgtaaagtgtgtggcaaagccttcgatttccctagctctttccgtattcatgagcgaacacataccggagaaaagccatatgactgtaagcaatgtggcaaggctttctcttgttcttcgtctttccgcaaacacgagcggattcatactggcgagaaaccctacaagtgcactaagtgtggaaaggcattttcccgctcttcttacttccgtatccacgagcggacacatacgggggagaaaccctacgagtgcaagcagtgtggcaaggcgttcagcagatctacctacttccgggtgcacgagaagattcacactggagaaaaaccctatgaaaatcccaatccaaatgcctcagtggtgccggtgctttcgtag

SEQ ID NO: 212333 - DNA, 3168 bp, synthetic construct
  misc_feature 1..3168: note = Description of Artificial Sequence: Synthetic coding sequence
  source 1..3168: mol_type = other DNA
atggtgggcagccacgccgacatggcccccgccagcaccgccgagggggctggcgagaaacctgggccagctgcacctgcccctgcggctcaatacgaatgcggtgagtgtggcaaatctttcagatggtcttcccgactcctgcatcatcaacgcacgcacactggtgagcggccatataagtgccccgattgtcccaaagcgttcaagggaagcagcgcactgctctaccatcagcgcggtcataccggtgagcggccctaccaatgcccggactgtccgaaggctttcaagaggagcagcctgctgcagatccatcggagcgtgcatacaggactccgcgcattcatctgtggtcagtgtggcctggccttcaagtggtcttctcattaccagtaccatttgcggcagcacacaggcgagaggccgtacccttgccccgattgtcccaaggcctttaaaaactccagctccctacgcaggcaccgccacgtacacactggggaacgcccttacacctgcggggtttgtgggaaatccttcactcagagcacgaacctccgacaacaccagcgcgtccacacaggcgagcgccctttccgttgtcctctgtgcccaaagacattcacgcattcctctaatttactgcttcaccagcggactcatggggccgcccctgctcctggaacagccagcgctgcccctccacctcaaagccgagagcctgggaaggtcttcgtatgcgacgcttatcttcagcggcacctgcagcctcattcaccaccagccccccccgctccaccccctccaccacccccggtcgtccctgaactctttctcgccgcagcagagaccaccgtggagcttgtttatcgatgcgatggatgtgagcaaggattctcatcggaagagcttttactggagcaccagccttgtccagggccagatgctgctccacagcctcaggaggcacctgccgaagcaccaaaagccgaccagccccccagccctcttccacaaccacccccacccgcagccgccccggccccaggttttgcctgtctgccctgtggaaagtcattcagaacagtggccggactctcccgtcatcagcactcacatggtgctgccgggggacaagcctttaggtgtgggtcatgcgacggcagtttcccgcagctcgcttcactcctggctcaccagcagtgccacgttgaagaggcggccgctgggcgcccaccacctcaggcggaagccgccgaggtcacctgtcctcaggagcctttagcacctgctgcgccagttcccccacctccaccaagcgctccagcttctgctgagcgtccatataaatgcgccgaatgcggcaagagttttaaaggcagcagcggactgcgctaccacctacgagatcacacaggtgaacgaccctatcaatgtggtgagtgcggcaaggcctttaaacggtcctcactgctcgctatccatcagagagtgcatacgggcctgagggccttcacatgtggacagtgcggtttgaccttcaagtggagcagccactatcaatatcatttgcgtctccacagcggtgaacggccttatgcctgtggtgagtgcggcaaagccttcaggaatacttcttgtctccggaggcacagacatgttcacactggtgagcggcctcacgcgtgcggcgtgtgcgggaagagtttcgcgcagacgtccaacctcagacagcaccagagggtacacaccggagagagacccttccgctgccctctctgcccaaagacattcacccattcctccaacttactgctccatcagaggacacattctgcagagcgcccttttacctgccccatttgcggtcggggtttcgtcatggcggcatatttacagaggcatttgagaacacacgctcctgcaaatacaccaccctccaccactgcccctgcggccggtcctcagccccccgctccactcgcggcagctagagcaccacctgctacccaggacgtccatgtgctaccacatttgcaggccacactctcacttgaggtagcaggaggaacagcccaggccccatcattaggacctgccgcaccaaactcccagacctttcttttggtccagacggcccaaggactgcaattgattccctcatcggtgcagccgccgactccacccccacctcccgcgccacctaaactcatcttgctgccctcaagcagtgccggcgccggcggagggcgggcccgccaaggcccccgggctgtggggaaggcggggcagggagctggagttgtttggctccccggtccgggcggtttgggagttcagggagccgccagtgctggcgcttccggaacaggccagtctttgatagtcctccagaatgttggggggggtgaggccggcccccaggagatgtctggagttcaactccagcctctgcgtcccgccccagaagtgactactgtccagttgcaacctgctcaggaggttactactgtgcagctgcagcccgcccaggaagtcacaaccgtacagctccagcctgcgcaggaggttactacagtgcagctgcagcccgtggctgggcagctgtccaatagcagcggtggagcagtggctactgaagcaccaaatctgctcgtggtgcaaagcggagccgccgaggagttattaaccggaccagggccaggcgaagctggggatggagaagcaagtactggagtggtccaggacgtcctgttcgagaccttgcagacggatgaaggacttcagtctgtgctggttttgtctggggccgatggggagcagactagactctgtgtgcaagaggtggagacgttacccccaggtctgactgaacctccggctacgggccctccgggacaaaagctgctgattattcgttctgctcctgcgacggagctactggactccagcaacactggggggggtacggccacacttcagctgcttgctccacccccatccggaccggcctccggacctgcggggctgcctggagctccagccagccaaatggtgcaagttgtgcctgcaggagcaggtcctggcgttatgacaccgcaggggttaccatcgattcagattgtccagacactgccagccgttcagctggtgcacacgttttag

SEQ ID NO: 212334 - DNA, 1602 bp, synthetic construct
  misc_feature 1..1602: note = Description of Artificial Sequence: Synthetic coding sequence
  source 1..1602: mol_type = other DNA
atggaccggtaccagggcaaccaggaccgggtgctgcggcaggtgaccgtcatctcccgggagactctgactgatgaaatgggttccaagtatagcgcatttggcaaaatgttcaataggtgcacagacctggcccccctctcccagaagtttcacaagtttgatagttgtgagaactcgttgaagtctaacagtgatctgctgaattacaatcggagttatgcccggaagaatcccacgaagaggtttaggtgcggtaggccaccaaagtacaatgcatcctgttccgttcccgaaaaggaagggttcatccacactgggatggagccttatggcgactcccagtgtgagaaggtgctctcccacaagcaggctcacgtgcaatacaaaaaatttcaagcccgagagaaacctaacgtgtgtagcatgtgcggtaaagcgtttattaagaaaagccagctcatcatacaccagagaattcatactggtgagaagccatatgtctgcggagactgtcgaaaggccttctctgagaaatcccatctcatcgtgcaccaacgaatacacactggggagaaaccatacgaatgtactaaatacggccgagcatttagccgaaaaagcccattcaccgtccatcaacgcgtacacaccggcgagaagccatatgagtgctttgagtgcccaaaagcgttcagtcagaagtctcacctcataatccatcagagggtgcatactcgcgagaagccctttgagtgctctgagtgccggaaagcattttgcgaaatgagccatctctttattcaccagataacacacactgggaaaaaaccatacgaatgcacagagtgcggtaagacctttccgcgaaagacccagctgataatccatcagaggacccacactggggagaagccatataaatgcggggagtgtgggaaaactttttgtcagcaatcacacctgatagggcaccagagaatccatacaggcgagaagccctacgtgtgcaccgactgcggcaaagctttctcccagaagagtcatctgactggacaccaacggctgcacactggtgaaaaaccttatatgtgcactgagtgcggaaagtccttctcccagaaaagcccccttatcatacaccagcggatacatactggagagaaaccttatcagtgtggcgagtgtggcaaaaccttctcacagaagtctctgttaatcatccatcttcgggtgcacactggggagaaaccctatgagtgtactgagtgcggtcgcgcgttttccctgaagtcccatctcatccttcatcagagggggcacacgggagagaagccatacgagtgcagcgagtgtggcaaggccttctgcggtaaaagccctctgattattcaccagaaaactcatcccagggaaaaaaccccggaatgtgcagagtccggtatgacatttttttggaaatcccagatgatcacctaccagagacggcacaccggcgaaaagccgtctcgttgcagcgactgcgggaaggccttttgtcagcatgtttatttcactggccaccaaaacccatatcggaaggatacactgtatatctgctag

SEQ ID NO: 212335 - DNA, 1974 bp, synthetic construct
  misc_feature 1..1974: note = Description of Artificial Sequence: Synthetic coding sequence
  source 1..1974: mol_type = other DNA
atgatcgagagccaggagcccgtgaccttcgaggacgtggccgtggatttcacgcaagaggaatggcagcagctgaacccagcacagaaaaccctgcatcgagacgtgatgctggagacctacaatcatctggtttctgttgggtgttctggcattaaacctgacgtgatattcaaattggagcatgggaaggacccctggattatcgagagcgaactgtcgagatggatctacccagaccgcgtgaagggcctcgaaagctcacagcaaataatttcgggcgagctgctgttccagcgcgaaatactggagagggcccctaaggacaatagcctgtattctgttctgaaaatttggcatatcgacaaccagatggaccgctaccaaggtaatcaagaccgggtcctccggcaggtgaccgtaatttctcgagaaaccctcactgacgaaatgggttcaaaatacagcgcatttggcaaaatgtttaaccgctgtactgacctggccccactgtcacagaagttccacaagttcgattcctgcgagaacagtctgaaatcaaattccgatctcctgaactataatcggagctatgctaggaagaaccctacaaagagatttagatgcggacgcccaccaaaatataacgcctcctgcagcgtccccgagaaggagggctttatccacactgggatggaaccttacggtgattcacagtgcgaaaaagtcctcagtcataagcaagctcacgtacaatacaagaaattccaggcacgcgaaaagcccaatgtgtgcagcatgtgcggaaaagctttcataaaaaagtcacagttgattatccatcagcgaatccatacaggtgaaaaaccctacgtctgtggcgactgtagaaaggctttctccgagaaatctcacttgatcgtgcaccaacggatccataccggcgaaaagccgtacgagtgcacaaaatatggacgggcattctcccgcaagtctcctttcacggtgcatcagcgggttcacaccggagagaaaccttatgagtgctttgaatgccctaaagcgtttagccaaaaaagtcatcttatcattcaccaaagggtgcatacacgcgaaaagccctttgaatgtagtgagtgccggaaggcgttttgtgaaatgtctcatctgttcatacatcaaattacacacacaggcaaaaaaccttatgaatgcaccgaatgtggaaaaacctttcctagaaagacacagcttataatccaccagagaacccataccggcgaaaagccctataagtgcggcgagtgtggaaagacattttgtcagcagtcacacctcatcggtcaccagaggatacatacaggcgagaaaccgtacgtgtgtacggattgcgggaaggccttcagtcagaaatcccacctcacaggacatcaacggttacataccggcgagaagccttatatgtgtaccgagtgcggcaagtcattcagtcagaaatccccgctgattatccatcaacggatccataccggagagaagccctatcagtgcggcgagtgcggcaaaacttttagccagaagtcactgctgatcatccatctcagggtgcacaccggcgaaaagccttatgagtgcacagaatgcggtagagctttctctctgaagagtcatctcattctacaccagagaggccacaccggggaaaagccttacgaatgcagcgaatgtggtaaagcattctgtgggaaaagcccactgattatccatcagaagactcatcccagagagaagacacccgaatgtgcagagagcggcatgaccttcttttggaagtcgcaaatgattacctatcagcgacggcatacaggcgagaaaccaagcagatgctcagactgcgggaaagccttttgccagcacgtttattttacaggacaccagaatccctatcggaaagacacgttgtatatctgttag

SEQ ID NO: 212336 - DNA, 645 bp, synthetic construct
  misc_feature 1..645: note = Description of Artificial Sequence: Synthetic coding sequence
  source 1..645: mol_type = other DNA
atgatcgagagccaggagcccgtgaccttcgaggacgtggccgtggacttcacacaagaggaatggcagcagctgaatcccgcacagaaaactctccaccgggatgtgatgttggagacgtacaatcacttagtcagcgttggttgcagcggtataaagccagatgtaatatttaagttagaacatgggaaggacccctggatcattgaatctgagctaagtagatggatctatcccgacagagtgaagggacttgagtcatcgcaacaaatcatcagcggggaactccttttccagcgcgagattctggaaagagcccctaaagacaatagcctttattcagtgctcaagatttggcatattgacaatcagatggaccgataccagggcaaccaggatcgtgtgcttcggcaggtcaccgtcatatcacgagaaacgctcacagatgagatgggctctaaatattctgccttcgggaaaatgtttaatcgctgtaccgatctagctccactgagccaaaaatttcacaaattcgatagctgtgagaatagtctgaaatccaattcagatttactgaactacaatagatcatatgctcgaaagaatccaaccaagcgcttcagatgtggccggccacctaagtag

SEQ ID NO: 212337 - DNA, 1932 bp, synthetic construct
  misc_feature 1..1932: note = Description of Artificial Sequence: Synthetic coding sequence
  source 1..1932: mol_type = other DNA
atgatcgagagccaggaggagtggcagcagctgaaccccgcccagaagacccttcacagagacgtcatgcttgaaacctacaaccacctcgtgagcgtgggatgttccggcattaaacccgacgtcatttttaagctggagcatggcaaggacccttggatcattgagtccgagctatccagatggatctaccctgatcgtgtgaagggcctagagtcaagtcaacagatcatctccggtgaactccttttccagcgagaaatcctggagagggcacctaaggataactctctttatagcgttctcaaaatctggcacatcgacaatcagatggaccgatatcaaggcaatcaggacagggtcctgcggcaagttaccgttatttcccgagagactcttacagatgagatgggttccaaatacagcgccttcggcaaaatgttcaaccgctgcactgatctggcgcccctttcacagaagttccacaagttcgatagttgcgaaaactccctaaaaagtaatagcgatctactgaattacaaccggtcctacgcccgcaaaaaccccacaaagagattcagatgcggacggccccccaaatataacgcctcctgctccgtacctgaaaaggaggggtttatccacactggcatggagccttacggcgactcccaatgcgagaaggtcttgagccacaagcaagcccatgtgcaatacaagaagttccaggccagggaaaagccaaacgtgtgctcaatgtgcgggaaggcttttatcaagaaatcccagttgataatccaccagcgcatccataccggcgaaaaaccctacgtgtgcggggattgtcgaaaggcctttagtgagaaatcacacctcattgttcaccaacggattcatacgggcgagaagccgtatgagtgcacaaaatatggcagggcattctccaggaaatctcccttcacagtgcaccagcgcgtgcatactggggagaagccctacgagtgcttcgagtgtccaaaagctttcagccagaagtcccaccttattattcaccagagagtgcacacccgggagaagccatttgagtgctcagagtgccggaaagctttctgcgagatgtcccacctctttattcatcagattacacatacggggaagaagccgtatgagtgtaccgaatgtggaaaaaccttccctagaaagactcagctgataatccaccagcggactcataccggtgagaagccctataaatgtggcgaatgtggtaagaccttttgtcaacagagtcacctaatcggccaccagaggatccacacgggagagaagccatatgtttgcaccgactgcggcaaggcgtttagccagaaatcacatcttaccggccatcagcggctccacacaggtgaaaaaccgtatatgtgcaccgagtgcggcaaaagcttttcacaaaagagccctctgattattcaccagcgcatccacacaggagaaaaaccctatcagtgcggcgagtgtgggaaaacattcagtcagaagtcactgttgattatccacctccgggtacataccggcgaaaaaccgtacgaatgtacggaatgcggcagggccttcagtttgaaatctcacctcattctgcatcaacgcggccatacaggagagaagccctatgagtgctccgaatgcggcaaggcattctgtgggaagtcccctctgataattcaccaaaagacccatccaagagaaaaaactcctgagtgcgccgagtccgggatgacttttttctggaaatcccagatgatcacatatcagaggcggcacacaggggaaaagccttcaagatgctctgattgcgggaaagccttctgccagcatgtgtactttacaggacatcagaatccctaccgaaaggacacactatacatttgctag

SEQ ID NO: 212338 - DNA, 5937 bp, synthetic construct
  misc_feature 1..5937: note = Description of Artificial Sequence: Synthetic coding sequence
  source 1..5937: mol_type = other DNA
atgagccggccccggttcaacccccggggcgacttccccctgcagaggcctagagcacccaacccaagcggaatgcggcctcccggacccttcatgagaccagggagcatgggactcccacggttctatccagcaggccgagccaggggcatccctcaccggttcgctggacatgagtcatatcaaaatatgggaccacagcggatgaacgtccaggtcactcagcatagaactgatccccgcctgacaaaggagaagctcgacttccacgaagcccaacagaagaaaggcaagccccacggcagtagatgggacgacgagccgcacattagtgcctccgtcgccgtgaaacagtcttctgtgacccaggtcaccgagcagtcccctaaggtccagtcaagatataccaaggagagcgcatcatcaatcctggcctctttcgggctgtccaatgaggacctggaggagctttcaaggtatccagacgaacagcttacccccgaaaacatgcctctgatcctgagggacatccgcatgcgcaagatgggaagaaggcttcctaacctcccctcccagagccggaataaagagaccctcgggagcgaagctgtgtcgtctaacgtgattgactacggccatgcctctaagtatggatacactgaggatcctctcgaggtgcggatctatgaccccgagattcctacagacgaagtcgagaatgaattccagagccaacagaatatctcagcctcagtcccaaatccaaacgtgatctgtaactccatgttcccagtggaggatgtcttcagacagatggatttcccgggcgaaagttctaataatagaagctttttttcagtagaaagcggcacgaaaatgagtgggctgcacatctcaggaggacagagtgttctcgagccaatcaaaagcgtgaatcagtccatcaaccaaacagttagccaaaccatgtcccaaagtctgatacctcccagcatgaatcaacagccattctcctctgagctgatcagtagcgtgtcccagcaggagagaatcccccacgagcctgtcataaatagtagtaatgtgcacgtgggctcccgggggagtaagaagaattaccagtcccaagcagacatcccaattcgtagcccattcgggatcgtcaaagcatcatggctccccaaattcagccacgccgatgctcagaagatgaaacgccttccaacgcccagtatgatgaacgactactacgcggcttcacctagaatatttcctcatctgtgctctctctgcaatgtcgagtgttcacatctcaaggactggattcagcaccaaaataccagcacccacattgaaagctgtagacagctgcggcagcagtaccccgactggaacccggagatcctcccgtcgcgccgcaatgaagggaatcgtaaagagaacgagaccccccgccgccgctcacattcacctagcccacggcgctctaggagatcctcctccagccacaggtttcggagatcccgctccccgatgcactacatgtaccggccacgtagcagaagccctcgcatatgtcacaggttcatttctcgataccgttcccggtcccgtagtagaagtccatatcgaattcgaaacccttttcgggggagtccaaagtgtttcaggtccgtcagccccgaaaggatgtctaggcggagcgtgcgctcaagtgatcgaaaaaaggcactggaagacgtagtccaacgcagtggtcatggcacggaattcaacaagcagaagcacctggaggcggcggacaagggacattcgccagcccagaaaccgaagacctctagtggaaccaagcccagcgtgaaacctacatcagcaaccaagtccgattccaatcttggcgggcactcaatccggtgtaagagcaagaacttggaggacgacactctctccgagtgtaagcaggttagtgataaagccgtgagtctccagcgtaagctccggaaagagcagagtctacactatgggagtgtgctcctgataactgagctccctgaagacgggtgtacagaagaagatgtgagaaagctatttcaaccctttgggaaagtgaacgacgtgctcatagtcccctatagaaaagaggcgtatctggagatggagtttaaagaagcaattactgccattatgaagtacattgagaccacacctctgacaattaagggcaaaagcgtaaaaatttgcgtccccgggaaaaagaaagcccagaacaaggaggtcaagaaaaagactctggagagcaaaaaggtgagtgcttccaccttaaaaagagacgctgatgcgagcaaggctgtcgaaattgtgacctcaaccagcgcagcaaagacaggtcaagcaaaggcatcggtcgccaaggtcaataaaagcactggtaagtccgcctcaagtgtcaagtcagtcgtgacagtagccgtgaaaggtaataaagcctccataaagacagctaagtctgggggcaagaagtccttagaagccaaaaagacaggtaatgtaaaaaataaagatagcaacaaaccagtgaccatccccgagaattctgagatcaagactagtatcgaagtgaaagcaaccgagaattgcgctaaagaggcaatttccgacgccgcgctggaagccactgagaacgagcccctgaataaggagacggaagaaatgtgtgtgatgcttgtgagcaaccttccaaacaaaggctacagtgtcgaagaggtttacgacctggccaagcctttcggcggactcaaggacatcctgattctctcgtcacataagaaggcatacatcgaaattaatcggaaagctgcagaatcaatggtgaagttctacacatgttttccagtcctgatggatgggaatcagctgtcgattagcatggcgcccgaaaacatgaacatcaaggatgaagaggcaattttcataaccctcgtgaaagagaatgaccccgaggccaatatcgacaccatttacgaccgctttgtccatctagataacctacctgaagacggtctgcagtgcgtgctctgtgtgggattgcaattcggcaaagtagatcatcatgttttcatctctaaccggaataaggcaattctacaactggacagtcctgaatctgctcagagtatgtactcattcctgaagcagaatccccagaacatcggggatcacatgctcacttgttctcttagtcccaagattgacttgccagaagttcagatcgaacacgatcccgaattggaaaaggaaagtcccggcctcaagaacagtcccatcgacgaatccgaggtgcagactgccaccgactcacccagcgttaagcctaacgaactggaagaagaaagtactccaagcatccagaccgaaactctggtacagcaggaggagccttgtgaggaggaggcggaaaaggccacatgcgactcagactttgcagtcgagactctcgagctcgaaacccagggcgaagaagtgaaggaggagatacctctggtagcctccgcgtccgtctccattgagcagttcactgaaaacgccgaggaatgcgcattaaaccagcaaatgttcaatagcgatctggaaaagaagggtgctgaaatcattaatcccaagactgccttactgccaagcgattcggtttttgcagaggaaaggaatttgaaaggaattctcgaggaaagtcctagcgaagccgaggattttatctcaggaataacacagaccatggtggaggctgtcgccgaagtcgagaagaacgagaccgtaagtgaaatcttgccgagcacttgtattgtcaccctcgtacctgggatcccaactggagatgagaagacagtggacaaaaagaatatctcggagaagaagggcaacatggatgaaaaggaggagaaagagttcaacaccaaagagacaaggatggatctccagattgggacagagaaggccgaaaagaatgaaggacgcatggacgcagaaaaggtcgaaaaaatggctgctatgaaggagaaaccagctgagaacactctattcaaggcttatccaaacaagggggttggacaggcaaacaagcctgatgagacctcgaagactagtatcctcgccgtgtctgatgtgtcctcatcgaagccttctattaaggccgtgatcgtgtcttctccgaaagctaaggcaacggtctctaaaaccgaaaaccagaaatcatttcccaaatccgtgccacgggatcagataaatgcagagaaaaagttgagtgctaaggaatttggactgctcaagcctacctcagctagatccggtctggcagagagttccagcaaattcaagccaacgcagagtagcctgaccaggggtgggagcggaagaatctccgcactgcaaggtaagctgtctaagctggattaccgcgatatcaccaaacagtctcaggaaacagaagcaaggccgagtattatgaagcgggatgattctaacaataaaaccctggccgagcagaacaccaagaacccgaaaagcacaaccggtagaagctcaaaatccaaggaggagcccttgtttccatttaatctcgacgaattcgtgactgtcgatgaggtgatagaggaagtgaaccccagccaggccaaacagaatcctctgaagggtaaacgcaaagagacactgaagaatgtccctttcagcgagctgaacttgaagaagaagaaggggaagacaagtactccaaggggagtcgagggagaactcagcttcgtgaccttggacgagatcggagaggaagaggacgccgcagcccatctggctcaggctttggttacagtcgacgaagtcatagacgaagaggagctcaacatggaggagatggttaagaattctaactccctctttacactggacgaattgatcgaccaggatgactgcatcagtcattccgagcctaaggatgtgactgtactgtcggtggcggaggaacaggacctgctgaagcaggagcggctggttaccgtggacgaaatcggagaggttgaagagctgccactgaatgaatccgctgacatcaccttcgcaacgttgaatacaaagggaaacgaaggcgatacggtaagggactcaatagggtttatttcatctcaagtgcccgaagatccttccactttggtgaccgtcgatgagatacaagatgatagctccgatctacatctggttacacttgatgaggtgaccgaagaggacgaggatagcctggctgactttaataatttaaaggaggagttgaatttcgtgacagtggatgaagttggcgaggaggaggatggcgataacgatctgaaggttgagcttgcacagtccaagaatgatcatccaacagacaagaagggaaaccgtaagaaaagggccgtggataccaagaagacaaaactagagtcattgagtcaagtaggaccggttaacgagaacgtaatggaagaagacctaaagacgatgattgagcgacatctgacagcaaagactcctacaaaaagagtgaggataggtaaaactctgccgtccgagaaggctgtggtcaccgaacctgcaaagggtgaggaggcgttccagatgtccgaagtggacgaggaatcagggttgaaggattcagaaccggagcgaaaacgcaaaaagactgaggattcttcatccggaaaaagcgtggcgtcagatgtgccagaagagcttgactttctggtgcctaaagctggcttcttctgtcctatttgcagtctgttctactctggtgaaaaagccatgaccaaccattgtaaatccactaggcataagcaaaacactgagaagttcatggcaaaacaaagaaaagaaaaggagcaaaatgaagcagaggagagatctagtagatag

SEQ ID NO: 212339 - DNA, 3420 bp, synthetic construct
  misc_feature 1..3420: note = Description of Artificial Sequence: Synthetic coding sequence
  source 1..3420: mol_type = other DNA
atgagccggccccggttcaacccccggggcgacttccccctgcagcgacctagggcccccaatccgtccggaatgcgtccccccgggcccttcatgaggcctggcagtatggggctcccgagattctaccctgctggtcgcgctaggggcatccctcatagattcgctgggcacgaaagttaccagaatatgggcccccagaggatgaacgtgcaggtaacccagcatcgcaccgacccacggctcacaaaggagaagctagacttccacgaggcccagcagaaaaagggcaagcctcatggcagtagatgggacgacgaaccccatatcagcgcgagtgtggcggtaaagcaatctagtgtgacgcaggtcacagagcagtcccctaaggtacaaagccgctacaccaaagagtccgcctccagtatactggccagcttcggccttagtaacgaggacctggaagaactgtcccgataccccgacgaacaactcacccccgagaatatgcccttgatcctgcgggatataaggatgcggaaaatggggaggcgcctgcctaacctgccctcccagagccggaataaggagacactcggtagcgaggccgtaagctcgaacgtgatcgactatggacacgctagtaaatacggctatacagaggaccccctggaagtgaggatctacgacccagagattcccacagatgaagtggagaatgagttccagtctcagcagaatatctcagcatccgttccgaaccccaatgttatctgtaacagcatgtttcctgtggaggatgtgttcagacagatggattttcccggcgagtcaagcaataatagatccttttttagcgtcgagtctggcacgaagatgtcgggcctacatatctccggcggccagtccgtgctggagcccatcaaatctgtaaatcagagcatcaatcagacggttagccagaccatgagtcagtctcttattccaccgagcatgaaccagcaacccttctccagtgagctgattagcagcgtttcccagcaggaacggatccctcatgaacccgttatcaactctagcaacgtccatgtggggtctagggggtcgaagaaaaattaccagtctcaggccgacatccccattcgcagcccgttcgggatcgttaaggcctcatggctgccgaagttcagtcacgcagatgcccagaaaatgaaaaggctgccgacaccgtctatgatgaacgactattatgctgccagcccaagaatcttcccccatttatgctctctttgcaacgtggagtgtagccacttgaaagattggatccagcatcagaacacttccactcatatcgaatcttgtagacagctgcggcagcaatacccagactggaacccggaaatcctgccatctaggcgcaatgagggcaacaggaaagaaaatgaaactcctagaagacggtcccacagtcccagcccccggaggagtagaagatcttcctcatcacataggttccgtcgtagcagatctcccatgcactacatgtatcggccacgatcaagatctccacggatatgtcacagattcatttctaggtacagaagcagaagcagaagtcgttctccttacaggattagaaacccgttcagggggtcgccaaaatgctttaggtccgttagcccagagagaatgagcaggcgcagcgtacgctcatctgacagaaaaaaagcactggaggacgtagttcagagatcgggacacggcaccgaatttaacaaacagaagcaccttgaggcagccgacaaaggccatagccccgcacagaagccgaagacctcttctggaacaaagccaagcgtgaaacctaccagtgctacaaaaagcgacagcaatttgggtggccattccattaggtgtaagagcaaaaacctggaagacgacacgcttagtgaatgcaaacaggtgagtgataaggccgtctcattacagagaaaacttcgtaaggagcagagtctgcactacgggtccgtgctgcttattaccgaactgcctgaggatggatgtacagaagaagacgtgagaaagctcttccagcccttcgggaaggtgaacgatgtcttaatcgtaccctatcgtaaggaggcctacttagagatggaattcaaggaggcaataacggccataatgaaatatatagaaaccacacctcttaccataaaaggtaagtcggttaagatctgcgtccctggaaagaaaaaggcccaaaacaaagaagtaaaaaagaagactctcgagtcaaaaaaagtttctgcatccacactgaagcgcgatgccgatgccagtaaggctgtggagattgttacaagtaccagcgctgcaaagaccggacaagccaaggcctcagtcgccaaggtgaataagtcaaccgggaaaagtgcatcctctgtgaagagtgttgtgactgtagccgtgaagggaaataaggcctccataaaaaccgctaagtcaggcggcaagaagagcctcgaggctaagaaaacggggaacgtcaaaaataaggattctaataaacctgttaccatcccggaaaactcggagatcaaaacaagcatcgaggtgaaggccaccgaaaattgtgcaaaagaagccatctctgacgctgcccttgaagctactgagaacgagcccttaaataaggagacagaagagatgtgtgtgatgctggtctcgaacttacccaataaggggtacagcgtggaggaagtgtacgaccttgcaaagcccttcggaggtctgaaggacatactgatcctctccagccacaaaaaggcctacatcgaaatcaacaggaaagctgcagaatcgatggtcaagttctacacttgtttccctgtactgatggacggaaatcagcttagtatctctatggctccagagaatatgaacattaaagacgaggaggcaatcttcatcactcttgtgaaagagaacgaccccgaggcaaacattgacacgatttacgaccgattcgtccatctggacaatctcccagaggacgggctgcagtgcgtgctctgtgtcggcctgcaattcggtaaagttgatcaccacgtcttcattagcaataggaataaagctatcctgcagctggattccccagaaagtgcccagtcaatgtactccttcctcaagcagaaccctcagaacatcggtgatcacatgctcacttgcagcctatcgcctaaaattgacctgccagaggttcagatagaacacgaccccgagctggagaaggaacggctttggctgagcaaaacgcttcgcatcctgaaagctctacttgttgaggtacccaaccttaaacggagtcactacttccacctgatttggatgaatctgctcttgtggatgagactttag

SEQ ID NO: 212340 - DNA, 2445 bp, synthetic construct
  misc_feature 1..2445: note = Description of Artificial Sequence: Synthetic coding sequence
  source 1..2445: mol_type = other DNA
atgagccggccccggttcaacccccggggcgacttccccctgcagaggccgcgcgcaccgaatccatctggcatgcggcctcctgggccctttatgcgacccggatctatgggtttacctcgcttttacccagcgggccgggcgaggggcatcccacatcgcttcgccgggcacgaaagttaccagaacatggggccgcaaagaatgaatgtgcaggtgacacagcacaggaccgatcctcgtctcactaaggaaaagctcgacttccacgaggcccaacagaagaaagggaagccccatggatcccggtgggacgatgagcctcacatatcagcctctgttgccgtcaagcaatcctcagttacgcaagtgaccgaacagtcacccaaagtgcagagtcgttacacaaaggaatccgcgagtagtatcctggcatccttcggcctcagtaacgaggatctcgaagaactctcacggtatccagatgaacagctgacacctgaaaacatgccactgatactaagagatattaggatgaggaagatgggacggagactgccgaacctcccctcccagtcacgaaataaagagaccctgggaagcgaggccgttagcagtaatgtcatcgattacgggcatgctagcaaatatggatatactgaggatcctctggaagtgcggatctatgatccggagattccaacagacgaggtcgagaacgagttccagtcccagcagaatataagtgcttcagtacccaacccaaatgtaatatgtaattccatgtttccggtcgaggatgtattccgtcagatggacttcccaggggaaagctcaaacaacagatctttcttttcggtcgaatcaggcaccaaaatgagcgggcttcatatctccggagggcagtctgtgctcgaaccaatcaaatctgtgaaccagtctatcaatcagacggtttctcaaacaatgtcacagtctttaatcccaccatcaatgaatcaacagccgttctcttcagagctgatctccagcgtctctcagcaggaacgaattccacacgaaccagtgatcaactcaagtaatgttcacgtgggtagcagaggaagtaagaagaactaccagtcccaggcagatatccctatccgctccccattcggaatcgtgaaggcaagctggttaccgaagtttagccacgcggacgctcagaaaatgaaacgactgcctacaccctcgatgatgaacgactattacgccgcctcccctaggattttcccccatctgtgttccctctgtaatgtcgagtgtagccatctgaaggattggatccagcaccagaatacaagcacacatatcgaaagctgccgtcagctgcggcagcaatatcccgactggaacccagagatactgccatcccgccggaacgaaggaaacaggaaggaaaacgaaaccccccgccgccggtcacattctccatcaccccgacgtagccgcaggagcagcagctcccacagattccgcaggtccagatctcccatgcattacatgtacaggccccggtccaggtccccccggatctgtcataggtttattagcaggtaccggagtcggtctcggagtagatcaccgtatagaattagaaaccctttcagagggtccccaaagtgcttccgatccgtaagcccagagcgcatgtctcgccgctctgtgcggagtagcgacagaaaaaaggcactcgaggacgttgtgcagcgatctggacatggcactgagtttaacaagcagaagcacttggaagctgccgataaaggccatagtccagctcaaaagcctaagacgtctagcggtacgaaaccaagcgtcaaacccacaagcgcaaccaaaagcgattcaaacctggggggtcactccatacggtgtaaatctaagaacctggaagacgacacattgtcagagtgcaagcaggttagtgacaaagccgtatccttgcagaggaaacttaggaaagaacaaagtctgcactacggaagtgttctgctgataactgagttgcccgaagacgggtgcaccgaagaggacgtgagaaaactatttcagccttttgggaaggtcaatgacgtgctcatcgtgccgtaccggaaggaggcttatctggaaatggaatttaaggaggccattaccgcgataatgaagtatatcgaaaccacacccctgacgattaaaggtaaaagtgttaaaatctgtgtccccggaaagaaaaaagctcagaacaaagaggtgaaaaaaaagacactggagtctaagaaggtgtcggcgtcgactctgaaacgtgacgccgacgcttctaaagctgtggaaattgtgacgagtacaagcgccggcctgcttccaaccggaggaggcaacaattatccccaaattgttctcgcaccaggtctctgccactag

SEQ ID NO: 212341 - DNA, 2643 bp, synthetic construct
  misc_feature 1..2643: note = Description of Artificial Sequence: Synthetic coding sequence
  source 1..2643: mol_type = other DNA
atgccccgggacggcgtgcccgccggcaacaccacccccgccgccgcgcaggccgcggctcagtctcctgactcagccacagcaggggcaccccaggtcctcgactctctcaagcgttatccagactggaatcccgaaatcctcccgagccgacggaacgaaggcaaccgtaaagaaaacgagacccctaggcgtcgatcgcacagccctagccccaggcgatctaggcgctcctcttcatcccaccgcttccggagaagcaggtctcccatgcattacatgtaccgacctcggagcagatcacccagaatctgtcatcgctttatcagtaggtaccggtcacgtagccggtctcgatccccctatcgcattagaaatccttttcgcggttcaccaaagtgttttcgctcggtgtcaccagagcggatgtcaagacggtctgtccgttcaagtgatcggaaaaaggcattggaggatgtggtacaaaggtcggggcatgggaccgaattcaataaacagaagcatctcgaagcagctgacaagggacactcccctgctcagaaacctaaaactagcagtgggactaagcccagtgtcaaaccaacatcggcaaccaaatcagacagcaatctcgggggacattctattagatgcaagagcaaaaacctggaagacgacactctttcagagtgcaagcaagtcagcgataaggctgtctcactgcagaggaaacttaggaaggagcagtctctgcactacggatccgtgcttctcattaccgaacttcccgaggacggttgtactgaggaagatgtgaggaagctgttccagccatttgggaaggtgaacgacgtgctgattgttccctatcggaaagaagcttacctggagatggagtttaaagaggcaatcaccgccatcatgaagtacatagaaactacacctctgacgatcaagggaaagtctgtgaaaatttgcgtgccagggaaaaagaaggctcagaacaaggaggtcaagaaaaaaaccctcgagtccaagaaggtgtccgctagtacgctgaagagggacgctgacgcatccaaagcagtcgaaatagtgacatcaactagtgctgccaagaccgggcaggctaaggcctctgtggcaaaggttaataaatccacaggcaaatcggccagctccgttaaatcggtggtgactgtcgctgttaagggaaataaagcctccattaaaaccgccaaaagtgggggcaagaagagcctcgaggcaaaaaaaacgggcaatgtgaagaacaaggattcaaataagccagttactatcccggagaactccgagatcaagacctctattgaagtgaaggcaacggagaactgtgcaaaggaagccatttctgatgcggctctggaggccaccgaaaatgaaccgttgaacaaagaaacagaggaaatgtgtgtgatgttagtgtcgaatttgccaaataagggatattccgtggaggaggtatacgacctcgccaagccgttcgggggtctaaaggatatattgatactgagcagccataagaaagcatatatcgaaattaaccgcaaagcagctgaatccatggtaaaattttatacatgttttcctgtgctgatggacgggaaccaactctcaatctccatggctcctgaaaatatgaacattaaagatgaggaggcaatcttcattacattggtgaaggaaaatgacccagaagccaatattgataccatttacgacaggtttgtgcatctggataacttgccagaggatgggctgcagtgtgtcctgtgtgtggggctgcaattcggtaaagtggaccaccacgtcttcatttctaacagaaataaggcgattctccagttggacagccctgagtctgcacagtccatgtatagcttcttaaaacagaatccacagaacattggagatcatatgctgacatgcagcctctccccaaagatcgacctacctgaagtgcaaatagaacatgaccctgaattagagaaagaaagtcccggcctgaagaactcgccgatagacgaatctgaggttcagactgccacagactcaccgagtgttaaacccaacgagctggaagaggagagtacaccgtcaattcagactgaaactctggtgcagcaggaagaaccatgcgaggaggaggctgagaaagccacatgcgattcggattttgcagtcgagacgctggaattggagacccagggagaagaagtgaaagaggagatcccactggtagccagcgcatcagtttccattgagcagtttaccgagaacgcggaggaatgtgcccttaatcagcaaatgttcaactccgacttagagaaaaaaggcgcagaaatcattaacccaaagaccgcactccttcccagcgattccgtattcgccgaagagagaaacttaaagggaatattggaggagtctcctagcgaggctgaggactttatatccggaatcacccagaccatggtggaggcagtagccgaggtcgaaaaaaacgagaccgtgagcgaaattctaccctctacctgtatcgttactctcgtgccgggaattcctacaggcgatgagaagacagtcgataagaagaatatctcttag

SEQ ID NO: 212342 - DNA, 2757 bp, synthetic construct
  misc_feature 1..2757: note = Description of Artificial Sequence: Synthetic coding sequence
  source 1..2757: mol_type = other DNA
atggacagcccccccctgaaggccctgaacagcaacagcatctacttcctccttctgttccactgtatgctcatctccgaagtccagatcgaacatgatcccgaactagagaaggagtcacccggtcttaagaattccccgattgacgagtcagaggtgcagaccgctactgactctccttccgtcaagcctaacgaacttgaggaagagagtactccatctattcagacagagacactcgtgcaacaggaggagccatgcgaggaggaggctgagaaggccacctgtgacagtgacttcgccgtggagacacttgagctggaaacccagggtgaggaggtgaaggaggaaatccccttagtcgcttcagcgagtgtttctattgagcagttcacggagaatgccgaagagtgtgccctgaatcagcagatgttcaattctgacctggaaaagaagggtgccgagattatcaatcccaaaacggcactacttccttccgacagtgtgtttgctgaggagaggaatctgaaggggattctggaagagtccccatcagaagccgaagatttcattagtggtattacacagacaatggtggaagcagttgcagaggtagaaaagaacgaaacggtctcagagatactgccaagcacctgcatagtgacactggtaccaggtatcccaacgggcgatgagaagaccgtggataagaaaaacatcagtgaaaaaaagggaaacatggacgagaaggaagagaaggaatttaatactaaagagacacgcatggacctgcagatcggaactgagaaggctgagaagaacgaaggcagaatggatgcagaaaaggtggagaagatggcagccatgaaggaaaagcctgctgagaatactctgtttaaggcctacccgaataaaggggtcgggcaggcaaataagccggatgagacctccaaaacctccattctagcggtttctgacgtgtcttcttccaagccgagtattaaagcagtgatcgtgtccagtcctaaagcaaaggctaccgtcagcaagacagagaatcagaaaagtttccccaagtcagtccctcgtgaccagatcaatgctgagaagaagctcagcgctaaagaatttggattgctgaaacctacctctgctagaagcggcctggcagaaagtagcagcaaattcaagccgacccagagctcccttactcgcggcggctcgggaaggatttccgctttgcagggtaagttatcaaagctcgactaccgtgacatcacaaaacagtcacaggagactgaggccagaccatctataatgaaacgtgacgactcgaataataaaacgctggcggagcagaacacgaagaaccctaaatccaccactggccgcagcagtaagtctaaagaggaaccgttgtttccgtttaacctggacgaatttgtgacagtggatgaagtgattgaggaggtgaatccctcacaggctaaacagaatcctctgaaaggtaaaaggaaagagacactcaagaacgtacctttctccgagctgaacttgaaaaagaagaagggaaaaactagtacacctagaggcgtggagggcgagctgtctttcgtgacactggacgagattggcgaggaggaggatgccgcggcccatcttgcccaagcactcgtcactgtggacgaggtgatcgatgaagaagaactaaatatggaagaaatggtgaaaaactcgaattccttgttcacactggatgaattgattgatcaagacgactgcattagccacagtgagcccaaagatgtcacagttttgtctgtggcagaagagcaggacctgttgaaacaggagagactggtcaccgtggatgagatcggggaagtcgaggaactgcccctgaatgagtctgccgacattactttcgcaacactgaatactaagggcaacgaaggagacacagtgcgcgattctataggcttcatcagctctcaagtgcctgaagatcccagcacgctggtcactgttgatgagatccaagacgactctagcgacctgcacctggtgactctggatgaagtcaccgaggaggacgaggattccctggcggacttcaacaatctgaaggaagaactaaacttcgtcactgttgacgaagttggtgaggaggaagatggtgataatgacctgaaggtggagctcgctcagagcaagaacgatcaccccaccgacaagaagggaaatagaaagaagcgggcagttgacacaaaaaaaacaaagctggaaagcctctcccaggtggggcccgtcaacgagaatgttatggaggaggatctaaagactatgatcgagcgccatctcactgcaaagacaccgaccaaaagggtacgaatcggcaagacgctaccatccgaaaaggctgtggtgacagagcctgccaaaggtgaggaggctttccagatgagtgaagtggacgaggagagcggcctcaaggactctgagccagaacggaaacgcaagaagacagaggattctagctctgggaagagcgtggcttccgatgtgccggaggaactcgactttctagtgcccaaggccgggttcttttgtccgatctgctcactcttctattctggcgagaaagcgatgaccaaccattgtaagtctacaagacacaagcagaataccgagaagtttatggcgaagcaaagaaaagaaaaggaacagaacgaggctgaagagagaagctcacggtag

SEQ ID NO: 212343 - DNA, 5937 bp, synthetic construct
  misc_feature 1..5937: note = Description of Artificial Sequence: Synthetic coding sequence
  source 1..5937: mol_type = other DNA
atgagccggccccggttcaacccccggggcgacttccccctgcagcgacccagagcgcccaacccatcaggaatgagaccccccgggcctttcatgcgacccgggtccatgggtcttccacgcttttaccccgccggtcgcgcccgtggcatcccccaccggtttgcagggcacgaatcataccagaacatgggacctcagaggatgaacgtgcaggttacgcagcacagaacagatccacgcctcaccaaggagaagctagacttccacgaggctcagcaaaaaaagggcaaaccacacggttccaggtgggatgacgaaccacacatctcagctagtgtggccgtaaaacagtctagcgtcacacaagtgactgagcagagccctaaggtgcagtctcgatatactaaagagagcgccagctcgattcttgcaagctttggtctgtcaaacgaggatctggaagagttatctagatatccagacgaacaacttactcccgaaaacatgcccctgatcctgcgggatatccgcatgcgcaagatgggaagacgtctgccgaatttaccatctcagagtaggaacaaggagacactggggtcagaagcagtgtccagcaacgtcattgactacggtcacgcctcaaagtacggttatactgaggatccactggaggtgcgaatctatgacccagagatccccaccgatgaggtggagaacgagttccagagccagcagaacattagcgcctcagttcccaaccccaatgtgatctgcaattcaatgtttcctgtggaagacgttttccggcagatggacttccctggggagagttctaacaataggagctttttctccgttgagtccggaacaaagatgagcgggctgcacatctctgggggccagtctgtcctcgagcctatcaagagcgtgaatcagagcatcaatcagactgtcagccagacaatgtcacagtcgcttatcccacctagtatgaaccagcagcctttctctagtgagctgatttcatccgtcagccagcaagagaggattccccacgaacccgtgattaactccagcaatgttcacgttgggtcccgcgggagcaagaaaaactaccagtcgcaagccgacattcccatccgttctcccttcgggatagtaaaggcttcctggctgccaaagtttagtcatgccgacgcccagaagatgaagagactccccacccctagcatgatgaacgattactatgccgcaagccccaggatttttcctcatctgtgttcgttgtgcaatgtagagtgctctcacctcaaggattggatccaacatcagaatacatccacccatattgaaagctgtaggcagctgagacaacagtaccctgactggaacccggagattctgccctcacggcgaaatgaaggaaaccgtaaagagaatgagactccacgtaggcggtcacattctccttctccgaggcgtagtcgcaggtcgtcaagcagccatcggttccgccggtcccgttcacccatgcactacatgtatcgaccaagaagccggagcccccgaatctgtcacaggtttatcagtagataccgcagtcgatcccgctcccggagtccatacagaatccggaaccccttccggggttcccccaaatgcttcaggagcgtatcgcctgagcgtatgtcgaggagatctgtgcggagctcagatcggaagaaggcccttgaggacgtggttcagaggagcgggcacgggacagaattcaacaagcagaaacatttggaggctgccgacaaaggacacagtcccgcacagaagccgaaaacatcctctggtacaaaacctagtgtcaaacccacctctgctaccaagtccgactctaacctcggcgggcattctattagatgcaaaagtaagaatttggaagatgacacactgagcgagtgtaagcaagtgagcgataaagctgtttcactacagcggaaactgagaaaggaacagtccctgcattatggttccgtcttgttgatcaccgagctgccagaagacggatgtacagaggaagacgtccgtaagcttttccagcctttcggtaaagtgaacgacgttctgattgtcccttataggaaggaggcctacttagagatggaattcaaggaggccattaccgctatcatgaagtacatcgaaacgaccccacttacaatcaaaggcaagtctgtcaagatctgtgtgcccggtaaaaaaaaagctcaaaataaagaggtcaagaaaaagacattggaaagtaaaaaggtgagtgcttcaacgctcaaaagagatgctgatgcttcaaaagctgtggagatcgtgaccagcacgagtgcagctaaaacaggtcaggctaaggctagcgtcgctaaagtgaacaaaagcaccggcaagagtgccagtagcgttaaatctgttgtaaccgtggcagtcaagggcaacaaagctagcattaaaacggctaaaagcggtggtaagaaatcccttgaagcgaagaagaccggaaacgtgaaaaataaggactccaacaaacccgttacgatccccgagaactccgaaatcaaaacgtctattgaggtgaaagccacggaaaattgtgctaaggaagcaatttctgatgctgcacttgaggcgaccgaaaatgaacccttaaataaggagaccgaggagatgtgcgttatgctcgtgtcaaacctgcctaacaaaggctatagcgttgaggaagtgtatgatttagccaagccattcggtggcttaaaagacatccttattctaagctctcataaaaaagcctacatcgagatcaacaggaaagctgctgagagcatggtaaaattctacacttgtttcccagtgctaatggacggtaatcagttgtcaatctcaatggcccctgagaacatgaatatcaaagacgaagaggcaatttttataaccctcgtcaaagagaatgacccggaggctaacattgacaccatctatgaccgattcgttcatctagacaacctgcctgaggatggccttcaatgcgtactgtgcgtgggactacagttcggcaaagtggaccaccatgtttttattagcaaccgaaacaaggctatattgcagcttgactccccggaatccgcgcagtccatgtattccttcctcaaacaaaatccccagaatattggggatcacatgctcacctgttcgctgtcccccaaaattgacttgcccgaagttcagatcgagcacgacccagagctggagaaagagtctcccggtctgaagaattctcccatagacgagagcgaagtccagactgctaccgactccccaagcgtgaaacccaacgaactcgaagaagagtccactccttcgattcaaactgagaccctggtgcaacaggaggaaccttgcgaagaagaagctgaaaaggccacatgtgattctgactttgccgtcgagacattggagctcgagacccagggggaggaagttaaggaggagatccctctcgtcgctagtgcctccgtgagcattgaacagttcacagaaaacgccgaagaatgcgccctgaatcagcagatgttcaatagcgatttggaaaaaaaaggggcggaaatcatcaatccaaagactgccctgctgccttccgactctgttttcgccgaagagaggaacctgaagggcatactggaggaatctccttcagaggccgaggacttcatttccggtatcacacaaaccatggtcgaggcggtcgccgaggtagaaaagaatgaaacagtgtctgaaatactgcctagtacttgtatcgtcactctggtgcccggtattcctaccggagacgagaagacggttgacaaaaagaatatttccgagaaaaagggaaacatggacgagaaggaggagaaggaatttaacacaaaagagacacgaatggatctgcaaatcggcacagagaaggccgaaaagaatgagggcaggatggacgctgaaaaagtggagaaaatggccgctatgaaggagaagccagctgagaacaccctgttcaaagcgtacccaaacaaaggcgtcggacaggccaacaagcctgacgaaacctccaaaacgagcattttagccgtttcggacgtttcttcttccaaacctagcatcaaggccgttatagtctccagtccaaaagcaaaggctactgtgtcaaagactgagaaccagaagagttttccgaaatctgtgccacgtgatcagatcaatgcagagaagaagctgagcgcgaaagagttcggcctgctcaagccaacatcggcccgcagtggcctcgctgagtctagttccaaatttaaaccaacccagagttcactgactagaggtggctcaggaaggatctctgcgctacagggcaaattaagcaaactcgactatcgtgacattacgaagcagtcccaggaaactgaagctcgtcccagcatcatgaaaagggatgatagcaataacaaaacgctcgcagagcaaaataccaaaaaccctaagtccacaaccgggagatcctccaaatccaaagaggaaccgttatttccattcaatctggatgagtttgtaaccgtcgacgaggtgatcgaggaagtgaatccttcccaggccaagcagaatcctctgaagggaaagcggaaggagactctgaaaaatgtgccattttctgagcttaacttgaaaaagaagaagggtaagacaagcacgcctcgaggagtggaaggtgaactgtccttcgtaacactcgacgaaatcggcgaagaagaagatgctgccgctcatcttgctcaggctcttgtgacagtggacgaagtcattgatgaggaggagcttaacatggaagagatggtcaaaaattctaattctctcttcacactggatgaactgattgatcaagacgactgcatcagccacagtgagcctaaagatgtaactgttctgagcgtcgccgaggagcaggatctattaaaacaggagaggctcgtgacagtcgatgagatcggggaggttgaagaactccccttaaatgaaagcgccgacattaccttcgccaccctaaacacaaagggcaatgagggcgacaccgtccgcgattctatcgggttcatctcaagccaggtcccagaggacccatccacactggttaccgtcgacgagatccaagatgatagcagcgacctccatctggtaaccctggatgaggtgacagaagaggatgaggactcacttgccgacttcaataatttaaaggaggaattaaacttcgtcactgtcgatgaagtgggcgaagaggaggacggcgataacgacctcaaggtcgagctggcacagtctaaaaatgatcacccaaccgataaaaaaggaaataggaagaaaagagctgtggacaccaaaaagaccaagctggagtccctttctcaggtgggtccggttaacgaaaacgtaatggaagaagatctcaagactatgatcgaacgtcacctgacagctaagactcccactaaacgtgtccgtatcggcaaaacattgccgagcgagaaagccgtggtgacagaacctgctaagggtgaggaggcattccaaatgagcgaggtggatgaggagtcgggactcaaggacagcgagcccgaaagaaagcgcaaaaaaacggaagatagttcctcaggaaagagtgttgccagcgacgtgcccgaggaactggacttcctcgtccctaaggcaggattcttctgccctatttgcagcctgttttatagtggggaaaaagctatgaccaatcattgtaaatctactcggcacaaacagaatacagagaagtttatggcaaagcagcgaaaagaaaaggaacagaacgaagccgaagaacgcagctctcgatag

SEQ ID NO: 212344 - DNA, 90 bp, synthetic construct
  misc_feature 1..90: note = Description of Artificial Sequence: Synthetic coding sequence
  source 1..90: mol_type = other DNA
atgagccggccccggttcaacccccggggcgacttccccctgcagaggccacgtgccccaaaccctagtgggatgcgccctcccggctag

SEQ ID NO: 212345 - DNA, 594 bp, synthetic construct
  misc_feature 1..594: note = Description of Artificial Sequence: Synthetic coding sequence
  source 1..594: mol_type = other DNA
atgagccggccccggttcaacccccggggcgacttccccctgcagcggccgcgcgctccaaacccaagtgggatgcgccctcccgggccctttatgagacccggcagcatgggactaccgcgcttctaccctgcaggcagagctcgtggaatcccgcatagattcgcaggccacgaaagttaccaaaacatgggtccacagcgcatgaatgtacaggttacccagcatcggacagatccacgcttgacgaaagagaagcttgacttccatgaagcccaacaaaagaagggtaaacctcatggaagtcgctgggacgacgaaccccacatttctgcaagcgtggctgttaaacagtccagcgtcacccaggtcacagagcaatctcctaaggttcagtcgaggtacacgaaggaatctgccagctctatcctggcatccttcggcctgagcaatgaggaccttgaagaattaagccgctacccagatgagcagttgacacctgaaaatatgcctctcatcctgcgggatatacgtatgcgcaagatggggcgccgtctgcctaacttaccctctcaatcccggaataaagagtag

SEQ ID NO: 212346 - DNA, 111 bp, synthetic construct
  misc_feature 1..111: note = Description of Artificial Sequence: Synthetic coding sequence
  source 1..111: mol_type = other DNA
atgagccggccccggttcaacccccggggcgacttccccctgcagcgcccccgcgcgccgaacccaagtggcatgagacctcctggccctttcatgagacctgggtcatag

SEQ ID NO: 212347 - DNA, 189 bp, synthetic construct
  misc_feature 1..189: note = Description of Artificial Sequence: Synthetic coding sequence
  source 1..189: mol_type = other DNA
atgagccggccccggttcaacccccggggcgacttccccctgcagcgccctcgggcgccaaaccccagcggcatgcgaccacccggtccttttatgagaccaggaagtatggggctaccacggttttaccccgcaggccgggcacgcggaatcccgcatcggtttgcaggccacgaaagttaccagtag

SEQ ID NO: 212348 - DNA, 189 bp, synthetic construct
  misc_feature 1..189: note = Description of Artificial Sequence: Synthetic coding sequence
  source 1..189: mol_type = other DNA
atgagccggccccggttcaacccccggggcgacttccccctgcagaggccaagagcccccaatccttccggtatgcggcctccaggcccctttatgcgccccggcagcatgggcctgccccggttttacccagctgggagggcccgcggcattccccataggttcgccggccatgaatcttaccagtag

SEQ ID NO: 212349 - DNA, 1758 bp, synthetic construct
  misc_feature 1..1758: note = Description of Artificial Sequence: Synthetic coding sequence
  source 1..1758: mol_type = other DNA
atggacagcccccccctgaaggccctgaacagcaacagcatctacttcctgctgctgttccattgtatgttgatctccgaggtacagatagaacacgacccggaacttgagaaagaaagccccggcctgaagaactcccctattgacgaatctgaagtccagacagctaccgatagcccatccgtgaaaccaaatgagctggaagaagaatccacaccaagcatccagacggagactctcgtgcagcaggaagaaccttgcgaggaggaagcagagaaagctacctgcgattctgattttgcagtcgagacactggagctggaaacacagggggaagaagtaaaggaagagatccctctggtggcaagtgcctccgtgagcattgaacaatttactgagaatgcagaagagtgtgctctcaaccaacagatgttcaattctgatctggagaaaaaaggtgcggaaattattaaccccaagaccgcgcttctccccagcgattctgtgtttgctgaagaacgcaatttgaaagggatcctggaagaatcccccagcgaagcggaggatttcattagcgggataacacagactatggttgaggccgtagcagaggtggaaaagaacgaaaccgtcagtgagatcctcccctcgacttgcatcgtgaccttggtcccagggataccaacaggtgacgaaaagacagtagataaaaaaaacattagtgagaagaagggaaacatggacgaaaaggaggagaaggagtttaataccaaggagacccggatggatttgcagatcggcactgagaaggccgagaagaatgagggccgcatggatgctgaaaaggttgaaaagatggcggccatgaaagagaagcccgcggagaatacattgttcaaagcctacccaaataagggcgtggggcaagctaataaacccgatgaaactagtaagacgtctattctggctgtctctgacgttagtagtagtaagcctagcattaaagccgtgatcgtttcgtcccctaaggcaaaggcgaccgtctctaagactgaaaaccagaagtccttcccaaaatccgtgcctagggaccaaatcaacgccgaaaagaaactgagcgcgaaggaattcggcctgctgaagcccacatcagccaggtccggtcttgctgaaagctccagcaagtttaagcccacccagagttcattgactagggggggttctggccgtatttctgcgctgcaggggaagctgtccaagctggactaccgcgatatcacaaaacagtcccaggaaacggaagctaggccctccattatgaagagggacgattcaaacaataagaccctggccgaacagaatacaaaaaaccctaagagtactaccgggcgttcctcaaaaagtaaggaggaacccttgttcccttttaacctggatgagtttgttaccgtggacgaggtgatcgaggaggtgaatcccagtcaagccaaacagaaccctctaaagggcaagcgcaaagagacactgaaaaacgttcctttttctgagttgaatctgaagaagaaaaaaggcaagacatcaacacctcgaggggttgaaggagaactaagctttgtcaccctggatgaaattggagaggaagaggatgcagccgcgcatttagctcaggcactggtcaccgtggacgaagtaatcgacgaagaggaacttaacatggaagagatggtgaagttcaagttcaccttttatattaggtag

SEQ ID NO: 212350 - DNA, 3075 bp, synthetic construct
  misc_feature 1..3075: note = Description of Artificial Sequence: Synthetic coding sequence
  source 1..3075: mol_type = other DNA
atgccccgggacggcgtgcccgccggcaacaccacccccgccgccgctcaagctgcagcacaaagtccagattctgccaccgccggagctccacaggtgttggactccctaaaacgctttgtgttattcctcgaaaattttgcgccattagtcaattccttgaacttaggaattgctaatccactcctgttaggcccctcgccgctgcattttgcccagattaagacccagctcgcactgcagcagcttaacgctgtagcctcccatgggtcaactcccccttatactctgttgaatcaggctttcttaaaaattgccatgtctagaccgcggttcaacccaagaggcgattttcctctccagcggccaagagcccccaacccttccggcatgaggcccccgggtccattcatgcgaccgggctcgatgggtctgccccgtttctatcccgcggggagggcaaggggtattccccatcggttcgcgggtcacgagagctaccagaatatgggcccccagaggatgaatgtccaggttacacaacaccggaccgatccccgcctcacaaaggagaaactggacttccacgaagctcagcaaaagaaagggaaaccgcacggctctcgatgggacgacgagccacatatctctgcctcagtagccgtgaagcagtcatccgtgacccaggtcacggagcagagcccaaaggtgcaatctaggtacactaaagaatctgctagcagtattcttgcttcgttcggactgtctaatgaagatctcgaggagctgagcagataccccgacgagcaattaaccccagaaaacatgccccttatcctgagagatataaggatgcgcaagatgggacgcaggctcccaaacctcccaagccagtcccgcaataaagagactttgggctcggaggctgtgtcaagtaacgtgatcgactacgggcatgcctcaaagtatggttacaccgaggaccccttggaggtacggatctacgatcctgagatccccaccgacgaggtggagaacgagtttcagtcacaacagaacatctctgcgagcgtacccaaccccaatgtgatttgcaactccatgttccccgtggaggacgtctttaggcagatggattttcccggtgagtcctcaaataataggtcatttttctccgtggagtccggcaccaaaatgagcggtctgcatatctccgggggacaatctgtactcgagccaatcaagtctgttaatcagtctatcaatcagaccgttagccagacgatgtcgcaatcactcatacctccctccatgaatcagcaaccattttcgtcagagcttatttcgtcagtgagtcagcaagaacgcattccacacgagcctgtgataaatagctctaacgtgcatgtcgggtctaggggaagtaaaaaaaattaccagagccaggcagacatcccaatccgatcacccttcggtatagtcaaggctagctggttgccaaagttttcccacgcagatgcccagaagatgaaacgtctgccgaccccttctatgatgaacgactattatgcggccagccctcgcatattccctcacttgtgtagtctgtgcaacgtggagtgttcgcacttgaaggactggatccagcatcaaaacactagcacacatatcgaatcgtgcaggcagcttcggcagcagtatcctgattggaatcctgagattctgccctcaagaaggaacgaagggaacaggaaagagaacgaaacgccgaggcggcggtctcatagccctagtcctcgaaggtccagaaggtcaagcagctctcataggttccgaagaagtcgctcccctatgcactacatgtacaggccaagatcccggtcccctcgcatatgccaccggtttatttcccggtacaggagtagatcacggtcgaggtctccgtatcggatcagaaacccctttcgaggatcacccaagtgtttcagatccgttagccccgaacggatgtccagacggtctgtccggtcctccgacaggaaaaaggccctggaagacgtggtgcagagaagcggacacggtaccgagtttaataaacagaagcatctcgaggccgccgacaaaggccatagccccgctcagaaacctaagacgagctcaggtacaaaaccctccgtcaaaccaacgtctgcaactaagagcgattccaacttaggcggtcactctatacgctgcaagagtaaaaacttggaagacgataccctgtcagaatgcaagcaggtgtctgataaggctgtgagtcttcaaagaaaactgcgcaaagagcagtctctgcattatggaagcgtcctgttgatcactgaactgccagaagatggatgcacagaagaggacgtcagaaaactcttccaacctttcggtaaagtcaatgacgtcctgattgtaccttacaggaaagaagcatatctcgagatggagtttaaggaagcaatcacggcaatcatgaagtatatcgagactacccctctgacaattaaagggaaatccgttaagatctgcgtgccaggcaagaaaaaagcccaaaataaggaagtgaagaagaagaccctggagagcaaaaaagtgtcagcttctactttgaaaagagatgcggacgcatcaaaggcagtcgaaatagtcacctcgacctcagcagagtccgttgatcaaacccaacagttagtccctctggtcaggaatacagcccgagatcatgatggaacaccggagaatgagggtgaggagaccgtccagtcggcactttttggattccaatacgacgcaagcgaccacaccatggcctggttaggcccaaataccgtgccagaggtgaaggaaatgattctgcaggacccccagcttcagactactcagcttccacaaacaacgcaggcccctgacattacctggggaatgctcaaaaagacgacttataaagctgaacagattctgctccagacacaaaagccattcaccccagataacttatttttggcattgttgtccggagatgctaaacctgagtacgagcagtag

SEQ ID NO: 212351 - DNA, 1317 bp, synthetic construct
  misc_feature 1..1317: note = Description of Artificial Sequence: Synthetic coding sequence
  source 1..1317: mol_type = other DNA
atgcaggccgaggaccggagccagttcggcagcgccgccgagatgctaagcgagcaaacagctgccctgggaacaggctgggaatccatgaatgtacagttagacggagccgagccccaggtagagaggggctcccaggaagaaagaccctggcgcactgtgcccggccccctagagcacctgtgctgtgaccttgaagaagaacctcagtccctccaggagaaggcccagtcagccccctgggtccctgccatcccccaggagggtaacaccggggactgggagatggccgctgcactgctcgccgctgggtctcagggcctagtgacaatcaaagacgtgtccttgtgcttttctcaggaggaatggaggagcctggatccaagccagacggacttttacggagaatacgtgatgcaggaaaattgcggaattgtagtgagcctccgctttcctatccccaagctggatatgctctcccaattagaaggaggcgaggagcagtgggtcccagacccccaggatctggaggaacgcgacattttgcgagttacatatacaggagacggatcagagcatgaaggagatacgcctgaattggaagctgagcctcctagaatgttaagcagcgtatcggaggatacagtcttgtggaaccctgaacatgacgagagttgggacagtatgccctcctcctctcgcggaatgctactgggcccccccttcttgcaagaagattcctttagcaacctcctatgcagtaccgaaatggattctctcctcagacctcacacctgtccacagtgcggtaagcagtttgtgtgggggtcccatctagcccggcaccagcagactcataccggcgagcgaccttactcttgcctcaagtgtgaaaagacatttggccgcaggcaccatctgatccgacaccagaagacccatctacatgataagacaagccgatgttcagaatgtggcaaaaacttccggtgtaactcacatctagcgtcccatcagagggtacatgcagaaggaaagagttgtaagggccaggaggtaggcgagagtccgggcacccggaagcggcaacgagcacctcctgtccccaaatgccacgtatgcaccgagtgcggcaagtcatttggacggcggcaccacttggtacgacactggctaacccacacaggcgaaaaaccctttcagtgtccacggtgcgagaagtccttcggacgaaaacaccacttggatcggcacctcctcactcaccaggggcagtccccgcgcaattcttgggacagagggacgtcggtgttctag

SEQ ID NO: 212352 - DNA, 1248 bp, synthetic construct
  misc_feature 1..1248: note = Description of Artificial Sequence: Synthetic coding sequence
  source 1..1248: mol_type = other DNA
atgctgagcgagcagaccgccgccctgggcaccggctgggagagcatgaatgtccagctggatggcgcagaaccacaggtagagcgaggctctcaggaggagcgaccctggcgtaccgtgccggggcccctcgagcacctatgttgcgatctggaagaagaaccacaaagcctacaggagaaagctcagtctgcaccctgggtacctgcaatcccccaagaaggcaacaccggcgattgggaaatggccgctgccctgctggcagcggggagccaggtgagctcagcatcgctcggcgtctcatgcggaccaattaccgctgcgttcgtcctgctgtcccaccagccgatcgacgagctggctcacatgatcataaatggatttcctatccctaaattagacatgctcagccagctggaagggggggaagaacagtgggtgcctgatccccaggatctcgaggaaagagatattctccgcgtgacctacacgggggacggttcggaacacgaaggagacacgccagagctcgaagccgagcctcctaggatgttgtcttcagtaagcgaagacacagtgctgtggaaccctgaacatgatgagtcttgggacagtatgccatcctcatctcgtgggatgctccttggccccccattcctgcaggaggactctttcagcaacctcctttgtagtaccgaaatggatagcctgttgagacctcatacttgtccccagtgtgggaagcagtttgtctggggcagccaccttgctcgccaccagcagacacacaccggcgagcgcccctatagctgcctgaagtgcgaaaagacattcggcaggcgccatcacctaattcggcaccaaaagacacacctgcatgacaaaaccagccggtgtagtgagtgcggaaagaattttcgctgtaacagccatctggcgagccaccagagggtacacgcagaaggcaagtcgtgcaagggccaagaggttggcgagagtccgggaacccgcaagcgccagcgggcccctcctgtgcctaaatgccacgtctgcactgaatgtggtaagtcatttggtaggaggcatcatcttgtcaggcattggctgacccacacaggagagaagccattccagtgtccccgctgcgagaaatccttcggccgaaagcatcacttggaccgtcacctactcacccatcaggggcaatctccccgcaactcatgggaccgcggaacatcagtcttctag

SEQ ID NO: 212353 - DNA, 1317 bp, synthetic construct
  misc_feature 1..1317: note = Description of Artificial Sequence: Synthetic coding sequence
  source 1..1317: mol_type = other DNA
atgcaggccgaggaccggagccagttcggcagcgccgccgagatgctgtctgaacagactgcagcactgggcacaggctgggagagcatgaatgtgcagctggatggcgccgagccccaggtggagcgcggctctcaagaagaaagaccctggagaacagtaccagggcccctggaacatctgtgctgtgacctggaggaggagccgcagagccttcaggagaaggcacagtctgctccatgggtgccagccattccacaagagggaaatacaggggactgggaaatggctgcagctttgctcgcggccgggtctcaagggctagtgacgatcaaggacgtgtccctctgcttcagccaggaggaatggcgcagcctggatcccagccagaccgacttctacggtgagtacgtgatgcaggagaactgtggcatcgtggtcagtcttcggtttccgatccccaagttggatatgctttctcagctggagggtggggaagaacaatgggtgcctgacccgcaggatctggaagaaagagatatccttcgagttacttacacaggggacggtagcgaacacgaaggggatactccagagcttgaggctgaacctccccgtatgctctcatcggtctcagaagatacggtgctttggaatcccgagcatgatgaatcgtgggactctatgccctcttcctcccggggcatgctgctcggtcctcccttcctacaggaggattcctttagcaatctcctgtgcagcactgaaatggatagcctgttgaggcctcacacgtgtccccagtgcggaaagcagtttgtgtggggttcacacctggccaggcatcagcagacgcacacaggggagcggccttatagctgtctgaagtgtgagaaaaccttcggccgaaggcaccatcttatccgccatcagaagacacatttgcacgataagacgtccagatgcagcgagtgcggcaagaacttccgctgtaacagccatctagcctctcaccagcgagtccacgctgaggggaagtcctgcaaagggcaggaagtaggagaatcccccggaacaagaaagcgccagcgggcgccacctgttcccaagtgccacgtgtgtaccgagtgcggtaaatcctttgggcggagacaccaccttgtgcgtcattggctcacacacaccggggagaagccctttcagtgcccccgctgcgaaaaaagtttcggcaggaagcaccaccttgatcgacatctccttacacaccagggccagagcccaagaaatagttgggatcgtgggacctccgtgttttag

SEQ ID NO: 212354 - DNA, 1275 bp, synthetic construct
  misc_feature 1..1275: note = Description of Artificial Sequence: Synthetic coding sequence
  source 1..1275: mol_type = other DNA
atgctgagcgagcagaccgccgccctgggcaccggctgggagagcatgaacgtgcagctggatggagccgagcctcaggtggaacggggttcgcaggaggaacggccatggaggacagtacccggccccctggagcatttgtgctgtgatctggaggaagagcctcagtccctgcaggagaaagcacaaagcgctccctgggttccggctataccccaggagggcaacacaggagattgggaaatggccgctgccctgcttgcggcggggtcccagggccttgtcacaatcaaagacgtgtccctgtgtttttcccaggaagagtggaggtctctggaccctagccaaaccgatttttacggggaatatgtcatgcaagagaactgtggcatcgttgtgagcctgcgcttcccgattcctaagctggacatgctgtcacagcttgaagggggagaggagcaatgggtgccagaccctcaggatctcgaagagagagatatccttagagtcacctatacgggggatggcagcgagcacgagggggacacacctgagttagaagccgaaccgccacggatgctctccagcgtgtcagaagataccgtgctctggaatcccgaacacgacgagtcctgggatagcatgccctcgtctagcagggggatgttattggggcctcccttcttgcaggaggattcattctccaacttactgtgcagcaccgaaatggattccctcttgagaccacacacctgtccgcagtgtgggaagcagtttgtttgggggagccacctcgcacggcatcaacagacccacacaggcgaacgaccttattcttgcttgaaatgcgagaaaacatttggcagacggcatcacctgatcagacaccagaagactcacctgcacgacaaaacctcacgctgctctgaatgtggaaagaacttccgctgcaatagccatctcgcttcccatcagcgcgtacacgccgaagggaaatcctgtaaaggccaggaggtcggcgaatctcccgggactcggaagcggcagagggcacccccggtacccaagtgccacgtttgtactgaatgcggcaaaagttttggccgcagacaccatttggttcgacactggttaactcacactggcgagaagcccttccaatgtcccaggtgcgagaagtcatttggcagaaaacatcaccttgaccgccatctgcttacacatcagggccagtcgccccgcaactcctgggatcgtggtactagtgtcttctag

SEQ ID NO: 212355 - DNA, 411 bp, synthetic construct
  misc_feature 1..411: note = Description of Artificial Sequence: Synthetic coding sequence
  source 1..411: mol_type = other DNA
atgcaggccgaggaccggagccagttcggcagcgccgccgagatgctctctgagcaaacagccgctcttggcaccggctgggaatcaatgaacgtccagctggatggtgcggagccgcaagtcgaaaggggatcccaggaggagaggccatggcggacggtccctggccccctggaacatctgtgctgtgacctcgaggaggaaccccaatccttacaagagaaggcgcagtcagcaccctgggtccctgctattccgcaggagggcaataccggggactgggagatggccgccgctctgctcgcagccggaagtcagggactcgtgaccattaaggacgtgtcactctgcttctcacaagaggaatggcggtccttggacccttcccaaacggacttctacggcgaatag

SEQ ID NO: 212356 - DNA, 324 bp, synthetic construct
  misc_feature 1..324: note = Description of Artificial Sequence: Synthetic coding sequence
  source 1..324: mol_type = other DNA
atgctgagcgagcagaccgccgccctgggcaccggctgggagagcatgaatgtgcagctggacggggccgaacctcaagtagagcgcggctctcaggaggaacggccttggcggactgtgcccggaccactggagcacctatgttgtgacctcgaggaggagccccagtcattacaggagaaagcccagagcgccccttgggtgccggcaattccccaagaaggaaataccggggattgggaaatggcagctgctttgctggcggccggatcacagggacttgtgactatcaaggatgtcagcttgtgcttctcacaagaatag

SEQ ID NO: 212357 - DNA, 234 bp, synthetic construct
  misc_feature 1..234: note = Description of Artificial Sequence: Synthetic coding sequence
  source 1..234: mol_type = other DNA
atgctgagcgagcagaccgccgccctgggcaccggctgggagagcatgaatgtccaactggatggcgccgagccgcaggtggaacgagggtcccaagaagaacggccttggcgtaccgtcccaggccccttagagcacttatgctgcgatttagaggaggaaccacagagtctgcaagaaaaggcccagtctgcaccctgggttccagccatcccacaagaaggaaacacatag

SEQ ID NO: 212358 - DNA, 3984 bp, synthetic construct
  misc_feature 1..3984: note = Description of Artificial Sequence: Synthetic coding sequence
  source 1..3984: mol_type = other DNA
atgcggagcttcctgcagcaggacgtgaacaagaccaagagccggctgaacgtgcttaatgggcttgcaaacaacatggatgacctcaagatcaatactgacatcacaggcgccaaggaggaactgctagacgataataattttatatccgataaggaaagcggggtccacaagccgaaagactgccagactagttttcagaaaaacaatacgctgacgcttccagaagagctgagcaaagacaagtcagagaatgcactctccggtggtcaatcgagcctatttatacacgcaggtgcccccacagtaagcagcgagaacttcatcttacccaaaggagctgctgtgaacggccccgtctctcatagctctctgaccaagacatctaatatgaacaagggtagtgtgtctttaacaaccggccaacccgttgaccaacctaccacagagtcatgcagcactctcaaagtggccgccgatttgcagctcagcacgccccaaaaagccagccaacaccaagtgctgtttctgctctctgacgtggctcacgctaagaatccaacacacagcaacaaaaagctgcccaccagcgcaagcgtaggctgcgacatccagaactccgtcggctctaatatcaagagcgacggaacactgatcaaccaggtggaagtcggagaggacggagaggatcttttagttaaagacgattgcgtgaatactgttaccggcatcagttcgggcactgatggcttccgctcagagaacgataccaactgggatccacagaaggagtttattcagttccttatgaccaatgaggagacagtcgacaaggcccctcctcacagcaaaatcggcctagagaagaagagaaaacgtaagatggacgtttctaaaatcacaaggtataccgaagactgcttttctgacagcaactgcgtgcctaacaagtccaagatgcaggaggtggattttctcgagcaaaatgaagaactgcaggctgtggatagccagaagtatgcgctcagtaaagtgaagcccgaatccactgatgaggatttggagtccgtggatgctttccagcacctcatctacaacccagacaagtgtggtgaagagtcatcaccagtgcataccagcacattcctgtctaacaccctaaagaagaagtgcgaagagtctgacagcgaaagcccagcgactttcagtactgaggagccgtctttctacccatgcaccaagtgcaatgtgaactttcgggagaaaaaacatctccatcggcacatgatgtatcatcttgacgggaactcgcactttcgccacttgaatgtgcccaggccatacgcctgccgcgagtgtgggcgcaccttcagagataggaactccttgctgaaacacatgattattcaccaggaacgccgacagaaacttatggaagaaatcagagaattgaaggagctgcaggacgaggggcgctccgccaggctgcaatgtccgcaatgtgtctttggtaccaactgtccaaagacttttgtgcagcacgcaaagactcacgagaaagacaagagatactattgttgcgaagagtgtaatttcatggccgtgactgaaaacgaactcgagtgtcaccgggggatcgcacacggagcagtcgtcaaatgccctatggtaaccagtgatattgcacaaaggaagactcagaagaaaaccttcatgaaagatagcgtggttggaagcagcaaaaagtctgcgacttatatttgtaagatgtgcccattcacaacttccgccaagagtgtcctaaagaagcacacagagtacctgcactcttcctcctgcgtggactcctttggctcccctctggggcttgacaaacgcaaaaacgacattttggaggaacccgtagatagcgactcaaccaagactttgaccaagcaacagagcactactttccccaagaattcagcattgaagcaggatgtgaaaagaacatttggctcaaccagccagagtagcagcttcagcaagatacacaagcgtccccaccgtatccagaaagctcgtaagagcatagcacaatctggcgtgaacatgtgcaatcagaattcttcccctcacaagaatgtgaccattaagtcctcagtggatcagaagccaaagtatttccaccaggccgctaaggagaagtccaatgctaaggcaaacagccactatctgtaccgtcacaaatatgagaactatcggatgatcaagaaaagcggcgaatcctatcccgtgcactttaaaaaagaagaggcatcaagccttaattcattgcatctgttttcttcttctagtaattcacacaataacttcattagtgatccacacaagcccgatgctaagcgccctgaaagttttaaggatcaccgtcgcgtcgccgtgaagcgggtgattaaggagagtaagaaggagtcttccgtggggggggaggacctggattcttatcccgattttcttcataaaatgaccgtcgtggtactccaaaaactgaactccgcagagaagaaagattcatacgagacagaggatgaatcttcctgggacaacgtggagctgggtgattacacgacccaggcaatcgaagacgagacatactccgacattaaccaggagcacgttaacctcttccccctttttaagagcaaagtggaaggccaggagcccggggaaaacgctaccctgtcatacgatcagaatgatggtttttatttcgagtactatgaggacactggcagcaataattttctgcacgaaattcacgaccctcaacatcttgaaactgctgacgcctctctctccaagcacagctcagtctttcactggaccgatctgtcactggagaagaagtcttgcccgtactgtcctgctacttttgagaccggcgtcggtctgtctaatcacgtgagggggcacttgcacagagcaggcttatcttatgaggcaaggcacgtagtaagccccgagcagatcgcgaccagcgataagatgcagcatttcaaaaggactgggacggggactcccgtaaaacgggttagaaaggctatagagaagtctgagacgacgtcggaacatacatgccagctgtgcgggggttggttcgatacaaaaataggactgagcaatcacgttcgcggccacctaaagaggctgggaaaaaccaagtgggacgcgcataagtctcccatctgcgtactgaatgagatgatgcagaacgaggagaaatatgagaagatcctgaaggccctgaattcccgacgaatcattccccgccccttcgttgcccagaaattggcatcctccgatgattttatctcccagaacgtgattcccctcgaagcctatcgcaatgggttgaagactgaggcactgtccgtgtcagcttccgaggaggaggggttaaattttctcaatgaatacgatgagacaaagcccgaactgcccagtggtaaaaaaaaccagagtctcaccctgatagagctcctgaaaaacaaaaggatgggtgaggagcgaaatagcgcaatctcgcctcagaaaattcacaatcaaaccgcaaggaaaagatttgtacaaaaatgtgtcctaccgctcaacgaggacagcccattgatgtaccagcctcagaagatggacctgactatgcacagtgcccttgactgtaagcagaagaaatcccggagccggtctgggtccaagaagaaaatgcttacgctgccgcacggagccgacgaagtgtacattctgaggtgccggttctgcggcctggtgttccggggaccactcagcgtgcaggaggactggattaagcatcttcagagacacattgtgaacgctaacctgccacgaacgggtgcaggtatggtggaggtgacatcactgttaaagaaacccgcctcgatcacagagactagtttctcactgctgatggctgaggctgcttcctag

SEQ ID NO: 212359 - DNA, 318 bp, synthetic construct
  misc_feature 1..318: note = Description of Artificial Sequence: Synthetic coding sequence
  source 1..318: mol_type = other DNA
atgctgatccggcagaacctggccctggactgcaagcagaagaagagtaggagtcgtagtggatccaaaaaaaagatgcttacactgccccacggtgctgacgaagtgtacatcctcagatgcagattctgcggcttagtatttcgcggacccttgagcgtgcaggaagactggattaagcatctccagagacacattgtaaatgcaaacttgccccggacgggtgcaggcatggtggaggtgacaagtctcctaaaaaaacctgcctccattacagagactagttttagcctattaatggccgaggcagcgagctag

SEQ ID NO: 212360 - DNA, 318 bp, synthetic construct
  misc_feature 1..318: note = Description of Artificial Sequence: Synthetic coding sequence
  source 1..318: mol_type = other DNA
atgctgatccggcagaacctggccctggactgcaagcagaagaagtctagaagtcgttctggtagtaaaaagaaaatgctgacgttgccacatggtgccgacgaggtctatatcttgaggtgccgattttgtggcctggttttccgggggcctctgtctgtgcaggaagattggatcaagcatctccaaaggcacattgtcaatgctaatctccctaggaccggagctggcatggtagaggtgacaagtttgcttaagaaacctgcctccatcacggagacctcatttagcttgcttatggccgaggctgcttcttag

SEQ ID NO: 212361 - DNA, 3984 bp, synthetic construct
  misc_feature 1..3984: note = Description of Artificial Sequence: Synthetic coding sequence
  source 1..3984: mol_type = other DNA
atgcggagcttcctgcagcaggacgtgaacaagaccaagagccggcttaatgtattaaatggactagccaacaacatggatgacttgaagatcaatactgatattactggggctaaagaggaactgctggatgataacaattttattagtgataaggagagcggagttcataaacccaaggactgccagacaagcttccaaaaaaataatacccttacattgccagaggaactgtctaaggataaatccgagaatgcgctctcaggggggcagtcctctctcttcatccatgcaggcgcacccactgtgtccagtgaaaattttattctgcccaaaggggcggccgtgaacggccccgttagccactcaagcctgacaaagacatctaatatgaacaagggaagcgtctcgttgaccactgggcagcctgtggatcaacccacaactgaatcctgcagcaccctgaaggtagctgctgatctgcagctgtctactccgcaaaaggcatctcagcatcaagtgctcttcctgctctctgacgttgcgcacgctaagaaccctacacactctaataagaaactccctacatctgcgtcagttggatgcgacatccaaaattccgtgggctccaacatcaagtctgacgggacgctaattaaccaggtggaggtgggtgaggacggtgaggaccttctcgtcaaggacgattgtgttaacacagtgacaggcatatcatccgggaccgacggtttccggtcagaaaatgacacaaactgggatccacaaaaagagttcattcagtttctaatgactaacgaggagacagtcgacaaagcgccaccgcattcaaagatcggacttgaaaaaaaacggaagcgaaagatggacgtgtctaagatcacgcggtataccgaggattgcttcagcgatagtaactgcgtgcctaataaaagcaaaatgcaagaagtcgattttctcgagcagaatgaagaactgcaggcagtggatagtcagaagtacgcacttagcaaagtcaagccggaatctaccgacgaagatctagagtccgtggatgcctttcagcacctcatttacaaccctgacaagtgtggcgaagaatctagccccgtgcatacgtccacttttctatctaacactttgaaaaagaagtgcgaagagtccgactccgagagccccgcgacattctccaccgaagagccgtccttttatccctgcaccaaatgcaatgtgaacttcagagagaaaaagcacctgcatcgacatatgatgtatcacttagatggcaattctcacttcaggcacctcaatgtcccaaggccctatgcttgccgtgagtgtggaaggacattcagggacagaaattcattgctgaagcacatgattatccaccaagaaaggaggcagaagctgatggaagaaatacgcgaactgaaggaattgcaggacgaaggcagaagcgctcgactacagtgccctcagtgtgtgtttggtactaactgtccaaaaacttttgttcagcacgccaagacccacgaaaaagacaaacgatattactgctgcgaggaatgtaacttcatggcagttactgaaaacgagctggagtgccaccgaggaattgcgcatggggcagtggtcaagtgtcccatggtaacatccgacatcgcccaacggaagactcaaaagaaaaccttcatgaaggacagcgttgtaggtagcagtaagaaaagtgccacatatatctgcaagatgtgcccctttactacttctgcaaagtcagtcctgaaaaagcacaccgagtatctacattcatcctcctgcgtggactcctttgggtccccgctggggctggacaagcgcaagaatgacatactcgaggaacccgtcgacagcgacagcaccaaaacgctcacaaagcaacagagcacgacgttccccaaaaacagcgctctgaagcaggatgtgaaaagaactttcgggagcacaagccagtcatcttcgtttagtaaaatacataagcgccctcaccgaatacagaaagcaagaaaaagtattgcccagagtggcgtcaacatgtgcaatcaaaattcctcgccgcataagaatgtgaccatcaagtcctcggtggaccaaaaaccaaaatacttccatcaggccgctaaggaaaaatcaaatgcaaaggctaatagtcattacctctaccgacacaagtacgaaaactatcgtatgattaaaaagagcggagagtcatatcccgtgcacttcaaaaaggaagaggctagctctctgaattctctgcacttattcagttcatcttccaacagtcacaacaactttatcagtgatccccacaaacccgacgcgaagagacctgagagttttaaggaccaccggagggtggcagtgaagcgcgtgataaaggagtctaagaaggagtcgtcagtaggaggtgaggatctcgattcttaccccgatttcctccacaagatgacagtggtcgtgctgcaaaaactcaactccgccgaaaagaaggactcctacgaaactgaggacgaatcgtcttgggataatgtagaacttggggactacactacccaggcaattgaggatgaaacatactctgacatcaatcaagaacatgtgaacctgtttcccctgttcaagtctaaagttgaaggacaggaaccaggtgagaatgccacactttcatacgaccagaacgatgggttttactttgaatattatgaagatactgggagcaataatttcctacacgagatccacgacccacagcatttggaaacagccgacgcctcactttccaaacacagtagtgtgttccactggacagacttaagcctcgaaaagaagtcgtgcccttactgccccgcaacttttgaaactggtgtgggacttagtaatcacgtaagagggcacctgcacagggcaggcctatcttacgaggcaaggcacgtagttagcccagagcagattgcaactagcgacaaaatgcagcattttaagcggaccggcactggtacccccgtcaagcgggtgcggaaggcaatcgagaaaagtgaaaccacgtctgaacacacttgccagctatgtggcggctggttcgatacaaaaataggactgtccaaccacgtgcgtggccacttaaagcggttgggcaagaccaaatgggatgctcataagtcaccaatctgtgtgcttaatgaaatgatgcaaaacgaagagaagtacgagaagattctcaaagctctcaactcccggcgtattattccacgtccgttcgtcgcacagaagctggccagttctgatgattttatatctcagaatgtgataccactggaggcctacagaaatggcctgaagacagaagcgctgagcgtgtccgctagcgaggaggaaggtctgaacttcttgaatgaatacgacgagacaaaaccagaactcccttctggcaagaaaaaccagagcctgacacttatcgagctcctgaagaacaaacgcatgggagaagaaagaaattctgccatctctccacagaaaatccacaatcaaaccgccagaaaacgctttgtacagaagtgtgttctgccattaaacgaggattccccattaatgtatcagccccaaaaaatggacttgacaatgcactctgctctggattgcaaacagaaaaagagtagaagtcggagcggatctaagaagaagatgctcacgctacctcatggggcagacgaggtgtacatcctgcggtgtagattttgcgggttggtgttccgaggcccactctccgtccaggaggactggataaagcatcttcagaggcacatcgttaacgctaatctgccgcggacgggcgccgggatggtggaggtcacatctctgctaaaaaaacctgcctcaattacagagacttctttctctttgctaatggcagaagcggcctcctag

SEQ ID NO: 212362 - DNA, 1953 bp, synthetic construct
  misc_feature 1..1953: note = Description of Artificial Sequence: Synthetic coding sequence
  source 1..1953: mol_type = other DNA
atgatgtaccacctggacggcaacagccacttccggcacctgaacgttccccgtccttacgcttgtagggagtgtgggagaacctttagagacaggaattcactactcaaacacatgattatccatcaggagcgcagacagaagttaatggaggaaatcagggaattaaaggagctgcaagacgagggcaggagtgcccggcttcagtgtcctcaatgcgtgtttgggacgaattgtcctaagactttcgtccaacacgcaaagactcatgagaaagataaacggtactattgttgcgaggagtgtaatttcatggccgtaacagaaaacgaattagaatgtcacaggggcatcgctcacggagccgtcgttaaatgtccaatggtgaccagtgatattgctcagaggaagacccaaaagaaaactttcatgaaggattccgtggtgggtagctccaagaagagcgcaacctacatttgcaagatgtgcccctttactaccagcgcaaaaagtgtgctgaagaagcacactgaatacctgcattcctccagttgcgtggactccttcggtagccctctgggccttgacaaaagaaaaaatgacatcctggaagaacctgtggactctgacagcacaaagaccctaacaaaacagcagtccaccaccttccccaagaattctgccctcaagcaagacgtaaagaggaccttcgggtcgacatcacagtcgtcatctttctctaagatccataagaggcctcacagaatccagaaggctcggaagtcgatagctcagtctggcgttaacatgtgcaaccaaaactcttctcctcataagaacgtcaccatcaaaagctccgtggatcagaaaccaaaatacttccaccaggccgccaaggagaagtcaaacgccaaagcaaacagtcattatctataccggcataagtatgagaactaccgcatgattaaaaagagcggtgagagctatcctgtgcacttcaagaaggaagaagcctcatctctcaactcgctgcacctgttctcttcgtccagcaatagccacaataactttatcagcgacccccataagccagacgcgaagcgcccagaaagcttcaaggatcatcgccgggtggctgtgaagagggtgatcaaagaatcaaagaaggagtcctccgtggggggcgaggatctcgattcctatccagattttctgcataagatgaccgtagtagtgctgcagaaattgaattctgctgagaaaaaagatagctacgagacagaggatgaaagcagttgggacaacgtggagcttggcgactacacgactcaagccatagaagacgaaacatacagcgatattaatcaagagcacgtgaacctgttccctctttttaagagtaaagtggagggacaggaaccaggagagaacgcaacgctgtcttatgatcaaaacgatggcttttactttgagtactatgaagacactggatctaacaattttctgcatgagatccatgacccacagcacctcgagaccgccgacgcatctctgtccaagcattcttcagttttccattggacagacctatctctcgaaaaaaagtcttgtccctactgccccgcgacattcgagactggcgttggcctgtctaaccatgtcaggggccatctgcatcgagccggcttgagttacgaggcgcgccatgtagtcagtcccgagcagattgccacatcagataaaatgcagcattttaagcggacaggtacagggacccccgtgaaacgagtgcggaaggcaatcgagaagtctgagaccacctccgagcatacttgtcagttgtgtggggggtggtttgacactaagattggcttatctaatcatgtacgtgggcatttgaaacgcctgggaaaaacaaagtgggatgcccacaaatcgccaatctgcgtctag

SEQ ID NO: 212363 - DNA, 924 bp, synthetic construct
  misc_feature 1..924: note = Description of Artificial Sequence: Synthetic coding sequence
  source 1..924: mol_type = other DNA
atgcggagcttcctgcagcaggacgtgaacaagaccaagagccggctaaacgtgcttaacgggctggcgaacaatatggacgacctgaagattaacacagacatcacaggcgcgaaggaagagctgttggacgacaataattttatctccgataaggagtctggcgttcataagcccaaggactgccagacatctttccagaaaaacaataccttaaccctccccgaagagctgtcaaaagataagtccgagaatgcattgtctggcgggcagtcatctctgttcatacacgccggcgccccaacagtgtctagtgagaatttcattctgcccaagggtgctgctgtcaacggcccggttagccatagctccctgaccaagactagtaacatgaacaaagggagcgtttccttgaccacagggcagcctgtggatcaaccgacaactgagtcgtgcagtaccctcaaggtagccgcggacctccagctgagcaccccgcagaaagcatcacagcaccaggtgctgttcctgctgtctgacgtcgcccacgcaaagaacccgacccacagtaacaaaaaattacctacctctgcgtccgttgggtgcgatatccagaactccgtaggcagcaatatcaagtcagatgggacgctgattaatcaagtggaagtgggggaggatggagaggatctccttgtgaaagacgattgcgtgaataccgtgacgggcatctctagtggaaccgacgggttcagatccgagaacgatacaaattgggaccctcagaaagagtttatccagttcttaatgactaacgaggaaacagtcgacaaagcacccccgcattcaaagattggccttgagaagaagaaggcaaaaaacggatgcaaacaggacaatagtctctaccgcggactcctctag

SEQ ID NO: 212364 - DNA, 1518 bp, synthetic construct
  misc_feature 1..1518: note = Description of Artificial Sequence: Synthetic coding sequence
  source 1..1518: mol_type = other DNA
atgaccaaggcccaggagagcctgaccctggaggacgtggccgtggacttcacttgggaggagtggcagtttttgtcacccgcgcagaaggacctctacagggacgtgatgctagagaactattctaatcttgtgtccgtgggttaccaagctgggaagcctgatgcactgaccaaactggagcagggtgaacctctctggaccttggaggatgaaatccattcaccagctcatccagaaattgagaaagccgatgatcaccttcagcagcccctccagaaccaaaaaattctgaagcggacgggacaaaggtatgagcacggccggacgttaaagtcatatttggggctgaccaatcagagcagacgctataatcgcaaagaacctgcggaatttaacggagatggtgcattccttcatgataaccatgagcagatgccaactgagatcgagttccccgagtcgcggaagccaattagtactaagtcccagttcctgaagcaccaacagacccataatattgaaaaggcacacgaatgtaccgattgcgggaaagccttcctgaagaagtcccagcttactgagcataagaggattcataccgggaagaagccgcatgtctgcagtttatgtggtaaagccttttataagaaatataggctgaccgaacacgagagagcccaccgcggtgagaaaccacatggatgttccttgtgtggaaaagctttttataaacggtacagactgaccgaacatgagcgtgcacacaagggggaaaagccctacgggtgtagcgagtgcgggaaggcttttccacgcaagtctgagctaacagaacatcagaggatccatactggcattaaaccgcaccaatgtagcgagtgcgggcgggcattttcacggaaatccctcctggtggtgcaccagaggactcatacaggcgagaaaccccacacatgtagtgaatgcggcaaggggtttatccagaaggggaatctcaacattcaccagaggacccacaccggcgagaagccctacggatgcatcgattgcggtaaagcatttagccagaagtcctgcctggtggcgcatcaaaggtaccacaccggaaagactccgttcgtatgcccggaatgcggacagccatgcagtcagaaatctgggctgatccgccaccaaaaaatccacagcggcgaaaagccctacaagtgcagtgattgcgggaaggcttttctcaccaaaactatgcttatagtccaccaccgtacccatacaggcgagaggccctacgggtgcgacgagtgtgaaaaggcgtatttttatatgtcctgtttagttaaacataagaggatccatagccgggagaagagaggcgactccgttaaggtcgaaaatccatccacagctagccactcactgagcccttctgagcacgttcaaggtaagtctccggtaaacatggttaccgtggctatggtcgctggccaatgcgagtttgcgcacatactgcatagttag

SEQ ID NO: 212365 - DNA, 1833 bp, synthetic construct
  misc_feature 1..1833: note = Description of Artificial Sequence: Synthetic coding sequence
  source 1..1833: mol_type = other DNA
atgcccagcgcccggggcaagagcaagagcaaggcccccatcaccttcggggatcttgctatctacttcagccaagaagaatgggagtggctgagtccaatacaaaaggacctgtatgaggacgtcatgcttgaaaattaccgaaatctggtctctctgggactgagttttcgtaggcccaacgtgataacccttctcgagaaaggcaaggctccctggatggtggagccagtccgcagaagacgcgcacctgactcaggatccaagtgcgaaacaaagaagctgccaccgaaccagtgcaacaaatcgggacagtccatctgccagaaactggtcagtgcccagcagaaggcacctacgcgcaaaagcggttgtaataagaactccgtgcttgtcaaaccgaagaaaggccacagtggaaagaagccactgaaatgcaatgactgtggaaagactttctcccgaagcttctccttaaagctacaccaaaacattcacaccggggaaaagccattcgagtgcagtaattgtcgcaaggctttccgccagatctcctccatcttgctgcaccagcgaatccactccggaaagaagtcacacgagtgcaacaaatgtggcgagagtttcaaccagcggaccactctgatacttcacatgagaatacacgatggaaaggagatcctggattgtggcaaggctctgtcccagtgccagagcttcaatattcatcagaagattcacgtcgtgggtaacgtgtgccagtgccgaaagtgcgggaaggcgtttaaccagatgtcttcccttcttctccacaagaagatacataacggtaaaaagacacacaaatacaacaagtgcggccgcggcttcaaaaagaagagcgtctttgtggtacacaagcgcattcacgctggcgaaaagatccccgagaacgctaaggcattgtcacagtcactccagcagcggagccaccacttagagaacccctttaaatgcaggaagtgcggaaagctgtttaaccgtatatcaccgctgatgctacatcagcggattcacacgagcgagaagccctacaagtgtgacaagtgcgataaattctttaggagactttctactttgatacttcatctgaggattcacaacggtgagaagctctaccggtgtaacaagtgtgaaaaggtgtgcaatcgacatagctccctgattcagcatcaaaaagtacacaccaaaaaaaaaaagcttttcgagtgtaaagagtgcggaaagatgttttcgggcacggccaacttaaagattcaccagaacattcatagcgaagaaaagccattcaaatgcaataaatgctccaaggtatttggtaggcagtcctttttgattgagcaccagcgcattcacactggagaaaaaccttaccaatgcgaggagtgcggaaaagccttttctcataggatatcactgacacggcacaaaagaatccacacagaagaccggccttacgagtgcgatcagtgtgggaaggcattttctcagtccgctcacctggcacagcacgaaagaatacatacaggagaaaagccatatacttgcaaaacctgcggtaaagctttttcccagcgaacctctctgatattacatgagagatctcacaccggtgaaaagccttacgaatgcaatgagtgtggcaaggccttctcttccggatctgacttaatccggcatcaaaggtcccactcaagcgagaagccttacgagtgctcaaagtgcggaaaagcctacagtcgatcatcctctctgatacgccaccagaacacccattctgaggagaaggcgtag

SEQ ID NO: 212366 - DNA, 2217 bp, synthetic construct
  misc_feature 1..2217: note = Description of Artificial Sequence: Synthetic coding sequence
  source 1..2217: mol_type = other DNA
atgcggaccctggtgaacgccctgagcggcggcggccaggagatcaaacccgaggggaaatgcgcccacaatggaatgtgcttccggtgtgaggaggtcgcaccagacacttgcgaggcctatccttatcccggtctggtcgtgtcagtggccgggaaagaagggcctaaccccgatcataaaagaggctttctggatctggcccaggaagggattcaggccttaccatatcagctatccgctcatttaagcgtctggaccctgaagggagaagagagaatgccaagtgccaggggcaaatcaaagagcaaggcccccattacgtttggggaccttgcaatctatttctcccaggaggagtgggagtggctgtctcccatacaaaaggatttgtatgaggatgtgatgctcgagaactaccgaaatttggtgtcactgggcctgagttttaggagaccaaatgtcataaccctgctagagaagggcaaggccccttggatggtagagccagtgcgacgaagaagagcccctgagctcgtgaccgtggctctctttagttcctttggagaagtgatgttctcccgaatggtcctgatgctcatggacgtgtgtcaatacctcgtgattgacgaactcgattcggggagcaagtgtgaaacaaagaagcttccacctaaccagtgtaacaaaagcggacagagcatctgccagaaattagtttccgctcaacaaaaagcacccacacgcaaatccgggtgtaataagaactccgtccttgtcaaacctaagaaaggccattccggaaagaagcctctgaaatgtaacgattgtggcaagactttttcccgtagcttttcccttaaactacaccaaaacattcacaccggtgagaagcctttcgagtgctctaactgtcggaaagcattccgtcaaatctctagcatcctgctgcatcaaagaattcacagtggtaaaaagtctcacgagtgtaataagtgtggcgaaagtttcaaccaaagaactaccctgattttgcacatgaggatccacgatggaaaggagatcctcgactgcgggaaagccctctcccagtgtcagtcgttcaatatccaccaaaaaattcatgtagtaggtaacgtatgtcagtgtcgaaagtgtggcaaagcctttaatcagatgagctctctcctgctgcacaaaaagattcataatggcaagaaaacccataaatataataagtgcggtcggggatttaagaaaaaaagcgtctttgtcgtgcataaacggatccacgcaggtgaaaaaatccccgagaacgctaaagccctgtcccaatccctgcagcagcgatctcaccatctcgaaaaccccttcaagtgcagaaagtgtgggaagctctttaatcgaatcagcccactgatgctgcatcagcggatccacactagtgaaaaaccttataaatgtgataagtgcgacaagtttttccgcaggctgtctacccttatactgcacttgcgcattcataacggcgagaagctgtaccgatgcaacaaatgcgagaaggtatgcaacaggcactctagccttattcagcaccaaaaagtgcatacaaaaaagaagaaactgttcgaatgtaaggagtgcggcaaaatgttttcaggcaccgccaatctgaagattcatcaaaacatccactctgaagagaagccttttaagtgcaacaaatgtagcaaggtttttgggcgacagtctttccttatcgaacatcagcgcatccacacaggggaaaaaccttaccaatgcgaagagtgcggcaaagctttctctcatcggatttcgttaacccggcataagaggattcacacagaggatcgcccatacgaatgcgaccagtgcggaaaggcattcagccagagcgcccatcttgcacagcacgagcggatccacacaggtgagaagccttacacatgcaagacttgcggcaaggctttctcacagagaacttctcttatactccatgagcggagccataccggggagaagccttacgagtgtaatgagtgtggaaaggcttttagctctgggagcgatctgattcgtcaccaacgatctcactcctccgaaaaaccatacgagtgcagcaagtgtggaaaggcttattccagaagctctagtctgattaggcaccagaacacccacagcgaggaaaaagcgtag

SEQ ID NO: 212367 - DNA, 975 bp, synthetic construct
  misc_feature 1..975: note = Description of Artificial Sequence: Synthetic coding sequence
  source 1..975: mol_type = other DNA
aagaacagcgtgctggtgaagcccaagaagggccacagcggcaagaagccgctcaagtgtaatgattgtgggaagactttcagccggtcattctcactgaaattgcatcagaacattcacacaggggagaagccattcgaatgtagtaactgtagaaaagcttttagacagatcagcagcatccttctgcatcaacgaatccacagtggaaagaagtctcatgaatgtaacaagtgcggcgaatccttcaaccagcggaccacactgatcctccacatgaggattcacgatggaaagaaccctttcaagtgcaggaagtgtggcaaactattcaataggattagcccgcttatgcttcatcagcggatccacacaagcgagaaaccctacaaatgcgaagagtgcggtaaaatgttctctgggaccgccaacctgaaaatacatcagaacatccacagcgaagagaaaccatttaagtgtaacaaatgcagcaaagtgtttggcagacagagcttcctgatcgagcaccagcggatccacaccggagagaaaccttaccagtgtgaggaatgcggcaaggcattctcacaccgtatctctctgacaaggcacaagcgcattcacacggaggaccgaccgtatgagtgcgaccagtgcgggaaggcgttttcccagtcagcccatctggcgcagcatgagcgaatccatacaggtgaaaaaccttacacctgtaagacctgcggcaaggctttctcacagcgcacatctctgattctgcacgagcgttctcacaccggcgagaaaccctacgagtgcaatgagtgcggcaaagcgttttcctcaggaagtgatttaattcgacatcagcgctcacactcctctgagaaaccctacgagtgctccaagtgcggtaaggcatacagtaggagcagctcccttatccgacaccaaaacacccattcagaagaaaagtag

SEQ ID NO: 212368 - DNA, 1179 bp, synthetic construct
  misc_feature 1..1179: note = Description of Artificial Sequence: Synthetic coding sequence
  source 1..1179: mol_type = other DNA
atgcggatccacgacggcaaggagatcctggactgcggcaaggccctctcgcagtgccagtccttcaacattcaccagaagatacacgtggttggaaatgtctgtcagtgccggaagtgcggtaaggctttcaaccaaatgagctctttgctattgcacaaaaagatccataacgggaaaaagactcacaaatacaacaaatgcggaaggggcttcaagaagaaaagcgtgtttgtggtacataagaggattcatgctggcgagaaaattcctgaaaacgctaaagctctttcgcagtctctgcagcaacggagtcaccatcttgagaaccctttcaaatgtaggaaatgtggcaaactgtttaaccggatttccccactgatgctacatcaacgaattcacacatctgagaagccttacaagtgcgacaaatgtgacaaattttttagacgactgagtactctgattctgcacctgaggatccataatggtgagaaactgtataggtgtaacaaatgcgagaaagtgtgcaaccgtcacagctccctaatacagcaccagaaagtgcacaccaagaagaagaaactcttcgagtgcaaggagtgtggtaaaatgttttctggcacggctaacttgaagatccaccaaaatatccactcagaggagaagccctttaagtgcaataaatgcagcaaagtgttcggtcggcagtcattcctaatagaacaccaacgaatacacacaggggagaaaccttaccagtgcgaggagtgtggcaaggcatttagccaccgaatcagcctgacccgacataagcgcatacacaccgaagaccggccgtacgagtgtgatcagtgtggtaaagctttctcgcagtctgcccacctcgcccaacatgaacgcatacatacaggggagaagccctacacctgtaagacatgcggaaaagcattcagccaaagaacaagcttgatcctgcacgaaaggtcgcacacgggggagaagccttacgaatgtaacgagtgcggaaaagctttttcatccggcagcgacttaattaggcaccaaagaagccattcatccgagaaaccttatgaatgctccaagtgcggcaaggcctactcaaggagctccagcctgattagacaccagaacacccacagcgaggagaaggcctag

SEQ ID NO: 212369 - DNA, 1833 bp, synthetic construct
  misc_feature 1..1833: note = Description of Artificial Sequence: Synthetic coding sequence
  source 1..1833: mol_type = other DNA
atgcccagcgcccggggcaagagcaagagcaaggcccccatcacctttggagacctagccatatatttctcgcaagaagaatgggagtggctaagccctatccagaaggacctctacgaagatgtgatgctggaaaactacaggaacctagtcagcctagggctctctttccggcgtcccaatgtgattactttgctcgagaaaggtaaggcaccctggatggtcgagcctgttaggcgacggcgggcacccgacagtgggagcaaatgcgagacaaaaaagttgcctccaaaccagtgcaacaagtctgggcagagcatctgtcaaaagctagtgtctgcccagcagaaggctcccacacgaaaatcaggctgcaacaagaactctgttttagtgaagcccaagaagggccattcaggcaaaaagcctctgaaatgcaatgattgcggtaagacctttagtaggtcttttagccttaaactgcaccagaatatccacactggcgaaaaaccttttgagtgctcgaattgtcgcaaggcttttcggcagatttctagcatcctgctgcaccagaggatccactctgggaaaaagagccacgagtgcaataagtgtggtgaatccttcaaccagcgtaccactctgatcttacatatgagaattcacgatggcaaggagattctcgattgtggcaaggccctatcacaatgccagagttttaacattcatcagaagatacacgtcgtggggaatgtgtgccaatgtagaaaatgcggtaaagcattcaatcaaatgtcctctcttttgctgcacaagaaaatccataacggtaagaagactcacaagtacaataagtgcggtcggggatttaaaaagaaatcggttttcgtggtgcacaagcggattcacgccggtgagaagatccccgaaaatgcgaaggccttaagtcagtcactgcagcagcggagccaccatctggagaaccccttcaagtgcagaaaatgtggcaaactctttaaccgcatcagtcccctgatgttgcaccaaagaatacatacctctgagaaaccttacaagtgtgacaagtgtgataagttctttcgccggttgtctaccttaattcttcatttgagaattcacaacggggaaaaactgtaccgatgcaacaaatgtgaaaaggtatgcaatagacactccagcttgatccaacatcagaaggtccacactaaaaagaagaaactatttgagtgcaaagagtgcggaaaaatgttctcagggaccgctaacctgaagattcaccagaatatccactccgaagagaaaccctttaaatgtaacaaatgcagcaaagtttttggccggcaaagcttcctgatcgagcaccagagaatccatacgggtgaaaaaccatatcagtgtgaagagtgtggaaaggccttttcccacagaatctctctcactcgacacaagcgaattcacacagaggacagaccatacgaatgcgatcagtgtgggaaggccttctcacagtcagcacacttggctcagcatgagcggatccacaccggcgagaaaccatacacctgtaagacatgtggcaaggcgtttagccagcggaccagcctcatattacacgagcggtctcacacgggagaaaagccttatgagtgcaacgaatgtggtaaggcgtttagttcaggatcagacctgatccggcaccagcggtcgcatagttctgagaagccgtatgaatgttcgaaatgcggtaaagcttatagcagaagtagcagcctgatcagacatcagaacacgcacagtgaagaaaaagcgtag

SEQ ID NO: 212370 - DNA, 1728 bp, synthetic construct
  misc_feature 1..1728: note = Description of Artificial Sequence: Synthetic coding sequence
  source 1..1728: mol_type = other DNA
atggccatgagccaggagagcctgaccttcaaggacgtgttcgtggattttacattggaggagtggcaacaacttgacagcgcacagaaaaatttataccgagacgtgatgcttgagaattacagccatctcgtatccgtggggcacctagtggggaaaccagacgtgatcttccgcctgggccctggcgatgagtcctggatggcagatggcgggacacccgtgaggacatgcgcagtatgggaagtggatgaacagatcgaccactataaagaaagccaggacaaatttttatggcaagctgcctttatcggtaaagagacactgaaggatgaaagcggacaagagtgtaaaatctgtagaaaaatcatttacctcaacacagactttgtaagcgttaagcaacgactgcccaagtactacagttgggaaagatgcagcaagcatcatctgaatttcctcggccagaatagaagctacgtaaggaaaaaggatgatggttgcaaggcctattggaaggtgtgcttacactacaacctgcacaaagcgcagcctgccgagcgattcttcgaccctaatcagaggggcaaggccctgcaccaaaaacaggctctccgaaagtcccagcgatcccagacaggcgaaaagttatataaatgcaccgaatgcggcaaagttttcatccaaaaggctaacttagtcgtacatcaacggacgcacactggagaaaagccatacgagtgttgtgagtgcgctaaagccttctcacagaagtccaccctgatcgcgcaccaaaggacccatacaggtgaaaaaccatacgagtgtagcgagtgcggcaaaacctttatccagaagtccactctgatcaaacatcagcgcacacacactggagagaagccgtttgtctgtgacaagtgtcccaaagctttcaaatcatcttatcacctgatccggcacgagaagactcatatccggcaggcgttctacaagggcattaaatgcactacaagctcgttgatctatcagcgaatccacacatccgaaaagccccaatgtagtgagcatggcaaagccagcgatgaaaaaccttcacctacaaaacactggcggacccatacgaaagagaacatctatgaatgctccaagtgcgggaagtcttttagaggtaaatcacatttaagcgttcatcaacgcatccatactggagaaaaaccatacgaatgctcgatttgtggcaaaaccttttccgggaagagtcatctgtctgtgcaccatcggactcatacaggcgagaaaccatacgagtgtcgccggtgcggtaaagcttttggggaaaagagcactctgatagtccaccagcgaatgcataccggtgagaagccctataagtgtaacgagtgcggcaaggcattttcggagaagagtccactaattaaacaccagcgcattcatactggggagcggccctatgagtgcacagattgtaagaaagcttttagcagaaagtctaccttgatcaagcatcagaggatccacacaggagaaaaaccctataaatgcagtgaatgcggtaaggccttcagtgtgaaatccacacttatagtccaccaccggacgcacacgggcgagaaaccctacgagtgtcgggactgtggtaaggcgttttccggcaagagtactttaattaagcaccagagatcccacacaggcgataaaaacctttag

SEQ ID NO: 212371 - DNA, 1746 bp, synthetic construct
  misc_feature 1..1746: note = Description of Artificial Sequence: Synthetic coding sequence
  source 1..1746: mol_type = other DNA
atggccatgagccaggagagcctgaccttcaaggacgtgttcgtggattttacattagaagagtggcagcaacttgactctgcccagaagaatctataccgggacgtgatgctggagaattacagtcatttggtgagcgtgggccacctggttggaaagcccgatgtaattttcaggctgggtccaggcgacgagtcatggatggctgacggcggcaccccagtgagaacttgcgcaggcgaggataggcctgaggtgtgggaagtggatgaacagatagaccattataaggagagccaagacaagtttttgtggcaggcagcattcattgggaaggaaaccctcaaggatgagtcggggcaggaatgcaaaatttgtcggaaaattatatatcttaacacggacttcgtttccgtcaaacagcggttgccaaagtattattcttgggagcgttgcagcaagcaccatctgaatttcttagggcagaacaggtcttacgtccgtaagaaagatgatggatgcaaagcctattggaaagtctgccttcactataatctgcacaaggcccagcccgcagaacggttcttcgacccgaaccagcgggggaaggcccttcatcaaaagcaggccctcaggaagagccagcgcagccaaacaggagagaagctctacaagtgtaccgagtgtgggaaagtgtttattcagaaggccaatcttgttgttcaccagaggactcacaccggagaaaagccatacgagtgttgtgaatgtgcaaaggccttcagtcaaaaaagcacccttatcgcacaccagcggacacacacaggcgagaaaccctacgaatgctcggagtgtggaaaaacatttatccagaagagcactttgataaaacaccagaggactcatactggggaaaagccttttgtgtgcgataagtgtcctaaagccttcaaaagcagctatcacctcatccgccatgaaaagacccacatccggcaggccttctacaaaggaattaaatgtacaacatcttcactaatataccagaggatacatacatctgagaagcctcagtgcagcgagcacggaaaagcttcggacgaaaagcccagccctactaaacattggagaacccatacgaaggagaacatctacgagtgtagcaagtgtggaaagagttttaggggtaaatcccacctctccgtgcaccagaggatccatacaggggagaagccatacgagtgcagcatctgcggtaaaacgttctctgggaaatctcatctgtcagttcatcaccgaactcatacgggcgaaaaaccctatgagtgccgcaggtgcggcaaagcctttggcgaaaaatctactctgatcgttcatcagaggatgcacacaggtgagaaaccatacaagtgcaacgaatgcggaaaggccttctccgagaagagtcctctgattaaacatcagcgtatacacacaggagaacgcccatacgaatgtaccgactgtaagaaggcattcagcaggaagtctacgctcatcaagcaccagaggatacacacaggggaaaagccctacaagtgttcagagtgtggcaaagctttttctgtgaagtctacacttattgtgcatcacaggacacatacgggtgagaagccgtatgagtgccgggattgcggcaaagccttctctggcaaaagcactctgattaagcatcagcgaagccacaccggggataagaatctgtag

SEQ ID NO: 212372 - DNA, 3714 bp, synthetic construct
  misc_feature 1..3714: note = Description of Artificial Sequence: Synthetic coding sequence
  source 1..3714: mol_type = other DNA
atgggcgacatgaagacccccgacttcgacgacctgctggccgcctttgatattccagacatcgacgcaaatgaagctatccattctggccctgaggaaaacgagggccctggtggcccaggaaaacccgagccgggtgttgggtctgaatctgaggataccgcggccgctagcgcaggggatggccccggcgttcccgcccaagcctcagaccacggactgccgcctccggatatctctgttgtctcagtgatcgtcaagaacacagtgtgccctgaacagtcagaggctttggcaggtgggtcggcaggagatggtgcccaggcagccggggtaactaaggaaggtcccgtcggcccgcacaggatgcaaaatggatttggctccccggagccatccctgccagggactccgcactcccccgcacccccctcaggggggacttggaaggaaaaaggcatggagggtaaaacgcccttggacctgtttgcccatttcggccctgagcccggcgaccattcggaccctctgcctccctctgctcctagcccaactagagaaggagcactgactcctcctcccttccctagcagtttcgaacttgctcaggagaacggtcctggcatgcagcctccagtctcatcccccccgttgggtgccctgaagcaggagtcatgctccccacatcaccctcaggtgcttgcccagcaggggagcggctcctcaccaaaagcgaccgacatacctgcaagtgcatcccccccccctgttgctggtgtgccttttttcaaacaatcacccgggcaccagagccctctggcctcaccaaaagtgcctgtttgccagcccctcaaggaggaggacgatgatgaagggcccgtggacaagagttctcctggaagtccacagtctccctcctccggcgccgaggcggccgacgaagactcaaacgatagccccgcgtccagctcctctagacctttgaaagtcagaatcaagactatcaaaactagttgtggcaacataacacgaaccgtgacccaggtgccttctgaccccgacccgcctgctccactggccgagggcgcctttctggccgaggcaagcttactgaagctctctcctgccacacctactagtgagggcccaaaagttgtaagcgtgcaactgggagatgggaccaggttaaaagggactgtcctgccggtagctacaatacaaaatgccagtacagctatgctcatggcagcttcagtggcgcgcaaggcagtcgtgctgcccggaggcacagcaacatctcctaaaatgatcgctaaaaacgtcctggggctggtgcctcaggccctgcccaaagccgatggcagagctggtctgggaaccggaggccagaaggtgaacggggccagcgtggtaatggtccagccctcaaagaccgccacagggccctccactggcgggggtactgtgatcagcaggacccagtccagccttgtggaagcctttaacaaaatcctgaactctaagaacctgctgccagcctacaggccaaatcttagtccccctgcagaggccggtctcgcattgccccctacagggtacaggtgcctggagtgcggcgacgctttctctctggaaaagtctctcgccagacattacgaccgaagaagcatgagaatcgaggttacgtgcaatcactgcgctaggcgtctggttttttttaataagtgttccttgctgctgcatgctagggagcataaagacaagggactggtgatgcaatgttctcatttagtcatgagaccggttgccctggaccagatggtgggtcagcctgatattaccccactgctgcctgtggcagtgcctcctgtgagcggacccctggctctgcctgcgcttggcaagggtgagggggccatcacatcttctgccatcaccacagtggctgctgaggcacccgttttgccactatcaactgaacccccagcagcccctgcaacttcggcttacacatgcttccgttgtctcgagtgtaaagagcagtgcagggacaaggccggcatggcagcgcatttccaacagctgggccctcctgcccctggtgctaccagcaacgtctgcccaacatgtcctatgatgttaccaaaccggtgctcatttagtgcacatcagcggatgcataagaatcgccctcctcatgtgtgccctgagtgtggaggaaacttcctacaggccaactttcagacccatctgcgagaggcatgtctgcatgtctcaaggagagtcggctatcgttgcccatcctgttctgtggtgttcggcggcgtgaactcaatcaagagccacatccaaacatcccactgtgaagtcttccacaagtgccccatttgcccgatggcctttaaatccggacctagcgcccatgctcacctttattctcagcacccatcattccagactcagcaggccaagctaatatataagtgtgcgatgtgcgacacagttttcactcacaagcctctgttatctagtcacttcgaccagcacttactgccacagcgcgtcagcgtgttcaagtgtccatcatgtccactgctattcgctcaaaagcggacaatgctggagcacctgaaaaacacccaccagtctggacggctagaagaaacagctggaaaaggggcgggaggggcactcctgacacctaagactgaacctgaggagctcgctgtgtcccagggcggggccgcccccgccaccgaagagagtagctcaagctccgaggaagaggaagttccttcaagtcccgaacctcctcggcctgctaagcgcccccgtcgtgagctcgggagtaaaggtctgaagggagggggagggggtcctgggggctggacctgcgggctctgtcattcctggttcccagagagagacgagtatgtggctcacatgaagaaagaacacggcaaatcagtcaagaagttcccatgccggttgtgtgaaagaagtttttgcagtgcaccttcactcagacggcacgtccgcgtcaaccatgaaggcattaaaagggtctacccttgccgatattgtactgaaggaaagaggacgtttagctccaggctgatcctcgaaaaacacgtccaagtgagacatggcctgcagctcggcgcacagtcaccagggagaggcaccacacttgctcggggatcttccgctagggctcagggcccggggcgcaagcgccggcagagctccgatagctgttcggaggagcctgacagcaccacacccccagctaaatctcctagaggtggacccgggtctggaggccatggtccactgcggtatagaagcagttcctccaccgagcagtccctgatgatgggcctccgggtagaagatggggcgcagcagtgtctggactgtggcttatgcttcgctagtccaggcagccttagtaggcatcggtttatcagccacaagaaaagaagaggggtcgggaaggcaagcgccttgggcctaggtgatggcgaggaggaagcccccccctcaaggtctgatcctgatggcggagattcacctttgccggcttctgggggaccgttgacctgcaaggtgtgcggaaagtcctgcgacagtcctttaaacttgaaaacgcacttccggacccacggcatggcttttattagggcgcgccaaggcgctgtgggagacaattag

SEQ ID NO: 212373 - DNA, 3714 bp, synthetic construct
  misc_feature 1..3714: note = Description of Artificial Sequence: Synthetic coding sequence
  source 1..3714: mol_type = other DNA
atgggcgacatgaagacccccgacttcgacgacctgctggccgcctttgacatcccagacatcgatgccaatgaagctattcacagcggccctgaagagaacgagggccctggtggtcctggcaaacccgaacccggtgtcggcagcgaatccgaagatactgctgcagcatcagcaggcgacggccctggggtacccgcacaggcctccgaccatggtttaccacccccagacatcagcgtcgtgagcgtgatcgtgaagaatacggtctgtccagagcagtcggaagcgctcgccggagggagcgctggtgacggggctcaagccgccggcgtgactaaggaagggcctgtcgggcctcaccgcatgcagaatggcttcggaagccccgagcctagcttaccgggcaccccccacagcccagctcccccttcagggggaacttggaaggagaaaggaatggagggaaaaactccgttggacttatttgcccatttcggtccagagcccggcgatcacagtgatcccctgccgccttcggctcccagtcccacaagggaaggcgctcttaccccgccacctttcccctcaagtttcgagttggcccaagagaacggaccgggaatgcagcccccagtgtcaagcccacctttaggagcgctgaagcaggaatcttgctcaccacatcacccacaggtgctggcccagcaaggatcaggaagctcaccaaaggccacagacatccctgccagcgccagccccccccccgtggctggggtaccattctttaagcagagccccggtcatcagtctcctcttgcaagtcccaaggtccccgtgtgtcaaccactcaaggaagaggatgatgatgagggaccggtcgacaaatcaagccccggttccccacagagtccatcttcaggagctgaagccgcagacgaggactcgaacgacagcccagcgtctagctctagtcggcccttaaaggtacgcattaaaaccataaagacatcttgtggtaacattacacgcaccgtgactcaggtccccagcgaccctgaccctcccgcccctctggccgaaggcgcttttttggctgaagcttccctccttaaactgtcccctgcaacccctacgtctgagggaccaaaggtggtgtcagtgcagctcggtgacgggacccgtctgaaaggcacagtcctgccagtcgcaactatacagaacgcgtccactgctatgttgatggccgccagcgtcgcccgcaaggcggttgtacttccgggaggtactgctacatctcccaaaatgatcgctaagaacgtactcgggctcgtgcctcaagccctgcccaaagctgacggcagagccggccttggaacaggcgggcaaaaagtgaatggcgcctcggtggtaatggtgcagccatctaaaaccgcgactggaccctccacaggcggaggaactgtgatctctcgaacccagagcagccttgtcgaagcctttaacaaaatcctcaattcaaagaatctactgccggcctatagacctaaccttagccccccagcggaggcaggtctggccctgccaccgacagggtatcgctgcctcgagtgtggagacgcctttagcctcgagaaatccctggcacgccattacgataggcggtccatgcggatcgaggttacatgcaatcactgcgcgagacgcttggtattttttaacaagtgctccctgttgctgcacgcgagagaacataaagacaagggtcttgtcatgcagtgttcacatttggtgatgagaccagtggctctggaccagatggtgggacagcccgacatcacccctctgctacctgtggctgtgccgcctgtctctggtccactggccttgcccgccctcggaaagggagagggggctattacctctagtgcaattacaaccgttgcagctgaggccccagtgttacccctgtcaacagaaccaccagccgcccctgcaacttcggcctacacatgcttccggtgcctggaatgcaaggagcagtgtcgggacaaagccgggatggctgcacacttccagcaacttggtccgcctgcacctggcgccaccagcaacgtctgccctacctgccctatgatgctgcccaacaggtgcagcttttccgcacatcaacggatgcacaaaaatcgtcctccccatgtgtgtccggagtgcggcggaaatttcctgcaggctaactttcaaacccacctgcgagaggcttgcctgcatgtgagccggagggtgggctatcgctgccccagctgctccgttgttttcgggggagtcaactccatcaagtctcacatccagacgagtcactgcgaggtgtttcacaagtgtccaatctgcccaatggccttcaagtccggaccatccgcccacgcacacttgtattcgcagcatccttccttccagactcagcaagctaagctcatctataaatgtgccatgtgtgatacggtgttcactcataagccactcctgtccagccacttcgatcagcacttgctcccgcaacgagtctccgtcttcaaatgtccatcttgtcccctgctttttgctcagaaaagaaccatgttggagcacttgaaaaacactcatcagtccggcagactggaagagacagccggtaaaggcgccggcggcgctttgttgacacccaaaaccgagcctgaagagctggcagtctcccaggggggagccgcccccgcaacagaggagagcagtagcagttccgaggaagaggaggtaccttctagccccgagccccccaggcccgccaaacgccccaggcgcgagctaggctcaaaaggtctgaagggcggggggggcggtcctgggggttggacctgcggtttatgccacagctggttccccgaacgcgacgaatacgtggcccatatgaaaaaggaacacggcaaatccgtaaaaaaattcccctgcaggctgtgcgagaggtcattttgcagtgcacctagtttgcgtaggcatgtgagagtgaatcatgagggaattaaaagggtgtatccctgtagatactgcaccgaagggaaacgaacattctctagccgcttgatccttgagaaacatgttcaggtccggcacggcctgcagctcggggctcaaagcccagggcggggaacgacgctggcccgaggatcctctgctcgggctcagggcccaggaaggaagcgccgccagtcgtccgacagctgctctgaagagcctgattctactacgccaccagccaagagtcctagagggggacccggctccggagggcacggccctttgagatatcggagcagtagctctactgaacaatcattgatgatgggactgagggtggaggatggtgcacagcaatgtctggactgtggcctgtgtttcgctagtcctggcagtctatctcgccacaggtttattagccacaaaaaacgccgaggagtggggaaggcgagcgcactcggtcttggggatggagaggaggaggctcctccgagccgatccgacccggacggaggcgatagtcccctacccgcgtctggcggtcccctgacctgcaaggtgtgtggcaagtcatgcgactccccacttaatcttaagacccactttcgcacccatggaatggctttcatccgggcgaggcagggagccgtgggtgacaactag

SEQ ID NO: 212374 - DNA, 3312 bp, synthetic construct
  misc_feature 1..3312: note = Description of Artificial Sequence: Synthetic coding sequence
  source 1..3312: mol_type = other DNA
atgggcgacatgaagacccccgacttcgacgacctgctggccgccttcgatataccggatattgatgcaaacgaagccatccattcgggaccggaggaaaatgaggggccagggggccccggcaaacctgaaccgggggtcggttccgaatctgaagacacggccgctgcgagtgccggggatggaccgggcgtccctgcccaggctagtgatcacggcctgcctccccccgatattagcgtggtgtccgtgatagttaaaaataccgtgtgtccagagcagtcagaggccctcgcaggaggatctgccggcgacggggcgcaagccgccggggtgacgaaggaggggccagtcgggcctcaccgcatgcagaatggtttcggcagcccggaaccttcactgcccggaacaccccacagccctgctcctcctagtggggggacctggaaagagaaaggcatggagggaaagacccctctggatctgtttgcacatttcggccctgaaccgggagatcacagcgatccccttccgcccagtgctccgtctcctacacgggagggcgcactcaccccccctccctttcctagttcttttgaactggcccaggagaacggacccggtatgcagccacccgtgtccagcccacctctcggagccctcaaacaggagagttgtagtccccatcacccacaggtccttgctcagcagggttccggcagtagtccaaaagccaccgatatcccagcctccgcttcgcctcctcccgttgcaggggtgccctttttcaagcaatcacctggtcaccagtcccctctggcctctccaaaagtaccagtttgccagccccttaaggaggaggacgatgacgaagggccagtcgataagagttcacccggctcacctcagagtccttcatcaggcgccgaggccgctgacgaggatagtaacgacagcccagcaagttcctcatcccggcctttgaaagtacgcatcaagacgatcaaaaccagctgtggaaatatcacaaggaccgtgacccaggtaccttctgatccagatccccccgctcctctggccgaaggtgcttttctggccgaggcgtcccttctcaagctaagcccagcaacaccaacatctgaaggcccaaaggtggtatccgttcagctaggcgatggaacccgcttaaagggcaccgtattgccggtggctactatccagaacgcttcgacagcgatgctcatggcagctagcgttgcgaggaaagcagtcgttcttcctggcgggaccgccacatcccctaagatgatcgccaagaacgtactggggttggttccccaggcactgcccaaggcggacggcagagcgggcctaggcaccggcgggcagaaagtgaatggggcgtctgtcgttatggttcagcccagtaagacggccaccggccccagcaccggcggtgggactgtgatatcgcgaacgcaaagctcgttagtggaagcttttaataaaatcttgaattctaaaaatttgctcccagcctatagacctaacttatcaccgccagctgaggccggattggctttgccccccactggctatagatgtcttgaatgtggagacgccttcagccttgaaaagtccctggcccgacattatgacaggaggtcaatgaggatagaagtcacgtgcaaccactgtgcccgaaggttagtttttttcaataagtgcagcttgctgctgcacgctcgggagcacaaagataaaggcctcgttatgcagtgctctcacctagtcatgaggccagtggcattggatcagatggtagggcagcccgacattaccccactcctgccagttgctgtccccccggtgtcagggccgttagctctgccagcacttggcaagggagaaggagccattacaagtagcgccatcactaccgtcgccgcggaggcacccgtacttcctctttctacagagcctcctgctgcccctgctacgtcggcatacacctgcttccgatgtctagagtgtaaggagcagtgcagagataaagctggaatggccgctcactttcagcagctggggccgcccgctcctggcgctacctcgaatgtgtgccccacatgccccatgatgctgcctaaccggtgttcctttagtgcgcaccagcgaatgcacaagaacagacctccgcacgtgtgtccagagtgcggaggaaacttcctgcaggctaacttccaaacccacctgcgcgaggcatgtcttcacgtgtctcggagagtggggtacaggtgccctagttgttccgttgttttcggtggcgtaaacagtataaaatcacatattcagacttcccactgcgaagtgtttcacaagtgcccgatttgcccgatggcctttaaaagcgggcccagtgcacacgcacacctctattctcaacatcctagtttccagacacagcaagccaaactgatttacaaatgtgcgatgtgtgatacagtcttcacccataaacccctgctttctagccactttgaccagcatctgttgccccagcgtgtgtccgttttcaagtgtccctcatgtccgctgctgtttgcgcagaaacgcactatgctggaacacctgaaaaacacacaccagagcggacgtttagaggagacagccggtaaaggcgcgggcggcgcccttttgacccctaagactgagccggaggagcttgctgtatcccagggcggcgcagctccagccaccgaagagtccagcagcagcagcgaagaggaggaagtcccctcttccccagagccaccccggccagctaagaggccccggagggaactggggagcaagggtctaaagggtggcggcggcggacccggcggatggacatgcggtctgtgccattcatggtttcctgagcgggatgagtacgttgcccatatgaagaaagagcacggtaaatcagtgaaaaagtttccctgtagactttgcgagcggtccttttgtagcgccccgagcctaaggcggcacgtcagagtgaatcatgagggtataaagagggtgtacccatgtaggagtaagggtcctggcctcagagccgtgccacttcttccatcatgtccactgccgttccaggtgctacaccgaggaaagactcatctgcaacagccccccgacccccgcgaaacctgtccaggccctgcccgcctggctgcatggggtcccgtaccttggcccggcgaccatcttggctcaggattccagtgtcaaagtcctggcgctcgatctgagacaccgcctgtgttttag

SEQ ID NO: 212375 - DNA, 2121 bp, synthetic construct
  misc_feature 1..2121: note = Description of Artificial Sequence: Synthetic coding sequence
  source 1..2121: mol_type = other DNA
tgaaccgtgctgcccgtggccaccatccagaacgccagcaccgccatgctgatggcagctagcgtcgctagaaaggccgtggtccttcccggcgggaccgctacatcaccaaagatgattgcaaaaaacgttctaggactggtccctcaggcacttcctaaagctgacggtagggctggcttagggacgggggggcagaaggtgaacggcgccagcgtagtgatggtgcagccctcaaagaccgctacaggacctagtactggtgggggaaccgtgatctccaggactcaaagctccctcgtagaggcattcaacaaaattctgaactccaagaacctgctcccagcatacagaccgaatctcagtccgcccgccgaagcaggtctggccctgcctcccacaggctaccgatgcttggagtgcggagacgcatttagtctggagaagtccttagctcggcactatgacaggcggagcatgcgcatcgaggtaacctgcaaccactgcgcccgtcgtctagttttcttcaacaagtgctccctgttgttgcacgcccgggaacataaggacaaaggactggtcatgcagtgctcgcacttggtgatgcggccagttgcgcttgaccagatggttggccaacccgatattacacctctgttgcctgttgccgtgccacccgtgtccggacctctggctctgccggccctaggaaagggcgaaggggctattaccagctctgctatcacaacagtggctgctgaggctcccgtgctgcccctgtctacagaaccacctgcggcgcccgcaacttccgcctacacctgcttccggtgcctggagtgcaaagagcaatgtagagacaaggctggaatggccgcccacttccaacagctcgggcctcccgctcccggagccacctccaacgtgtgtcccacttgtccgatgatgctccctaacaggtgttccttctctgcccaccaacgtatgcataagaaccgtccccctcatgtttgtccagagtgtgggggaaactttctgcaggcaaattttcagactcaccttcgggaggcctgtttacacgtgagtcgcagagtgggatatcggtgtccatcttgttctgtagtattcggaggcgtgaattccattaagagccacattcagacatcccactgtgaggtttttcacaagtgtccaatttgccccatggcttttaaatctgggccaagcgcccatgcccacctatatagtcagcacccatccttccaaacccaacaagctaaattaatctacaaatgtgcaatgtgtgatacagtgttcacgcacaaacctttgctttcctctcatttcgaccaacacctgctgccacagcgagtgtccgtattcaaatgtcccagttgtccgctgctctttgcccagaagaggacaatgctggaacatctcaaaaatacacaccaatccggcagactggaggagacagcaggcaaaggagctgggggtgcccttctgacgcctaagaccgaaccggaggagttagctgtttcccaggggggcgcagcaccagcaacagaggaatctagttcttcttcagaggaagaagaagtgccttctagccccgagccacccagacccgccaagcgacctaggcgggaactggggtcaaaaggattgaaaggcggaggtggcggccctggcggatggacctgcggtctctgtcattcgtggtttcctgagagggatgaatatgtagcacatatgaagaaagaacacggcaaaagcgttaaaaaatttccctgtcgcctgtgcgagaggagcttttgttccgcccccagcctgcggcgacacgtgcgcgttaatcatgaagggatcaaacgcgtctacccctgcagatccaaaggaccagggctgagagctgtgccactgctgccctcttgccctctgccttttcaagtgttgcatagagggaaaacccacttgcagcaaccacccgatccacgcgaaacctgtcccgggcccgcacggttagcggcttggggtccagtgccgtggccgggtgatcatctcgggagtggttttcagtgtcagtcaccgggtgcccgtagtgaaaccccacctgtattctag

SEQ ID NO: 212376 - DNA, 450 bp, synthetic construct
  misc_feature 1..450: note = Description of Artificial Sequence: Synthetic coding sequence
  source 1..450: mol_type = other DNA
atgccctgctgcagccaccggcggtgccgggaggaccccggcacctctgaaagccaggagatggaggagtgggccttgttagatatttcccaacgaaagctgtacaaagaggtgatgctggaaacatttcgtaacctaactagtgtcggcaagagttggaaggatcagaacatcgaatatgagtaccagaaccctcggaggaatttccgaagtctgatcgaaaagaaagttaacgaaatcaaggacgattcacattgcggcgagactttcacacaggtaccggatgatcgtctgaactttcaggagaagaaggcatcccctgagatcaagtcttgcgatagtttcgtgtgcggagaggtgggacttggaaactccagttttaatatgaatatcaggggcgacattggccacaaagcatacgagtatcaggagtatggccctaagccttag

SEQ ID NO: 212377 - DNA, 1701 bp, synthetic construct
  misc_feature 1..1701: note = Description of Artificial Sequence: Synthetic coding sequence
  source 1..1701: mol_type = other DNA
atgccctgctgcagccaccggcggtgccgggaggaccccggcaccagtgagtcacaggaaatggaccccgtcgccttcgatgatgtggctgtgaactttactcaggaagaatgggccctgctggacatcagccagagaaagctttacaaagaggtcatgctggagacgttcagaaacctgacaagtgttggaaaatcctggaaagatcagaacatagaatacgagtatcagaaccccaggcgaaatttcagaagtttgatcgagaaaaaggtcaatgagattaaagacgactctcactgcggcgagacttttacccaggtgcccgatgatcggctgaatttccaagagaagaaagcctcccccgagatcaagagttgcgatagcttcgtgtgcggcgaggtggggctgggcaattcttcatttaacatgaatatccggggggatataggccataaggcctacgagtaccaggagtacggtccgaagccctgcaaatgccaacaacccaagaaggcttttcggtaccacccttcatttcgcaccccccaaagggatcatactggggaaaaaccctatgcttgcaaggaatgtggcaagactttcatctcccattcaagtatacagagacatgtcgtgatgcactctggcgacggaccctacaaatgcaaattttgcggcaaggccttccattgtctgtctctgtatttgatccacgagcgcattcacactggggagaaaccgtacgagtgtaaacagtgtggaaaaagcttctcatatagtgctacgctcaggatccatgagagaacacacacgggggagaaaccgtatgagtgtcagcagtgtggcaaagcttttcactctcctagatgttaccgacggcacgaaaggatccacaccggggaaaaagcctatcaatgtaaggaatgtggcaaagcattcacctgcccacagtatgtacggatacacgaacggacacacagtagaaagaaaccttatgagtgcacccaatgcggaaaagcgcttagtagccttacaagctttcagacgcacatacgcatgcactctggcgagagaccttatgagtgtaagatttgcggcaaaggcttctgtagcgctaacagtttccaaaggcatgaaaaaacacatagcggtgaaaaaccctacaaatgcaagcagtgcggtaaggcattcatccattctagtagcctcagatatcacgagagaatacataccggtgagaaaccctacgagtgtaagcagtgcgggaaggccttcagatcttcatctcacttacaacttcacgggaggactcacacaggagaaaaaccatatgaatgccaggaatgtggcaaggcattccgaagcatgaagaatctgcagtctcacgaacgtactcagactcacgtcaggattcactccggagagaggccatacaagtgtaagctgtgtggcaagggtttttattgtccaaaaagtctgcagcggcacgaaaaaactcatacaggcgaaaaactgtacgaatgtaaacaatgtggggaagcattctcttccagttcttcttttcggtaccatgagaggacccataccggagagaaaccatataagtgtaagcagtgcggcaaagcttttagggccgcctccgttttaagaatgcacggccggacacacccagaggataaaccttatgagtgcaaacagtag

SEQ ID NO: 212378 - DNA, 2061 bp, synthetic construct
  misc_feature 1..2061: note = Description of Artificial Sequence: Synthetic coding sequence
  source 1..2061: mol_type = other DNA
atggaggtggtgaccttcggcgacgtggccgtgcacttcagccgggaggagtggcagtgcctggatcctggccagagagctttgtaccgcgaagtgatgctggaaaaccactccagtgtggccggcttggcaggctttctggttttcaagccagagctgatatctcggctggagcagggggaagagccatgggtgctcgatctgcaaggggcggagggcaccgaagcacctcgcactagcaaaactgacagcaccatccgcacggagaacgaacaagcctgtgaagacatggacatattgaaatcagagtcttacggcacagtggtgcggatatcccctcaggactttccccaaaaccccgggttcggagacgtgtcagattccgaagtgtggctggatagccatctcggatcacccggtctgaaggttaccggtttcacgtttcaaaacaactgtctcaatgaggagaccgtcgtacctaaaactttcaccaaagacgccccacagggatgcaaagagttgggaagctcaggactcgactgccagcccctcgaatcccagggagaaagtgctgagggcatgtcacaaaggtgcgaggaatgcggcaaaggaattcgagctacaagtgacatagccttgcattgggagattaacacacagaagatctctcgatgccaggagtgccaaaaaaagctgtccgattgcttgcagggtaaacacacaaataattgtcacggagagaaaccatacgagtgcgcggaatgtggtaaggtgttcaggttgtgctcccagctcaatcagcaccagcgaatccatactggggaaaaaccttttaagtgtactgaatgcggcaaggctttcaggctgagctcgaagctgattcagcaccagcgcatacataccggggaaaagccataccggtgcgaggagtgtgggaaggccttcggacagtcctcctctctgattcatcatcagcgtatccacacaggggaacgtccctatggctgtcgggagtgtgggaaagcctttagccagcagtcccagttggtcagacatcaacggacacacactggggagcgcccttatccatgcaaagagtgcggaaaagcctttagccagtcctctactctggctcaacatcagcggatgcacactggcgaaaaagctcagattctgaaggcatcagactccccgtcactcgtggcccatcaaagaatccatgccgtggaaaagccgttcaaatgcgacgaatgcggaaaagccttccgttggatctccagattatcccagcatcagctcatccacaccggcgaaaagccatacaagtgtaataaatgcaccaaggctttcggatgttctagtcgactcatcagacatcagcgaactcataccggcgaaaagccgtttaagtgtgacgaatgcggaaagggtttcgtgcagggatcccaccttattcagcatcagaggatccacacaggtgaaaagccatacgtctgcaatgactgcgggaaagccttcagccagtcttcgagcctaatttatcaccagaggattcacaagggcgagaaaccgtacgagtgtttgcaatgtggtaaggcgtttagcatgtcgactcaactgacaatccaccaacgcgtgcataccggcgagagaccttacaagtgtaatgaatgtggcaaagccttctcccagaattcgactcttttccagcatcagatcatccatgccggagtgaaaccatatgagtgttctgagtgcggaaaagcttttagccgatctagttacctgattgaacatcaaagaatacacacacgtgcgcagtggttttacgaatatgggaatgccctcgaaggaagtacctttgttagccgcaagaaggtcaatacaattaagaagctgcaccagtgcgaggactgtgagaagatattccgctggcggagccacctcatcatccaccagcgcattcacaccggtgagaaaccatataaatgcaacgattgcggaaaagccttcaatcgcagctcacgtttaacacagcaccagaagatccacatgggatag

SEQ ID NO: 212379 - DNA, 2094 bp, synthetic construct
  misc_feature 1..2094: note = Description of Artificial Sequence: Synthetic coding sequence
  source 1..2094: mol_type = other DNA
atgggcttcctgggctgctggtgcgtgagcttccaggaggtggtgacctttggggacgtcgccgttcacttctcaagagaggaatggcaatgcctggatcccggtcagagggccctttatagagaagtgatgttagaaaatcactcctctgtcgcaggattggcagggtttctggtgttcaagcctgaattgatcagccggctggagcagggtgaagagccttgggtgcttgatcttcagggggccgagggcaccgaggcaccaaggacgtccaagacagattcaactattcggactgagaacgaacaggcgtgcgaagatatggatatactgaaatcagagtcttatgggactgtcgtcaggatctcgccacaagattttccccagaatccgggcttcggcgatgttagtgacagcgaagtatggttggatagtcacttgggaagtcccggcttgaaggtcaccgggtttacctttcaaaacaattgcctgaacgaggagaccgtggtgccgaaaactttcacaaaagatgccccacaaggctgcaaggagttgggatcctcgggtctggattgtcagcccctggaaagtcaaggggagtctgcggaaggaatgtcccaaaggtgcgaggaatgtggcaaaggtatccgcgccacctccgacatcgcactgcactgggagattaacacgcaaaaaatctcgcgttgccaagaatgtcaaaagaaactttctgactgcttacaaggaaaacacaccaacaactgccacggcgaaaagccttatgaatgcgctgagtgtggaaaggtgttcaggttgtgttcccagctgaatcagcatcagcgcatccataccggggaaaagcctttcaaatgtactgagtgcgggaaggcctttcggctgtcttcgaagctgatccagcatcagcgaattcatactggagaaaaaccataccgttgtgaagaatgcggaaaggcatttggccaaagctcttctctgattcaccaccagcggattcataccggcgagaggccctatggatgtcgcgaatgcggcaaggctttcagtcagcagtctcaactggtccgtcaccagcgcacccacacaggcgagcggccatatccctgcaaggagtgtggtaaggccttcagtcaatccagtaccctggctcagcaccagcggatgcacactggtgaaaaggcacagatcctgaaggcatctgatagccccagtctggtggcccatcaacgaatccacgcagtcgaaaagccatttaagtgtgacgaatgtggtaaggccttcagatggatatcccggttatcccagcaccagctcatccacaccggcgagaaaccatacaagtgtaacaaatgcaccaaagccttcgggtgcagctcccgactcattcgtcaccagcgcactcatacaggggagaaaccattcaagtgtgatgaatgcggcaaaggcttcgtccaggggtcgcaccttatccagcaccaaaggatacacacaggcgaaaagccctacgtctgcaatgactgtggaaaggccttctctcagtcctcatcactcatctaccaccagaggatccacaaaggcgagaagccctacgagtgtctccagtgtgggaaggccttttcaatgtccacccagctgactatccaccagagggtacacacaggagagagaccatataaatgcaacgagtgcggcaaggctttttcacaaaactctaccctattccagcatcaaattatccacgcaggggtaaagccctatgagtgcagtgaatgcggaaaagctttctcccgcagttcataccttattgaacatcagcggattcacaccagggcccagtggttttacgagtatggaaacgctctggaaggcagcaccttcgtatctcgtaaaaaggttaacaccatcaagaaactgcaccagtgcgaggactgtgaaaaaatctttcgatggagaagtcaccttattattcatcagagaatccatactggtgagaaaccatacaaatgtaacgactgcgggaaggcttttaaccgttctagtagactgacacagcaccagaaaatccacatgggatag

SEQ ID NO: 212380 - DNA, 447 bp, synthetic construct
  misc_feature 1..447: note = Description of Artificial Sequence: Synthetic coding sequence
  source 1..447: mol_type = other DNA
atggaggtggtgaccttcggcgacgtggccgtgcacttcagccgggaggagtggcagtgtttagaccccggtcagagggctctgtatcgggaggtaatgcttgagaatcatagttccgtcgccgggctggcgggctttctcgtattcaaacctgagcttattagcaggctggagcagggcgaagaaccttgggtccttgaccttcagggtgctgagggcacagaagccccccgtacctccaagactgggttcctcggaaggcccacgatggggcaggaaccccgccacccccacgcacctccagcaacccctgtacctggccttccaaagcactgcagccagagattaaccttgccacctccggggctatcgtcctctcctctgggccactttctagtgcatgatcaggatagacgtcgcgggaccagcgccatctggatggtttag

SEQ ID NO: 212381 - DNA, 2061 bp, synthetic construct
  misc_feature 1..2061: note = Description of Artificial Sequence: Synthetic coding sequence
  source 1..2061: mol_type = other DNA
atggaggtggtgaccttcggcgacgtggccgtgcacttcagccgggaggagtggcagtgcctggatcctggccagagagcattatacagggaagtcatgctcgaaaatcatagctccgtcgctgggctggccgggtttctggtgttcaaaccagagctcatctctagattagagcaaggcgaggagccatgggtccttgatctgcagggagctgaggggaccgaggcgcctcggaccagtaagaccgattccacaattcgcacagagaatgagcaggcctgcgaagacatggatatcctcaagtcagaatcttacggaaccgtggtgcgcataagtccacaggacttcccgcagaatcctggcttcggagatgttagtgattccgaggtttggttggattcccatctcggcagtccaggactgaaagtgacaggttttaccttccaaaacaactgcctgaatgaggagacagtcgtgcctaaaacctttacgaaagacgctccccaggggtgcaaggagctcggcagctctggcttagactgtcagccattagaaagccaaggtgagagcgcagagggcatgtcacagcgctgtgaggagtgcgggaagggcattagggctacatcagacatcgctctgcattgggagatcaatacccaaaaaatttcaaggtgccaggaatgtcagaagaagctttcggactgccttcagggcaaacacacgaataactgtcacggcgagaagccttatgaatgcgcggagtgtggcaaggtgtttcgactttgttcacagctgaaccagcatcagcgaatccacacaggcgagaagccttttaagtgcacggaatgtggaaaggcatttaggctgtccagtaagctgatccagcatcagagaattcacaccggtgagaaaccatatcgctgtgaagagtgtggaaaggcgtttggacagtcctcttcgttgatccaccaccaacgcattcacaccggcgagcgaccctacggctgtagagaatgcggcaaggctttttcccagcagagccagttggtacggcatcagagaacccataccggcgagagaccctacccatgcaaggagtgcgggaaggccttctcccagagctccacgttggcccaacatcagaggatgcacaccggcgagaaggcccagattctgaaagcctccgatagcccttcactcgttgctcaccaacggatccacgctgtcgaaaagcctttcaagtgtgatgaatgcggcaaagccttccggtggatctcaagactgtcccaacatcaattgatccacacaggagagaagccatataaatgtaacaaatgcacaaaagccttcggatgctcttcgcgtctcatacgccaccagcggacgcacacgggagagaagccatttaagtgcgatgagtgtgggaaagggttcgtccagggtagccaccttatccagcatcagcggatacacaccggagagaaaccgtatgtgtgtaatgactgtgggaaagctttttcccagagttcttcgctgatctaccaccagcgaatccacaagggtgagaagccctatgagtgcttacagtgcgggaaggcctttagtatgagtactcaattgacaattcaccagcgggttcatacaggagagcgtccttataagtgcaacgaatgcggtaaggccttctcccagaactcaacgctttttcagcaccaaattattcacgccggcgtgaaaccatatgaatgcagtgaatgtgggaaagccttttccagatcaagctacctaatcgaacaccaaaggatccacacacgggctcagtggttctatgaatatggcaacgcactggaagggtctactttcgtgtcacggaaaaaagttaatacgataaagaaactccaccagtgcgaagactgtgagaaaatatttcgatggcgatcccaccttataattcatcagcggattcatactggcgagaagccatacaagtgcaacgattgtggcaaggcctttaatcgttcttcgaggctcacacagcatcagaagatacacatgggatag

SEQ ID NO: 212382 - DNA, 1773 bp, synthetic construct
  misc_feature 1..1773: note = Description of Artificial Sequence: Synthetic coding sequence
  source 1..1773: mol_type = other DNA
atggacatcctgaagagcgagagctacggcaccgtggtgcggatctctcctcaggatttccctcaaaatcccgggttcggcgatgtttccgactcggaagtctggctcgatagccacctgggtagtcccggtttaaaagtcaccggcttcacattccagaacaactgtctcaatgaggagacagtcgtccctaaaactttcaccaaggacgctccccagggatgtaaagagcttggctctagcggattagactgccagccgttagaatcccaaggcgagtccgctgaaggaatgtcgcaaaggtgcgaggaatgcggaaaagggatccgtgctacatcagacatcgccctgcattgggaaattaacacgcaaaaaatctcccgctgtcaggaatgccagaagaaactttcagattgcctgcagggcaagcacaccaacaactgccacggggagaaaccttacgaatgcgctgaatgtgggaaggtcttccgactgtgctcacaactgaatcaacatcagcgcattcatacgggggagaagccgttcaaatgtaccgaatgcggcaaggcttttcgcctctccagcaagctgatccagcatcaaaggatccataccggtgagaaaccataccgctgtgaagaatgtggcaaagcgttcgggcagtcatcaagcctgattcaccaccagcgcatacatacgggggaaagaccttatgggtgccgggagtgcggcaaagcattctcccagcagagtcagttggtaaggcaccagaggacacatacgggggagaggccttacccttgcaaagagtgtggtaaagcattcagccagtcatcaactctcgcccagcaccaacggatgcacaccggcgagaaagcgcagatccttaaggcctccgacagcccctcactcgtggcccaccagcggatccatgccgtggaaaaacccttcaaatgcgacgagtgtgggaaagcttttcgctggatttcacgactcagccagcaccagctgatccacaccggcgagaagccatataaatgcaataaatgcaccaaggccttcggatgtagttcacggctcatacggcaccagagaacgcacacaggcgagaagccattcaaatgcgatgagtgtggtaagggcttcgtgcaggggagtcatctcatccagcaccagaggatccataccggcgagaaaccttatgtgtgtaatgattgtggaaaagccttttcccagtcaagctcactgatctatcaccaacgaattcacaagggcgagaagccctatgagtgcctgcagtgtggcaaggcgttcagtatgtctactcagctgactattcatcaacgcgtccatacaggcgagaggccttacaagtgcaacgagtgtgggaaggcttttagtcagaacagtacactatttcagcaccagatcattcacgccggggtgaaaccttacgaatgcagtgagtgtggaaaggcattctccagaagttcttacttgatcgaacaccagcgcattcacaccagagctcagtggttttacgaatatggtaacgccctggaaggttccaccttcgtttcgcgtaaaaaagttaatactattaagaagctgcatcagtgtgaagactgtgagaagatctttagatggcgcagccacctaattatacaccagcgtattcatactggagaaaagccatacaagtgtaacgactgcgggaaggcatttaatcggagctcaaggctgacccaacatcagaagatccatatggggtag

SEQ ID NO: 212383 - DNA, 1470 bp, synthetic construct
  misc_feature 1..1470: note = Description of Artificial Sequence: Synthetic coding sequence
  source 1..1470: mol_type = other DNA
atgaaggagctggaccccaagaacgacatcagcgaggacaagctgtcggtggtcggcgaagctacaggtggtcctaccagaaacggggcccgcgggccagggagcgagggggtctgggagccaggcagctggcccgagaggccccgtggagacgctggcgctgaatgggagcctctgggtattccgcagggaaacaagctgctggggggcagtgtccccgcctgccacgaactcaaagcattcgcaaaccagggatgcgttctagtgcctccgcgtttagacgatcctaccgaaaagggcgcctgtcccccagttcggagaggcaaaaatttttccagcactagtgacctgtctaaaccccctatgccatgcgaagagaagaagacttacgactgctcagagtgcggcaaagccttctctcggagctctagtcttattaagcaccagagaattcatactggcgagaaacctttcgagtgcgacacatgtggcaagcatttcatcgagcgttctagcttgaccatccatcagcgagttcacacgggcgagaaaccttacgcgtgtggcgactgcgggaaagctttcagccagcggatgaacttaactgtacatcaacgcacacatacaggcgagaaaccatacgtgtgcgatgtgtgtggaaaagcatttcggaagacttctagcctaacacaacacgagcggattcacactggtgaaaagccctatgcctgcggcgactgcgggaaagcattctcacaaaatatgcatctaatcgtgcaccagcgcacccataccggcgagaaaccatacgtctgtccagaatgcggaagagctttcagccagaatatgcatctcaccgagcatcaacgcacacacacaggcgaaaaaccatatgcatgcaaggagtgtggcaaagcattcaacaaatcttcatccttgactctgcatcagcgcaaccatacgggcgaaaagccgtatgtctgcggggaatgtggcaaagccttttctcagtcttcatacctgatccagcaccagagatttcacatcggtgtcaaacctttcgagtgctcagagtgcggcaaagcatttagtaagaactcatcactgactcagcatcagcggatccataccggggagaaaccgtatgagtgctatatttgcaagaagcatttcaccgggaggtcaagcttaattgtccatcagatcgtgcacacaggcgagaaaccatatgtgtgcggagagtgcggcaaagccttctctcagtcggcgtatctaattgaacaccaacgtattcacacaggcgaaaagccctacagatgtgggcagtgcggaaaatcttttataaaaaatagctctctgactgtgcatcagagaattcataccggggaaaagccttaccggtgcggcgaatgtggaaagaccttctcccgaaacacaaatctcacccgccatctcaggattcatacttag

SEQ ID NO: 212384 - DNA, 2286 bp, synthetic construct
  misc_feature 1..2286: note = Description of Artificial Sequence: Synthetic coding sequence
  source 1..2286: mol_type = other DNA
atggacagcggcggcggcagcctgggcctgcacacccccgacagccggatggcacacaccatgattatgcaagattttgtcgcaggcatggccgggaccgcccacatcgatggggaccacatcgtggtcagcgttccagaggcggtgttggtgagcgacgtagtcacggacgacggtatcacccttgaccacggcctggcagccgaggtagtccatgggcccgacattatcacagagactgatgtggtaacagagggtgtcatcgtgcctgaggctgttctcgaggctgacgtggccatcgaggaagatctggaggaggatgacggggatcatatcctcacatctgagttaatcaccgagaccgtgcgcgtgccagaacaggtgttcgtggcggatcttgttaccgggcccaacggacatctagagcatgtggtgcaggactgtgttagtggggtcgatagtcctactatggtatctgaagaggtgctggtcacgaactcagataccgaaactgtgatccaggccgctgggggcgtaccaggatcaacagttaccatcaagacggaagacgatgatgacgatgacgttaagagcacctcagaggactacttgatgatttccctggacgatgtcggtgaaaagctggagcatatgggcaacacccctctcaagatcggatcggatggttctcaggaagacgcgaaagaggatggatttggaagtgaggtcataaaggtgtacattttcaaagcagaggctgaggatgacgttgaaataggaggcaccgagatcgtgacagaaagtgagtacacgtcaggccatagcgttgcgggagtgctggaccagtcaagaatgcagagagaaaaaatggtgtatatggctgtgaaagacagtagccaagaggaggatgatattagagatgagagacgagtttctcgccggtatgaagactgccaagcatctgggaacacactggatagcgctcttgagagcagatcatctactgctgcgcaatacttacaaatttgtgatgggataaatacaaataaagtgctgaaacagaaagccaagaaacggcgcagaggagagacacgacagtggcagaccgctgtgattatcggccccgacggtcaacccttgacggtctacccttgccatatctgtaccaagaagttcaagagccggggtttcctgaagcgacatatgaagaatcatccagaccacctgatgagaaaaaaataccagtgcaccgactgtgatttcaccaccaacaaaaaagtgtccttccataaccatctagagtcacataagcttatcaataaggtcgacaagacgcatgaattcacagagtacacaagacgctacagggaggctagcccgctgtcaagcaacaaactgattctccgcgacaaagaaccaaagatgcataaatgcaaatactgtgactatgagaccgccgagcagggcctgctgaaccggcacctgcttgcagttcatagcaagaacttcccccatgtctgcgtggagtgcggtaaggggttcaggcatccctcagaactcaaaaaacatatgaggacccataccggggaaaagccctaccagtgtcagtattgcatatttcgttgcgccgatcagtcgaatctcaagacgcatatcaagtccaagcacggtaataatctgccatataagtgcgaacactgcccgcaggcctttggagacgagcgcgaacttcagaggcatctggacctcttccaaggacataagacccaccaatgtccacactgcgaccataaatctacgaactccagcgacctgaagcgccatatcattagtgtccacacaaaggactttcctcacaaatgtgaggtgtgtgataaggggttccataggccctccgagcttaagaagcactctgacattcacaaaggacggaagatccatcagtgcaggcactgcgattttaaaacatcggaccctttcattttgtctggccacattctgagtgtacacacaaaggaccagcccctgaagtgtaagaggtgtaagcgggggttcagacagcagaacgaactcaagaagcacatgaagacacacactggcaggaaaatctaccagtgcgagtactgcgaatactccacaactgacgcctctggtttcaaaagacacgtcatcagcatccacaccaaagattatccacatcgttgtgaattttgtaaaaagggcttcagacgccctagcgaaaaaaaccagcacatcatgcgacatcataaggaagcactgatgtag

SEQ ID NO: 212385 - DNA, 2286 bp, synthetic construct
  misc_feature 1..2286: note = Description of Artificial Sequence: Synthetic coding sequence
  source 1..2286: mol_type = other DNA
atggacagcggcggcggcagcctgggcctgcacacccccgacagccgaatggcccataccatgatcatgcaggatttcgtagccgggatggcagggactgcccacattgacggggatcatatcgtagtgagtgtgccggaggccgttctggtgtccgacgtagtaactgacgatgggatcactctggaccatggtttggcggccgaggtggtgcacggacccgatattattaccgagaccgatgtcgtgactgagggagtaattgtcccagaggctgtgctcgaagccgacgtggcaatcgaagaagatctggaagaggacgatggtgaccacattttaacatcagagctgatcacagagacggttcgggttccagagcaggtgtttgtggctgatctggtcacagggcccaacggccacctggagcatgtggtccaggattgcgtgagtggtgttgattcccccaccatggtgtcagaggaagttctggtcacaaacagtgacacagaaacagtgattcaggcagccgggggtgtgcctggatcaactgtgacaataaagaccgaggacgacgacgatgacgacgtgaaaagtacatcagaggattacttgatgatctctctggacgacgtcggcgaaaagctagagcatatggggaacactccactcaagattggcagtgatggcagtcaggaagatgcaaaggaggacggctttggctctgaagtcataaaggtgtatatattcaaggcagaggccgaggacgacgtggagataggggggactgaaatcgtgacagaatcggagtatacaagtggccattcagtcgctggagtgttggaccaaagcagaatgcagcgcgagaaaatggtgtacatggcagttaaagactcctcccaggaagaggatgacattagagacgagcggagagtgagccggcggtacgaggactgtcaggccagcggaaacactctcgactctgcactggagagccggagttcaaccgcagcccagtacttgcagatctgcgacggaattaacaccaataaagttctgaagcagaaggcgaaaaagaggagacgcggcgaaacccgccaatggcagacagcggttataatcgggcccgatgggcagcccctaactgtttatccctgccatatttgcacaaaaaagttcaaaagccgtggattcctcaagaggcatatgaagaaccatccagatcatttgatgagaaagaagtatcagtgcaccgattgcgatttcacaaccaacaaaaaagtgagctttcataatcacttagagtcccacaagcttatcaataaggtggataagactcatgagtttaccgagtacacccgcaggtatcgggaagccagcccccttagttccaacaagttgattctcagagacaaagagcctaagatgcacaagtgcaagtactgcgattatgagaccgctgagcagggcctgctaaaccggcacctgctcgcagtacactccaagaattttccccacgtctgcgttgagtgcggtaaaggtttcagacaccctagcgaattaaagaaacacatgcgcactcatacaggagaaaaaccctaccagtgccagtattgcatttttcgatgcgccgatcagagcaacctcaaaacacacattaaaagcaaacacggcaataacctgccgtacaaatgtgaacattgtcctcaggcttttggcgatgagcgtgaactacaacgtcatttggacttatttcaaggacacaagactcatcagtgcccacattgcgatcataagagcacaaactcatcagatttgaagagacacatcattagtgtccacactaaggacttcccccataagtgtgaagtgtgcgacaaagggtttcaccgcccgagcgaactcaagaagcactccgatattcacaaagggcggaagatccatcagtgtagacactgcgacttcaaaaccagtgacccgtttatcctttctggacacatactcagtgtgcacaccaaagatcaacccctaaaatgcaaacgatgtaaacgcggcttccggcaacagaacgaactgaaaaagcacatgaagactcatacaggcaggaagatttatcagtgcgaatactgcgagtactcaacaaccgacgcctcaggttttaaacgccatgtgatctccatccacaccaaagactacccccacagatgtgagttttgcaaaaagggctttcgacggccatccgaaaagaaccaacatataatgaggcaccataaggaggcactgatgtag

SEQ ID NO: 212386 - DNA, 2310 bp, synthetic construct
  misc_feature 1..2310: note = Description of Artificial Sequence: Synthetic coding sequence
  source 1..2310: mol_type = other DNA
atgcaggacttcgtggccggcatggccggcaccgcccacatcgacggagaccatatcgtggtgagcgtaccagaggccgttctagtgagcgatgtggtgactgacgatggcattacgctggatcacgggctcgccgcggaagtcgtacacgggccagacatcatcactgaaaccgacgtcgtcacagaaggagtgatcgtgccagaggctgtgctagaagccgacgtagccattgaagaggatcttgaagaagatgacggggaccacattctcacttccgagctgattaccgagactgtgagagttccagagcaggtgtttgtggccgacctggtaacaggacccaacggccacttggagcatgtggtccaagactgtgttagtggggttgactctcccaccatggtgtcggaggaggtgcttgtgaccaactccgacacagagactgtcattcaggccgccggtggggtgcctggttcaaccgtgaccatcaagacagaagatgatgacgatgatgacgtgaaatctacgagtgaagattacctgatgatctcgctggatgatgtcggcgagaagctggaacacatggggaatacccccctgaagatcgggagcgacggaagtcaagaagacgctaaagaagatggtttcggcagtgaagtgattaaagtctacatctttaaagccgaggcagaggatgacgttgaaatcgggggtactgaaatcgttactgagagcgaatatactagcggccactcggtggctggcgtcttggaccagagtaggatgcaacgggaaaaaatggtgtatatggctgtgaaagactccagccaggaggaagatgacatttcttgtgctgagatagctgatgaggtgtatatggaggtgattgtgggtgaggaggaggggacttccctgcccgaaatccaattggaggatagcgacgtgaacaaaaccgtggtgccggtcgtttgggcagcagcatacgggaacacactagacagcgcgctggaatcccgaagctcaacggccgcccaatacctccagatttgtgatggcatcaatactaataaggtgttaaagcagaaagctaagaaacgcagacgcggtgagacccggcaatggcagacagcggtcatcattggtcctgacgggcaacctctgactgtgtatccatgtcacatatgcacaaaaaaatttaaatcccgaggttttctgaagcgtcacatgaaaaaccacccagaccaccttatgcgaaagaaatatcaatgcactgattgcgactttacgactaataagaaagtgagcttccacaaccacttggaatcccacaagttaatcaacaaggtggataagacgcacgagttcacagagtataccagaagatacagggaagcctctcccctctcttccaacaagctcatcctcagagataaggagccaaaaatgcataagtgcaaatattgcgattacgaaacggccgagcagggcctgctgaaccgccacctgttggcagtccactcaaaaaattttccacatgtttgtgtggagtgtggtaaggggttccgacatccttccgagctgaaaaaacatatgaggacccatacaggagagaaaccttatcagtgtcaatactgcattttcaggtgtgctgaccaatctaacttgaagacccatatcaaaagcaagcacggaaataacctgccatacaagtgcgaacactgccctcaagcattcggcgacgagcgggagttgcagcggcatctggacctgttccaggggcacaagacacatcagtgtccccattgcgaccacaagtcgacaaactcgtccgacctgaaaaggcatattattagtgttcatactaaggattttcctcacaaatgtgaagtgtgtgacaagggcttccaccgaccatcagagctaaagaagcattcagacatccataagggacgaaaaattcaccagtgccggcactgcgactttaagacctcggacccttttatcctgagcggccacatactcagcgtgcatactaaggaccaacccctgaaatgcaagcgatgcaagcgcggttttcgacagcaaaatgaattgaagaagcacatgaaaacccacaccggtcgcaagatctatcagtgtgagtactgcgaatactccacaaccgatgcctcgggatttaaacgccacgtgatctcaattcacacgaaagactatccccacaggtgcgagttctgtaagaaagggttccgccggcccagcgaaaaaaatcagcatattatgagacaccacaaagaagcgctgatgtag

SEQ ID NO: 212387 - DNA, 1812 bp, synthetic construct
  misc_feature 1..1812: note = Description of Artificial Sequence: Synthetic coding sequence
  source 1..1812: mol_type = other DNA
atgatcagcctggacgacgtgggcgagaagctggagcacatgggcaacacacccttgaaaataggttcagacgggagccaagaggatgcaaaggaggacggattcggaagtgaggtaatcaaggtgtatatattcaaggctgaagccgaggatgacgtggagatcggaggcacagagattgtgacagagagcgaatatacttcaggtcattccgtggccggggtcctcgatcaatccaggatgcagcgcgagaaaatggtatatatggccgtcaaggatagttctcaggaagaagatgacatctcgtgtgccgagatcgccgacgaggtgtacatggaagtcatcgttggggaggaagagggcacttcactgccagaaattcagcttgaagatagcgatgtgaataagaccgtggtgccagtggtgtgggcagccgcctacggtgacgagcggcgcgttagccgacgctatgaagattgccaggccagcggaaacaccttggacagtgctctggaatcccggtcctcaacagcggcgcagtacctccagatttgtgacggtattaataccaataaagtcctgaaacagaaagccaaaaagcgacgacgcggcgagactcggcagtggcaaactgctgtgatcatcggaccagacggtcaaccactcacagtatacccatgtcatatctgtacgaaaaagttcaaatcacgcggctttctgaaacgccacatgaaaaaccatcccgaccacctgatgcgcaagaagtaccaatgcaccgactgtgactttacgacaaataagaaggtatcgtttcataatcacctggagtctcacaagctaataaacaaagtcgacaagactcatgaattcacagaatacacaagacgctacagggaggcctcacccctgtcatcaaataagttgatcctccgggacaaggagcccaagatgcacaaatgcaagtactgtgactatgagactgccgagcaaggcctgctgaataggcacttgctcgcagtgcactcgaagaattttccacatgtttgtgttgaatgcggaaagggctttagacaccctagtgaattaaagaagcatatgagaactcacactggcgagaagccataccaatgccagtactgtatctttagatgcgcagaccagagcaatctcaagacccacataaaatcaaaacacggcaacaacttaccctacaaatgcgaacattgtccccaggcatttggcgatgagcgcgaactgcagaggcatctggacctctttcaggggcacaaaactcaccaatgcccccactgcgaccataaaagtaccaacagcagtgatctgaagcggcacataattagcgttcacactaaggacttccctcacaaatgtgaagtttgtgacaaaggattccaccggccctctgaattgaagaagcacagcgatattcacaagggccgcaaaattcatcagtgccggcattgtgattttaaaacatcagatcctttcattttaagtggccatatcctgagcgtgcatacaaaggaccaacccctgaagtgcaaacgttgcaagcgcggcttccggcaacagaacgaacttaagaagcatatgaagacacacaccgggcgaaaaatctaccagtgtgagtactgtgagtattccacgacagacgcctcggggtttaagagacatgtgatctcgatccatactaaagattatcctcaccgctgtgagttctgcaagaagggcttccggaggcccagtgagaagaatcagcatataatgcggcatcacaaagaagccctcatgtag

SEQ ID NO: 212388 - DNA, 1611 bp, synthetic construct
  misc_feature 1..1611: note = Description of Artificial Sequence: Synthetic coding sequence
  source 1..1611: mol_type = other DNA
atgggccccctgcagttccgggacgtggccatcgagttcagcctggaggagtggcactgcctcgacacagcacaaaggaacctttacaggaacgtaatgctggaaaattatagaaatctggtcttcctgggcattgtggtgtcaaagcccgatctgataacatgcttagaacaaggcaaaaaacctcttactatgaaaaagcatgaaatggtcgcgaatcctagcgtgacttgctcacactttgctagagatctctggccggagcagtccatcaaggatagctttcagaaggtgacactgcgcagatatgagaattacggccacgataatctgcagtttaagaagggttgtgaaagtgttgacgaatgcaaggtccacaaaagggggtataatggcttaaaccaatacttgacaacaacgcagagcaagatcttccaatgcgataagtatgtgaaggtgatccacaaattctctaacagtaatcgccataaaattcgccacacggggaaaaaaccctttaagtgcatagagtgtggtaaggcctttaaccagagtagcaccttaacaacacataaaaaaatccacacaggagagaagccttttaagtgtgaagaatgtggcaaggcatttaactggtcatctcatctgaccacccataaaaggattcacaccggggagaagaggtacaagtgcgaagactgtggtaaagctttcagtagatttagctatctaacagcacacaaaatcatacatagcggtgagaagccatataagtgcgaggagtgcggcaaagccttcaaaagatcgagtaatctgaccacacataagataattcacacgggtgagaaaccgtacaaatgcgaagagtgtgggaaagctttcaaacggtcatccatactgactgcccataagattattcactcaggcgaaaaaccctacaaatgtgaggagtgtggcaaggcctttaaacacccttccgttctgactacccacaaaagaatccatacaggtgaaaaaccttacaagtgcgaagagtgcgggcgggcatttaagtatttttcctcattaacaactcacaagattatccacagtggagagaagccttacaagtgtgaagagtgcggcaaagcctttaattggagcagtcatctgaccactcataaacgcatccatacgggtgaaaaaccgtacaagtgtgaggagtgtggcgaggcgtttaagtactcatcctctctgacaacccataaaattattcacactgggcagcagccctttaaatgtgaggagtgcgggaaagcgttcaagtgcttctccatcctgaccactcacaaaagaatacacacaggagagaagccctacaagtgtgaggagtgcggaaaagcatttaattcctcaagccacctaacagcccacaagcgtatccataccggggaaaagccttataagtgtgaacggtgcggcaaggcattcaaacggagcttcattctcacccggcataaacgtatccatacaggcgagaaaccatacaaatgtgaggaatgtgggaagggcttcaagtgcccatcaacgctgactacacataaggttatccacaccggggaaaaactgtag

SEQ ID NO: 212389 - DNA, 1935 bp, synthetic construct
  misc_feature 1..1935: note = Description of Artificial Sequence: Synthetic coding sequence
  source 1..1935: mol_type = other DNA
atggagatccccgcccccgagcccgagaagaccgccctgagcagccaagatcctgcattatccctgaaagagaatctggaagatatctccggttggggactgccggaggcgcggtccaaagaatccgtaagctttaaagacgtggcagtggatttcactcaggaggagtgggggcagttggattctccccagagggccctatacagagacgtcatgctcgaaaactaccagaacctactagccctgggccctccattgcacaagcccgacgtaattagccatctcgaaagaggagaggagccctggagtatgcagagagaagtccctcggggtccttgtcctgagtgggagctcaaagcagtcccctctcagcaacagggtatctgtaaggaggagcctgcccaggaacctatcatggaacgaccattggggggcgcacaggcatggggaagacaggccggagcgctgcagcgcagtcaggccgcaccatgggccccggcgcctgccatggtgtgggacgtgcccgtggaggagttcccattgcggtgtcctttatttgcccagcaacgcgtgccggaaggcggacccctgctcgacactaggaagaatgtccaggcgacagaaggacggactaaggccccggcccggctttgtgccggagaaaacgcctctaccccctctgagccagaaaaatttccacaggtccgcaggcagcggggcgcaggcgctggcgagggcgagttcgtctgcggagagtgtggaaaggcattcagacagtcctcctctttaaccctgcacaggcggtggcactcccgcgagaaagcctacaagtgcgatgagtgcggaaaggctttcacgtggtctacaaacctgctggagcataggcggatccacacgggcgagaaaccctttttctgcggagagtgcggaaaggccttctcatgccactccagtctgaacgttcatcagaggatccatacaggcgagcggccttacaagtgtagtgcctgcgaaaaggcgttcagctgttccagtctgcttagtatgcacttacgtgtgcacacaggggaaaaaccgtatcgttgcggggaatgcggaaaggcttttaaccagaggacacacctcaccagacaccaccgaattcataccggcgaaaagccctatcagtgcgggtcatgtggaaaggctttcacttgccattcctctctgaccgttcatgagaaaatccacagcggagacaagcctttcaaatgttccgattgcgagaaagcgtttaactctcgaagccgactgacattacatcagagaacccacacgggagagaaacctttcaaatgcgccgattgcggcaagggtttctcctgccatgcctacctgctcgtgcacaggcgcatccattccggtgagaagccattcaaatgtaatgaatgtggcaaggccttcagctcacatgcctacctgattgttcacagaagaatccacaccggcgaaaagccctttgattgtagccaatgctggaaggccttcagttgtcattcatctctcatcgttcaccaacgcatccacactggcgagaaaccctataagtgtagcgaatgcgggagggccttctctcaaaaccattgtctcatcaaacatcagaaaatccacagcggggagaaaagttttaaatgtgaaaaatgtggcgaaatgtttaactggagcagccacttgacagagcatcagagacttcacagtgaaggtaagccgctggcaatccagttcaataagcacctgctttcgacgtactatgtacccggtagcctcctgggagctggagacgccgggctcagggatgttgatcctatcgatgcgctcgacgttgcaaaactgctctgtgtggttcccccccgcgcaggcaggaactttagcctcggttcaaaacccagaaattag

SEQ ID NO: 212390 - DNA, 1935 bp, synthetic construct
  misc_feature 1..1935: note = Description of Artificial Sequence: Synthetic coding sequence
  source 1..1935: mol_type = other DNA
atggagatccccgcccccgagcccgagaagaccgccctgagcagccaggatcccgcactgagcctgaaggaaaacctggaagatatcagcggatggggcctgcccgaggcccgctccaaggaatccgtatcctttaaagacgtagctgtcgacttcactcaggaagaatggggacagttggactcaccacagcgcgccctctatcgcgatgtgatgctggaaaattaccagaacctgctggccctgggtccacccctgcacaagcctgatgtgatatcccacctggaacggggggaggaaccctggtccatgcagcgggaagtgccccgggggccgtgccccgaatgggaactaaaggccgtccctagtcagcagcagggtatttgcaaagaggagcccgcgcaggagcctattatggagcgcccactcgggggcgcgcaggcttggggtcggcaggccggagctctgcagcgatctcaggccgcaccatgggctcctgcgcccgcaatggtctgggatgtgcctgttgaggaattccccctccgctgcccactgtttgctcaacagcgcgtcccagaggggggcccactgttggatacacgaaagaatgtgcaggcaactgagggccgcacaaaggctccagctcgcctctgcgccggagagaatgcatccaccccatcagaacccgaaaagttcccacaagtgaggcggcaacggggcgcaggggcaggtgagggtgaattcgtgtgcggcgagtgtggaaaggcctttaggcagtcaagctccttgacgctgcatagacgctggcactctcgtgagaaggcctacaaatgtgatgagtgcggcaaagccttcacttggtctaccaatctgctggagcatagacgaattcatacaggcgagaagccattcttctgtggcgagtgtggtaaagcgtttagttgccatagttccttaaatgtgcatcaacgcatccacaccggagaaagaccttataaatgtagcgcctgcgagaaggcattctcctgcagctctcttctctctatgcacttacgggtccacacgggcgaaaaaccctatagatgtggagagtgtggaaaggcattcaatcagcggacacatcttactaggcatcaccggatccatacaggtgagaaaccctatcagtgcgggtcatgtggcaaggcattcacatgtcattcctcccttactgtgcacgaaaaaatccatagtggcgataagccatttaaatgcagtgactgtgaaaaggcatttaactccaggagccggcttacactgcatcagcggacccatacaggagagaagcctttcaaatgcgccgactgcggcaaggggttctcctgtcacgcctacctcctggtgcatcgccgtatccactcaggagaaaagccgtttaagtgtaacgaatgtgggaaggctttcagcagtcatgcttacttgatagtccatagaagaatacatacgggcgagaagcctttcgactgttcacaatgctggaaagccttcagctgtcactcctctcttatcgtccaccagagaattcacaccggagagaagccttacaaatgctctgagtgcggccgggccttttcgcaaaatcattgtctcattaaacatcagaaaatacactctggcgaaaaatcctttaagtgtgagaagtgtggcgagatgttcaactggagctcgcacttgacagagcaccagcgcttgcactcagagggcaaacccctggctatccagttcaataaacatctcctgtcgacctattatgttcctggatctcttttgggcgcgggggatgcaggactaagggacgtggaccctatcgacgccctcgatgtggccaagctgctgtgtgtggttccacctcgagccggtaggaacttctctctggggtctaaacccagaaattag

SEQ ID NO: 212391 - DNA, 1839 bp, synthetic construct
  misc_feature 1..1839: note = Description of Artificial Sequence: Synthetic coding sequence
  source 1..1839: mol_type = other DNA
atggagatccccgcccccgagcccgagaagaccgccctgagcagccaggaccctgctctgagcctgaaggagaatctggaggacatttccggatggggactacccgaagcaagatctaaggaaagtgtgtcctttaaggatgttgctgtggacttcacacaggaggagtgggggcaactggatagtcctcagcgagctctctacagagatgtgatgctggaaaattaccagaatctcctggcgctcgaatgggagctcaaagccgtgccttcccagcagcagggaatctgtaaggaagaaccagctcaggagcccatcatggagcgccctctgggcggtgctcaggcttggggccgccaggccggggctcttcaaagatctcaggccgctccatgggccccagcacctgccatggtgtgggacgtgcctgtggaggagtttcccttaagatgtcctctgtttgctcaacagagagtgcctgaaggtggtccattgctggatacacgcaagaatgtgcaggcgaccgagggcagaaccaaagctcctgccagactgtgtgcaggcgaaaatgcctccaccccttcagaaccggaaaagttccctcaggttaggcggcagcggggggcaggcgccggcgagggcgagtttgtctgcggagaatgcgggaaggccttccgtcaaagcagctcactgactctgcatcgtcgctggcactcgagagaaaaagcttataaatgtgatgagtgtggaaaggcattcacctggtcgacgaacctccttgagcatagaaggatccacactggggaaaaaccatttttctgtggcgaatgtggcaaggcgttctcgtgtcactcctcactgaacgtccatcagaggatccatactggcgagaggccatacaaatgctcagcttgcgaaaaagcctttagctgctcttcacttttaagcatgcacctaagggtgcatacaggagagaaaccctataggtgtggagagtgtggcaaggccttcaatcagcgaactcaccttactcggcaccacagaatccataccggagaaaagccctaccaatgcggcagctgtggaaaggcttttacctgtcacagctctctcacggtgcatgaaaagatacactccggcgacaagccctttaaatgcagcgactgtgagaaggcattcaattcaaggtctagactcaccttgcaccagcggacgcacactggcgaaaagccgttcaaatgcgctgactgtggaaaggggttctcctgccacgcttacctgttggtgcatcggcgaatccacagcggtgagaagccgtttaaatgcaacgagtgcggaaaggccttttccagccacgcctacctgatcgttcataggcgcattcatactggagaaaagccattcgactgctctcaatgctggaaggccttctcatgccactcttcactcatagtacatcaaaggattcacacaggagagaaaccttataagtgttcagaatgtggaagagccttcagccagaatcactgcctaattaagcatcagaagatccactctggcgagaagtcctttaaatgtgagaagtgcggggagatgtttaattggagtagtcacctgacagagcaccagaggctacactctgagggcaagccactagcaatccagttcaataagcacttacttagcacttactacgttcctgggtcccttctcggcgccggcgacgccggtctccgagatgtagaccctatcgacgctctcgatgtcgctaagctgctttgtgtggtaccccctcgagccggcagaaatttcagtcttggttcaaaaccccggaattag

SEQ ID NO: 212392 - DNA, 210 bp, synthetic construct
  misc_feature 1..210: note = Description of Artificial Sequence: Synthetic coding sequence
  source 1..210: mol_type = other DNA
atggagatccccgcccccgagcccgagaagaccgccctgagcagccaggaccccgcactgagtctcaaagagaacttagaggacatcagcggttggggccttcccgaggcgcgatccaagagcctcgctctggtgacacaggcaggagtgcagtggagaaacttgggctccctccagcctcctccactggggtttaagcagttctcctag

SEQ ID NO: 212393 - DNA, 1935 bp, synthetic construct
  misc_feature 1..1935: note = Description of Artificial Sequence: Synthetic coding sequence
  source 1..1935: mol_type = other DNA
atggccgaggccgtggccgcccccatcagcccctggaccatggccgcaaccatccaagcaatggagagaaagatagaaagccaggctgccagactcctgtcgctcgaaggcagaactggcatggccgaaaagaaactggctgactgtgaaaaaaccgcggtcgaatttggaaaccagttggagggaaaatgggccgtactaggcactctgcttcaggagtacggcctgctgcagaggagactcgaaaacgttgagaatctgctgcgtaacagaaacttctggatcctcaggctgccccctgggtccaagggagagagccccaaagaatggggcaagttggaggattggcaaaaggaactgtataagcatgttatgagaggtaattacgaaacattggtttccctagactacgccatttccaagccagaagtgctgagtcagatcgagcaggggaaggaaccttgcaactggaggcgccccggacccaaaattcctgatgtgccagtggacccatccccgggatcgggccctcccgtacctgccccagaccttctcatgcagattaagcaggagggggagctacaactccaggagcagcaggcgttgggcgttgaagcttgggccgccggccagcctgacatcggagaagaaccgtggggattgagccagctcgactccggcgctggggatatcagcaccgatgctactagtggggtgcactcaaacttctctacaacaatccctcccacctcttggcagaccgatctgccccctcatcacccttccagtgcctgctccgacggtacgcttaagctcaatacagcggcgagcactgaggacgtgaaaatagttatcaagactgaagtccaggaggaggaagtcgtcgccacccccgtgcacccgactgatctggaagcccatggcacattgttcggtccaggacaggctacaagattttttccatcccctgcccaggagggcgcgtgggagagtcagggcagctcgttcccatcccaagacccggtgttgggactccgggaacctgcccgccctgagcgtgatatgggcgagctctcaccggccgtagcccaggaggaaacacctcccggtgactggctgtttggcggtgtaagatggggctggaactttagatgcaagcctccggtgggcctaaatcccagaaccgggcccgaggggctgccttatagctcccccgacaatggagaagcgattctggatccctcgcaagcaccaaggccatttaacgagccatgtaagtatcccgggagaactaaaggattcggccataagcccggtcttaagaagcaccctgccgccccgccagggggtcgcccctttacgtgtgctacatgcgggaaaagttttcagctacaggtgtcactgtcagctcaccaacgtagttgcggggcgcctgacggctcaggccccggcaccggcgggggcgggagtggatctgggggcggcggcggaggtagtgggggggggagtgcgcgcgacggatcagccctgagatgcggggaatgtggaaggtgctttaccagacctgcccatcttattagacacaggatgcttcacacgggggaacggccatttccgtgcactgagtgtgagaagcgtttcaccgaacggtccaagttgatcgaccactatcgcacacataccggcgtcagaccattcacctgcacggtatgcggtaaaagctttatccgcaaggatcacctgaggaaacaccagaggaatcatgccgctggggctaaaacacccgctcgtgggcagcccctgcccacaccacccgcccctcctgaccctttcaaatcgcctgcctcaaaaggaccacttgctagcaccgatttagtgacagactggacatgcgggctttctgttctgggccccacggacgggggagacatgtag

SEQ ID NO: 212394 - DNA, 1938 bp, synthetic construct
  misc_feature 1..1938: note = Description of Artificial Sequence: Synthetic coding sequence
  source 1..1938: mol_type = other DNA
atggccgaggccgtggccgcccccatcagcccctggaccatggccgctaccatacaggccatggaaaggaagattgagagtcaggctgcccggttgctgagcttagagggcagaaccgggatggctgaaaagaagcttgcagactgtgaaaaaaccgcggtggagttcggtaaccagttagagggtaagtgggcagtcctcggcactcttctgcaggaatatgggctccttcagaggaggcttgagaatgtagagaacctgctccgcaaccgtaatttctggatcctcaggctgccacccggcagcaagggggaatctcctaaagagtggggtaagctggaggattggcagaaagagctctacaaacatgtgatgcggggaaactacgagacactggtgtccttggactatgcaatcagcaagccagaagtgctgtcgcaaatcgagcaaggcaaggaaccatgtaactggcggagacccggcccgaaaatacccgatgtgccagtggatccatcacctggttcaggccctcccgtccccgcccctgacctcctgatgcagattaaacaggagggcgagctacagctgcaggagcagcaagcactaggcgttgaggcctgggcggccgggcagcccgatattggggaagaaccctggggcttgtctcagctcgacagcggagctggcgacatcagtaccgacgccacatccggtgtgcactccaacttttcgaccacaatacctccgacatcttggcagacagacctgccaccccatcatccaagttccgcatgctcagatgggacactgaaactgaatacagctgcgtcaacagaagccgatgtgaaaatagtgattaaaacagaagtacaggaggaagaggtggtggcaaccccagtccaccccaccgaccttgaagctcacggcacactctttggcccaggacaggccactcgtttcttcccatcccccgcccaggagggagcgtgggaatcccaaggtagctccttccctagccaggatcccgttctggggctccgggaacctgctagacctgagagagatatgggagagctgtccccggccgtggctcaggaggaaacccctcccggcgactggctgtttgggggagttcggtggggatggaacttcaggtgtaagccacctgtcggtctgaacccaagaaccgggcctgaggggctgccatacagttctccagataacggagaggcaatcctcgacccatcgcaggcccctcggccattcaatgaaccctgtaagtaccctggcaggaccaaaggttttgggcacaaacccggcctgaaaaagcatccagccgcaccccccgggggccgccctttcacttgcgctacatgtggaaagtccttccaattgcaagtgtccctcagcgcacatcagaggtcatgtggcgcccccgatggatctggtcccggcacaggcggaggaggttcagggtcaggcggtggaggagggggtagtggaggtggaagtgctagagacggatcagccctgaggtgtggcgagtgcggcaggtgcttcacgcgccctgctcacctcatcagacaccgcatgctgcatacaggagaacgcccatttccatgcactgaatgtgagaagcggttcaccgagagaagcaaactgatcgatcactaccggacccacacaggcgtccgaccgtttacctgtacagtttgtggcaaatcctttatcagaaaggatcacttgaggaagcaccaacggaaccatgccgctggcgcgaaaactccagcacggggtcagccacttcccacaccacctgcaccacccgatcccttcaaatctcccgcctctaagggcccccttgctagcaccgacctggtcactgattggacgtgcggcttgagcgtgctcggacccaccgatggaggtgacatgtag

SEQ ID NO: 212395 - DNA, 2172 bp, synthetic construct
  misc_feature 1..2172: note = Description of Artificial Sequence: Synthetic coding sequence
  source 1..2172: mol_type = other DNA
atgagcctgctgaaggagcggaagcccaagaagccccactacatcccccgacccccaggcaagcccttcaagtataagtgctttcagtgcccattcacttgcaatgaaaagtctcacctgtttaaccatatgaagtatgggctgtgtaagaattccattacccttgtttctgaacaggacagggtgcctaaatgtcctaagtccaactccctggaccctaagcagacaaatcaacccgatgcaacagctaaacccgctagttcgaaatccgtggcaaatggcctctccgcttttgattcaaagctccagcatagctccgcacgggaagacattaaggaaaatctagaactgcaggctcgcgggacccaccgttgtctcggacagaaacccgctctgcacagggcttccccctgcaagtctccagctcccgaggctgctttgggcgctcaacctgccctcgagggagccgcgcgaccgtctgcttttgtgccggttggggagcaccgattgaaggggccagataacgccgaagcaccagaaacactggctctccataatcctacagcaaaggccgtttctttccacacgaaaagcgccttccacacacctggctatccttggaaagccggcagtccctttctaccaccggaatttccacacaagatttctagtacaaaaggtttaggggcaattagtccgtatatgcaccctacaatacctgagtatcccccccatttctatactgagcatgggctagcgaccatatactccccctaccttctggcgggatcgtctcctgagtgtgatgccccccttttgagcgtatacggcacccaggatcccaggcactttctccctcaccctgggcctatcccaaaacacttggcgcctagcccggctacgtatgatcattatcggttcttccagcaatatccatccaatctgcctattccctacggattttacagaccagaatcggctttcagcagttatgggctcaggctcccgcccgtcacggggctgaccagggaccaatcctcccacctgctggaagaggccactctggtctatcccgctagctcccctagcaggttgaatccaagcgaccccaacaggaagcatgtcgagttcgaaagccctatccccgaagctaaagatagctcaaaggctgggcagcgagataccgagggatcaaaaatgagtccaagagctggcagtgcggccacaggttctcctgggagaccaagccctacagactttatgcaaacctcccagacttgcgagggtctgtatgatctgagcaataaagccgcttcctctgccctgggtcggctgtacccccccgagcagagcctcacagccttcagaccagtaaaaaagtctaccgaatgtctgcctgcccaggctgccgagactacggctgagagtccagttagtctaaatgtggttaacggggaccctcctgctcctactggaagcgcaagcctcgtctctgaggcagccccgagttctcccgatgattcaagtggcatggggccactaaacctttccaaaaagtccgaaatcaacctggccgccacccacgaacccacataccaaggaagccctcaagctgagactgcgtccttctcagagctgcaagacttgccactaaacctgtccgtaaaagatccctgcaacacacaagccccccgccccgcctttcccggtcgcccacgggctgctgagcctgccgccgcagttcctcaaaaaacaggaacggagggatcagaggatggtccttcacaccccgagacgaagccaggaagtctagacggggacggcgcccctccaaccggccccggggaagaggctcctgacgcttgtgccgtcgatagctcggaggagcaaaaacagacagcagctgtcgctctgtgtcagcttgcagcctacagccccaggaacatcagagtgggggatggtgacgccgccgcccctgagcccgcatgccgccaagacactccaactcttagcagtatggaatctcaggaagcccaatgcgacctgcgccccaagggccagaaacggacgtccctgagagatgccggcaagtcccagcaaggtgccaagaaggccaaactccaggataccgccagagtttttacactacggaggcgggcgcgtgtaagctag

SEQ ID NO: 212396 - DNA, 951 bp, synthetic construct
  misc_feature 1..951: note = Description of Artificial Sequence: Synthetic coding sequence
  source 1..951: mol_type = other DNA
atgagcccccgggccggcagcgccgccaccggcagccccggccggccctctcctaccgactttatgcagacctcccagacttgtgaggggctctatgatctatccaacaaagccgcttcatcagccctgggccgcctgtatccacctgagcagagcctcaccgcgttccgccccgtcaagaagtccacagagtgtctgccagctcaggcggctgaaacaacagccgaaagcccagttagcctgaacgtggtaaatggggacccccccgcgcctaccggtagcgccagcttggttagtgaagccgccccttcctctcctgatgactcaagcgggaaaagcgaaattaacttagctgctacacatgagcctacgtaccaggggtcaccccaagctgagactgcttccttttccgaactccaggacttgcctctgaacctgagtgtgaaggatccttgtaacactcaggctccacgccccgcatttccaggacggcctagagctgccgagccagcagccgcggtgcctcagaaaacaggcaccgaaggatccgaagacggcccttcccaccccgaaaccaagcccggttccctggacggcgatggtgcccctcccaccggccccggggaggaagcacctgacgcctgtgccgtagatagcagtgaagagcagaaacaaactgcagctgtggcactgtgtcagttggccgcttatagccctcggaacattcgtgtgggggatggcgacgcagcagcgcctgaacctgcatgcagacaagacacacctaccctgtcctccatggagtcgcaagaggcacaatgcgatctgaggcccaaagggcagaaacggacttcactccgcgacgctggcaagtcacagcaaggagcaaagaaagccaaactacaggatactgctagggtgttcaccttacgcaggagagccagagttagctag

SEQ ID NO: 212397 - DNA, 891 bp, synthetic construct
  misc_feature 1..891: note = Description of Artificial Sequence: Synthetic coding sequence
  source 1..891: mol_type = other DNA
atgtacttcagccaggaggagtgggagctgctggaccccacccagaaggcactgtacaacgatgtgatgcaggaaaactacgagaccgtcatcagccttgctctctttgtgttgcccaagcctaaggttattagctgtctcgagcagggtgaagaaccatgggtgcaagtatctcctgagtttaaagacagcgctggaaaatcccctacaggcctgaagctcaagaatgacaccgagaaccatcaaccagtgagcctgtctgatctggagatccaggcttcagccggcgtaatttcaaagaaggcgaaggtgaaggtgccccagaagactgctggcaaggaaaaccatttcgacatgcatagagtgggtaagtggcaccaagattttcccgtcaaaaagagaaagaagctctctacttggaagcaggaacttctgaagcttatggaccggcataagaaggattgcgcacgtgagaaacccttcaagtgccaggagtgcggcaagacctttcgtgtgtccagcgacttgataaagcaccagcgcattcatacggaggaaaaaccctacaagtgtcagcaatgcgacaagcgcttcaggtggtccagcgacttaaataaacacctgaccactcaccagggaattaagccatacaagtgctcctggtgcggcaagtcattttcccagaatactaacttacacacccaccagcgaacccacaccggcgagaaaccatttacctgccacgaatgcggtaagaagtttagtcagaattcccatcttattaaacatcgaaggacacataccggcgagcagccttatacatgctccatctgccggaggaactttagcaggcggtcctcattgctacggcatcagaagctgcacctctag

SEQ ID NO: 212398 - DNA, 891 bp, synthetic construct
  misc_feature 1..891: note = Description of Artificial Sequence: Synthetic coding sequence
  source 1..891: mol_type = other DNA
atgtacttcagccaggaggagtgggagctgctggaccccacccagaaggccctgtacaacgatgtgatgcaggagaactatgagacggttatcagtctggcccttttcgtcttgcccaagccaaaggtgatttcttgtctggagcagggagaggaaccttgggtgcaggtgagcccagagttcaaagactcagcgggaaagtcaccgacaggactcaagctcaagaacgacacggaaaaccaccaacccgtatccctttcagatctggaaattcaggcgagcgcaggggttatcagtaagaaggccaaagttaaagtgccccagaaaaccgccggcaaggaaaaccactttgacatgcacagggtaggcaagtggcaccaagatttcccagtgaagaagcgaaagaaactgagcacctggaaacaagaactgctaaaactgatggatcgccataaaaaggattgcgctcgtgagaagccttttaaatgccaggagtgtggcaagacattccgggtttccagtgaccttataaaacaccagcgtatccacactgaggagaaaccgtataagtgccaacaatgtgataagcgcttcaggtggtcttcggatctgaataaacatctcaccactcatcaaggtataaagccatacaagtgctcctggtgtggcaaaagcttctcccagaataccaatcttcacacccaccaacgtactcatacaggggagaagccatttacatgtcacgagtgcggtaagaagttttcacagaacagccacctgattaagcatagaaggacgcacacaggagagcagccatacacatgctcaatttgcagaaggaacttttccagaaggagctctctgctgagacaccagaagctacacctgtag

SEQ ID NO: 212399 - DNA, 1248 bp, synthetic construct
  misc_feature 1..1248: note = Description of Artificial Sequence: Synthetic coding sequence
  source 1..1248: mol_type = other DNA
atggccatgcgggagctgaacgccgacagctgcagcagcccccagatgggagccatgtgggaaacatcagggtcagtgaaggaaaactcatcacagtcaaaaaaatactccactaagatagaaaatttgggcccagagagtgcgtgtcgacatttttggtcctttagataccacgaagccacaggtcctctggagactataagccagctccagaagctgtgtcaccagtggttgagaccagagatccattccaaggagcagattctggagatgctggtgttagagcagtttctttcgatcctgcccaaggaaactcagaattgggtccagaagcatcatccccagaacgtcaagcaagctctcgtgctcgtggagttcctgcagcgtgaaccagatggcacgaaaaacgagagcctgctcacttttgaggacgtcgctgtgtattttagcgaggaagaatggcaattgttgaatccattagagaaaaccctctacaatgacgttatgcaggacatctatgagactgtgatatccctcggtctgaaacttaaaaacgacactgggaacgatcatccaatttccgtgtctacgtctgagattcagacctccggctgcgaggtgtctaagaaaacccggatgaagattgcacagaagacaatgggcagagagaatcccggagacacacatagcgttcagaagtggcaccgggcatttccccggaaaaaaagaaagaagcccgcaacatgcaagcaggagctgcccaaacttatggacctgcatggtaaagggcccaccggcgagaagccattcaaatgccaggagtgcggcaaatcttttagggtctcgagcgacctaatcaaacatcaccggattcacaccggcgaaaagccctacaaatgccaacagtgtgatcgccggtttaggtggagctcagacttgaataaacattttatgacccaccagggaatcaagccttacaggtgctcgtggtgcgggaaatcgttcagtcacaacaccaatctgcacactcaccaacgcattcatacaggcgagaaaccattcaaatgcgatgagtgtgggaagcgtttcatccagaactctcatttgattaaacaccaacggacccacacaggggagcagccttatacgtgctccctatgtaaacgcaattttagtcgccgcagctcccttttacggcaccagaaacttcataggcggagggaggcttgccttgtgtcccctaactag

SEQ ID NO: 212400 - DNA, 1533 bp, synthetic construct
  misc_feature 1..1533: note = Description of Artificial Sequence: Synthetic coding sequence
  source 1..1533: mol_type = other DNA
atggccatgcgggagctgaacgccgacagctgcagcagcccccagatgggagctatgtgggaaacatctggctctgtaaaggaaaactccagtcagagcaagaaatactctactaaaatagaaaacctggggcctgaatcggcctgtcgccacttttggagtttccggtatcacgaagcaaccggtcccttagagacaatctcacagctgcagaaactttgccaccagtggctgcggcctgagatccacagcaaagaacaaatactggaaatgttggtgctcgagcagtttttgtccattctgcctaaggagacacagaactgggtccagaaacaccacccacaaaacgttaaacaagccttggtgcttgtcgaattccttcagagggaaccagacgggaccaagaacgaagtgacagcacacgagttgggaaaggaggccgttctacttggagggactgccgtcgctccaggcttcaagtggaaaccagctgagccgcaacccatgggggtgtttcaaaaggagtactggaacacttacagagtgctgcaggagcaattgggctggaacactcacaaagagacgcagcctgtttacgagcgcgcagtccacgatcaacagatgctggcactgagcgaacagaagagaatcaaacactggaagatggcatctaagctgatcctgcctgaatccttgtctctgctaacgtttgaagacgtggccgtgtatttttctgaagaagagtggcaactgctgaatccgctcgagaaaacactgtacaacgacgtcatgcaagatatttacgaaaccgtgatcagcctggggttaaaattgaaaaacgacactgggaacgatcaccctatcagtgtctccacaagcgagattcagacctccggctgcgaagtcagtaaaaagacccgtatgaaaattgctcaaaaaacgatgggcagagaaaaccccggggatacacacagtgtccagaagtggcacagagctttcccccgcaaaaagcggaaaaagcctgccacctgtaaacaagaactgcctaaactgatggaccttcacggcaagggaccgaccggcgaaaagccttttaagtgtcaggagtgtggaaaaagtttcagagtatccagtgacctgataaaacaccatagaattcacaccggagaaaaaccatacaagtgtcagcagtgcgacagaaggttcaggtggtcttccgatctgaataaacattttatgacgcaccagggaatcaaaccatacaggtgttcgtggtgcggaaagtctttttctcataacaccaacctccatactcaccaacgaatacacacgggcgagaaaccattcaagtgtgacgagtgcggcaagcggttcatccaaaacagccatctgattaagcaccagcgcactcataccggtgaacagccatatacctgctcactatgcaaaaggaatttctctcgaaggtcttccctgctcaggcaccagaagctgcaccgccggcgcgaggcctgcttggttagccctaattag

SEQ ID NO: 212401 - DNA, 1548 bp, synthetic construct
  misc_feature 1..1548: note = Description of Artificial Sequence: Synthetic coding sequence
  source 1..1548: mol_type = other DNA
atggagagcctgggcctgcacaccgtgaccctgagcgacggcaccactgcctatgtgcagcaagcagtgaagggcgaaaaactgctggaggggcaggttattcagctcgaggacggaacgacagcgtacatccaccaggtcacggttcagaaggaggccctgtcctttgaagatgggcaaccggtccagctcgaagatgggtccatggcttatattcatagaacccccagagagggttacgatccttctacccttgaggctgtccaactcgaggacggctccaccgcctacattcatcacccagtcgctgtcccaagtgagagcaccatcctagcggtccagaccgaagtggggctcgaggatctcgctgccgaggacgatgaaggctttagcgccgatgccgtagtggccctggagcagtatgcaagcaaagtgcttcacgatagtcagatcccacgaaatggaaaaggccagcaggtgggcgatagagcgtttcgctgcggatataagggctgcggcaggctttataccaccgcccatcaccttaaggtccacgagcgggcacacaccggggaccgcccctatcgctgtgacttcccttcctgcgggaaggcctttgctactggatatggcctgaagtcccacgttaggacccacacgggagaaaagccttacaagtgtcccgaggaactttgctcaaaggctttcaaaacctccggtgatcttcaaaagcatgtgcggacacatactggcgaaaggccatttcagtgccctttcgaaggatgcggacggagcttcactacgagcaatatccgcaaggtgcatgttaggactcacaccggagagagaccatatacatgccccgagccgcactgtggaaggggctttacttcggcgactaattacaagaatcacgtgagaatacacaccggtgagaagccttatgtttgcacagttcccggttgcggcaagaggttcaccgaatattcttccctgtacaagcatcacgtggttcatacccactgtaaaccttacacttgtagtacttgtggaaagacatataggcagactagcacactggccatgcacaagcgttctgcccacggggagctggaggccaccgaggaatcagagcaagcactgtacgagcagcaacagctggaggctgctagtgctgctgaggaatccccccccccaaagcggccaagaattgcctatctgtcagaagtgaaagaggagcgcgacgacattccagcgcaggtcgcaatggtaaccgaggaagatggtgccccacaggtagcgcttattactcaagatggcgctcaacaggttaccattatcacctcaggggccgtggtcgctgaggacagctctgtggcgtccctccggcaccagcaggtcgctctgcttgccacagcgaatggcactcacattgctgtgcagctcgaggaacaacagaccctggaagaggcaatcaatgttgctaccgcagctatgcaacagggagccgtgacgctcgagactacggtgagcgagtcagggtgttag

SEQ ID NO: 212402 - DNA, 1713 bp, synthetic construct
  misc_feature 1..1713: note = Description of Artificial Sequence: Synthetic coding sequence
  source 1..1713: mol_type = other DNA
atggagagcctgggcctgcacaccgtgaccctgagcgacggcaccaccgcttacgtgcagcaagcagtaaagggagaaaagttgttggaagggcaggtgatccaactcgaggacggcacgaccgcctatatacaccaggtgactgttcaaaaggaagccctgtcttttgaggacggccagcccgttcagctggaagacggcagcatggcgtatattcatcggacccctagagaagggtatgacccttccactctcgaagcagtccaattagaagacggaagcactgcctatatacaccaccctgtggcagtgccctctgagtctacgatcctggccgtgcagaccgaagtgggtctggaagacctcgccgctgaggatgatgaggggtttagcgctgacgcagtggtggccctggagcagtatgcatcaaaggtgctccacgattctcagatacccagaaatgggaaaggccagcaagtcggcgatagagcatttcgctgcggctacaaggggtgcggacgcctgtataccaccgctcatcacctcaaggttcatgagagagcccataccggcgacaggccctaccgatgtgactttccctcctgcggaaaagcgttcgcaacaggatacggactgaagtcacatgtaagaacacacactggggagaaaccatacaaatgtccagaagaactgtgcagcaaagcttttaagaccagcggggatctgcagaagcatgtaaggactcacaccggcgaaaggcctttccagtgccctttcgagggctgcgggcggtcatttaccacctcaaatattcggaaggtacatgtgcgaactcatacaggggagcgcccgtatacctgtcccgaaccccactgtggccgcgggtttacgtctgccaccaattataagaaccacgtgagaattcataccggcgagaaaccctacgtctgcaccgtacccggatgcggcaagcgatttacagaatacagttccttatacaagcaccacgtagtgcacacgcactgtaaaccatacacctgtagcacatgtgggaaaacctatagacaaacatctacgttggccatgcataagcgctccgcccacggcgagcttgaagcaaccgaggaatcagagcaagccttgtatgagcagcaacagcttgaagccgcaagtgctgcggaggagtcacctcctccaaagagacccagaatcgcctacttgtcagaggtgaaggaagaaagggatgacattcctgcccaagtcgccatggtgactgaagaggatggagctccccaagtggcactgataactcaggatggggcccagcaggtgagcctgtctcccgaggaccttcaggccctcggaagcgccatatctatggtgacacagcacgggagcacaacacttacaattcctagcccagatgccgacctggccacctccggcacacacacagtaacaatggtcagtgccgacgggacccagacccagccagttaccatcatcacatcaggtgccgtggtggcagaggatagctcagtggcttccctcagacatcagcaagttgctctccttgcaactgctaatgggacacacattgcggtacagctggaagaacagcagacccttgaggaagccatcaatgtggcgacggccgcaatgcagcagggcgcagtgacattggagactactgtgagcgaatcaggctgctag

SEQ ID NO: 212403 - DNA, 1287 bp, synthetic construct
  misc_feature 1..1287: note = Description of Artificial Sequence: Synthetic coding sequence
  source 1..1287: mol_type = other DNA
atggagagcctgggcctgcacaccgtgaccctgagcgacggcaccactgcttacgttcagcaagccgtgaaaggcgagaaattactggagggacaagtgatccagctggaagatggtacaaccgcctacattcatcaagtcaccgtgcagaaagaagccttgtcatttgaagatggccagcccgtgcagctggaggacggctctatggcatacattcacagaactccgagggagggctatgatccttctaccctagaggccgtgcagctcgaagacggatctactgcatacatccatcatcctgtcgcagtgccttctgagagcacaattcttgccgtgcagaccgaggttgggcttgaagatcttgccgccgaagatgatgagggcttcagcgcggacgccgtcgtggctctagagcagtacgctagcaaagtcctgcacgattcacaaattccccgtaacggaaaggggcagcaggtaggcgatcgagccttccgctgtggctacaagggatgtggacgactgtacaccactgcccaccacttgaaagtgcacgaaagggctcacacaggagatcgaccctaccgctgtgattttccgtcttgtggaaaggcctttgcaacaggatatggactgaagtcacatgtgcgaacccacactggggagaaaccttataagtgccccgaagaattgtgctcaaaagcgtttaaaactagcggtgaccttcagaagcacgtacgcacccacaccggtgaacggcctttccagtgtccgttcgaaggctgcggacgctcctttacgaccagcaacattcgcaaagtgcacgttaggacgcataccggggagagaccttatacctgccccgagccacattgcggccgcggattcacctcagcaaccaattataagaatcatgtgcgcatacacactggtgagaagccttacgtctgtacagttcccggatgcggtaagcgatttacagagtactcgtctctgtacaaacaccacgtggtgcacactcactgcaaaccctacacatgctcaacttgcgggaaaacctatcggcagacgtcaacattggccatgcataaacggtctggtcattgcggacacgccgctagaggctgcgatcccggtgacaacagcgtgggcgagtggctcctatctcccaggggcctgggacccacaccctgctggagaaagtgccacctccacggacacagttgccctcagggaccacgtttatggttgacacacaggcgctggcctcacaggtctctcggatag

SEQ ID NO: 212404 - DNA, 1635 bp, synthetic construct
  misc_feature 1..1635: note = Description of Artificial Sequence: Synthetic coding sequence
  source 1..1635: mol_type = other DNA
atggagagcctgggcctgcacaccgtgaccctgagcgacggcaccactgcctacgtgcagcaggccgttaagggcgagaagctcctggagggccaggtgattcagcttgaagacggaactacagcctacattcaccaggtgacagtccagaaagaaggttatgatccgtccactctcgaagccgtgcagctcgaggacggctctactgcttacatccaccatcccgtagcggttccctctgagagtacaatactcgctgttcagaccgaagttgggctggaagacctagccgctgaagacgatgagggcttctcggcggacgcagtcgtcgccctagaacagtacgcaagcaaagtgcttcacgacagtcagattcctcgtaacggcaaggggcagcaggtgggtgatcgcgcgtttcgatgcggctataagggatgcgggcgcctgtatactacggcccatcacctgaaagtccacgagcgggcccacactggagataggccctatcgatgtgactttccaagctgcgggaaagcttttgctactggttatggactgaagtctcacgtcaggactcacaccggcgagaaaccttataagtgcccagaagaactttgcagcaaggcattcaaaacctcaggggacttgcaaaaacacgtaagaacccatacaggtgaacgaccgttccagtgcccgttcgaaggatgtggtcgatctttcactacatcaaatatccgcaaggtgcacgttcggacacacactggagagcggccttatacatgccccgagccacattgcggcagagggttcacttctgcaacaaattataaaaaccacgtgagaatccatactggcgagaaaccctatgtttgcacggtgcccggctgtgggaaacgttttaccgaatactcatccctgtacaaacatcacgtggtgcacacccactgcaaaccatacacttgcagtacgtgcggaaagacttacagacagacctctactttggcaatgcataagcgttcagcccacggagaactagaggccacggaagagtccgaacaggccctatatgagcagcaacagctggaagctgcatccgccgcagaggagagcccaccccccaaaagaccaaggatcgcctacttgtcggaggtcaaagaggagcgcgacgatatccccgctcaggtagcaatggtgacggaggaagatggagcgcctcaggtagctctcatcactcaggatggggcccagcaggtcagcttgtcccccgaagacctccaggcactgggatccgcaatcagcatggtcacgcagcacggttccacaactttgacaataccctcgcccgatgccgatcttgcaactagcggcacccatactgtgactatggtgtccgcggatgggactcagacacagcctgtaacaataatcaccagtggggccgtagttgctgaagactcctcagtggcaagtctgcgacaccagcaagtggctctccttgccaccgctaacggtacacacattgcagtccagctggaagagcaacagactctcgaggaggccattaacgtggctaccgccgccatgcagcagggcgcagtgactctagaaacgacggttagcgagagtggatgctag

SEQ ID NO: 212405 - DNA, 1209 bp, synthetic construct
  misc_feature 1..1209: note = Description of Artificial Sequence: Synthetic coding sequence
  source 1..1209: mol_type = other DNA
atggagagcctgggcctgcacaccgtgaccctgagcgacggcaccaccgcctacgtccagcaggctgttaagggcgagaaactgctggaagggcaggtcattcagctagaggacgggacgactgcctatattcaccaggttacggtgcagaaggaggccctttctttcgaggatgggcagcctgtacaactggaagatggatctatggcctacattcatcggactccccgtgaaggctatgacccttccaccctggaggctgtccagctggaggacgggagcactgcatatatccaccatcccgtggctgtgcccagcgagtctacaatactggcggtgcaaactgaagtgggactggaggatctcgcagccgaagatgatgagggctttagcgcagacgccgtggtcgccctggaacagtatgccagcaaggtgctgcacgatagtcagatcccccgaaacggaaagggccagcaggtgggtgacagggctttccgctgtggctacaagggctgcggaaggttgtacaccacagcacatcatcttaaagtacatgagcgggcgcacaccggtgatcggccatacaggtgtgacttcccttcctgtggtaaagccttcgctactgggtacgggctaaagtctcatgtgcgaactcacacaggtgaaaagccatataaatgcccagaggagttatgtagcaaagcattcaagaccagcggtgatctgcagaagcatgtgaggacccacacaggcgaacggccttttcaatgtccatttgagggctgcggcagatcatttacaaccagcaatataagaaaagtgcatgtgcggacgcatacaggtgagaggccctacacctgtcctgagccccactgcgggaggggattcaccagtgccacaaattacaagaaccatgtgagaattcacactggggagaaaccctacgtatgcacggtgcccggctgtgggaagcggttcacagagtacagctcactgtataagcatcacgttgtccacactcatcactgcgggcatgcggcaagaggctgcgacccaggagacaattccgttggagagtggcttctgagccccagagggctcggccccaccccgtgctggcgcaagtgccacctacatggtcatagttgtccgcagggacctaggctctggctgacacataggcggtggcctcaccgttctttagggtag

SEQ ID NO: 212406 - DNA, 1023 bp, synthetic construct
  misc_feature 1..1023: note = Description of Artificial Sequence: Synthetic coding sequence
  source 1..1023: mol_type = other DNA
atggagagcctgggcctgcacaccgtgaccctgagcgacggcaccacagcctatgtgcagcaagctgttaagggggagaaactgctggagggccaggttattcagctcgaagacggtactaccgcctatattcatcaagtgaccgtgcagaaagaagccctgagcttcgaggacggccagcctgttcagctggaggatggaagtatggcatatatccacagaacaccacgagagggttacgatccttcgacacttgaagctgtgcagctggaagatggctccacagcctatattcatcaccccgtggctgtcccaagcgaatcaaccatcctcgcagttcagacagaggtcgggctcgaagacctggcagccgaagacgacgaagggttctcggcagatgctgtggtagctctggaacagtatgctagtaaggtactgcacgactcccaaatcccacgcaatggtaaggggcagcaagtgggagacagggccttcaggtgcggctataaggggtgtggcagactgtataccactgctcaccacctcaaagtacacgagcgggctcataccggggacaggccttaccggtgcgattttccttcttgtgggaaagcgtttgcaactggctacggcctgaaatctcacgtcagaacacacacaggagagaagccttataagtgccctgaggagctatgctccaaggcctttaaaacttcaggagacttacagaaacacgtccggacccacactggggagcgaccctttcagtgtcctttcgagggctgcggacgcagtttcactacatctaacatacgaaaggtccacgtgcggacacacaccggcgagcgcccttacacttgccctgagccccactgtggccggggttttacatccgccactaactacaagaatcatgtgagaattcatacaggtgagaagccttatgtctgtacagtaccaggatgtgggaagcgcttcacagagtattccagcctatacaaacatcacgtagtacacacatag

SEQ ID NO: 212407 - DNA, 1638 bp, synthetic construct
  misc_feature 1..1638: note = Description of Artificial Sequence: Synthetic coding sequence
  source 1..1638: mol_type = other DNA
atggactgcgtgatcttcgaggaggtggccgtgaacttcacccccgaagagtgggcgcttctggatcatgctcagaggtcgttgtaccgggacgtgatgctggaaacctgccgtaatttggcttccttagattgttatatctacgtgcgtaccagcgggtcatctagccagcgcgatgtttttggaaatggtatttccaatgacgaagagatcgtgaaatttaccggaagtgactcctggtcaatctttggtgaaaactggcggttcgataacactggagaccagcaccagatcccacagaggcacctgcgaagtcaacttggacgattgtgtgagtcaaacgagggccatcagtgtggtgagacactttcacaaacagccaatctacttgttcataagagctaccctaccgaggcgaaaccatctgagtgtaccaagtgtgggaaggctttcgagaataggcaaagaagccacaccgggcaacgaccttgcaaggaatgtggtcaggcctgcagttgcctcagctgtcagagccctcccatgaagacacaaaccgtggagaagccttgcaactgccaggattcacgaactgcctccgtaacctatgttaagtcactcagtagtaaaaagtcatacgagtgccagaaatgtgggaaagcgttcatttgtcctagcagtttcagaggacatgtgaattctcaccacggtcaaaagacccacgcctgtaaagtgtgcgggaagaccttcatgtactactcttacttgacaagacacgtgcggacccatactggagagaaaccttacgagtgcaaggaatgcgggaaggcttttagctgtccaagttacttcagggaacacgtcagaacccacacaggggaaaaaccctacgagtgcaagcactgcggcaaatcctttagttgctatagttctttccgcgatcacgtacggactcatactggggagaaaccgtgtcagtgtaagcattgcgggaaggcctttacgtgctattcctccctgagggagcatggccgcactcatagtggtgagaagccctacgagtgcaaggagtgcggtaaggcattcaggtacccctcctccctgcgggcccacatgcggatgcatactggcgagaagccctatgtctgtaaacagtgtggaaaagcattcgggtgcccgacatatttcaggaggcacgtcaagactcatagtggggtgaaaccgtatcaatgcaaagagtgcggtaaggcatactctttcagctcctctctccgcatccacgtgagaacgcatacaggtgagaagccttttgagtgcaaacattgcgggaaagctttctcctgtcattcgtctctgcgggagcatgtccgaactcactcgggggaaaaaccctacgagtgtaaccaatgcggtaaggccttctcacacgcccagtacttccagaagcacgtgagatcacattcgggggtgaaaccttatgaatgtaccgagtgtggcaaggcttactcttgctccagctccctgcgggttcatgtcaggacacacaccggcgagagaccatatgagtgtaaacagtgcgggaagaccttccggtatctcgccagtcttcaggctcatgtccgcacgcatgctggggcctag

SEQ ID NO: 212408 - DNA, 1308 bp, synthetic construct
  misc_feature 1..1308: note = Description of Artificial Sequence: Synthetic coding sequence
  source 1..1308: mol_type = other DNA
cggctgtgcgagagcaacgagggccaccagtgcggcgagaccctgtcccaaaccgctaatctactggttcataagagctaccctacggaggctaagcccagtgaatgtacgaagtgtgggaaaacgttcatgtattactcttacttgaccaggcacgtccgaacacataccggcgaaaagccatatgagtgcaaagagtgcggaaaggccttctcttgcccatcctactttcgcgagcatgtgcgcacccacacaggggagaagccgtacgaatgtaaacactgcgggaagagcttttcctgctattccagcttccgggatcacgttcgcacgcataccggcgaaaagccatgtcagtgcaagcactgtggtaaagctttcacatgttatagctcactgagagaacacggccgaacacactctggagagaagccatacgaatgtaaggagtgtggaaaggctttcagatatccttcaagccttagagctcatatgcgcatgcacacaggtgagaagccttacgtgtgtaagcagtgtggcaaggccttcgggtgccccacatacttccggaggcacgtaaagacccattctggggttaaaccatatcagtgtaaggaatgtggaaaggcctactctttctcatcctcccttcgcatccatgtgcgtactcataccggagaaaaaccctttgagtgcaagcactgtggtaaggcattcagctgccactccagtttgagagaacacgtacgaacccactctggcgagaagccctatgaatgtaaccagtgtggcaaggcattttcgcacgcacagtatttccagaagcatgtacggtctcatagcggggtgaagccatacgagtgtactgaatgcgggaaagcatactcctgttctagcagccttcgcgtgcatgttaggacccacactggcgaacgaccatacgaatgcaaacaatgcggtaagaccttcagctggccttcagatttaagagtgcacatgagaacccactcaggcgaaaagcgctgcggatgtaagcagtgcggcaagtcattcagttccccctcatcctttaaagggcacatcagaactcatacaggggaaaagctctacacctgtcgcgaatgcgggaaggtattctcatctccaagctattttaggacccaagtgcgcattcatatcggggaaaaaccctacgtgtgcgaacagcgcggaaaggtgttctcctggtcctcatcatttcggggccatctgcgaacccatagccgggagaaaccctatgagtgcaaggaatgtactaaggccttctag

SEQ ID NO: 212409 - DNA, 1497 bp, synthetic construct
  misc_feature 1..1497: note = Description of Artificial Sequence: Synthetic coding sequence
  source 1..1497: mol_type = other DNA
atgctggaggagggcgtgctgcccagccccggccccgccctgccccaggaggagaatacaggggaagaaggcatggcggcaggattacttaccgctggcccaagaggcagcacgtttttcagttcggtcaccgtcgcttttgcccaggagcggtggaggtgtttagtttcgacaccgcgagatcggttcaaagagggcatccctggaaagtcaagaagcctggtactgcttgggcttcccgtgtcccagcccgggatgaattcccagttggagcagcgcgaaggtgcatggatgcttgaaggggaggacttacgctctcccagtcctgggtggaagattatttctggatccccccccgagcaggcactgtccgaagcaagttttcaggatccgtgcgtcgaaatgccccctggggattccgaccatgggacttcagacttagagaagtcattcaatctccgcccagtattgtcccctcagcagcgggtccctgtggaagcacggccgcggaagtgcgagacgcacacagagtcttttaagaattcagaaattctcaagcctcacagggctaaaccatacgcctgcaacgagtgtggaaaagcattcagttactgctcttccttgtcccaacatcaaaaaagccataccggcgagaaaccctatgaatgctctgaatgcggcaaggcatttagccagtcctcaagtctgatccagcaccagcggatccataccggagagaagccctacaaatgctccgagtgcggtcgggcttttagccaaaatgctaatttaaccaagcaccagcggacccataccggggagaagccctaccgctgcagcgagtgtgagaaagcattctctgactgttccgccctggtgcagcaccaaagaattcataccggcgaaaagccctacgagtgtagcgactgcggaaaggcatttagacacagtgcaaaccttactaaccaccagcggactcatactggagaaaagccatataaatgtagcgagtgcggtaaagcattctcttattgtgccgccttcatccagcaccagcgaatccacacaggagagaagccttaccgctgcgccgcctgtgggaaagcattctctcaatcggccaatctgacaaaccaccagcggacacacacaggggaaaaaccttacaagtgctctgaatgtggaaaagcgttcagtcaatccactaatcttatcatccatcaaaaaactcataccggcgagaaaccttataaatgtaacgagtgcggcaaatttttttccgagtcctctgcgctaatccgccatcacattatccacaccggcgagaagccctacgaatgtaatgagtgtggcaaagcatttaaccagagctcttctctgtctcagcaccagcgtattcataccggggtcaagccttacgaatgcagtgaatgtggcaaggctttccggtgctctagcgcctttgtacggcatcagcgcttgcatgcaggagaatag

SEQ ID NO: 212410 - DNA, 1425 bp, synthetic construct
  misc_feature 1..1425: note = Description of Artificial Sequence: Synthetic coding sequence
  source 1..1425: mol_type = other DNA
atggccgccggcctgctgaccgccggcccccggggcagcaccttctttagctcagtcaccgtcgcatttgcccaggaaaggtggagatgtcttgtatcaactcccagggatcgatttaaagaggggatccccggaaaatcaaggtcattagtccttctcggcctacccgtcagccagcccggtatgaactctcagctggagcagcgggagggagcctggatgctggagggcgaagacctgagaagtcctagtcccggatggaagataatttctggaagccctcccgagcaggcactgtcagaagccagcttccaggacccatgcgtggagatgccaccaggagactctgaccacggcacctccgacctcgaaaagtctttcaacctgcgccccgttctttcccctcaacagagagtgcccgtggaggcccgccctagaaaatgcgagactcacaccgaatccttcaagaatagcgaaatacttaaaccacacagggcaaaaccttacgcttgtaatgaatgcggcaaagccttctcctactgcagtagcctgagccagcaccagaagagccatacaggcgaaaagccatacgaatgctctgaatgtggaaaagcatttagccaaagttcaagtcttatccagcatcagcgaatccacacgggcgagaaaccatacaagtgctcagagtgtgggcgagctttttctcaaaatgccaacctgacaaaacaccaaaggactcacacgggggaaaagccctacagatgttccgaatgcgagaaggcgttcagtgattgttctgcattagtacaacatcaaagaatacataccggagaaaaaccctacgaatgcagcgactgcgggaaagctttccgccactctgcgaatttaacgaaccatcagaggacacataccggagagaaaccctacaaatgttctgaatgtggaaaggcattttcttattgcgctgcctttatccagcaccagaggatccacaccggagagaagccataccggtgcgctgcttgcggtaaagctttttctcagtccgctaatctgaccaaccatcaacgaacccacaccggtgagaaaccctataaatgctccgaatgcgggaaagcatttagccagagcactaatctgattatccatcaaaaaacccacaccggggaaaaaccttacaagtgtaatgaatgcgggaagttctttagcgagagcagcgccctcatacgccaccacattatacacacgggagagaagccctacgaatgcaacgaatgcggaaaggctttcaaccaatcctcctcactgtcgcagcaccaacgcatacacactggagttaagccctacgaatgtagcgaatgcggcaaggcctttaggtgctcctctgcattcgtgaggcatcagcgccttcatgcaggcgagtag

SEQ ID NO: 212411 - DNA, 1728 bp, synthetic construct
  misc_feature 1..1728: note = Description of Artificial Sequence: Synthetic coding sequence
  source 1..1728: mol_type = other DNA
atggaccccgaggacgagggcgtggccggcgtgatgagcgtgggcccaccagctgccagactacaggaacctgtgactttccgggacgtcgcagtcgatttcacccaagaggaatggggacagctcgatccgacccagcgtattctgtaccgcgatgtcatgcttgagactttcggacatctcctttcgatcggccccgagctaccaaagcccgaggtgatctcccagctggaacagggtacggaactttgggttgccgagaggggcactactcaagggtgtcatccggcctgggagcctaggagcgaaagccaggcatcccgtaaggaagaaggactgccagaggaggagcctagccatgtgactggaagggaggggttccccactgacgcgccctaccccaccacacttggtaaggacagagagtgccaatcccaatctcttgccctcaaagaacagaataatctgaaacaactggagttcggtctaaaagaggcgcctgtgcaggatcaggggtacaagacactacggctgagagagaactgcgtgctctccagtagtcccaacccttttccagaaatttcaaggggagagtatctctatacgtatgacagccaaattacagactctgagcacaactcctctctggtgagtcagcagacggggtcccctggcaaacagcctggagaaaactccgattgccacagggacagcagtcaagctattcctataaccgaacttacgaagtcccaagtccaagataagccgtacaagtgcacagactgtggaaaatcctttaaccacaacgcccatctgacagtgcacaagcggatacacactggagagagaccatacatgtgtaaagagtgcggcaaagcttttagccagaatagtagtctggtccagcacgagcgtatacacaccggggacaagccctataagtgtgcagagtgcgggaaatccttttgccacagtactcacttaactgtgcataggagaatccatacaggcgaaaaaccctacgagtgccaagactgcggacgggcgttcaaccaaaactcgtcgctgggacggcataagaggacacacactggagaaaaaccatacacatgctcagtttgcggcaaatccttctccaggactacctgcctcttcctccatctcagaacccacaccgaggaaagaccatacgagtgcaaccattgcggcaaaggctttcgccatagctcctccctcgcccaacatcagaggaaacacgctggagagaaaccatttgaatgtcgccagagacttatcttcgaacagactcccgccctgacaaagcacgagtggactgaagccttgggctgcgatccaccactgtcccaggatgagagaactcaccgtagtgaccgaccttttaaatgtaatcaatgtggaaaatgcttcattcagagtagccatctgatccgtcatcagatcactcacactagagaagaacagccccatgggaggtccagacgcagagaacagtcgtcatcccggaatagccatctggtccagcaccagcaccccaattcccgcaagtcaagcgcgggtggggccaaagcaggccagcctgagtctcgcgccttggctctgtttgatatccagaagataatgcaggaaaaaaaccccgtgcacgtaattggcgtggaggagcctagcgtcggcgcctcaatgctgtttgacattagggaatccacctag

SEQ ID NO: 212412 - DNA, 519 bp, synthetic construct
  misc_feature 1..519: note = Description of Artificial Sequence: Synthetic coding sequence
  source 1..519: mol_type = other DNA
atggaccccgaggacgagggcgtggccggcgtgatgagcgtgggcccaccagcagcaaggttgcaggtcacaatcactactatcacaactgctgccggcagtggacaggcatctcccgcccagaccgaccccttcacgagtagacgtgatgaatcagggaccgccgtcaacgccctggacacatggggcaattcagatgcaggcaggggcgtggtcacggtcctcgctggccagcggggagggcgggacagcaatcaggctcctgggccccgtatgcgcatgcttcacgccgctttgagtagtcccgcgcccagaagcccatgtcctggtgcttgggcacagccactcgggggcaacgatgggagccccaggacagagtgcgacgaatctgaccatcaaggccgaccactgagagattgcgggaggaccgctgtgcaaggcgggcagtgtcttcaaggacatcttgccatccgggcccctctgtcaagacagtccggctgcggtctgtgttctccatag

SEQ ID NO: 212413 - DNA, 873 bp, synthetic construct
  misc_feature 1..873: note = Description of Artificial Sequence: Synthetic coding sequence
  source 1..873: mol_type = other DNA
atgtgcaaggagtgcggcaaggccttcagccagaacagcagcctggtgcagcatgagagaattcacactggggataagccgtacaagtgtgctgaatgcgggaaatccttttgtcattccactcacctgactgtccaccgccgcatccacaccggcgaaaaaccctacgaatgtcaagattgtggccgggcgtttaaccagaacagtagtcttggtcggcacaagcgcacccataccggcgagaagccttacacatgttccgtgtgcggtaaatccttttcaagaactacatgcctctttctccacctgcgtactcatacagaagagagaccatacgagtgtaatcactgtggaaagggcttcagacacagtagtagcctcgcacagcaccagaggaaacacgccggagaaaaacccttcgaatgtcgccagcgtctgatattcgaacaaaccccagcccttactaaacatgagtggacggaggctttaggctgcgatccgccgctctctcaggatgaacggacccaccgcagcgatcgccctttcaagtgtaaccagtgtggcaaatgcttcattcagagttcgcatttgatacggcaccagataacacatacgcgcgaggagcagccccacggccggtctcggagaagagaacagtcaagtagtcgaaattctcacctggtgcaacatcaacatcccaactctagaaaatctagcgctggcggggctaaggccgggcagcctgaaagtcgtgccctggcactcttcgacatacaaaagatcatgcaggagaagaatccagtccatgtgatcggcgtcgaagaaccctccgttggtgcatctatgctctttgacattcgggaaagcacttag

SEQ ID NO: 212414 - DNA, 822 bp, synthetic construct
  misc_feature 1..822: note = Description of Artificial Sequence: Synthetic coding sequence
  source 1..822: mol_type = other DNA
atgagccccaagcgggacggcctgggcaccggcgacggcctgcacagccaggtgctgcaggagcaagtgtccactggagacaacctgcatgaatgcgactcacaaggcccaagcaaagacactctggtgagagaaggaaagacttataaatgcaaagagtgtgggtccgtgtttaacaagaacagcctcttggtgagacaccagcagatccacactggagttaaaccttatgaatgccaggagtgcggaaaagcatttcctgagaaggtcgatttcgtgagaccaatgcggatccataccggtgagaagccatgtaaatgtgtggagtgtggcaaagtgtttaaccgaagatcccatctcttgtgttacaggcagattcatacgggtgagaagccttacgagtgctccgagtgtggcaagacattctcttaccacagcgtgtttattcaacatagggtcactcataccggggaaaaattgtttgggtgtaaagaatgcggcaagacattttactataatagctccctcaccagacacatgaaaatccacaccggggagaagccctgtaagtgcagcgagtgcggaaagaccttcacataccgctccgtgttcttcagacattctatgacccatacggccggcaagccatacgagtgcaaagaatgcggcaagggtttctactactcctactctctgacccgccacacacgcagccatactggagagaagccgtatgagtgtttagagcacagaaaagacttcggctatcactccgccttcgcacagcagagtaaaatccacagcggtggcaaaaatttatag

SEQ ID NO: 212415 - DNA, 822 bp, synthetic construct
  misc_feature 1..822: note = Description of Artificial Sequence: Synthetic coding sequence
  source 1..822: mol_type = other DNA
atgagccccaagcgggacggcctgggcaccggcgacggcctgcacagccaggtgcttcaagaacaggtctccacgggtgacaacctccacgagtgtgattcccagggcccttcaaaagacacactggtgcgggaaggcaagacatacaagtgcaaagagtgcgggtccgtcttcaataaaaatagccttcttgtgagacaccaacagatccacactggagtgaaaccttatgagtgccaggaatgcgggaaagccttccctgaaaaagttgactttgtccggcctatgcggatccacacaggcgaaaaaccgtgcaagtgtgtcgaatgtggcaaggtttttaaccgtcggtcccacctgttgtgctaccgccagatacataccggagagaaaccttatgaatgctcagagtgcggcaaaactttcagctatcactccgtctttatccagcacagggtaacccatacaggggagaaactgtttggttgtaaggaatgcgggaaaaccttctactataattctagtttaacacggcatatgaagatccataccggggaaaaaccatgtaaatgtagtgagtgtggcaagacattcacctaccggtctgtcttctttcgacacagtatgactcataccgctgggaagccatacgagtgtaaagagtgcggaaaaggattctactattcctacagtttgacccgtcataccagatctcacacaggcgagaagccctatgagtgcctggagcataggaaggatttcggataccactccgccttcgcacagcagagtaaaatccatagtggagggaagaacctgtag

SEQ ID NO: 212416 - DNA, 3630 bp, synthetic construct
  misc_feature 1..3630: note = Description of Artificial Sequence: Synthetic coding sequence
  source 1..3630: mol_type = other DNA
atggagtgctactacatcgtgatcagcagcacccacctgagcaacgggcactttaggaatattaaaggggtctttcggggtccgctgtcgaagaacggcaacaagaccctggactatgcggaaaaagagaatactatagccaaggcgctagaggacctcaaagcaaatttttactgtgaactatgcgataaacaatactacaagcaccaggaatttgacaaccatatcaattcttacgatcacgcccataagcagaggttgaaggaactgaaacagagggaatttgcgagaaacgtcgcgagcaaaagccgcaaggatgaacggaaacaagaaaaagctctgcagagactccacaagcttgccgagctgcggaaagagaccgtctgtgcaccaggaagtggaccaatgttcaaatctaccacggtaaccgttagagaaaattgcaatgaaatcagccaacgagtggtcgtggacagcgtgaacaatcagcaggatttcaagtatactttgattcatagtgaagagaataccaaggatgcaaccactgttgctgaggaccccgaaagcgcaaacaattacactgcgaagaacaatcaagttggcgatcaagcacagggcatccatagacataaaatcggcttcagcttcgcatttccaaagaaggcgtctgtgaaattagaatcatcggctgctgctttcagcgaatattcagacgacgcatccgtgggaaaaggcttttcacgtaagtcccgctttgtgccatcagcctgtcatttacagcagtcctcccctacagatgtgctgctctccagtgaggaaaagacaaactcattccacccacctgaggctatgtgtagggataaagaaacagtacagacacaggaaattaaggaagtgtcatctgagaaggacgctcttcttcttccaagcttctgtaagttccaattacaactgtccagtgacgcggacaattgccagaactcagtccctctggcagatcaaatccccctggagagtgtagtgatcaacgaggacatcccagtgagcggaaattcattcgaattgctaggaaacaaatctaccgtcctggatatgagcaacgactgtattagtgttcaagctacaacagaggagaacgttaagcataacgaagcgtccaccaccgaggtcgagaataaaaatggccctgagacccttgcaccctccaacaccgaggaagtaaatatcactatccacaaaaagactaacttttgcaagaggcagtgtgagccatttgtgcctgtcttaaataagcaccgcagtacagtcctgcagtggccctccgaaatgctggtctataccactaccaaaccctcaatctcctatagctgcaacccgctctgcttcgactttaaatctaccaaggtcaataacaatctagacaagaataaacctgatcttaaagatctgtgttcacagcagaagcaggaagacatctgtatgggacccttgtccgactataaggatgttagcaccgaaggactgacagactacgaaatcggatctagtaaaaataagtgctcacaggtgacaccactgttggccgatgatatattgagttctagttgtgactctggcaagaacgagaacactggtcagcggtacaaaaatattagttgcaaaatacgggagaccgaaaagtataatttcaccaagagccagattaagcaggacactctggacgaaaagtacaacaaaatccgtctgaaagagacacacgaatactggtttcacaaatctcgacggaagaaaaagcgtaagaaactatgccaacaccaccatatggaaaagacaaaagaaagtgagacgaggtgtaaaatggaagctgaaaactcatacaccgaaaatgcaggaaaatatctcctagaacctatatcagaaaaacaatatctcgcagccgagcaactgcttgactcccatcagcttttagataaaaggccaaagtctgagtctatttcgctgtctgataacgaggaaatgtgtaaaacctggaatacggaatacaacacctatgacacaattagttcaaaaaatcattgcaagaaaaatactattctacttaatgggcagtccaatgcaactatgattcattctggcaaacacaacttaacgtattctagaacgtattgttgttggaagaccaaaatgtcttcctgctcgcaggaccatcggtccctggtcctgcagaacgatatgaagcacatgtctcaaaaccaggcagtgaaacggggctataactccgtcatgaacgagtccgagcgcttctaccgaaagagacgccagcatagccattcatactctagtgatgagagcctcaaccgccagaatcacttgccagaagaattccttcggccgccatccacaagtgtcgcaccctgcaagcctaagaagaaacgtcggagaaaacgggggagattccacccaggatttgagactttggagctaaaggagaataccgattatccagtaaaagataactccagcctcaatcccttggaccgattgatatcagaagacaagaaagaaaagatgaaacctcaagaggttgccaagatagaaagaaatagtgagcagactaaccaattgcggaataaactcagcttccaccccaacaatctcctgccttcagagaccaacggggaaactgaacatctcgagatggagactacgtccggggagttaagcgatgtgagcaatgatcctacgacctccgtttgtgtggcctccgctcctacaaaggaggccattgacaacaccctattggagcacaaagagcggtctgagaatattaatctgaatgagaagcagattccttttcaggtcccaaacattgagagaaatttcaggcaatcccagcccaaatcatacctgtgtcattacgaactggcagaggccctgcctcagggaaagatgaacgagaccccaacggagtggctgagatacaactctgggatactgaacacgcagcccccactccctttcaaggaagcccacgtgtctggtcacactttcgtgacagccgaacagattcttgcacccttggctctaccggagcaggcgttgttgattcctctcgagaaccacgataagtttaagaatgtcccctgcgaagtctatcagcacattctgcaaccaaatatgctggcgaataaagttaaattcacctttccacccgcagcccttcccccaccttccactcctttacagccactgcctctccagcaaagcctttgtagcacctcagtcacgaccatccatcacaccgtgctgcaacagcacgccgcagccgctgccgctgcggccgccgctgccgccgctggtactttcaaagtcctgcagccacatcaacagtttctatctcagattcctgcgcttactaggactagcctgccccagctcagcgtcggccctgtcggacctagactctgtcccgggaatcagccaacttttgttgctcccccgcagatgcccataattcctgcaagtgtgcttcacccttctcacctggccttcccttctctgcctcatgccctgttcccaagcttactctcacctcatcctactgtgatccctcttcagcctctattctag

SEQ ID NO: 212417 - DNA, 210 bp, synthetic construct
  misc_feature 1..210: note = Description of Artificial Sequence: Synthetic coding sequence
  source 1..210: mol_type = other DNA
atgcccgccaacgaggacgccccccagcccggcgagcacggcagcgcgtgcgaagtttcagtgtcgtttgaggatgttacagtcgatttttctcgcgaggagtggcagcagctcgactccacgcaacgtcgcctgtatcaggacgttatgctcgagaactactcgcaccttctctctgtcggcaaagataaccatccagtcaagctgtag

SEQ ID NO: 212418 - DNA, 1986 bp, synthetic construct
  misc_feature 1..1986: note = Description of Artificial Sequence: Synthetic coding sequence
  source 1..1986: mol_type = other DNA
atgcccgccaacgaggacgccccccagcccggcgagcacggcagcgcttgcgaagtgtccgtcagctttgaagacgtcactgtggatttttcacgtgaggaatggcagcagctcgactcaacacagaggcggctgtaccaagacgtcatgctggagaattacagccatctgctgagcgtagggttcgaggtgccaaagccggaagtaatcttcaaactcgagcaaggcgaaggcccttggactctggaaggggaggcgcctcaccagtcttgctccgacgggaaattcggaatcaaacctagccagagaaggatctctggcaaatcaaccttccattccgagatggagggcgaagacacccgggacgactccctgtattcaatcctggaagaactgtggcaggacgctgagcagatcaagcggtgtcaagaaaaacacaacaaactgctcagccggaccaccttccttaataagaaaatccttaataccgagtgggattacgaatataaggacttcggaaagttcgtgcatccttctcctaacttaattctgtcacaaaagcgtccgcacaaacgggattcctttgggaaaagtttcaaacacaatttggacctgcacattcacaataaatcaaatgcagctaaaaatctcgacaaaacaatcggacatggccaggtctttactcagaacagtagttacagccatcacgaaaacacccatactggagtgaaattttgtgagaggaatcagtgcggtaaggttctgtctctgaagcactcattgagccaaaacgtgaaatttcccattggggagaaggcgaatacctgcacggaattcggtaagatcttcacccagagaagccactttttcgcgcctcagaagatccatacggtggagaagccacacgaactgagcaaatgtgtgaatgtgttcacccaaaaacctctgctctcaatctacctgagagtgcatagggatgaaaagctctatatatgtaccaaatgcggtaaggccttcattcagaattcagagctgataatgcacgaaaagacgcacactagggagaagccatataagtgtaacgagtgtggaaagtctttcttccaggtgtcatccctgctgcgtcaccagactacacacacaggcgagaagctctttgagtgctccgagtgtggaaaggggttctcactaaactccgcactgaacatccatcagaagatccataccggggagcggcaccacaagtgctcggagtgtggaaaggcgttcacacagaaaagcactctgcgaatgcaccagaggatccatacgggggaaaggagctacatatgtacccagtgtggtcaggccttcattcagaaagcacaccttatcgctcatcagcgtattcatacaggcgagaagccatatgaatgttccgactgtggaaagagctttccgagcaagtcccagctccaaatgcacaagcgaatccacactggggagaaaccttacatatgcacggaatgtgggaaggcctttacgaatcgatcaaacctgaatacccatcagaagtcccataccggtgaaaagtcttatatctgtgctgagtgtggcaaggcctttaccgaccgctctaatttcaacaagcatcagaccatacacactggggagaagccctatgtgtgcgccgattgcggcagagcttttattcagaagagtgaactcataacacatcaacgtatccacactacagagaaaccctacaagtgcccagattgcgagaagagcttttccaagaagccccacctgaaagtgcaccagcgcatacacaccggggagaagccgtatatctgcgcagaatgtgggaaggccttcaccgatcggtctaattttaacaaacaccaaaccatccatactggcgataagccatacaaatgctctgattgcggtaaaggcttcacccagaaatctgtgctgagcatgcacaggaacatacatacctag

SEQ ID NO: 212419 - DNA, 312 bp, synthetic construct
  misc_feature 1..312: note = Description of Artificial Sequence: Synthetic coding sequence
  source 1..312: mol_type = other DNA
atgcccgccaacgaggacgccccccagcccggcgagcacggcagcgcctgtgaggtctccgtgtctttcgaagacgttactgtggacttctctcgcgaagaatggcagcagctcgattctacacagcggcggctctatcaggatgtcatgctggagaattacagtcatttgttgtcagtgggattcgaggtgcccaagccagaagttatcttcaaactggagcaaggagaaggcccctggaccttggagggcgaggctcctcatcagagctgtagtgggatttcaacctacttcgtgacctcaaccgtctag

SEQ ID NO: 212420 - DNA, 1986 bp, synthetic construct
  misc_feature 1..1986: note = Description of Artificial Sequence: Synthetic coding sequence
  source 1..1986: mol_type = other DNA
atgcccgccaacgaggacgccccccagcccggcgagcacggcagcgcttgcgaagtttcagtcagtttcgaggacgtgactgtggacttctccagggaggagtggcaacagcttgacagtacccagcggcgactttatcaggatgtgatgctggaaaattattctcatctgctttcagtcggtttcgaagtccctaagccggaggtgatttttaaactcgagcaaggggaaggaccatggactctcgaaggagaggccccgcatcagagttgttccgatggaaaattcggcatcaagccttctcaacgacggataagtggtaagtccacattccattccgaaatggaaggcgaggacacacgggatgatagcctgtattcgatccttgaggaactgtggcaggatgcagaacagattaagcgttgccaggagaagcacaataaactgctcagccgcaccacctttctgaacaaaaagattctaaacaccgagtgggactacgagtacaaggattttggaaaatttgtgcatccatctcccaacttgatacttagccagaagaggcctcacaagcgcgatagtttcggcaagtccttcaaacacaacctcgacctgcacattcacaataaaagtaacgcagcaaaaaacctggataagaccattggtcacgggcaagtgttcactcagaacagctcgtactcccaccacgagaatactcataccggtgtgaagttttgcgagcggaatcaatgcggaaaggtcctatctctgaaacacagtctaagtcagaatgtgaagttccctattggtgagaaggctaatacctgcaccgagtttggcaagattttcacccagaggtcccatttcttcgctcctcagaagatccatactgttgagaaaccacacgagctgtctaaatgcgtgaatgtgtttacccagaagccattattatccatctacctgagagtccacagagacgagaaactctatatttgtaccaagtgcggcaaagctttcattcaaaatagcgagctcatcatgcacgaaaaaacacacactcgtgaaaagccgtacaaatgtaacgagtgtgggaagtcatttttccaggtgtcctccctccttaggcatcaaaccacccacacaggggagaagttattcgaatgctcagagtgcggcaagggtttcagcctgaactcggcactgaatattcatcagaaaatccacaccggcgaaaggcaccacaagtgttcagagtgcggcaaggcgtttacccagaagagtactcttcggatgcaccagcgtatacacaccggcgaaaggtcatatatatgcacccaatgcgggcaagccttcattcagaaggcgcatctaatcgcccaccagcgcattcacactggagaaaagccgtacgagtgttcggactgcggtaagtccttcccttctaaatcacagctacaaatgcacaaaaggattcacacaggtgaaaaaccttacatctgcacagaatgcggcaaagcattcaccaatcgtagcaacctgaacacgcaccagaaatcccataccggggaaaagagctatatctgtgccgagtgcggcaaggcattcacagaccgctccaatttcaataagcatcagaccatccatactggagaaaagccctatgtgtgcgccgactgcgggcgagcctttattcaaaagtcagagctgatcacacaccagcgcatccatactacagagaagccgtacaagtgccccgattgcgaaaagtcatttagcaagaaaccccatctcaaggtgcatcagaggattcacactggtgaaaagccatatatatgcgccgagtgtgggaaagcattcaccgatcggtcaaacttcaataagcaccagacaatccacaccggcgacaaaccctataaatgctccgactgtggtaagggcttcacacagaaatcagttttgtccatgcataggaatatacacacgtag

SEQ ID NO: 212421 - DNA, 369 bp, synthetic construct
  misc_feature 1..369: note = Description of Artificial Sequence: Synthetic coding sequence
  source 1..369: mol_type = other DNA
atgcccgccaacgaggacgccccccagcccggcgagcacggcagcgcctgtgaggtgagcgtctcctttgaagacgtgaccgtggacttttctcgggaggaatggcagcaattagactctacccaacggcgcctctatcaggatgtgatgcttgagaattattcccaccttctgtcggtcggcttcgaagtgccgaagccagaggtcattttcaagttggaacagggggaaggtccctggaccctggaaggcgaggcaccgcaccagtcctgcagtgacggcaaattcggtattaagcccagtcaacggcggatcagtggcaaatcaacttttcactcagaaatggaaggcgaggacactctctgctag

SEQ ID NO: 212422 - DNA, 1551 bp, synthetic construct
  misc_feature 1..1551: note = Description of Artificial Sequence: Synthetic coding sequence
  source 1..1551: mol_type = other DNA
atgcacggccggaaggacgacgcccagaagcagcccgtgaagaaccagctgggcctcaacccacagagccacctgcctgagctgcagcttttccaagctgaggggaaaatctacaaatatgatcacatggaaaagtcagtgaattccagctcccttgtttccccgcctcagaggatcagttcaaccgtgaagacgcacatctctcacacttatgagtgcaactttgttgactcactctttactcagaaagagaaggctaatattggtacagaacattacaaatgcagcgagcggggaaaggcattccaccagggcctccacttcactatccatcagattatccacactaaggagacgcagtttaagtgcgatatttgtggtaagatttttaacaagaagtccaacctcgctagccaccagcgaattcatactggagagaagccgtataagtgtaacgaatgcggtaaggtgtttcacaatatgagccatctggctcaacatcggcggatccatactggagagaagccatataagtgtaatgagtgtgggaaagtcttcaatcagattagtcacctggcccaacatcagaggattcatactggggagaagccatataagtgcaacgagtgtgggaaagtcttccaccaaatcagtcacctggctcaacaccggaccatccacactggggagaagccttatgagtgtaacaagtgcggcaaagtgttcagtaggaattcttaccttgtgcaacacctgatcatccacacaggagagaagccatatcgctgtaacgtgtgcggcaaggtgtttcatcacatctctcatctggcccagcatcagcggattcacacaggcgagaagccctataagtgtaacgaatgtggtaaagtgttttcacacaagtcctcacttgtgaaccattggaggatccacactggggagaaaccgtataagtgcaacgaatgcggcaaagtctttagccataagagcagcctggttaatcattggcgcatccacactggtgagaaaccgtataagtgtaacgagtgcgggaaagtgtttagccgtaatagctacctggctcaacacctgatcatccacgccggcgaaaagccatacaagtgtgacgagtgcgacaaggcttttagtcagaactcacatttggtgcagcatcatcgcatacacactggcgagaaaccttacaagtgtgatgagtgtgggaaagtcttttcacagaattcctatttggcttaccactggcggatccatactggagagaaggcctataagtgcaatgaatgtggaaaagttttcggcctgaactcgagcctcgcccaccaccgaaagatccacaccggggagaagcctttcaagtgtaatgaatgcggcaaagcgttttctatgagaagcagcctcaccaatcatcatgctatacacaccggcgaaaaacactttaagtgtaacgagtgtgggaagttgttccgagataacagctatctggtccgccaccaaagatttcatgcaggtaaaaagagcaatacttgcaactag

SEQ ID NO: 212423 - DNA, 1467 bp, synthetic construct
  misc_feature 1..1467: note = Description of Artificial Sequence: Synthetic coding sequence
  source 1..1467: mol_type = other DNA
atgcacggccggaaggacgacgcccagaagcagcccgtgaagaaccagctcggactcaatccccagagtcacctccccgagttacagctgtttcaggcagaggggaagatttataagtatgaccacatggaaaagtctgtgaactcctcctccctagtaagcccgccccaacgcatcagctcaactgtcaaaacgcacatcagtcatacttatgagtgtaacttcgtagacagtctgtttacacaaaaagaaaaggctaatatcggcactgaacactataaatgttccgagaggggaaaagcctttcatcagggactgcactttacgatccatcagatcattcacaccaaagaaacccaatttaaatgcgatatttgcggcaaaatattcaacaaaaaatctaacctggcttctcaccagcgtattcacacgggtgagaaaccctacaagtgtaacgaatgtggaaaagttttccacaatatgtcacacctagcccagcaccgccggatacacaccggcgagaaaccatacaagtgtaatgagtgcggcaaagtatttaaccagatttcacaccttgctcagcaccagaggatacatacaggggaaaagccctataagtgcaacgaatgtggaaaggtctttcatcagatttcgcatcttgcgcagcatcggacaatccacacgggggagaagccctacgaatgcaacaaatgcggaaaggtattcagcagaaacagctatctggtgcaacacctgatcattcacactggggaaaaaccctaccgctgtaacgtatgcggtaaagtctttagtcacaagtcctctctagttaaccactggagaatacacacaggcgagaaaccctacaagtgcaacgagtgcggcaaagtttttagtcacaagagctccctagtgaaccattggcgcattcatacaggagagaaaccttacaaatgcaacgagtgcggcaaggtttttagtcggaattcttatctcgcacagcacctcatcatccacgctggagagaagccttacaagtgcgacgaatgtgataaagcattctctcagaacagccacctggttcagcaccataggatccatacaggggaaaagccatacaaatgtgacgaatgcggcaaggttttctctcagaatagctacctggcctaccactggagaatacatacgggagaaaaagcatataagtgcaacgaatgcggaaaggtcttcgggttaaacagctctttagcacatcatcgaaaaatccatactggggagaagcccttcaagtgcaacgaatgcggtaaagctttttctatgagaagctccttgacgaaccaccacgcgatccacacaggagaaaaacacttcaaatgtaatgagtgtggcaaactctttcgggacaactcctaccttgtgaggcaccagagatttcacgcagggaaaaagagcaatacatgtaactag

SEQ ID NO: 212424 - DNA, 1467 bp, synthetic construct
  misc_feature 1..1467: note = Description of Artificial Sequence: Synthetic coding sequence
  source 1..1467: mol_type = other DNA
atgcacggccggaaggacgacgcccagaagcagcccgtgaagaaccagttggggttgaatcctcagagccacctgcctgagctacaattgttccaggcagaggggaaaatctacaaatatgatcatatggagaagagtgtcaactccagttcgctggttagccccccgcagaggatctcaagcacagtgaaaacgcatatctctcatacttacgaatgcaatttcgtcgatagtctgttcacacagaaggagaaagcaaacatcggcactgaacactacaagtgctctgagcgtgggaaagcgtttcaccaaggtttgcacttcaccatccatcagattattcatacaaaggaaacacagtttaaatgcgacatttgcgggaagatctttaataagaagtccaatctggctagtcaccagaggattcacacaggtgagaagccatacaagtgtaatgaatgcggcaaagtgttccacaatatgtcccacctggctcaacatcgccgaatacacactggtgaaaaaccctacaagtgtaatgagtgcgggaaggtgtttaaccagatttcccaccttgctcagcaccaaagaatccacaccggtgagaagccatacaaatgcaatgagtgcggcaaagtcttccatcagatcagtcacctcgcccaacaccgaactatccacacaggagaaaagccctatgaatgcaataaatgcggtaaggtttttagcaggaattcatatctcgtccaacacctcatcatacacacaggagagaaaccttaccggtgtaacgtgtgtggaaaggtgtttagtcacaagtccagtttggtcaatcactggcggattcacaccggagaaaagccctacaagtgcaacgaatgtggcaaggttttcagccacaaatcaagtctcgtgaaccactggagaatccataccggcgagaaaccctacaaatgcaacgagtgtggaaaagtattttcccggaactcatacctggctcagcacctgattatccatgctggggagaagccatacaaatgtgatgaatgtgacaaggccttctctcagaattcgcacttagtgcaacaccacagaatccacaccggggagaaaccgtacaagtgcgatgaatgcgggaaggtttttagccaaaattcttacctggcctaccactggaggatccacaccggcgagaaggcatacaagtgtaatgagtgcggaaaggttttcggactgaacagcagccttgctcaccacaggaagattcacacaggggaaaagcctttcaagtgtaacgagtgcggcaaagccttcagcatgcggtccagcctgaccaaccaccacgccatccacacgggtgaaaagcacttcaagtgtaacgagtgcggtaaactgtttcgggacaatagctacttggttaggcaccagcggttccacgctgggaaaaaaagcaatacctgtaactag

SEQ ID NO: 212425 - DNA, 1551 bp, synthetic construct
  misc_feature 1..1551: note = Description of Artificial Sequence: Synthetic coding sequence
  source 1..1551: mol_type = other DNA
atgcacggccggaaggacgacgcccagaagcagcccgtgaagaaccaactgggcttgaacccacagtcccacctgcccgagctgcagttgtttcaggccgagggcaagatctacaagtacgatcacatggagaagtcagtaaacagcagcagcctggtgagtcctccccagcgcatttcgagtaccgtgaagacccacatatctcacacttacgagtgcaattttgtggatagcctctttacccagaaggaaaaggctaatatcggcaccgagcactataagtgctctgaaaggggcaaagccttccatcagggcctacacttcactatccatcagattatacatacaaaggaaactcagttcaaatgtgatatctgcggaaagatctttaataagaagtcaaacttggctagtcaccagcggattcataccggggaaaaaccctacaaatgcaatgagtgtgggaaagttttccacaatatgagccacctggcccagcaccggcggatccacacaggagaaaagccatacaagtgtaatgaatgtgggaaggtgttcaatcagatctcacatctcgcccagcaccaacgcatccacacaggcgaaaaaccatacaagtgtaacgagtgcggtaaagtatttcatcaaatcagtcatctagctcagcatcgcacgattcacaccggcgagaaaccgtacgaatgtaataaatgtggcaaagtgttctctagaaactcatatctggtgcagcacttaataattcacacaggggagaagccctatcggtgcaatgtttgcggaaaagtattccaccacattagccatctcgcccagcaccagcggatccatactggggaaaagccttataagtgtaatgagtgtggcaaagttttctcccacaagtcaagcctggtcaaccattggcgcatccatactggggagaagccttataaatgcaacgaatgtgggaaagtctttagtcacaaaagctccctcgtgaatcactggagaatacacacgggagagaagccgtataagtgcaacgagtgtggaaaagtgttctcccggaacagctatctggcacaacatttgataatccatgcgggcgagaagccttataagtgcgacgaatgtgacaaggcattcagccagaatagccacttagtccagcatcatcgaatccacactggagagaagccttataagtgtgacgagtgcggaaaggtgtttagccagaactcttacttagcgtatcactggaggatccacacgggcgagaaggcatacaaatgcaatgagtgcggcaaggtcttcggcctgaacagctccttagctcatcaccgtaagatccataccggcgagaagcccttcaagtgtaacgaatgcggcaaggccttttctatgaggagttcccttactaaccatcatgccattcacacgggagagaaacatttcaagtgcaatgagtgcggcaaactctttcgggataattcttacctggtgcgccaccagcgttttcatgccggtaagaaatctaacacctgtaattag

SEQ ID NO: 212426 - DNA, 1551 bp, synthetic construct
  misc_feature 1..1551: note = Description of Artificial Sequence: Synthetic coding sequence
  source 1..1551: mol_type = other DNA
atgcacggccggaaggacgacgcccagaagcagcccgtgaagaaccagttaggactaaaccctcagagccacctcccagagctgcaactctttcaggctgaggggaagatttataagtatgatcatatggagaagtcagttaactctagtagcctggtatctccacctcagagaatttctagtacggtcaagacgcacatttcccacacatatgagtgcaatttcgtggactccctcttcacgcagaaggagaaggcaaacatcggcaccgagcactataagtgcagcgagagaggcaaggctttccaccaggggctgcatttcacaattcatcagattattcatactaaagagacacagttcaaatgcgacatttgcggcaagattttcaacaaaaaatcaaatctggcatctcatcaaagaatacatactggcgagaagccttacaaatgcaatgagtgtgggaaggtgtttcacaacatgagccacttggctcagcatcggcgcatacacactggggagaagccttacaagtgtaacgagtgcgggaaagtattcaaccagataagccacctagctcagcaccagcggattcataccggggagaaaccctataaatgcaacgaatgcggaaaggtgttccaccagattagccacttggcccagcatagaacaatacacactggagagaagccctacgagtgtaataagtgcggaaaggtattctcccgcaacagctacttggtccagcatctgatcatccataccggtgaaaagccataccgttgcaacgtgtgcggaaaagtgtttcatcacatttcgcaccttgcacaacaccagagaatccacactggggagaaaccatacaagtgtaacgagtgtggcaaagtgttttctcacaagtccagcctggtcaatcattggcggattcacacaggtgaaaaaccatacaaatgtaatgagtgtggaaaggtgttttcgcataaatctagtctcgtcaaccattggcgtattcataccggagagaagccatacaaatgcaatgaatgtggtaaagtgtttagtcggaattcatacttagcccagcatcttatcatccatgcaggggagaaaccctataaatgtgacgaatgtgataaagcttttagccagaacagtcacttggttcaacatcatagaatccacaccggggaaaaaccctataaatgtgatgaatgcggcaaggtcttctcccaaaacagttacttggcctaccactggcgtatccacacgggcgagaaagcgtataagtgcaacgaatgtgggaaggtctttgggttgaacagctctctggcacaccacagaaaaatccataccggagaaaagccctttaagtgcaacgaatgcggcaaggccttttctatgagaagttcacttacaaaccaccacgcaatccacacgggcgagaagcatttcaaatgcaacgagtgcggaaagctctttcgcgacaactcctacctagtcaggcaccagcggttccacgctggaaagaagtcaaatacctgcaactag

SEQ ID NO: 212427 - DNA, 1551 bp, synthetic construct
  misc_feature 1..1551: note = Description of Artificial Sequence: Synthetic coding sequence
  source 1..1551: mol_type = other DNA
atgcacggccggaaggacgacgcccagaagcagcccgtgaagaaccagttgggcttgaaccctcagtcccacttaccagaactgcagctctttcaagcagaaggtaagatatacaagtacgatcatatggaaaagtccgtgaattccagttctttggtgtcaccccctcagcggataagtagtacggtaaaaacacatattagccatacctatgagtgcaatttcgtggactctttgtttacccagaaagaaaaggcgaacataggcaccgagcactataagtgcagtgagcggggcaaggctttccaccaaggtctccactttacaatccatcagatcattcacactaaagaaactcaatttaaatgtgacatctgcggcaaaatttttaacaagaaatcaaatctagcctcccaccaaaggatacacaccggagaaaaaccctacaagtgcaatgaatgcggaaaagtgtttcataacatgagccatctcgcccagcatcgaaggattcacacaggggagaaaccatataagtgtaatgagtgtgggaaagtgttcaaccaaattagccatctggctcagcaccaacgaattcataccggagagaagccttataaatgtaacgagtgcggaaaggtctttcatcagatcagccatctagctcagcatagaactatccacaccggtgagaagccatacgaatgcaacaagtgcggaaaagtgtttagcaggaactcctatctcgtccagcatcttattatccacactggtgagaaaccctataggtgcaatgtttgtggcaaggtgtttcatcatatctcccacctggcccagcaccagcggattcatactggggagaaaccctacaaatgtaacgaatgcgggaaagtattttcccacaagagctcacttgtgaatcactggagaatacacacaggtgagaagccctataaatgtaatgagtgtggcaaagttttcagtcataaaagctcacttgttaatcattggcggatccacacaggagagaaaccatacaaatgcaatgagtgtggcaaggtcttttcacgaaactcctatctcgcccagcatctgataattcacgcaggtgagaagccctataagtgtgacgagtgcgataaagcattcagccagaatagccacctggtgcaacatcatcgcatccacactggcgagaagccatacaaatgcgatgagtgtggcaaagttttctcacaaaactcttacctggcgtatcattggaggatacacacgggggaaaaggcctataaatgcaatgagtgtggtaaggtctttgggctcaattcttccctggcgcatcaccggaaaatccataccggcgagaagccctttaagtgtaatgagtgcggcaaagccttttctatgcgctcaagcctgaccaaccaccatgctatccataccggcgagaaacattttaagtgtaatgagtgtggcaaactgtttcgagacaatagctacctcgtgcggcatcagcgctttcacgcaggcaagaaatcaaatacctgtaattag

SEQ ID NO: 212428 - DNA, 1551 bp, synthetic construct
  misc_feature 1..1551: note = Description of Artificial Sequence: Synthetic coding sequence
  source 1..1551: mol_type = other DNA
atgcacggccggaaggacgacgcccagaagcagcccgtgaagaaccagctgggactgaatccccagtcccatttgcctgagctgcaactgttccaggcagaaggcaaaatttacaaatatgatcatatggagaagagtgttaacagtagcagcctggtttccccacctcagcggatttcatccaccgtaaaaacacacattagccatacttacgagtgtaacttcgtcgacagcctgtttacccaaaaagagaaagccaacatcggcaccgaacactacaagtgtagcgagcgcgggaaggcattccaccaggggctgcattttacaatccaccagatcatccacacaaaagaaacacagttcaagtgtgatatatgtggtaaaattttcaacaagaaatcaaatctggcctcacatcagaggatccatacaggggagaagccttacaaatgcaatgaatgcggcaaagtttttcataacatgtctcacctggctcagcaccggcgcatccacaccggcgaaaagccatacaaatgcaatgaatgtggcaaagtgttcaatcagatctctcatctcgctcagcatcagaggattcacaccggggagaagccatataagtgtaatgagtgtggtaaggtatttcaccagatctcccacctggcacagcacaggactatccacacaggggagaaaccttacgagtgcaataaatgtggtaaggttttcagccggaattcatacctggttcagcacttgatcatccatacaggagagaagccttatagatgcaacgtgtgcggtaaggtgtttcatcatatctcccacttggcgcaacatcagaggatccacacaggcgaaaagccttataagtgcaacgaatgtgggaaggtcttctctcataagagctctctcgtgaatcattggcgaattcacacaggagagaagccctacaaatgtaacgaatgcggaaaagtattcagtcataagagctccctcgtgaaccactggaggatccatacaggggaaaagccatacaaatgtaatgaatgcggcaaggttttctcaagaaactcttacctggcacagcacctgatcatccatgcaggagagaagccctataagtgcgatgagtgtgataaggcgttttcacagaactctcatttagtacagcaccaccgtatccatacaggagagaagccctacaaatgcgacgaatgcgggaaagtgttctctcagaattcatatctcgcttatcattggcgtattcatactggtgagaaggcctacaagtgcaatgagtgtggtaaagtgtttggcctaaacagctcgcttgcacatcacaggaagatccatacaggggaaaagccttttaagtgtaacgaatgcggtaaggccttttctatgagatcttccctcaccaatcaccatgccatacatacaggcgagaagcattttaagtgcaatgagtgcggcaagttgtttagagacaactcctacttggtgcggcaccagcggtttcatgctggcaaaaaaagcaacacgtgcaattag

SEQ ID NO: 212429 - DNA, 5034 bp, synthetic construct
  misc_feature 1..5034: note = Description of Artificial Sequence: Synthetic coding sequence
  source 1..5034: mol_type = other DNA
atggaggtgcccgagcccacctgccccgccccccccgcccgggaccagccagccccaaccccagggccacccggtgcccctggcggccaagccagtcctcacctgacacttggaccagtgctacttcccccagagcagggtctcgctccgccgacagtctttctgaaggccttgccaatccccctgtaccacaccgtgccccccggggggttgcagcctcgggctcctctggtaaccggaagcctcgacggagggaatgttccgtttatcctatccccggtcctgcagccagaggggcccgggcctactcaggttggcaagcccgcagctcctaccctcacagtgaacatcgtaggtacactgcccgtactgtccccaggcctcggccccaccctgggctcacctggaaaagtcagaaatgccgggaaatatctgtgtcctcactgtggcagagattgtcttaagcccagcgtcttggagaagcacattaggagccataccggagagaggccttttccttgtgctacttgtggaattgcatttaagacacaatctaacctttataaacatcgcagaactcagacacatttaaacaattccagacttagttcggagagcgagggggccggaggcggcctgcttgaggagggcgacaaagccggcgagcctccgcgtcccgaaggccggggagaaagcaggtgtcagggtatgcacgagggtgcctccgaacggcctctgtcaccaggggcgcacgtgcctctccttgcaaagaacttagatgtgcgaactgaggcggccccatgccccggaagcgcctttgccgaccgagaagctccatgggattcggcaccgatggcttcacccggactgcccgccgctagcacccagccttggcgaaaactacccgaacaaaaaagccccaccgccgggaagccttgcgccctccagaggcagcaggctactgccgcagaaaagccatgggatgctaaagccccagaaggcagattacgcaaatgcgagtcaaccgactccggatacctgtcccggtcagattctgctgaacaaccacatgcgccctgcagccccctgcatagcttgagcgagcactcggctgagtccgagggcgagggcggtccgggccccggcccaggtgtggcgggggcagaacccggagcacgcgaggctggactggaattggagaaaaaacggctggaggaacggattgctcaactgatcagccacaaccaggccgtggtcgacgatgctcagttggataatgtgagaccccggaaaacaggactgagcaagcaaggaagtatagacctgccaaccccttacacctacaaggactctttccacttcgatatcagagccttagagcccggccggcgcagggcccccggtcctgtccgctccacatggacgcctccagacaaaagcaggccgctgttcttccactcagttccgacacagctgtctacgactgtggaatgcgtacccgtcacaaggtccaacagtctgccatttgtcgagggatcgcgcacctggctggagccacgggaaccaagggacccatggtcacggacacagaaaccactcagcccacggcccgggccggcacgcttggggtgccgttctggtttgagttccactgatgtgccgagtgggcacccaagggcactggtgcggcaggctgcggttgaagacttaccggggacacctattggcgatgcgctagtcccagcggaagacactgacgccaaaagaaccgccgctcgcgaagccatggccggcaagggacgagccggggggagaaaatgcggccagaggcgcctgaaaatgttctcccaggaaaagtggcaagtttacggggacgaaacatttaaacgaatctatcagaagatgaaggcgagcccccacggaggtaaaaaggcccgcgaggtagggatgggaagtggagccgagttggggttcccgctgcagaaggaggcggctggatcctccggcaccgtgccaacacaagatcgtcgtactcctgttcatgaggatatcagcgccggggccaccccagaaccttggggaaaccctccagccctggaagcctctttagtgacagaacccactaagcacggggagactgtcgcccgccgaggggattctgatcgaccccgcgtcgaggaggcagtctccagcccagcgctggggggcagagactctccgtgtagcgggagccgatcacccctcgtttcccctaacggccgtcttgaactgggttggcagatgccaccagccccagggcccctgaagggcggcgatgtggaagcgcctaggcctgtctggccagatccaaaactagagggcggagcgcgaggcgtcggcgatgtccaggaaacctgtttgtgggcccagactgtgctgagatggccctctaggggatctggtgaggataagctgcccagcgagcggaagaaacttaaggtggaggacctccacagctggaaacagcctgaaccggtgtcagccgaaacgcctgggggaccaacccagcccgcttctttatcttcccagaagcaagatgcagacccaggcgaagttcccggcggcagtaaagagagcgcgaggcaggtgggagagccccttgagagttccggggcatctctagcggccgctagcgtggcccttaagcgcgtcggtcccagagataaagccacccctctgcacccagcggccccagcgcctgctgaacatccatccttggccactcctccccaggctcctcgcgtgctgtctgcccttgcggacaacgctttctctccaaaatatctgctcaggctaccccaggctgagaccccgttacccttgcccataccatggggtccacggcatagccaggatagcctgtgtagctctggatggcctgaagagcgggcctctttcgtcggctccggactcggaactccattgtctccaagtccggccagtggaccttctccgggggaggccgatagcattttagaagaccccagctgtagccgcccccaggatggaagaaagggtgctcagctgggtggcgataaaggcgaccgaatggccacaagtcgaccggcggcccgggaactgcccatttccgctccaggcgctcctcgggaggcaacatcatctccccccaccccaacctgtgaggctcacctggttcaagacatggagggcgatagccatagaattcaccgactgtgtatggggtcaacactggccagggctcgcttatcgggcgatgtgctgaacccatgggtgcccaattgggaactcggcgagcctccaggtaacgctccagaagacccaagttcaggaccgttggtcggaccagatccctgctcaccgctgcagcccggcagctttctgaccgcgttaacccggccccagggcgtgcctcctggctggccagagttggcgttatcttcccattcaggtaccagtagatctcactcaacaaggtcgcctcattccacgcaaaaccctttccccagtctgaaggcagaaccacgcctgacatggtgttgtctgagtcggtctgttcccctcccggctgagcagaaagccaaagccgccagcgtatacttggctgtgcattttcctggtagcagcctgcgcgatgagggccctaatgggcctccaggttcgaacggagggtggacgtggacatcccccggtgagggggggcctgcccagatgtcaaagttttcctaccctacagtcccgggagtcatgccacagcatcaagtgtcggaaccggaatggaagaaggggctgccttggagagccaaaatgtcaagaggcaatagcaagcagcggaagttgaaaatcaatcctaagcggtacaagggtaactttctccaaagctgtgtgcagttgagggccagccgtctgcggacaccaacctgggtgcgccgacgtagccgtcatcctcctgctcttgagggcttaaaaccctgcagaacacccggccagacaagttccgagattgcaggactcaaccttcaggaagagcccagctgcgcaacgagtgagagtcctccttgctgtgggaaggaggagaagaaagagggcgactgcaggcaaacccttgggactctgagcctggggacatcatcaagaatcgtcagggagatggataagcggaccgtgaaagacatctcgccaagtgcgggtgaacacggggactgcaccactcattccaccgccgccacctcaggcctctcactgcagtctgacacatgcctggccgtggtgaatgatgtccccctgccaccaggtaaaggcctggacttaggcttacttgaaacccagttgcttgcgagccaggactccgtgagcacagatccaaagccctacatcttctcagatgcccagagacccagttcgtttggcagtaaggggacgtttccccaccacgacatcgcgaccagcgtggccgcagtctgtattagcctcccggtgcgtaccgaccatattgcgcaggagattcacagcgccgagtctcgagatcattctcaaacagctgggcggacgcttacatcaagtagcccagactcaaaagttaccgaggagggtagggcccagaccctgctcccaggtcgtccctcctcaggacagcggatctccgactcggtcccccttgagagtacagaaaaaacacacctggaaattccagcatccggccctagtagcgcctcctcccaccacaaggagggccggcataagacgttttttccctccaggggccagtacggctgcggcgaaatgaccgtaccttgtccaagcctcggctcggacggccgcaaaaggcaagttagcggtctgatcacgcgaaaggattccgttgtcccctctaagccagagcagcctattgaaatacctgaagccccttctaagagtttgaaaaagcgatccttggagggtatgagaaaacaaactcgcgtggagtttagcgacacaagcagtgacgacgaggacaggctggtcattgagatctag

SEQ ID NO: 212430 - DNA, 264 bp, synthetic construct
  misc_feature 1..264: note = Description of Artificial Sequence: Synthetic coding sequence
  source 1..264: mol_type = other DNA
atgggccccctgaccttccgggacgtggccatcgagttcagcctgaaggaatggcagtgtctggacaccgcacagcggaacctgtaccgcaatgttatgctggaaaactaccgtaatttggtgtttttgggtattacggtctctaaacccgatctgataacatgcttggaacagggtaaagaggcatggtcaatgaagcggcacgagataatggtggccaagccaacagagtcgtactcagtgacccagagcggcatgcagtag

SEQ ID NO: 212431 - DNA, 1788 bp, synthetic construct
  misc_feature 1..1788: note = Description of Artificial Sequence: Synthetic coding sequence
  source 1..1788: mol_type = other DNA
atgggccccctgaccttccgggacgtggccatcgagttcagcctgaaagaatggcagtgcctggacaccgcccaacggaacctttatcgaaacgttatgctcgaaaattataggaacctggtgtttctcggcattactgtgagcaaaccagatctgattacatgcctggaacagggtaaagaggcatggagcatgaagcgacacgaaataatggtggccaaaccgaccgtcatgtgcagccacttcgcccaggacctgtggcccgagcaaaacatcaaggactcatttcagaaggtaacactgaagcgctatgggaagtgtcgtcatgagaatcttccgctgcgcaaggggtgcgagtccatggacgagtgcaaaatgcacaagggtgggtgcaatggactgaaccagtgtctcactgctacacaatccaagatcttccagtgcgacaagtatgtgaaggtggcccataaattttcaaactctaacagacacgaaatccgccatacaaaaaaaaaaccgtttaagtgcaccaagtgcggcaagtccttcggaatgattagctgcctaacggagcatagccgcattcacacacgcgtgaacttttataaatgtgaggagtgtggaaaggcattcaattggagttccactctgacaaaacacaagcggatacacacgggcgagaagccatacaagtgcgaagagtgcgggaaagcgtttaatcagagctccaacctcatcaagcacaaaaaaatccacaccggcgagaagccatataagtgcgaggaatgtgggaaaaccttcaataggttctctacactgacgacgcacaaaattatccataccggcgaaaagccctacaaatgcaaagagtgcgggaaggctttcaatagatccagtacacttacaactcaccgaaaaatccataccggggagaagccctataagtgcgaggaatgtgggaaagctttcaaacagtcaagtaacctcacaacacacaaaattatccatacaggtgagaagccttacaagtgcaaaaaatgcggaaaggcctttaaccagtctgcccatctgacgacacatgaagtcatccacacaggcgagaagccttataagtgtgagaagtgtggtaaggccttcaatcacttcagccacctgaccacccacaaaatcatccacacaggagagaagccttataaatgtaaagaatgcgggaaggcattcaaacatagctctacactaactaaacataaaattatccatactggcgaaaaaccttataagtgtaaggaatgtgagaaggccttcaatcagtcatctaagctgactgagcacaaaaaaattcatactggcgagaagccttacgaatgcgaaaagtgcggcaaggctttcaaccaaagctccaatctgacacgacacaagaagtcacataccgaggagaaaccttataagtgcgaagaatgcggaaaaggatttaaatggccctccacgctgacaatccacaagataatccacacaggcgagaagccctataagtgcgaggagtgtggcaaagcatttaaccagtcctccaaactgacaaaacacaagaagatccacaccggggaaaagccgtacacctgtgaagagtgcggcaaagccttcaatcaaagtagcaacttgaccaagcataaacgcatccatacaggggagaaaccttataagtgcgaggaatgtgataaggccttcaagtggtcgagcgtgttgactaagcacaaaattatccatacaggcgagaagttacagatttag

SEQ ID NO: 212432 - DNA, 1689 bp, synthetic construct
  misc_feature 1..1689: note = Description of Artificial Sequence: Synthetic coding sequence
  source 1..1689: mol_type = other DNA
atgggccccctgaccttccgggacgtggccatcgagttcagcctgaaagagtggcagtgcctagacacagcccagcgaaacttgtaccggaatgtcatgcttgagaactaccggaatctggtgttccttgttatgtgctctcatttcgcccaggatctgtggccggagcaaaacattaaagactcatttcagaaagttacactgaagcggtacggaaaatgtaggcacgaaaatttgcctctgcgcaaaggctgtgagagtatggatgagtgcaaaatgcataaagggggatgtaacgggttgaaccagtgcctgactgcaacccagtcgaagattttccagtgcgataagtacgtcaaggttgcccataaattcagcaactcgaacagacatgagattcgacacaccaaaaagaaaccatttaagtgcactaaatgtggcaaaagtttcggaatgatctcctgtctgaccgagcactcaagaattcacacccgagtcaatttctataagtgtgaggagtgcgggaaagcattcaactggtctagcaccctaacaaagcataaacggattcataccggcgaaaagccgtacaaatgcgaggagtgcgggaaggcgtttaaccagtcctctaatctgatcaaacataagaaaattcatacaggagagaagccttataagtgcgaggagtgcggcaaaacgtttaatcgttttagcactctgaccacccataaaatcatccatacgggtgaaaagccctacaagtgcaaggaatgcggcaaggcctttaaccggagcagtactctgactacccaccgtaaaattcatacaggcgaaaaaccttacaagtgtgaagagtgcggtaaggcgtttaagcaatcatcaaacctaacaactcacaaaatcatccatacgggcgaaaagccttataaatgcaagaagtgtgggaaggcgtttaatcagtcggcccacttgaccacccacgaagtgatacataccggggagaaaccatataaatgcgagaaatgtggcaaggcgttcaatcacttttcgcatctcactacccacaaaatcattcatactggggagaaaccatataaatgcaaggagtgtggcaaagccttcaaacacagtagtacactgacaaagcataaaattattcacaccggagaaaaaccatacaaatgtaaagaatgcgaaaaagcttttaatcagtccagcaaacttaccgaacacaagaagatccatacaggagagaagccctatgaatgcgagaaatgtggcaaagcatttaaccagtcttcaaacctgacacgacacaagaagagtcacaccgaggagaagccctataagtgtgaagagtgcggaaaggggtttaagtggccttctactctcacgatacacaagattattcacaccggggaaaagccttacaagtgcgaggagtgcgggaaagccttcaatcagtctagcaagctcaccaagcataagaaaattcatacaggcgagaagccatacacctgtgaggagtgcggtaaagctttcaatcagtcatcgaatcttaccaagcataagcggatccacacaggggagaagccttacaaatgcgaggaatgtgataaggccttcaaatggagttcagtcttgaccaaacacaaaatcatccatacgggggagaaattgcagatctag

SEQ ID NO: 212433 - DNA, 1413 bp, synthetic construct
  misc_feature 1..1413: note = Description of Artificial Sequence: Synthetic coding sequence
  source 1..1413: mol_type = other DNA
atgcacaagggcggctgcaacggcctgaaccagtgcctgaccgccactcaaagcaagatttttcagtgcgataagtatgtcaaagtggcccacaaatttagtaacagcaatcgccacgagatccgtcacacaaagaaaaagccatttaaatgtacgaagtgcggtaaatctttcggcatgatttcctgtcttaccgagcactcaagaatccatactcgagttaacttttacaagtgtgaggaatgcggaaaagcctttaactggtcaagtaccctgaccaagcacaaacgcattcacaccggggaaaagccatataaatgcgaggagtgcggcaaggccttcaaccaaagctccaacctcatcaaacacaaaaagatacacaccggagagaaaccctataagtgcgaagagtgtggcaagacatttaatcgattttcaaccctcactactcataagattatccacacgggtgagaagccatataaatgcaaagagtgcgggaaggccttcaacagatcaagcacattaacaacacaccgcaagatccatacgggtgagaaaccttataaatgcgaagagtgtggcaaggccttcaaacaaagctccaaccttactacccataaaatcatacacactggcgagaaaccgtacaagtgcaagaagtgcggtaaggctttcaaccaatctgcgcacctaacaacacacgaggttatccatactggggaaaagccgtataagtgtgagaagtgcggcaaggcattcaaccacttcagtcacctcacaacccacaaaatcatccacaccggggaaaagccttataaatgcaaggagtgtgggaaagcatttaaacatagctccacgctcaccaagcataagataattcacactggcgagaagccttacaaatgcaaggaatgcgagaaagcattcaaccaatccagcaaactgacggagcacaagaaaatccacacaggcgaaaaaccctacgagtgcgagaagtgtgggaaagcatttaaccagtcaagtaatttaacgcggcataaaaaatcccacaccgaagaaaaaccatataagtgcgaggagtgcggcaaaggcttcaaatggcctagcacgctcactatccataagattatccacacaggtgaaaagccgtataagtgcgaggagtgtgggaaagcctttaatcagtctagtaagctcacaaagcataagaaaatacacactggggagaagccatatacttgcgaagaatgtggcaaggcctttaaccagagcagcaacctgacgaagcataaaaggattcatactggcgaaaagccatacaagtgcgaagaatgcgacaaagcgttcaagtggtcctctgtgctgacaaaacataagattatccataccggcgagaagttacagatatag

SEQ ID NO: 212434 - DNA, 1806 bp, synthetic construct
  misc_feature 1..1806: note = Description of Artificial Sequence: Synthetic coding sequence
  source 1..1806: mol_type = other DNA
atgggccccctggagttccgggacgtggccatcgagttcagcctggaggagtggcattgtcttgacactgctcagcagaacctgtaccgggacgtgatgcttgagaactatcgccatctcgtgtttctgggaatagtggtcacgaagcctgatctcatcacatgtctggagcagggaaagaagccctttacagtgaagaggcacgaaatgatcgccaaaagtcccgtaatgtgctttcacttcgcacaggatttatgcccggaacaaagcctgaaggacagttttcagaaagtgatcgtaaccaggtacgaaaaaagggaatacggtaacctggaactcaaaaagggctgcgagagcgtagacgaggggaaagtacacaaacgaggatacaacgggttaaatcagtgtctgactgcaacccagtctaaggtgtttcaatgtgatacctacgtgaaggtgtcccacatattctcaaattccaaccgacacaaaatacgtgacaccggcaaaaaaccctttaaatgcatcgagtgcggcaaggccttcaaccaaagttccacattagccactcataagaaaatacacactggagaaatcacctgcaaatgtgaggagtgtggcaaggccttcaatagatctagtcatttgactagccacaagaggattcatacgggggagaagagatataagtgcgaagactgtgggaaggagctgaagtatagttccaccctaacagctcacaaacgaatccacacaggagaaaaacgctataaatgcgaagattgtggcaaggagttaaagtactccagtactctcacagcccataagcgcatccacacaggtgagaagccatataagtgtgacaagtgcggacgggccttcatcagctcctctatcctctacgtacataagatctcacatacagaagaaaaaccctacaaatgtgaagaatgtggcaaggctttcaaactcagttctattctgagcacacacaaacggatccataccggggagaagccatacaagtgcgaagaatgcgggaaggcctttagacggagtcttgttctgcgcacgcataaacgcatccacaccggtgagaagccctacaaatgtgacaaatgtgggaaagcctttatcagctcttcgctgctatataaacacaagatctcgcatagcgagaagaaaccatacaaatgcgaggagtgcggtaaagcttttaagagatcctccactcttaccatccataaaatctcccatactgaggagaagccctacaagtgtcaggaatgcgataaagtctttaagcgctcctccgcgttgtccacccacaagattatacacagcggcgagaaaccttataagtgtgaagaatgcggtaaggctttcaaacgaagttcgaacctcactacgcacaaaatatctcatacagaagaaaaactgtataaatgccaggaatgcgataaagccttcaaatactcctcggctctttccacacataagatcattcactctggagagaacccttataaatgcgaggaatgcggtaaagcattcaagcggtcctcagtgctgagtaagcataagattatacatacgggcgctaagccttacaagtgcgaagagtgcggcaaggcgtttaaaaggagctcacagttaaccagtcacaaaatctctcatacaggggaaaagccatacaaatgtgaggagtgtggaaaggcatttaatctctcaagtgatctaaatacccataagagaatccacatcgggcagaaagcctacatcgttaaaaacatggccaacctctag

SEQ ID NO: 212435 - DNA, 369 bp, synthetic construct
  misc_feature 1..369: note = Description of Artificial Sequence: Synthetic coding sequence
  source 1..369: mol_type = other DNA
atgcggaagcacatcaaggagcgggagctgagcctgatggagcagattaaggagttcatcctagagcgcaacactatgaacgtgcctacagtggggaagccatttagcggtagacactcactgctatcgattcgcgaattcactctcggaagatcccctatgaacgtaatgaatgtgggcgaaccatccgagaagaaaccaacatgtatgataatccgggaatttattctggaaaagaatcccatcctggtgcgcaacgtaggaaagactagcgcagaagtgcagttgttgttgaatacccgagaattcatcctagagattaattccaggaacagggaaatcaaagagttcgcagaatgcttctcatag

SEQ ID NO: 212436 - DNA, 1911 bp, synthetic construct
  misc_feature 1..1911: note = Description of Artificial Sequence: Synthetic coding sequence
  source 1..1911: mol_type = other DNA
atggccccccggccccccaccgccgccccccaggagagcgtgaccttcaaagacgtgtcggtggacttcacacaggaggagtggtaccatgtagaccctgctcaaagatcactgtatcgtgacgttatgctcgagaactacagccacctggtctcactcgggtaccaggttagtaagcccgaagtcatctttaagcttgagcaaggagaagagccttggattagtgagggagagattcaacggcctttctatccagactggaaaaccaggccagaagtcaaatcatcgcatctccagcaggatgtgagcgaagtgagtcactgcactcacgaccttctgcacgccaccttggaagacagttgggatgtatcttcccaactcgacagacagcaagagaattggaaacggcacctgggctccgaagctagcactcagaagaagatcatcactccccaagagaatttcgagcaaaataagttcggtgaaaactccaggctgaatacaaatctggtaacccagctcaacatccccgcccggatccgccctagtgagtgtgagaccttaggcagcaatttaggtcataacgcagatctccttaatgagaataatatattggccaaaaaaaaaccctacaagtgcgacaaatgccggaaagcgttcatccaccggtcatctctgacgaaacacgaaaaaacccataaaggggagggggcctttccaaacggaaccgaccagggaatataccccggcaaaaagcatcacgagtgcacagactgtggtaagacattcctttggaagacgcagctgaccgaacatcaaagaatacacaccggtgagaagccattcgaatgtaatgtctgtgggaaggcattccgtcacagctcgagcctggggcagcatgagaacgcgcatactggggaaaagccatatcagtgtagcttgtgtgggaaagcctttcagagaagctcatcattagtgcagcaccaaaggattcacactggagaaaaaccataccggtgtaatttatgtggtcgttcgttccgacacggcacttctcttacacagcacgaggtgacacactcgggagagaagcctttccagtgcaaagagtgcggcaaggctttttctcgatgctccagtctggtgcagcacgagaggacacacaccggcgagaagcccttcgagtgcagcatctgcggtagggcattcgggcagagtccttccttgtacaaacacatgaggatacataagcgcggaaaaccgtaccagtcctcgaattattctatagacttcaaacattctacaagcttgacgcaggacgagtcgacccttacagaagtgaaatcctaccattgcaacgactgcggtgaagatttctctcacatcacagactttacagaccaccagcgcatccacactgccgagaatccatatgactgtgaacaagctttttcgcagcaggctatttctcatccgggagagaaaccctatcagtgcaacgtctgcgggaaagccttcaagcgttcgacatctttcatcgagcaccaccggatccatacgggcgagaagccttacgagtgtaatgagtgcggagaggcattcagcaggagaagcagcctgacacaacatgagcgcacccatactggggagaagccctacgagtgtattgattgtgggaaggcattttcccagtccagctcattaatccaacatgagaggacccacacgggcgaaaaaccctatgagtgtaacgagtgcggtcgtgcctttagaaagaaaaccaacctgcatgaccatcagaggatacataccggcgagaagccctacagttgcaaagagtgcgggaaaaacttttcccgaagctccgctctcacaaaacaccagcgaatccacacaaggaacaagctttag

SEQ ID NO: 212437 - DNA, 3576 bp, synthetic construct
  misc_feature 1..3576: note = Description of Artificial Sequence: Synthetic coding sequence
  source 1..3576: mol_type = other DNA
atgcccggcacccccggcagcctggagatgggcctgctgaccttccgggatgtagccatcgagttctcgcctgaggaatggcagtgcctggataccgcccaacagaatctctacagaaatgtgatgctcgaaaactacagaaacctcgccttcctgggcattgccctgagtaaacccgacctaattacatatttagaacagggtaaagagccttggaatatgaaacaacacgaaatggtggatgagcctaccggcatctgtccgcattttccacaggatttttggccggagcaaagtatggaagattcattccagaaagtactactccgcaaatatgaaaagtgcgggcatgaaaaccttcagttgcgtaaaggctgcaaatctgttgacgaatgcaaagtgcataaagaagggtacaataagctgaatcaatgtctgaccactgcgcaaagcaaggtatttcagtgtggcaagtacctcaaagtgttctacaaattcttaaacagcaaccggcacaccataagacacacaggtaaaaagtgtttcaagtgcaagaagtgcgtcaaatctttctgtatccgacttcataagacccaacacaagtgtgtctacataaccgaaaagagctgcaaatgcaaagaatgcgagaagactttccactggtcctctacgctgactaatcacaaagagatccatactgaagacaaaccttataaatgtgaggagtgtggcaaagcctttaagcagctttcaactcttactacacataaaattatctgtgctaaagagaagatctataagtgcgaggagtgtggcaaggccttcctctggagttctacgctgactcggcataaacgtatccacacgggggagaaaccatataaatgcgaagaatgcggtaaggcattttctcacagcagtaccctagccaagcacaaaagaatccatactggagagaaaccttataagtgcgaagagtgtgggaaggctttcagcaggagtagcactctcgctaagcacaaacgcatacatacaggtgaaaaaccctataaatgtaaggagtgcggaaaagccttcagtaattcctccacactggcaaatcataaaattacccacaccgaagagaagccatataaatgtaaagagtgtgacaaggccttcaagaggctttccacactgaccaaacacaagatcatacacgccggcgagaaactgtataagtgtgaagaatgtgggaaagcctttaaccgttccagcaacttgaccattcataagttcattcatactggcgaaaaaccttataaatgtgaagaatgcggtaaagccttcaactggtcttccagccttactaagcacaagagatttcatacaagggagaaaccttttaagtgcaaggagtgtggcaaagcattcatttggtcatctacactcaccagacacaagcgaatacacactggtgagaaaccctataagtgcgaggaatgcggtaaagctttccggcagtctagtactttaactaagcataagattatacacacaggcgaaaagccctataagtttgaggaatgcggcaaagccttcagacaatctttaacccttaataaacacaagatcatccattcacgcgagaagccttataagtgtaaagagtgtggcaaagctttcaaacaatttagtacactgactacccacaagattattcacgccggcaagaagctctacaaatgtgaagagtgcgggaaagctttcaaccacagctccagtttaagtacccacaaaattatccacactggcgagaaaagttacaagtgcgaggagtgtggcaaagcttttctttggagtagcactttacgtaggcataaacgtatacataccggagaaaagccttacaaatgtgaggagtgcggcaaagccttcagccactcatcggcccttgccaaacataaaaggattcacaccggggaaaaaccctataaatgtaaagaatgtggcaaggccttctctaacagttctactttggcaaatcataagattacacacaccgaggagaagccatacaagtgcaaagaatgcgacaaaactttcaagcggttgagcaccctcacaaagcacaagattatacatgctggcgagaagctgtacaagtgtgaggaatgcgggaaggccttcaatcgcagctctaacttaactatccacaagtttatccacacaggagaaaaaccctacaaatgtgaggaatgcgggaaagcttttaactggagttctagcctcaccaagcataagcgaatccatacgagggagaaaccttttaagtgtaaggaatgcggaaaggccttcatctggtctagcactttgacgcgtcacaagaggatccatactggcgagaaaccctataagtgcgaggaatgtgggaaagcttttagcaggtcatcaacacttacaaagcacaaaactattcacacgggcgaaaaaccttataaatgcaaagaatgcggtaaagccttcaaacattcgtcggccctggcaaagcataagatcatccatgccggcgaaaagctgtacaaatgtgaagagtgtgggaaagcattcaaccagagctccaacctgaccacccataaaattatccataccaaggagaagccttcaaagtccgaagaatgcgacaaagcatttatttggtcctccaccctcaccgagcataaacggatccataccagggagaaaacttacaagtgcgaagagtgtggcaaggcttttagccagcctagccacttgacgactcacaagcgcatgcatactggggaaaagccttataaatgtgaagaatgcggaaaagccttttcacagtccagtacgctcaccacgcacaagattatccacaccggggaaaagccgtacaaatgcgaggagtgtggaaaagccttcagaaagagttccaccctcacagaacacaaaattatccacactggagagaaaccttacaagtgcgaagaatgcggaaaggcattcagtcagagttccacccttacacggcacacccgaatgcacacaggagaaaaaccctacaaatgtgaagagtgtggtaaggcattcaaccggtcaagcaagcttactactcacaagattatacacacaggggaaaagccgtacaagtgtgaggagtgcgggaaggctttcattagcagcagcactttaaacgggcataaaaggattcatacgcgggaaaagccatataaatgcgaggagtgtggaaaggcattcagccagtcttcaaccctcacgagacacaaaagactccacaccggagagaagccttacaagtgtggagagtgcgggaaagcattcaaagagtcgtccgctctgacgaagcacaaaatcatacacactggagagaaaccctataagtgcgaaaagtgtgggaaagcctttaaccagtccagcatcctgaccaatcacaaaaaaattcacactatcaccccagttatacccctcctatgggaggcggaggcagggggcagccgcggccaggaaatggaaacaatcctagctaatactgtgaagccactgctgtactag

SEQ ID NO: 212438 - DNA, 3480 bp, synthetic construct
  misc_feature 1..3480: note = Description of Artificial Sequence: Synthetic coding sequence
  source 1..3480: mol_type = other DNA
atgcccggcacccccggcagcctggagatgggcctgctgaccttccgtgacgtcgccattgagttttcccccgaggagtggcagtgtctggatactgctcaacagaacctgtaccggaacgtcatgctcgaaaactaccgcaacctggcgttcttagggatctgtcctcactttccacaggacttttggccggaacaatctatggaggactctttccaaaaagtgctcctgcggaaatatgagaagtgtggacacgagaacttgcagcttcggaagggctgtaaatctgtggatgagtgcaaggttcacaaggagggctataataagcttaaccagtgcttgacaactgcacaaagtaaagtttttcagtgtgggaagtacctgaaggtgttctataaattcctgaactcaaatcggcacaccatcaggcatacgggaaagaaatgcttcaagtgcaagaagtgcgtgaagagtttctgtatcagactgcataagacgcaacataagtgtgtgtatatcaccgagaagtcctgcaaatgcaaggaatgcgaaaagacctttcattggtctagcacgcttaccaaccataaggagatacacaccgaggacaaaccctacaaatgcgaagagtgtggaaaagctttcaagcaattgtcaacccttactactcacaagatcatttgcgccaaggaaaagatctacaagtgtgaagaatgtggcaaagcctttctatggtcttcaacactgactcgtcataagaggattcacactggtgaaaaaccctataaatgtgaagagtgcggaaaggctttttcgcactcaagtaccctggccaagcataagagaatccacacgggcgaaaaaccttacaagtgcgaagagtgcgggaaagcgtttagcagatcaagcacgcttgcaaaacataagagaatccatacaggtgagaagccctataaatgtaaggagtgcggcaaggctttctcaaattctagcacactggctaatcacaagatcactcacactgaagaaaaaccctacaagtgtaaagagtgcgacaaagcttttaaacgcctttcaacactcacaaaacataaaattatccacgcaggtgaaaaactgtacaaatgcgaggaatgcggaaaggcttttaacaggtcatctaacctgacaattcacaaattcattcatactggggagaagccttacaaatgtgaagagtgcgggaaagccttcaactggtcttctagcttaaccaaacacaagcgtttccacacccgagaaaaaccatttaagtgcaaagagtgcggaaaggcctttatatggtcttcgactctcaccagacacaaacgcatacacaccggcgaaaaaccctacaaatgcgaagaatgcgggaaggcattccggcagagttccactctgactaaacataaaataattcacactggggagaaaccttataagttcgaggaatgcggcaaagcctttcgccagagcttaaccctgaacaagcataagatcattcatagtagggaaaaaccttataagtgcaaagaatgcggaaaagccttcaagcagttttcaacgctgacaacgcacaagatcattcacgcaggcaaaaaattgtacaagtgcgaagagtgcggcaaagcgttcaaccactcaagctccctctctacgcacaaaatcattcacactggagagaagtcatacaaatgcgaggaatgcgggaaggccttcctctggtcaagcacgctgcgcagacataagagaatccatacgggggagaaaccatacaagtgcgaagaatgtggtaaagcatttagtcactccagtgccctagccaagcataagcgcattcataccggcgaaaagccttacaagtgcaaggagtgtggcaaagctttctcgaacagctcaactctggccaaccacaagattacacacaccgaagaaaaaccttacaaatgcaaggagtgtgataagaccttcaaacgccttagtaccctgacgaagcataagattatccatgccggggaaaaactgtacaagtgcgaagagtgcggcaaagcattcaaccggagcagtaatctcaccatccataagttcatccataccggggagaaaccatataagtgcgaagagtgcggcaaagcttttaattggtccagcagcttgactaagcacaagagaattcacaccagagaaaagccttttaagtgtaaagaatgcggcaaagccttcatctggtctagcacgctcacaaggcacaagcggattcacactggcgaaaagccttacaagtgcgaggaatgtggcaaagccttttccaggagtagtacactcaccaagcacaaaaccatccatacaggtgagaaaccttacaaatgtaaggaatgtggcaaggctttcaaacatagctcggctttagctaaacacaagatcattcatgctggtgagaagttatataagtgtgaggaatgtggcaaagccttcaaccagtcctctaacctgacaacccacaaaattatacacactaaggaaaagccgtctaaatccgaggaatgcgacaaggccttcatttggtcctccacacttacggagcataaacgtatccatacgagggaaaaaacatataagtgcgaggagtgcgggaaggccttttctcagccaagccacctgaccactcacaaacgaatgcacaccggagaaaagccatataagtgcgaagagtgtggtaaggccttctcccagagctcgactctgaccacgcataaaattatacacactggtgaaaagccttacaaatgtgaagagtgcggtaaagctttccggaagagtagcaccctcaccgagcacaagatcatacatactggcgaaaagccatacaagtgcgaagaatgtgggaaagccttcagtcagtcgtctacgctgacaagacatacacgcatgcacactggagagaagccttataaatgtgaagagtgcggtaaggcatttaaccgatcgtcgaagttgaccacgcacaaaatcatccacaccggggagaagccgtataaatgtgaagaatgtggtaaagccttcatttcgtcttccactctcaacggccataagagaattcacactagagagaaaccgtataaatgtgaagagtgtggaaaagcattctcacagtcctctaccctgaccaggcacaaaaggctccatacaggcgaaaaaccctataagtgtggggagtgcggaaaagcattcaaggagtcctcagcacttactaaacacaaaatcatccacacgggagagaaaccgtacaaatgcgagaaatgcggcaaggctttcaatcagagctcgatcttaaccaaccacaaaaagatccacaccatcactcctgttatcccactcctctgggaagccgaagctgggggaagccgcggccaagaaatggaaaccatcctggctaatactgttaagcctctgctgtactag

SEQ ID NO: 212439 - DNA, 1761 bp, synthetic construct
  misc_feature 1..1761: note = Description of Artificial Sequence: Synthetic coding sequence
  source 1..1761: mol_type = other DNA
atgggccccctgaccttccgggacgtgaagatcgagttcagcctggaggaatggcaatgcctcgatactgctcaacgcaatctctacagggacgttatgctggagaattatcgaaacttagtgtttcttggaattgcggtgagtaaaccagatctgataacgtggctggagcaaggtaaggagccttggaacctcaaacggcacgagatggtcgataagactcctgtgatgtgctctcacttcgcccaggatgtgtggcccgaacattctatcaaagactcctttcagaaggtgatcctcaggacctatggaaaatacggccatgagaatttgcaactcagaaaagatcacaagagtgtcgacgcctgtaaagtgtacaagggcgggtacaatggcttgaaccagtgcctgactacaaccgactccaagatatttcaatgtgataaatacgtgaaggtgttccacaaattccctaacgtcaaccggaacaagatcaggcacacaggcaaaaagcccttcaaatgcaaaaatcgcggaaagtcattctgtatgttaagccaattgacccagcacaagaaaatccatacgagggagtactcctacaagtgcgaggagtgcgggaaggccttcaattggtcctcaacccttaccaagcacaaaatcatccacacgggtgaaaaaccatataagtgcgaagaatgcggtaaagcattcaaccgctccagtaatctgaccaaacacaagatcattcacactggggaaaagccgtacaagtgtgaggagtgcggtaaagctttcaatagaagctccactctaaccaaacataagcggatccacaccgaagaaaaaccttataagtgcgaggaatgtgggaaggcttttaaccaatttagtatactcaacaagcacaagaggatccacatggaggacaagccctacaaatgtgaggaatgtggaaaggcctttcgggtgtttagcatcttgaaaaagcataaaataatccatacaggcgagaagccgtacaagtgcgaagaatgcggcaaggcctttaaccagttttccaatttgaccaagcacaagatcatccacaccggcgagaaaccgtacaaatgtgatgagtgtggtaaagcgttcaaccagtcctctaccttgactaagcacaaaaggatccatacaggcgaaaagccctacaagtgtgaggagtgcggcaaagcatttaaacagagctctactctgacggaacataagatcatccacaccggcgaaaaaccgtacaaatgcgagaaatgcgggaaagcctttagctggtcttccgccttcacaaaacacaagcggaaccatatggaagataagccctataagtgcgaagagtgcgggaaggctttttctgtcttcagtactctgactaaacacaaaattatccacacaagagaaaaaccatacaaatgtgaggagtgtggcaaggcatttaaccagagttctatcttcacaaagcataagatcattcatacagaggggaaatcttataagtgtgaaaaatgcggcaacgcattcaatcaatcaagcaaccttacggctcgtaaaattatctacactggggaaaaaccatacaagtacgaggagtgtgataaagctttcaacaaattcagcactctgatcacacaccagatcatctataccggtgaaaaaccttgcaaacacgagtgcggaagagccttcaataaatcctccaactataccaaggagaagttgcaaacctag

SEQ ID NO: 212440 - DNA, 1665 bp, synthetic construct
  misc_feature 1..1665: note = Description of Artificial Sequence: Synthetic coding sequence
  source 1..1665: mol_type = other DNA
atgggccccctgaccttccgggacgtgaagatcgagttcagcctggaagagtggcaatgtcttgacacagcccaaaggaacctttatcgggatgttatgctcgagaactacagaaacctcgtttttctggtcatgtgcagccactttgcgcaggatgtttggcccgaacactcgattaaggacagttttcagaaagtgatcctcagaacatacggcaaatatggtcatgagaatctgcagttacggaaagaccataagtccgtggacgcctgtaaggtatacaagggtgggtataatggtctcaaccaatgtctaaccacgactgattccaagatttttcaatgtgacaaatatgttaaagtgttccataagtttcccaatgtgaacagaaataagatccgccacacaggcaagaaaccttttaagtgcaaaaaccgaggcaagagtttctgcatgctatcccaattgacccagcacaaaaaaatacatactagggaatattcttataagtgtgaggagtgcggtaaggcatttaattggtcatccaccctgacgaagcataaaattattcacactggcgagaaaccatacaaatgcgaagaatgcggcaaagctttcaacagatcctccaacctgaccaagcacaagatcatccacacaggagagaagccctacaaatgtgaagaatgtgggaaggcattcaaccggagttctacattgaccaagcataaacgcatccatacagaggagaagccatataaatgtgaggagtgcggaaaggctttcaatcagttctccattctcaacaaacacaagcggatccatatggaggataaaccttacaagtgtgaagagtgcggcaaggcttttagagtgttttccatcctcaagaaacacaaaatcatccacacaggtgagaagccatataagtgtgaagagtgtggaaaggcttttaaccagtttagtaacctcaccaagcacaagataatacatacaggcgagaagccatacaagtgtgatgaatgcgggaaagccttcaatcagtcctcaaccctgactaagcacaagaggattcacaccggcgagaagccctataagtgcgaggaatgcgggaaagctttcaagcagtcttcaacactgacagaacataaaatcatccatacaggtgagaagccttacaaatgcgagaagtgcggcaaggccttcagctggtcctccgcattcactaaacataaacggaatcatatggaagataaaccatacaagtgtgaggagtgtggtaaagctttctcagtgttctccactctgaccaagcataagatcatccacacccgcgagaaaccatataagtgcgaagaatgtggcaaagccttcaaccagagttcgatatttactaaacataagatcattcatacggagggaaagtcctacaaatgcgagaagtgcgggaatgcttttaatcagtcttccaacttgacggcacggaaaatcatttacactggagagaagccatacaagtatgaggaatgcgacaaagcctttaacaagttctccacactgattacacatcagattatttacactggagagaaaccgtgcaagcatgagtgcggccgggcgttcaataagtcatccaattatacaaaggaaaagctccagacgtag

SEQ ID NO: 212441 - DNA, 1554 bp, synthetic construct
  misc_feature 1..1554: note = Description of Artificial Sequence: Synthetic coding sequence
  source 1..1554: mol_type = other DNA
atggtggacaagacccccgtgatgtgcagccacttcgcccaggacgtgtggcctgagcactctattaaggatagcttccaaaaagtgatactgcgcacatatgggaagtacgggcacgagaacctgcagcttcgtaaggaccacaagtccgtggacgcgtgtaaagtttacaagggtggatataatgggctgaaccaatgtttgaccaccacagattctaaaatcttccagtgtgacaaatacgtgaaggtctttcacaagttcccaaacgtcaaccgaaataaaataagacatactggcaagaaaccatttaagtgtaagaatagagggaagtcgttctgcatgctgtctcagttgacgcagcataagaagatacacacccgagaatactcctataagtgtgaggagtgcggtaaggccttcaactggagcagcaccctcaccaaacataagattatccataccggcgagaagccctataagtgcgaggaatgtggcaaagccttcaaccgatcctcaaatctgactaagcataagattatccatacaggcgaaaagccctacaaatgcgaagagtgtggcaaagcttttaacagaagctcgacactgactaagcacaaaagaatacatacagaagagaagccttacaagtgcgaggagtgtggcaaagcattcaaccagttttcaatcttaaataaacataagagaattcacatggaagataaaccctataagtgcgaggagtgcggaaaagcttttcgtgtgttttcaatcctcaaaaagcacaaaatcatccacactggagaaaagccctataagtgcgaggaatgcggtaaggccttcaaccagtttagcaacctgacgaaacataaaatcatccacacaggggagaagccatataagtgcgacgaatgcgggaaagcattcaatcagtcctcaacccttaccaaacacaaacggatacacacaggagaaaaaccctacaaatgcgaggagtgtggaaaagcattcaaacagagttcaactctcaccgagcacaagataattcacaccggcgagaagccttataagtgcgaaaagtgtggcaaagctttttcatggtcttccgctttcacaaaacacaagaggaaccacatggaagataagccgtacaagtgtgaggagtgcggcaaggccttctcagtgttcagtacattgactaagcataaaattattcacacaagggaaaagccatacaagtgcgaggaatgtggcaaggcttttaatcagtcaagtatctttacgaagcacaaaataatccacacagagggtaagagctacaaatgtgagaagtgcgggaatgccttcaaccagagttccaatttaacggcgcgaaagatcatctacaccggggaaaagccttacaaatatgaagaatgcgataaagcctttaataaattttccactctcatcacacaccagataatttatacaggggaaaagccctgtaagcatgagtgtggccgggcgtttaataagagctctaattacactaaggagaagctgcaaacatag

SEQ ID NO: 212442 - DNA, 1863 bp, synthetic construct
  misc_feature 1..1863: note = Description of Artificial Sequence: Synthetic coding sequence
  source 1..1863: mol_type = other DNA
atgggccccctgcagttccgggacgtggccatcgagttcagcctggaagagtggcactgtttagatacagcgcaaagaaacctgtaccgcaacgtgatgctcgaaaactactcaaacctggtcttcttaggaatagtggtgtccaaacccgacttaatcgcccatctcgaacagggcaagaaacctctgacaatgaaaagacacgaaatggtggcaaatccctccgtgatttgttcccacttcgctcaggatctgtggccggagcagaatattaaggacagttttcaaaaggttattctgaggcggtacgagaaacgtggccatggcaacttgcagctgataaaacggtgcgaatctgtggatgaatgcaaggtgcacaccggcggctacaacggattaaatcagtgctcaaccaccactcagagtaaggtgttccaatgcgataaatacggaaaggtcttccataaattctcaaactccaataggcataacattaggcatacagaaaagaagccttttaaatgtattgagtgcggcaaggcatttaatcagttctcgactctgattactcataagaaaattcatactggcgaaaagccatacatctgcgaagagtgcggaaaggcttttaagtattcttcagccctgaatactcacaaaagaatccatacaggagagaaaccctataagtgcgacaagtgtgacaaagcctttattgcctccagtaccctcagtaagcacgaaatcattcataccggcaagaaaccctacaaatgtgaggaatgcgggaaggcattcaaccagtctagcacactcacgaagcataagaaaatccacaccggtgaaaagccttacaaatgcgaagaatgcgggaaggcctttaatcagagcagtacccttacaaagcacaaaaaaatccacaccggcgagaaaccatacgtgtgcgaggaatgtggcaaggccttcaaatattcaagaatcctcacaacccataagcgcatccataccggtgagaagccgtataaatgcaataagtgcggcaaggctttcatcgcctcatctacactgagtcgtcacgagttcatacatatgggaaagaagcactacaagtgcgaggagtgtggaaaagccttcatttggtcaagtgtgcttactagacacaagcgggttcacacaggggaaaaaccgtacaaatgcgaagaatgtggaaaagcattcaaatatagcagtacattatcaagtcataagagatctcacaccggcgaaaagccatataagtgtgaggagtgtggtaaggcattcgttgctagttcaaccctgtcaaaacacgagattatccacacaggcaagaagccatataaatgcgaagagtgtggcaaggcttttaaccagtctagtagcctgacgaaacataagaagatccatactggtgagaaaccgtataaatgtgaggaatgcggcaaagcattcaatcagagttcgagcctgaccaagcacaaaaagatccacacgggtgaaaaaccttacaagtgtgaggaatgcggcaaagcattcaatcagtcctccacgctcattaaacacaaaaagattcatacccgggagaagccgtacaagtgcgaggaatgtgggaaagcttttcacctgtcaactcacttgacaacgcataagatcctccataccggagaaaagccgtaccggtgtagggaatgcgggaaggcgttcaaccactcagccaccctcagctcccacaagaaaattcactccggcgagaagccatacgagtgtgacaaatgtggcaaagcgtttatctccccttcctcgctgagccgacatgagattattcacactggggagaagccttag

SEQ ID NO: 212443 - DNA, 1779 bp, synthetic construct
  misc_feature 1..1779: note = Description of Artificial Sequence: Synthetic coding sequence
  source 1..1779: mol_type = other DNA
atgggccccctgcagttccgggacgtggccatcgagttcagcctggaggagtggcattgtctggatacagcccaaaggaacctgtacaggaacgtgatgctggagaattatagcaacttggtcttcctcggaattgtggtgtcaaaacccgatttaatcgcgcaccttgagcaggggaaaaagcccctgaccatgaaaaggcatgaaatggtggcaaatccatccgtaatttgctcgcactttgcccaagatttgtggccagaacaaaatattaaagactcgtttcagaaggttatcctgcgtcggtatgaaaagagaggtcacggcaacctgcagttgatcaaaaggtgcgagtctgtcgatgaatgtaaggtgcatactggaggttataacggtctcaaccaatgctctacaacaactcagagcaaggtttttcagtgcgacaaatatggcaaggtcttccacaaattctctaacagcaatagacacaatattcgccacactgagaagaagccctttaaatgcattgagtgtgggaaggctttcaatcagttttccacacttataacccacaagaagatccacacaggggaaaagccatacatatgtgaagaatgcggaaaggcctttaagtactcgagtgccttaaacacacacaagagaatccacacaggcgagaagccatataagtgtgacaaatgtgacaaggccttcatcgcttcgtcaaccctgtcgaaacacgagatcatccataccggcaagaagccctacaaatgcgaagagtgcgggaaagccttcaaccagtcttcaactctcacaaaacataaaaagatccacactggggagaaaccatataagtgcgaggagtgtggcaaggcttttaaccagagcagtaccctcacaaagcacaaaaaaatacacactggagagaaaccttacgtctgcgaggagtgcggcaaagcatttaagtattctcggatattgactactcataaacgtatccatactggtgagaaaccatacaagtgtaacaagtgcggaaaagcctttatagcttcgagtaccctttcaagacatgagtttattcatatggggaagaagcattacaaatgtgaagaatgcggcaaggcctttatctggtcttccgtattaacccgccataaaagggtgcatacgggcgagaaaccttacaagtgtgaagagtgtggcaaggcgtttgttgcttccagtactctgtccaaacacgagattattcacaccggcaaaaaaccatacaagtgcgaagaatgcggtaaggcttttaaccagagttctagcttaaccaagcacaaaaaaatccacacgggcgagaagccgtacaagtgtgaagagtgtgggaaggcttttaatcagagcagcagtctgactaagcataaaaagatccataccggtgaaaagccttataagtgcgaggagtgcggaaaggctttcaaccagagcagtactctcatcaagcacaagaaaattcacacacgtgagaagccatacaaatgcgaggagtgcggcaaggcctttcacctgtccacccaccttactacgcacaagatcctccacacaggggaaaaaccctatcggtgtcgggagtgcggcaaagctttcaaccactccgcaacattgagctcccacaagaagatccacagcggagagaagccctatgagtgcgacaagtgcggaaaagcttttatcagcccctcttcactgtctaggcacgaaattattcacactggcgagaaaccttag

SEQ ID NO: 212444 - DNA, 183 bp, synthetic construct
  misc_feature 1..183: note = Description of Artificial Sequence: Synthetic coding sequence
  source 1..183: mol_type = other DNA
atggtggccaaccccagcgtgatctgcagccacttcgcccaggacttatggcccgagcagaatatcaaagattcctttcagaaagtgatcctacgacgctacgaaaaacggggccatgggaatctccagctgattaaaagatgcgaatcaaccccctcggaaaaagagaaaaagaagaaatag

SEQ ID NO: 212445 - DNA, 1719 bp, synthetic construct
  misc_feature 1..1719: note = Description of Artificial Sequence: Synthetic coding sequence
  source 1..1719: mol_type = other DNA
atgcccggccccctgggcagcctggagatgggcgtgctgaccttccgcgatgtcgccttggagttctctctggaagagtggcaatgtctcgacaccgcccagcagaatctctaccgaaatgtgatgctagagaattatcggaatctcgtgttcgttggcatagcagcaagcaagccagacctgattacctgcctggagcagggcaaagaaccttggaatgtgaaacgtcatgagatggtcaccgagccgcctgtggtctatagctactttgctcaggacctttggccgaagcaggggaaaaaaaattactttcagaaggtcatattgaggacctacaagaagtgtggacgggagaatttgcagctcagaaagtactgtaagagtatggacgagtgcaaagttcataaggaatgttacaatggtctaaaccagtgtctcaccacaactcagaacaagattttccagtacgacaaatacgtcaaggtgtttcacaaattctctaattctaatcgccacaagattggacatactggaaagaaaagttttaaatgtaaggaatgtgagaaaagcttttgcatgcttagtcatctggctcagcataagagaatccacagtggcgagaagccatataagtgtaaggaatgcggaaaggcctacaacgaagccagcaacttgtccacccataagaggattcacacggggaagaaaccatataaatgtgaagagtgtggcaaggctttcaaccgcttatctcacctaacaactcataagataatccatacaggcaagaaaccttacaagtgcgaggaatgtggcaaggcattcaaccagagtgctaacctcaccacacacaagcggatccacactggggagaagccgtataagtgcgaggagtgtggacgtgctttttcccagagctcaacgctcactgcacacaaaattatacacgccggcgagaagccctacaaatgcgaggagtgtgggaaagcattttcccagtcgtccaccctaacaacgcataagatcatccacaccggtgagaagttttataaatgcgaggagtgcggtaaagcattttctcgcctttctcacctgaccactcataagcgcattcatagcggggaaaaaccttacaagtgcgaagagtgcggcaaagcttttaaacagagttccacccttaccactcacaagcggatccacgccggagagaagttctataaatgcgaggtttgttcaaaggccttctctagatttagtcatctgacaacccataaaaggatccatacaggggaaaaaccttacaagtgcgaggagtgtgggaaagcatttaacctatccagtcagctgacaacccataagattatccacactggggagaagccttataaatgcgaagaatgcggcaaagctttcaatcagagctctaccttgagtaaacacaaggtcatacatacaggagagaagccttataagtgtgaggagtgcggtaaggcatttaaccaatctagccatctcaccacgcacaaaatgattcatacaggcgaaaaaccatacaaatgtgaggaatgtggtaaagcgtttaacaactcttccatcctcaataggcataagatgattcacactggagaaaagctatacaaaccggagtcatgcaacaacgcctgtgataacatagccaagatctccaagtacaagaggaattgtgcaggcgagaaatag

SEQ ID NO: 212446 - DNA, 3114 bp, synthetic construct
  misc_feature 1..3114: note = Description of Artificial Sequence: Synthetic coding sequence
  source 1..3114: mol_type = other DNA
atgagcttctggagcgagaagtgcacccggctgatcctgtacgacctcaagatcgctctgaagaacggctccctgacattctgggacgtaactattgagttcgctctcgaggaatggcagtgcttggatatggcacagcagaacctctacagaaatgtcatgttagaaaactatcggaatttagtatttctgggcatcgccgtgagcaaattggatctgattacctgtttgaagcaaggaaaggaaccatggaatatgaagcgccatgaaatggtcacaaagccccctgtcattagcagccacttcacccaggacttctggcccgaccagtcaatcaaagacagttttcaggaaatcatactgcgcacttacgcccgctgcggtcacaagaatttgagactgaggaaggattgcgagtctgtgaatgaaggaaagatgcacgaggaggcctataacaagctaaatcaatgttggaccactactcagggcaaaattttccagtgtaataagtacgtgaaggttttccacaaatacagcaacagtaacaggtacaaaatcattcacactggtaagaaaccttacaaatgtgaagaatgtggcaaagccttcaagcagagctctcacctgacgcgtcataaagcaatccacacaggcgagaaaccgtataaatgtgaagaatgtgggaaggcattcaatcactttagcgcacttaggaagcaccagattatccacactggtaaaaaaccttataaatgtgaggagtgcgggaaggctttctcacagtcctctactttgcgaaaacacgagattatccacaccgaggagaaaccctataaatacgaggaatgtggaaaggctttctctaacctttccgcattgaggaagcatgagatcatccacactggccaaaaaccttataagtgtgaggagtgtggcaaagcatttaaatggagcagtaagctgacagtccacaaggttattcacactgctgaaaaaccttgcaaatgcgaagagtgtggtaaagctttcaagagattctcagcgcttaggaaacataagatcatacataccggaaaacagccatacaaatgtgaggagtgcagcaaggccttctctaatttctcagccctgcgaaagcacgaaattatccatactggcgaaaagccctataagtgtgaggagtgtgggaaggcctttaagtggagtagtaagctcaccgtacataaggtgatacacatggaagagaagccatgcaagtgcgaagagtgtggaaaggccttcaagcactttagcgccctgaggaagcacaaaattattcacactgggaaaaagccttataagtgtgaagagtgcgggaaagcctttaacaatagttctactctgatgaaacataagattatccataccggcaagaagccctacaagtgtgaagagtgcggtaaagccttcaagcagagcagccacctgacccgccataaggccattcacacaggggaaaagccctacaagtgcgaagagtgtggtaaagccttcaatcacttttctgctctcagaaagcaccagatcatccatactggaaaaaaaccttataagtgcgaagaatgtgggaaagctttctcacagtcgtctaccctaagaaagcatgagattatccatacaggtgaaaagccgtacaagtgcgaagagtgtggtaaagcctttaagtggtcctcacacttgacccgccataaggtgatccacaccgaagagaaaccctataagtgcgaagagtgcggcaaagcctttaatcatttctcagctcttcggaagcacaagattattcacacaggcaagaagccttataagtgcgaggaatgcggcaaggcattcagtcagagtagtacccttcgaaaacacgagattatacatacaggggagaaaccctacaagtgcgaagagtgtggaaaagcattcaagtggtcttcaaagctgactgtccataaagttatccacaccgctgaaaaaccctgtaaatgcgaggaatgtggaaaggccttcaaacacttctccgctttgcgtaagcacaaaattattcatacgggcaagaaaccttacaagtgcgaagagtgcggcaaagctttcaataatagttctacccttcgaaaacacgaaatcatccacaccggtgaaaagagttacaaatgcgaagaatgtgctctccggaaacatgagatcatccacacagggaagaaaccgtacaaatgcgaggagtgcggaaaggcgttcaataattctagtacacttaggaaacataagatcatctatactggtaaaaaaccttacaagtgcgaggagtgtggtaaagccttcaaacagtccagccatctgactagacataaggccgtgcatacaggggagaaaccatacaaatgcggagaatgtggcaaggccttcaacaactcttccaccctgaaaaagcacaagcttatccacacgcgcgaaaagtcatataagtgcgaagagtgtggcaaggcattttctaactttagtgctctgagaaaacacaaaatcattcacaccggagaaaagccctacaaatgcgaggaatgcgaatgcggcaaagcattcaacaatagcagtactttaatgaaacacaaaatcatccacactggagaaaagccctacaagtgcgaggagtgtggtaaagggtttaacaatttcagcactcttatgaaacataagattatacacactggggaaaaaccttacaaatgtgaagaatgcggcaaagcattcaagcagtcctcgcacctgactaaacataaatccatccacactggcgaaaagccatataagtgtgaagagcgtgggaaggccttttcacacttttctcggctgactaaacataggataatacatacaggcaagaagccctataagtgcgaggagtgcggcgagaaaccctataagtgtgaggaatgtggaaaggcatttaatcagtcatctcatctgacacagcacaaaaccattcatacaggcggaaagacttacaagtgcgaggagtgcggcaaagcctttaaccacctgtccgccctgacaaagcataaaattatccataccggagaaaagccgtag

SEQ ID NO: 212447 - DNA, 3021 bp, synthetic construct
  misc_feature 1..3021: note = Description of Artificial Sequence: Synthetic coding sequence
  source 1..3021: mol_type = other DNA
atgagccggcggaagcagagcaacccccggcagatcaagcggagcttaggggatatggaggctcgcgaggaggttcagctggtcggagccagccacatggagcagaaggctaccgcacctgaggcaccaagtcccccttccgccgatgtcaacagcccccctccactcccacctcccaccagcccaggcgggccaaaggagctggaaggtcaggagcctgaacccaggccgaccgaggaggagcctggatctccatggtctgggcctgacgagctggagcctgttgtgcaggacggccagcgcaggattcgcgctcggctgagcttggctacaggtctgtcctgggggcccttccatggctctgtccagacacgggccagcagtcctagacaggccgagccctctcccgctcttacgctgctgttggtggacgaagcctgctggttgaggaccctgccccaagcacttacagaagcggaggcaaatacggaaatccaccggaaggatgatgctctttggtgccgcgtcactaaaccggtgcctgctggggggttactctcagtgcttctgactgctgagcctcactctacgccaggacaccccgtgaaaaaagagccagccgaacctacctgtccagccccagcgcacgacctacaactcctgccccagcaggccggaatggccagcattttagccaccgccgtaattaataaagatgtattcccttgtaaggattgcggtatctggtacagatctgagagaaatcttcaagcgcacctgctgtactattgcgcctcaaggcagggcacaggcagccccgcagccgcagctaccgacgagaaacccaaagaaacttatcccaatgaaagagtctgtccctttccacagtgtcgtaaaagctgcccgtccgcatcctcactcgagattcacatgcgcagccatagcggcgaacgaccctttgtttgtctgatatgtctgtctgcatttaccaccaaagcgaactgtgagagacaccttaaagtacacaccgataccctcagtggagtctgccactcatgtgggttcatcagcacaacccgcgacatactctattcccatttggtgactaatcatatggtatgtcagccaggtagcaaaggcgaaatttactcaccaggagctgggcacccagccaccaagctcccaccggactcacttggaagcttccagcagcaacatactgcattgcaggggcctctcgcaagtgcggatttggggttggcccctacccccagtcctgggctagaccgaaaagcactcgccgaagccaccaacggagaggctcgggcagaaccgctggcgcagaacggtgggtcctcagagccgccggcagccccccgcagcattaaggtcgaagccgtggaggagcctgaggcagcccctattttaggtcctggagaacctggaccacaagccccctctagaactccttcccctcgttctcccgcgccagcgcgtgtgaaggctgagctctctagtcctacccccggcagttctcctgttcccggcgagttgggactggcaggggccttgttcttgcctcagtatgtctttggccccgatgcagctccgcccgctagcgagattctcgctaagatgtccgaactggtacatagtaggctacagcaaggggccggcgccggtgccggtggggcccagacaggactgtttccaggggctccaaagggggctacgtgcttcgagtgcgagattaccttttccaatgtcaataattactacgtccataaacggctgtattgctcaggccgccgggcgccggaagacgcgccagcagcgagacgtccgaaagcgcctccgggcccggccagagcacctcctgggcagcccgcggagccagacgccccacgatccagtccaggccccggcgccagggaggagggggccgggggtgcagccacccctgaggatggggccggcggccgcggaagcgagggatcccagagtcctggctcaagcgtggacgatgcagaagatgacccctctcggacattgtgcgaagcctgtaacattcgcttttcacgacatgagacctacacagttcataaacggtattattgtgcctctcggcatgacccaccgcctcgacgccccgccgctccccccggacccccaggtccagccgcccccccagcccccagccctgcagcccccgtgcgtacacggcgaaggagaaagctttatgagctacacgccgccggtgcacccccgcccccaccccctggccacgctccagctccagaatcgccaaggccgggttctggctctggatcaggcccaggactggcacccgcaagaagccccggaccagcagccgatgggcccattgatctgtcaaagaaacctcgcaggcctctcccaggcgcacccgcccctgccctagcagattaccacgagtgcactgcctgtcgcgtgagctttcacagcctggaggcatacctcgcccacaagaaatacagctgtcccgctgcccccccccctggagcgctggggctccctgccgcggcctgcccttattgccctccaaatggccctgtgaggggggacctcctggagcatttccggctggcacacggcttactgttgggagctccccttgctggccctggtgtggaggcgcgaacacctgcagatcggggtccatctccggcaccagctcccgcggcaagtccccagcccgggtcgagaggaccacgggatggcctaggacccgaaccgcaggagcctccccccggaccacccccctctccagctgccgccccagaagcagtgcccccacctcccgccccgccatcgtattctgataagggtgtgcagacgccgtccaaaggcaccccagccccactcccaaacgggaatcaccgttactgtagactctgtaacattaaattttcctccctgtccacattcattgctcacaagaagtattattgcagctctcacgccgcggaacacgtcaagtag

SEQ ID NO: 212448 - DNA, 2649 bp, synthetic construct
  misc_feature 1..2649: note = Description of Artificial Sequence: Synthetic coding sequence
  source 1..2649: mol_type = other DNA
atgtactactgcagcggccggcagcgggaggccgcccccgtgagcgaagaaaacgaggatagcgctcaccagataagcagcctgtgcccattcccgcaatgcactaaaagcttttccaacgcccgtgccctggagatgcatctgaattcccactcgggggtgaagatggaggagttcctcccgccaggggctagcttgaaatgtacagtgtgttcatatacagcagactcggtgatcaatttccaccagcatcttttttctcacttgacccaagccgcttttaggtgtaatcactgccatttcggctttcagacccaaagagagttacttcaacatcaggaactgcatgtgccttctggaaagttaccaagggagtccgatatggagcattccccctcagcgaccgaagacagtctgcagcctgctacagaccttttaacccggtcggagctgccacagagccagaaagcaatgcagacgaaggacgcgagttccgacacggaattagacaagtgtgagaagaaaacacaacttttcctgaccaatcagcggcccgaaatccagccaacgacgaacaagcagtccttcagctataccaagattaagtccgagccaagttccccccgactcgccagttctcctgtgcaacccaacatcgggccgtcattccccgtaggcccgttccttagtcagttctcatttccccaggatattaccatggttccacaagccagcgaaatacttgccaaaatgtcagagctggttcatcgtagactgcggcacggtagctccagctatccacccgttatatattcgcccttgatgcctaagggcgcaacatgttttgaatgtaatatcacgttcaacaatctggataactacctagtgcataaaaagcattattgttcgtcaaggtggcagcagatggcaaagtctccggaatttccctccgtgagcgagaagatgcccgaggcactgtcccccaataccggccagacatctatcaacctgctgaacccggccgctcacagtgccgaccctgagaatccactactccaaacttcttgtatcaattcatcaactgtgctggatcttataggtcctaatggcaagggccacgacaaagatttctctacacaaaccaaaaagctctcaaccagctccaataacgatgataaaatcaacggaaagccggtggatgttaagaacccctcagtcccattggtcgacggtgaaagtgaccccaataagactacttgcgaggcatgtaacatcaccttcagtagacacgagacttacatggtgcacaaacagtactattgtgctacaagacatgacccccctctcaagagaagtgcctctaataaagtcccggccatgcagcggaccatgcgcacccggaaaaggaggaagatgtacgagatgtgcctgcctgaacaagaacagaggcccccgttggtgcagcaacgcttcttagacgtagcaaacctgaacaatccttgtaccagtactcaggagcctaccgagggcttgggcgaatgttaccatccccgctgcgacatcttccccgggatcgtgtccaaacatctagagacttcactcacaataaacaagtgcgtgcccgtcagcaagtgcgataccacccattcctctgtgagttgtctcgaaatggacgtgccgattgatctctccaaaaagtgcctctctcagtccgagaggaccacaacaagtccaaagcggttgcttgactatcacgaatgcaccgtgtgtaaaattagtttcaataaggtggaaaattaccttgcgcataagcaaaatttttgccctgtaacggctcatcagaggaacgacctgggacagctggacggcaaggtgttccccaatcctgaaagcgagcgaaacagcccagacgttagttacgaacggagcattattaagtgcgagaaaaatgggaaccttaagcaacccagccctaacggtaatctctttagttcacaccttgcaactcttcagggcctgaaagtcttttctgaggccgctcaactcattgctacaaaagaggaaaaccgccaccttttcctgccccagtgtctgtaccctggtgccattaagaaggctaagggcgcggaccagctgtcaccctattacggcattaagccttctgactatatttctgggtctctcgtgatccataacaccgacatcgagcagtccaggaacgccgaaaatgagtcccccaaaggccaagcatcctctaacggctgcgctgcactgaaaaaagatagcctgccactgctacccaagaaccgcggaatggtcattgtgaacggggggctcaaacaggacgaaaggccagccgccaatccacagcaggagaacataagtcaaaacccacagcacgaagatgatcataagtcccccagctggataagcgaaaatcctcttgccgctaatgaaaacgtttccccgggaataccctccgccgaggaacagcttagctcaattgctaagggagttaatggttccagccaggccccaaccagtggtaagtattgccgtttgtgcgacattcagtttaacaacctgagtaattttattactcacaagaagttctactgcagctctcatgcagccgagcacgtgaagtag

SEQ ID NO: 212449 - DNA, 3456 bp, synthetic construct
  misc_feature 1..3456: note = Description of Artificial Sequence: Synthetic coding sequence
  source 1..3456: mol_type = other DNA
atgagccggcggaagcagagcaagccccggcagatcaagcggcccctggaggacgctattgaagatgaagaagaggaatgtccttccgaggaaaccgacatcatttccaagggcgactttcctttagaagaaagttttagtactgagtttggtccagaaaacctcagctgcgaagaggtcgaatacttttgcaacaaaggcgatgatgagggaatccaggagactgcagagtcagatggcgacacccaatcagaaaaaccaggacagcctggagttgagaccgatgattgggatgggcccggcgaattagaagttttccagaaagatggagaaaggaaaattcagtctcgccaacagttgcccgtgggtaccacctggggtccctttccggggaagatggatctcaacaacaatagcctcaagacaaaagcacaggtgcctatggtgcttactgctggacccaagtggctgctcgatgtgacatggcagggagtggaagataacaaaaataattgcattgtttacagtaaaggaggccagctctggtgcaccactactaaagcaatctctgaaggcgaggagctgatagcgtttgtggtcgacttcgattctcgccttcaagcggcctcacagatgactcttactgaaggaatgtatccggcaaggctgcttgattccattcagctgttgccgcagcaggccgcaatggcttctattcttcctaccgcgatcgtgaataaggatattttcccgtgcaaatcctgtggcatctggtacagaagcgagagaaatctgcaggcccaccttatgtattattgtagcggccgccagagagaggccgcgcccgtctccgaggagaatgaggatagcgcccaccaaataagctctctctgtccctttccacaatgcactaaaagcttctcgaatgctagagcgctggagatgcatctaaatagtcattccggtgttaagatggaagagttcttgcctccgggagcaagcctcaaatgcacagtgtgtagttatacggcagatagcgttattaacttccaccagcatctcttctcacacttgactcaggcagcttttcggtgcaaccactgtcacttcgggttccagacccaaagagaactgctccaacatcaggagttgcacgtccctagtggtaagctgccgagggagtcagatatggaacatagcccctccgcaactgaggactcattgcagcccgccactgatctactgacaagatctgagttaccccagtcccagaaggccatgcaaacaaaagatgcctccagcgacaccgagctggacaagtgcgaaaaaaaaacccagctgtttctcaccaaccagcggcctgaaatccaacctactaccaacaagcaatcgtttagctacactaagataaagtcagaaccatcctctcccaggttggcttccagtccagtccaacccaacatcggtccgtctttccctgtgggccctttcctcagtcaattctcctttccacaggatatcacaatggttccacaagccagtgagattctggctaaaatgtcggagttagtacatcggcgactgcgccatggctcttcaagctacccaccagtcatttacagccccctaatgcccaaaggcgctacctgtttcgaatgtaacattacatttaataatctcgataattacctagttcataagaaacactactgcagctccagatggcagcagatggcaaagtctccggagttccccagcgtatcagaaaagatgcccgaagctctatcacccaacactgggcagacgtccatcaacctcctaaatcctgcagctcactccgctgaccccgaaaatcccctgctgcaaacatcctgcattaattcgagcaccgtcctggacctcattggtccgaatgggaagggccacgacaaggacttttcaactcaaactaaaaagcttagtacttccagcaataatgatgacaaaattaatgggaagcccgttgacgttaagaatcccagtgtcccattggtagacggggaaagcgatcccaataagacaacgtgtgaggcatgtaatattacattttctcgtcacgaaacctacatggtgcacaagcaatactactgcgcaacgcggcatgacccccccttgaagcgatccgctagcaacaaagtgcctgcgatgcagcggacaatgcggactcgtaagagacgcaaaatgtatgaaatgtgccttcccgaacaagagcagaggcctcctttggtgcaacagagattccttgatgtagctaatcttaacaatccatgcacctcaactcaggaacctaccgaaggactgggcgagtgctaccatcccaggtgtgacatcttccccggaatagtgagcaaacatcttgaaacctcgctgactatcaataagtgtgttcctgtgtccaagtgtgacaccacccattcttcagtttcttgtcttgaaatggacgtgcctattgacctctcaaaaaaatgtctgagtcaatctgaaaggaccacaacctcacccaagagattgctcgactatcacgagtgtaccgtgtgcaaaatttctttcaacaaagtcgagaactaccttgctcataagcagaatttttgtcccgtgacagcccatcagaggaacgatctggggcagttagacgggaaggtgttcccaaatcctgagtcagaaagaaatagtccagacgtgtcttacgagcggtctattatcaaatgtgaaaagaacgggaatttaaagcaaccctcaccgaacggcaacctgttcagcagtcacctagcaacactgcaaggtcttaaggtgttctcagaggctgctcagctcattgcaactaaagaagaaaatagacacttattccttccccagtgcctatatccaggtgccatcaagaaagccaaaggcgccgaccagctgtcaccttattatggaatcaagcccagcgattacatcagcgggtctctggtgatccacaacaccgacattgagcagtcccgtaacgccgagaacgaatcgccaaaagggcaagcaagctccaatggatgtgcagccctaaagaaggactccctgccgcttctgccgaaaaaccgtggcatggtgatcgttaacggagggttaaagcaggatgaacgaccagcagctaatcctcagcaagagaatatcagccagaatcctcagcatgaggatgaccataaaagcccatcctggatatccgagaatccgttagccgccaatgaaaacgtgtcaccagggatccctagcgccgaggagcagttgagttctatcgctaagggcgtgaacggaagctcacaggcccccacatctggcaagtattgtcgactgtgcgatattcaatttaataatctgtccaatttcattacccacaagaaattctactgcagcagccacgccgctgagcacgtgaagtag

SEQ ID NO: 212450 - DNA, 3060 bp, synthetic construct
  misc_feature 1..3060: note = Description of Artificial Sequence: Synthetic coding sequence
  source 1..3060: mol_type = other DNA
atggacctgaacaacaacagcctgaagaccaaggcccaggtgcccatggttctgacagcggggccgaagtggctgctagacgttacctggcagggcgtggaagataacaagaataactgcatcgtgtactccaaaggcggtcagctttggtgcacaaccacgaaagctatatcagagggtgaggagctcatagcatttgtggttgacttcgactcccgacttcaggcagcttcccagatgacactgacagaggggatgtatccagcccgcctgctcgattctattcagctactccctcagcaggccgctatggcctctattcttcccaccgccatcgttaataaagacattttcccatgtaaatcttgtggaatctggtaccgatcagagcgcaatctccaggcgcacttgatgtattactgttctgggaggcagcgggaggctgctccggtttcagaggaaaacgaggattccgcccatcagattagctccttgtgcccctttccacagtgcaccaagagctttagtaatgcacgggccctggaaatgcacctgaattcacatagtggagtgaaaatggaggagttcctgcctccgggcgcctcactgaagtgcacagtctgcagttatacagctgattccgtgatcaattttcatcaacatctgttcagtcacttgacccaagcagcctttcggtgcaaccactgccattttggcttccaaactcaacgggaacttctgcaacatcaagagcttcatgtgccgagtgggaagcttcctcgcgagtcagatatggagcatagtccaagcgccacggaagacagcctccagccagcgactgacctgttgactcggagcgaactgccacaaagtcagaaagcgatgcaaaccaaagatgccagctcagatacggaactggacaagtgcgagaagaagacccaactattcttaaccaaccagcgccccgagatccagccgacaactaacaagcagtctttctcttacaccaaaatcaagtccgaaccatcttccccgaggctggcatcttctcccgtgcagccaaacattggcccgagctttcccgtcgggcctttcttaagtcaattctccttcccccaggacatcactatggtgccccaggcaagcgaaattctcgccaagatgtctgaattggtgcataggcgtctgcggcacggtagtagctcgtacccccccgtcatctatagcccactgatgcccaagggggcaacctgttttgagtgtaatatcactttcaataatctggacaactatctggtccacaagaagcactactgcagctcacggtggcaacagatggcaaagagccctgaatttcccagtgtcagcgagaagatgcctgaagctttgagcccgaacaccggccagacctcaattaatttgctgaatcccgcggcacattctgccgaccctgagaatcctctcctgcagacgtcctgcattaactcatctaccgttttagatctgattgggccgaacggaaaaggccacgataaagacttttcaacccagacgaaaaaattatccacatcgtcgaacaacgacgacaaaattaacggcaagccagtcgacgttaagaatcctagtgtgccgttggtagacggtgaaagcgatccaaacaagacgacctgcgaggcgtgtaacattacattcagcaggcacgagacgtatatggtgcataaacagtactattgcgcaaccaggcacgaccccccactgaaaaggtccgcgtctaataaggtccctgctatgcagcggaccatgcggacgcggaagaggaggaagatgtacgagatgtgcctcccagaacaggagcagcgacccccgcttgtgcagcagcggtttctcgatgttgccaatctaaacaacccctgtacatccacccaggagcctaccgagggacttggggagtgttaccacccgcgctgcgacatattccctggtattgtgtctaagcacctcgagacgagcctgaccattaataaatgtgtcccggtgtctaagtgcgatacaacacattccagcgtgtcttgtttagagatggacgtcccaatcgacttaagcaagaagtgtttgtcccagagtgagcgaacaaccacaagtccgaagaggctgctagactatcacgaatgtactgtctgcaaaataagctttaacaaggtggaaaactacttggcacataagcagaatttctgcccggttaccgcccatcagaggaacgacctgggccagctggatggcaaggtttttcccaatcctgaatccgagcgaaactctcccgatgtttcatacgagagatcaatcattaagtgtgaaaagaacggcaatcttaaacagccttctcctaacggaaatttatttagctcacatctggcgacgttacagggcttgaaagtgttcagcgaggctgcacagctgatcgccactaaggaagagaacagacacctgtttcttccacaatgcttgtacccaggcgctataaaaaaggcaaaaggcgctgatcagctgtccccatactacggtataaagcccagcgattatatctctggatcgcttgtcatccataatacagacattgagcagagccggaacgctgagaacgagagccccaaaggtcaggcttcaagcaacggctgtgccgccctgaagaaggactctctgcctctattacctaaaaaccgcggtatggtgatcgtcaacggaggcctgaaacaggacgaaaggcccgcagctaacccccagcaggagaacataagccagaatccacagcatgaggacgatcataaatcccctagctggatcagtgagaaccctctggccgctaacgagaacgtcagccccggtattccctccgccgaggagcagttgagttctatcgcaaagggtgtgaatggctcatctcaggcaccaacctccggaaaatactgcaggctgtgcgacatccagtttaataatttgtccaacttcatcacacataaaaaattctattgctcatcacatgcagcggagcatgttaagtag

SEQ ID NO: 212451 - DNA, 3060 bp, synthetic construct
  misc_feature 1..3060: note = Description of Artificial Sequence: Synthetic coding sequence
  source 1..3060: mol_type = other DNA
atggacctgaacaacaacagcctgaagaccaaggcccaggtgcccatggttcttacagctgggcccaaatggctcttggacgtaacctggcagggggtcgaagacaacaagaacaattgtattgtatactccaaaggaggacagttatggtgcactaccacaaaagcaatttccgagggagaggagctaattgcatttgtggtggacttcgacagccggctgcaagccgcctcccaaatgaccctgaccgagggcatgtacccagctagactgctggatagcatacagctgttaccccagcaggcagccatggctagcatactgcctacagcgatcgtcaataaggacatctttccctgcaaatcttgtggcatatggtaccgatctgaaaggaatcttcaagctcaccttatgtactactgcagtggaaggcagcgggaggccgcacccgtcagtgaagagaacgaggatagcgcgcaccagatctcaagtttgtgtccattcccccaatgcaccaagagcttttccaacgcgcgggccttggagatgcatttgaactcccactcaggcgtgaagatggaagagtttctgccccccggcgcctctctcaagtgtacagtgtgttcctacaccgcagattccgtgatcaacttccatcagcacttgttttcacacctgacccaggcagcttttcggtgcaatcattgccatttcggttttcagactcagcgggaactcctccagcatcaggaactgcacgtgccttctggaaagctgccgagggaaagcgatatggagcattcaccctccgccacagaagattctctccagccagccacagacctgctgaccaggagtgaattacctcagtcgcaaaaggctatgcaaaccaaagatgcctcctctgacaccgagctggacaagtgtgagaagaagacacaactatttttgactaatcagcgaccagagattcagcctacaaccaacaaacagtctttcagctacacaaaaattaagagcgaaccgtctagcccccgacttgcttccagccctgtgcagcccaacattggcccttcatttccagtcggcccattcctctctcagtttagcttcccacaggacatcactatggtgcctcaggctagcgagatactggccaagatgtctgagctagtccataggcgcctgagacacggatcgagctcctaccctcccgtcatatattcccccctgatgccaaagggagctacatgcttcgaatgcaacattacctttaataatctggacaattacctggtgcacaagaagcattactgttcctctcgctggcagcagatggctaaaagtcccgaatttccctcggtgagcgaaaaaatgcctgaagctctcagccccaatactggccagacgtcaatcaatttgctgaatcctgcagcacattcagccgaccccgagaatcctctccttcagacttcatgtataaacagttctactgtcttagatcttatcggtcctaacggaaagggccacgacaaggatttttccacgcagacgaagaaactgtcaacctccagcaataatgacgataaaatcaatggcaaaccggtggacgtgaagaacccgagcgttcctctcgtagacggagagtctgatcctaataaaacaacttgcgaggcctgtaacattacttttagtcggcatgaaacatacatggtccacaagcagtactattgtgctactaggcatgaccctcccctcaagaggtcagcgtccaataaggtgcccgccatgcagagaactatgcgcacccgcaaaagaagaaaaatgtatgagatgtgcctgccagagcaggagcaaagaccaccattagtacagcagcgctttctcgacgtggccaatctcaataacccatgtacgagcacacaggagcccacagaaggactcggagagtgttatcacccacgatgcgatatcttcccaggcattgtcagcaagcacctggagacctccctgactatcaacaagtgcgttccagtgtctaaatgtgacaccacccacagctctgttagttgccttgaaatggatgtaccaattgatctcagcaaaaagtgtctgtcacaatcagagcggacgaccacctcccctaagcgactccttgattaccatgagtgtacagtttgcaagatatcattcaataaggtggagaattatttggctcacaaacagaacttctgcccggtcactgctcaccagagaaacgaccttggtcagctcgacgggaaagtgttccctaaccctgagtcagagaggaacagccctgacgtatcatacgagaggtctataattaaatgcgagaagaatggaaatctgaagcagccgtcccctaatggcaatctgttctccagtcacctcgcgaccctgcaaggactaaaagtgttcagtgaggccgcccagctcatcgcaaccaaggaggagaaccgacatctgttcttgccccaatgcctgtacccaggcgcaattaaaaaagcaaagggagcagaccagctgtctccttactacggcatcaagccttccgattacatctcaggatccctggtgattcataacaccgacatcgagcagagccgcaacgccgagaacgagagtcccaaaggccaggctagctccaatggatgtgcggctctcaagaaggacagccttccccttttaccaaagaacaggggtatggtaatcgtcaatggaggtttgaagcaggatgagcgtccagccgcaaatcctcagcaggaaaatatctcccagaacccacagcacgaagacgaccataaatcccccagctggataagcgaaaaccctctagccgccaacgagaatgtttcccccggcatcccctccgcagaggaacaactctcttcgatcgccaaaggagtgaacggttcctcacaggcccccacctctggcaaatactgtcgcctgtgcgacattcagttcaacaatctctcgaatttcattacccacaagaagttctactgctcttcccatgccgcggaacatgtgaagtag

SEQ ID NO: 212452 - DNA, 2418 bp, synthetic construct
  misc_feature 1..2418: note = Description of Artificial Sequence: Synthetic coding sequence
  source 1..2418: mol_type = other DNA
atggacgaggacggcctggagctgcagcaggagcccaacagcttcttcgacgctactggcgctgatggtacccacatggacggggaccagattgtggttgaagttcaggagacagtattcgtctctgacgtcgtggatagcgacatcaccgtgcataatttcgtacccgacgatcccgatagcgtggtcatccaggacgtgattgaagacgtcgtgatcgaggacgtccaatgcccagacattatggaggaggcagacgtgtccgagacagttattattccggagcaagttctagatagtgacgtcacagaggaggttagtctggcccactgtacagtcccagatgacgtgctggcctcggatatcactagtgccagcatgagcatgcctgagcacgtcctgactggggattccattcatgtgagcgacgtgggccacgtcgggcatgttggccatgttgagcacgtggtgcatgattcagtagtcgaagcagagattgttacggaccccctgactaccgacgtggtcagcgaagaggtcttggtggcggactgtgcctcggaggcggtgatagacgctaatggaattcccgtggaccagcaggacgatgataagggtaactgcgaggactatctcatgatcagtttggatgacgccgggaaaattgagcacgacgggtcttcaggaatgactatggatacagaatcagaaatcgacccttgcaaggtcgacggcacatgtcctgaggtgattaaggtgtacatctttaaggccgatcctggcgaagacgacctggggggtacagtggatatcgtggagagtgagcccgagaacgaccatggggtggaattgttggaccagaattcttcaatccgggtgccacgcgagaagatggtctacatgactgtaaacgatagtcagcccgaagacgaggatttgaacgtcgctgagattgccgacgaggtgtacatggaggtgattgtgggcgaagaggacgccgctgccgccgcagccgctgccgccgtccacgaacagcaaatggacgataacgaaattaaaacctttatgcccatagcctgggcagccgcatatggaaacaactcggatgggatagaaaatcggaatggaactgctagtgctctgcttcatattgatgaatccgctggacttggtcgtctggctaagcagaagcccaaaaaacgacggaggccggatagcaggcagtatcagacagctatcattatcggcccagatgggcaccccttaacggtgtacccttgcatgatctgcggcaagaagtttaaaagcagaggctttctgaagcgccacatgaagaatcacccggagcatttggctaaaaaaaaataccgttgtacggattgcgattacactactaacaagaagatctctctgcataatcacctggagtcacacaagttaacttctaaagcagagaaggccatagaatgcgacgagtgcggcaagcactttagccatgcaggcgccttatttactcacaagatggttcataaagagaagggtgccaacaagatgcacaaatgcaagttctgtgagtacgaaactgcggaacaaggcctcctgaacaggcacctgttagccgttcatagcaagaacttcccccacatctgcgtggagtgcggaaagggctttagacaccctagcgagctgaagaaacacatgaggatccacaccggcgagaagccttatcagtgccagtactgcgagtatagatccgctgattcctccaatctcaaaactcacgtgaaaacaaaacacagcaaggagatgcctttcaagtgtgatatatgcctactgactttttccgataccaaggaggtccagcagcatgctctgatacaccaggaaagtaaaacgcaccagtgtctgcactgcgatcataagagcagcaactccagtgaccttaagcgtcatatcatttccgtgcacacaaaggattacccccataagtgtgacatgtgcgacaagggattccaccgcccgtccgagctgaaaaaacatgtagctgcccacaaaggaaaaaaaatgcaccagtgtcggcattgtgatttcaagatcgctgacccatttgtgctgtccagacacatcttgtccgtgcatacgaaggacctccccttccgatgcaagcggtgtagaaaaggattcaggcagcagtcggagctgaagaaacacatgaagacgcactctggccgtaaagtgtaccagtgtgagtattgcgaatactcaacaacagacgcctcaggcttcaaacggcacgtgatctcaatccacaccaaagattaccctcataggtgtgaatactgcaagaaagggttcagacggcccagtgaaaagaaccaacacattatgcgccaccacaaggaggtggggctgccatag

SEQ ID NO: 212453 - DNA, 2268 bp, synthetic construct
  misc_feature 1..2268: note = Description of Artificial Sequence: Synthetic coding sequence
  source 1..2268: mol_type = other DNA
atggacgaggacggcctggagctgcagcaggagcccaacagcttcttcgatgcgactggggcagacggcacacatatggatggagatcagatcgttgtagaggtgcaagagaccgtcttcgtgagcgatgtagtcgacagtgatatcactgtgcataacttcgtgcccgatgaccccgactccgtagtgatacaagacgtcatagaggatgtggtgattgaagacgtgcagtgtcctgacatcatggaggaagccgacgtgagcgaaaccgtaatcatccctgagcaggtgttagactcagatgtaacggaagaagtctctttggcccactgtacggtgcccgatgacgtactcgcgtctgacatcaccagtgccagcatgtcaatgcccgaacatgttctcactggtgatagtatacacgtgtcagacgtaggtcacgtcggccatgtgggacatgtggaacatgtggtgcacgatagtgtcgtggaggcagaaattgttacagatcctttgaccacagatgtggtcagcgaagaggtgctcgtggcagattgcgcgtctgaggccgtcattgatgctaatggtatccccgtggaccagcaggatgacgacaaggggaattgcgaggactacctgatgatctcctgtgggaccgtcgacattgtggaatccgaaccagaaaacgatcatggagtggagttattagatcaaaactcaagcatcagggtcccacgggagaagatggtctatatgacagtgaacgactcccagccggaggatgaggacctgaacgttgccgaaattgccgatgaagtctacatggaggtgattgtgggcgaggaggatgccgctgcagcagctgcagccgcagctgtgcacgaacagcagatggacgacaatgagatcaagaccttcatgccaatcgcttgggccgctgcttatggcaataactctgacgggatcgagaaccggaacgggacggcatccgcattactgcatatcgatgaatctgcaggcctcgggcgattggcaaagcagaagccaaagaaacggaggcggccagactcccgccagtaccagactgctattatcatcggacccgacggacaccctctaactgtgtacccctgcatgatttgtggcaaaaaatttaagagcaggggtttcctgaagcgccacatgaagaatcatcctgagcatctggccaagaagaaataccggtgcaccgactgtgattacacaacgaataagaagatcagcctacataaccacttggagagccataaactcacatccaaggccgagaaagccattgagtgtgacgaatgcggcaaacatttctcacacgccggggctctgttcacacacaaaatggtgcataaagagaaaggagcgaacaaaatgcacaaatgcaagttctgcgaatatgaaacggctgagcagggattgctgaatcggcacctgctcgctgttcacagtaaaaattttccacatatatgcgtagagtgtggcaagggcttccgtcacccatctgagctgaaaaagcacatgcgtatccacaccggcgaaaagccttaccagtgtcaatattgcgagtatcgctcagcagacagcagcaatcttaaaactcatgtgaagactaagcacagcaaagaaatgccctttaagtgtgacatttgcttgctcaccttttccgacacgaaagaagttcagcagcacgccctgatccaccaggaaagtaaaactcaccaatgcctgcactgcgaccacaagtcgagcaactcttccgacctgaagcgacacatcatatctgtgcacaccaaagattatccacacaagtgtgatatgtgcgacaaaggattccatagacctagtgaactgaaaaaacatgtagccgcccataaaggaaagaagatgcaccaatgtagacactgtgatttcaagatagccgacccattcgtgctaagccggcacattctgtcggtccacaccaaagacctgccctttagatgtaagagatgtagaaaaggattccggcagcagtcggagttgaaaaagcacatgaaaacacattcaggccggaaagtttatcagtgtgaatactgtgagtacagcacgacagatgcatctggctttaaaaggcatgtcatttctattcatactaaagactatcctcaccgatgcgaatactgcaagaaaggatttcgcaggccctcagagaaaaatcagcatatcatgcggcaccacaaggaagtggggttgccttag

SEQ ID NO: 212454 - DNA, 2418 bp, synthetic construct
  misc_feature 1..2418: note = Description of Artificial Sequence: Synthetic coding sequence
  source 1..2418: mol_type = other DNA
atggacgaggacggcctggagctgcagcaggagcccaacagcttcttcgacgccacaggggcggacggaactcacatggacggggaccagattgtggtagaggtgcaagaaacagttttcgtctctgatgtggtggatagcgatattacagttcataacttcgttcctgacgatccagactctgttgtgatccaggacgtgatcgaggacgtggtgattgaggacgtccaatgtcctgatataatggaagaggccgacgtctccgaaactgttataatcccagaacaggtcctggattccgacgtcactgaagaagtaagcctggcgcactgtacagttccagatgacgtgctggcctccgacattacctcagctagcatgtcaatgccagaacatgttctgactggggacagtatccatgtatcagacgtgggccatgtaggccacgttgggcacgtggagcacgtagtccatgattccgtcgtcgaggcagagatagtcacggatccgttgacgaccgatgtcgtgtccgaggaggtcctggtagctgactgtgcttctgaagccgtgatcgacgctaacggtatacctgtggaccagcaggatgacgataaaggcaattgtgaggattaccttatgatatcacttgatgacgccggcaagattgaacacgacgggagcagcgggatgaccatggataccgaatccgaaattgatccttgtaaagtggacggtacgtgcccagaggtcattaaagtgtacattttcaaagctgaccctggtgaagatgacctgggagggactgtggatatcgtggagtccgagcctgaaaacgaccatggcgtggagctgttggatcagaattctagcatacgcgtcccccgggagaagatggtgtatatgactgttaatgattcccagccagaagatgaagacctgaatgttgccgagatagccgacgaggtgtatatggaggttatagttggggaggaggatgccgccgccgcagcagctgccgccgccgtacatgaacagcagatggatgacaatgaaattaagaccttcatgccaatcgcctgggccgcagcttacggcaacaacagcgacggcatcgagaatagaaatggcacagcgtcagcactgctgcatatcgatgagtctgcgggccttggacggcttgccaaacagaagcctaagaagcgtcggaggcctgactctagacagtatcagaccgccattatcatcggccctgatgggcatccattgacagtttacccttgtatgatctgtggcaagaagttcaaaagcagagggtttttgaagcgtcacatgaagaaccaccccgagcacctagccaaaaaaaaatatcggtgcaccgactgcgactacacaacaaataaaaaaatttcgcttcataaccacctggagtcccataagctcaccagtaaagccgagaaggcaatagaatgcgacgagtgcggaaagcatttttcacacgccggagccctgtttacccacaagatggtccacaaagaaaaaggcgctaataaaatgcacaaatgtaaattttgtgagtacgagaccgccgaacaggggctactgaatagacatctcctggctgtacattctaaaaattttccacacatctgcgttgagtgcgggaaaggctttcggcacccaagtgagttaaaaaagcacatgagaattcacacgggggagaagccatatcaatgccaatattgtgagtatcggtcagctgatagcagcaacctcaaaacccacgtaaaaaccaaacactcgaaggaaatgcccttcaaatgtgacatctgcctcctgacattcagtgataccaaagaggtgcagcaacatgcgctgatacaccaggaatcaaagacccatcagtgcttgcactgcgaccacaagagctctaactcctctgacctgaaaagacatataatatcggtacataccaaggactaccctcacaagtgtgacatgtgtgacaaaggcttccacagacccagtgagttaaagaagcacgttgctgcacacaaaggcaagaaaatgcaccagtgtaggcattgcgatttcaagattgccgacccattcgtgctgagccggcatatactgagcgttcacaccaaggaccttccattccggtgtaagcgatgcaggaaaggtttcagacagcagagcgagctgaaaaaacacatgaaaacacattctggaaggaaggtttatcagtgcgaatactgtgaatatagtactactgatgcatccggattcaaacggcacgtaatctccattcacactaaggactacccccaccgatgcgaatactgcaagaagggatttagaaggccctctgaaaaaaatcagcacatcatgcggcaccacaaggaagtcggtcttccctag

SEQ ID NO: 212455 - DNA, 2418 bp, synthetic construct
  misc_feature 1..2418: note = Description of Artificial Sequence: Synthetic coding sequence
  source 1..2418: mol_type = other DNA
atggacgaggacggcctggagctgcagcaggagcccaacagcttcttcgatgcaactggagccgacggaacacacatggatggcgaccagatagtggtagaagtacaggaaaccgtgttcgtctcagatgtcgtggactctgatattacggtgcacaatttcgtgcctgacgaccctgactctgttgtgattcaggacgttatagaagatgtggtgattgaggacgtccaatgtccagacatcatggaggaagccgacgtgtcagagacggtcattatcccagaacaggtgctggacagtgatgttaccgaggaggtcagcttagcacactgcacagtacctgacgacgtgctggccagcgacatcacctccgccagcatgtcaatgcccgaacatgttctgaccggcgactcaattcacgtttcagatgtggggcacgttggccacgtagggcacgttgagcatgttgtgcacgacagcgtggtggaagctgagatcgtgactgatcctcttaccactgatgtggtctcagaggaagtattggtggctgactgcgcctccgaggccgtcatcgatgcaaacggaatcccggtcgaccaacaagacgatgataagggcaactgtgaggattatttgatgatcagcctggatgatgccgggaaaattgagcacgacgggtcatccggaatgactatggacaccgaatcggagatcgatccttgcaaagttgacggtacatgccccgaggttatcaaagtgtatatctttaaagcagatccaggtgaggacgatctcggaggtaccgtcgatatagtggagagtgagccagaaaatgatcacggcgtagagctacttgaccagaactcctccattagagttcctagagagaagatggtgtatatgacagtgaatgactctcagccggaagatgaagaccttaacgtcgctgagattgccgatgaagtctacatggaggtcatagtcggggaagaggatgccgcagccgctgccgccgccgctgcagtgcatgaacaacagatggacgacaacgaaattaaaaccttcatgcctatcgcctgggccgcagcatatgggaacaactctgacggaattgagaaccgcaatgggactgcctccgctcttcttcatatcgatgaatcagctggcctcgggaggctggctaagcagaagccaaagaagaggcgacgaccagattctcggcagtatcagaccgccatcatcattggccctgacgggcatcctttaactgtttatccatgcatgatttgcggcaaaaagttcaagagtcgggggttcttgaagagacatatgaagaatcatcctgagcatcttgctaagaaaaaatacagatgtacggattgcgactacaccacaaacaagaagatatctctgcacaaccacctggagtctcacaagctgacctccaaggcagagaaggcgattgaatgcgacgaatgtggaaaacacttttcccatgccggggcactattcacccacaagatggtgcacaaagagaagggcgctaacaagatgcacaaatgcaaattttgcgaatatgaaactgctgagcaggggctgctaaaccggcacctactggccgtacactcgaagaacttcccacacatttgtgtggaatgcgggaaaggttttcggcaccctagcgaactcaagaaacatatgagaattcacactggggaaaagccctatcaatgccagtattgtgaataccgttcagccgattcttccaacctgaaaacacacgtgaaaacaaagcattcgaaggaaatgccattcaaatgtgacatatgcttgttgaccttcagcgatactaaggaggttcaacagcacgctctgattcatcaggagtcaaaaactcatcagtgcttacattgtgatcacaagtctagtaattcttcagatttaaaacggcacattatctctgtgcacacaaaagactatccccacaaatgtgacatgtgtgataaaggcttccatcgcccaagcgaactgaagaagcacgtggccgcacataaaggaaagaaaatgcaccagtgtcggcattgcgacttcaaaattgccgatccttttgtgttatccagacatatactgtccgtccacaccaaagacttgccatttcgatgcaagagatgcagaaagggattccggcagcagtcggaattgaaaaaacacatgaaaacccattcaggccggaaagtgtaccagtgtgaatactgtgaatactccaccacagacgcgagcggcttcaagcggcacgttataagcattcatactaaggattaccctcaccgttgtgagtactgcaaaaaaggttttcggcgcccttctgagaaaaaccagcacattatgaggcaccataaggaggtaggattaccttag

SEQ ID NO: 212456 - DNA, 99 bp, synthetic construct
  misc_feature 1..99: note = Description of Artificial Sequence: Synthetic coding sequence
  source 1..99: mol_type = other DNA
atggacgaggacggcctggagctgcagcaggagcccaacagcttctttgatgctacaggggctgatgggacgcatatggatggcgaccagattgtttag

SEQ ID NO: 212457 - DNA, 408 bp, synthetic construct
  misc_feature 1..408: note = Description of Artificial Sequence: Synthetic coding sequence
  source 1..408: mol_type = other DNA
atggacgaggacggcctggagctgcagcaggagcccaacagcttcttcgacgccacgggggccgacgggacccatatggatggcgatcagattgtcgttgaagtgcaggaaaccgttttcgtaagtgatgttgtggatagtgacatcacggttcacaatttcgtgcctgatgatccagatagtgtcgttattcaggatgtgatcgaagatgtggtgatcgaagacgttcagtgtccggacatcatggaagaagcggatgtatctgagactgtgattattccagagcaggtgctcgacagcgatgtcactgaagaagtgtctctggcccattgcacagtgccagacgatgtcctggcaagcgatatcacatcagcctcgatgtccatgcctgaacacgtgttgacctag

SEQ ID NO: 212458 - DNA, 1584 bp, synthetic construct
  misc_feature 1..1584: note = Description of Artificial Sequence: Synthetic coding sequence
  source 1..1584: mol_type = other DNA
atggacaccgagagcgagatcgacccctgcaaggtggacggcacctgtcccgaggttatcaaagtgtatatcttcaaagcagacccaggcgaagacgatttagggggaacagtggatatcgtggagtccgagccagagaatgatcatggcgtcgaattgctggatcagaattcgtccatccgggtgccacgggagaaaatggtctacatgacagtcaacgacagccagccggaggacgaggatctgaacgtggcagaaattgctgatgaggtgtacatggaagtcattgtgggggaggaggacgcagccgccgccgcagccgccgcagcggttcacgagcagcagatggacgacaacgagataaagacattcatgcctattgcgtgggctgccgcatatgctattattatcggtcccgacggccatcccttgaccgtgtatccctgcatgatctgcgggaagaagttcaagagtcgcggattcctgaagcgccacatgaagaaccaccctgagcacctggcaaaaaagaaataccgatgcaccgattgtgattacacaacaaacaaaaagatctccctccataaccatttggagtcacataagctaacaagcaaagccgagaaggctatcgagtgtgatgaatgcggaaagcatttttcccacgccggtgccctgttcacccacaaaatggtgcacaaggaaaaaggcgccaacaaaatgcacaaatgcaagttctgtgagtacgagacagctgaacaggggctgttgaatcgacatctcctggctgtccactcaaagaattttccacatatttgcgtagaatgtggaaaagggttccgtcatccaagtgaacttaaaaaacatatgagaattcatacaggggaaaagccctaccagtgtcagtactgtgagtaccgctccgccgacagcagcaacctgaaaactcacgtgaaaacaaaacatagtaaggaaatgccctttaaatgcgatatttgcctgctcaccttcagtgacacaaaggaggtccagcaacacgcactcatacatcaagaaagcaaaactcaccagtgcctccattgcgaccataagagcagcaatagctctgacctgaagcgccacattataagcgtgcacactaaagattatccacacaagtgtgatatgtgtgataaagggtttcaccgaccgagcgaattgaaaaagcatgtcgccgcccacaaggggaaaaagatgcatcaatgccgacattgcgattttaagattgccgacccctttgtgctgtcccgccacattctctccgttcacactaaggatctgcccttccgctgcaagagatgccgcaaaggatttcgacagcagagtgaactcaaaaaacacatgaagacacacagcggccgcaaggtgtaccagtgtgaatattgcgaatatagcactaccgacgcatcaggcttcaagagacatgtcatatcaatccacaccaaggactaccctcatcggtgtgagtactgcaaaaagggcttcaggagacctagtgagaagaaccaacacatcatgcgccaccacaaggaggtgggactcccgtag

SEQ ID NO: 212459 - DNA, 789 bp, synthetic construct
  misc_feature 1..789: note = Description of Artificial Sequence: Synthetic coding sequence
  source 1..789: mol_type = other DNA
atggacgaggacggcctggagctgcagcaggagcccaacagcttctttgatgctactggcgctgacggcacccacatggatggcgatcagattgttgtggaggtgcaggagaccgtatttgtctccgacgtcgtggatagtgatatcacagtgcacaattttgtcccggatgaccccgacagcgtcgtaatccaggacgtgattgaggatgtggtgattgaagatgtgcagtgccccgacatcatggaagaggccgatgtgagcgagaccgttatcataccggagcaggttctggattcggacgttaccgaggaggttagtctggctcactgtacagtgccagatgacgtcctggcctcagatattacatctgccagtatgagcatgcccgaacacgtcctgaccggcgacagcatccacgtgagcgacgtagggcacgtgggacatgttgggcatgtcgagcatgttgtgcatgacagtgtcgttgaggccgagatcgtgacagaccctctgaccactgatgtcgtgagtgaggaagtactggtcgccgactgtgcctcggaggctgtcatcgatgccaacggaattcctgtggatcagcaagacgacgataaaggaaactgtgaggactatctaatgatttcctgcaataattccgacggaatcgaaaatagaaacggcaccgccagcgcactgctccacattgacgagtctgcagggttaggccggcttgccaaacagaagcctaagaaacggaggcggcctgacagtcgccagtatcagacgtag

SEQ ID NO: 212460 - DNA, 1731 bp, synthetic construct
  misc_feature 1..1731: note = Description of Artificial Sequence: Synthetic coding sequence
  source 1..1731: mol_type = other DNA
atgaccatggacaccgagagcgagatcgacccctgcaaggtggacggaacatgccccgaagttattaaagtgtatatttttaaggccgaccctggtgaggatgaccttggtggcacagtcgacatcgttgaaagtgagcccgagaacgatcacggggtggaactcctcgatcagaactcttccattagggtgccaagggagaagatggtatatatgacagttaacgactctcagccggaagatgaagatctcaatgtcgcagaaattgctgacgaggtatatatggaagtcattgtcggagaggaagacgctgctgcagcagccgctgcagcagcggttcacgaacagcagatggatgataatgagatcaagacattcatgccgattgcttgggctgccgcgtatggtaacaatagtgatggaatcgagaacaggaacgggaccgctagcgccctccttcacatcgatgagtccgcaggacttggacggctagccaaacagaaaccaaaaaagcgccggaggcctgattcacgccagtatcagactgcaataattatagggccagatgggcaccccctaacagtgtacccttgcatgatctgtgggaagaagtttaagagccgaggctttctgaagcgccacatgaaaaatcacccagagcatcttgcaaagaagaagtaccgctgcacagattgtgattacactaccaataagaaaatttccttgcacaaccatttagaatcccataaactgaccagcaaggctgaaaaggccatcgagtgcgacgagtgtgggaaacatttctctcatgccggagcacttttcacccataagatggtgcacaaagagaaaggcgcaaataagatgcataaatgcaagttctgtgagtacgagactgcggaacaggggctgctaaataggcatctgcttgccgtccattcgaaaaatttccctcatatctgcgtagagtgcggaaaaggattcaggcatccatccgagcttaaaaaacatatgcggatacacaccggagaaaaaccctatcagtgtcagtactgcgagtatcgctctgctgattcttcaaatctcaagactcacgtgaaaaccaaacacagtaaggaaatgcctttcaagtgtgatatctgccttctgaccttttccgatacaaaggaggttcaacagcacgccctgatccatcaggaaagtaagacccatcagtgtctccactgcgaccataaatcctcgaactccagtgacctgaagcgacacatcatttctgtgcacaccaaagactatcctcataagtgcgacatgtgtgacaaaggcttccatagacccagtgagctgaaaaagcacgttgcggcccacaaagggaagaaaatgcaccagtgtaggcattgcgatttcaagatagccgacccatttgtgctgagtcgtcacatcctctctgtgcacactaaagatctgcccttccgatgcaaacggtgcagaaaggggtttcgccagcaaagcgaacttaaaaaacacatgaagacacattccgggcggaaggtgtaccaatgtgagtattgcgagtattctaccaccgatgcttccgggttcaaacgccatgtcattagtattcatactaaggactaccctcatcgatgtgaatactgcaaaaaggggttccggcggcctagcgaaaaaaaccaacacatcatgcggcaccacaaggaagtggggctgccctag

SEQ ID NO: 212461 - DNA, 2535 bp, synthetic construct
  misc_feature 1..2535: note = Description of Artificial Sequence: Synthetic coding sequence
  source 1..2535: mol_type = other DNA
atggacgaggacggcctggagctgcagcaggagcccaacagcttcttcgacgccaccgacagagttagcttttgccaccctggatggagcactgtcgccccatctggctcaacagcaacaagcgcctctcaggcacaggtcatatgctcagcatctcgggtgactggcgctaccggagcggatggcactcacatggacggcgaccagatagttgtggaagtgcaggagactgtgttcgttagcgacgttgtcgatagtgatattactgtccataactttgtgccagacgaccccgactcggtagttatccaggacgttatcgaagacgtggtgattgaggacgtgcaatgtccagatatcatggaagaagctgacgtgtccgaaacggtgatcatccctgagcaggtgctggattccgatgtgactgaagaggtcagcctcgcccattgtaccgtgcccgacgatgtcctggcgagcgacatcacttcggcctccatgtcaatgcccgaacacgtacttactggcgacagcattcacgtttccgatgtaggccatgtggggcacgtcggtcacgtggaacacgtcgtgcatgactccgtggttgaggcagagattgttaccgatcctctcaccaccgacgtggtctctgaagaggtccttgtagctgactgcgctagcgaagcggtgatcgacgccaacggaatccccgtcgatcagcaagatgatgataagggtaattgcgaagactacttaatgatcagccttgacgacgctgggaagatcgagcatgatggatcatcaggtatgacgatggacactgaaagtgaaatcgatccctgtaaggtcgacggcacctgtccagaagttattaaggtgtatatcttcaaagcggatccaggtgaggatgatctcggagggaccgtcgacattgtggagtctgaacccgaaaatgaccacggggtcgagctgctagaccagaatagcagtattagagtcccccgggaaaagatggtgtatatgaccgtgaatgactcccagcctgaagatgaggatctcaatgtggcagagattgcagacgaagtctacatggaggtcatcgtaggcgaggaggacgcggccgccgcagcagcagcggctgccgtccacgagcagcagatggatgacaatgagatcaagaccttcatgcctatagcatgggcagctgcatacgggaataattctgacggcatagaaaaccgaaatggcacggcttctgcattgctgcatattgatgagtcagccggtctgggacggctcgcaaaacagaagcccaaaaaaaggcggcggcccgactctaggcagtatcaaactgcgattatcattgggccagacgggcacccactcaccgtgtacccttgtatgatctgtggtaagaagttcaaatctcggggctttcttaagcggcacatgaagaaccatccggagcacctggcgaaaaagaagtatcgctgcacagactgtgactatacaactaataaaaaaatctcactgcacaaccacttggaatctcacaaactgaccagtaaagcagaaaaagctattgaatgtgatgagtgtggaaagcacttttcacacgcaggtgccctgttcacacataagatggtacacaaggagaagggagcgaacaagatgcacaagtgcaaattttgtgaatatgaaacagccgagcaaggcctcctgaatcgacacttgctggctgtccacagtaagaactttccccatatttgtgtcgagtgtggaaagggcttcaggcacccatcggagcttaagaagcacatgcgtattcacactggcgagaagccttatcagtgtcagtactgtgaatacaggagcgcagattcatctaatctcaagacccatgtgaagactaagcattctaaggagatgcctttcaagtgcgatatttgtttgttgacattcagtgataccaaagaggtccagcagcacgccttaattcaccaagaaagtaaaacccaccagtgtcttcactgcgaccacaagagctcaaattcaagcgacctgaaaaggcacatcattagcgtgcatacaaaagattacccccataagtgtgacatgtgtgataagggatttcatcggccatctgaactaaagaagcatgtggcagcccataaaggtaagaagatgcatcagtgccgacactgcgacttcaagattgcagatccctttgtgttgagccgtcacattcttagcgtccataccaaggacctcccttttcggtgcaagcggtgccggaaagggttccggcagcaatccgaactgaaaaaacatatgaagactcactccggcagaaaggtgtatcagtgcgagtactgtgagtattctaccacggatgcctcggggtttaagaggcacgtgataagcatccataccaaggattatccgcaccgctgcgaatactgcaaaaaaggctttaggaggccatcagagaagaaccagcacattatgcgtcaccataaggaagtgggattgccctag

SEQ ID NO: 212462 - DNA, 522 bp, synthetic construct
  misc_feature 1..522: note = Description of Artificial Sequence: Synthetic coding sequence
  source 1..522: mol_type = other DNA
ggcggctgcagccagtacctgctgctgttcgtggacgacgccggcaagatcgagcatgatggatcctcaggcatgaccatggatacggaaagcgaaatcgatccctgtaaggtggatggaacctgcccagaggtgatcaaagtgtacatctttaaagcagaccccggcgaggatgacttaggtgggacagttgatatcgtggagtccgaaccggagaacgatcacggggtcgagctgctggaccagaacagctcgataagggtccccagggaaaagatggtgtatatgacagtgaacgatagccagcccgaagacgaagatctcaacgttgctgaaatcgcagacgaagtatacatggaggtgatcgtgggggaagaagatgccgccgctgcggctgcagccgcagcagtccacgaacaacagatggatgacaatgaaatcaagacctttatgccaatcgcctgggctgcagcgtacggcaacaactctgacggcatcgagaatcgcaacggaaccgcttag

SEQ ID NO: 212463 - DNA, 2406 bp, synthetic construct
  misc_feature 1..2406: note = Description of Artificial Sequence: Synthetic coding sequence
  source 1..2406: mol_type = other DNA
atggacgaggacgagttcgagctgcagccccaggagcccaacagcttcttcgacggtatcggagcagatgccactcacatggacggcgaccagatcgttgtggagattcaggaggccgtctttgtcagtaacatcgtggactcagatattaccgttcacaactttgttccagatgacccagatagtgtcgtgattcaagacgtggtggaagacgtagtaatcgaggaagacgtccaatgtagcgatattcttgaagaagctgacgtctccgaaaacgtgatcatacccgaacaagttctcgactccgatgtgactgaagaagtgagtctgccgcactgtacagtgcctgacgatgtgctcgcctcggacattacttctacgtccatgagcatgcccgagcatgtcctcacctccgaatctatgcacgtgtgcgacatcggacacgtggaacacatggtgcacgatagcgttgtggaggcggagatcataacagatccgctgaccagcgacattgtgtctgaggaagtgcttgtggctgattgcgctccagaggccgtcatcgacgcctccggaatttcagttgaccagcaggataatgacaaagcttcatgcgaggactacttaatgatttctctggacgatgctggcaaaatagaacacgatggatctacaggcgtgaccattgacgccgagtccgagatggacccctgtaaagtcgacagtacctgtcccgaagtaattaaggtgtacatatttaaagcagaccccggtgaggacgacctgggcggtactgttgacatagtggaaagtgaacctgagaacgatcacggagtggagctattggatcagaatagtagtatacgggtcccaagagagaaaatggtctacatgaccgttaacgatagccagcaggaggatgaagatctgaatgtcgcagaaattgcagacgaggtttacatggaagtaattgtcggtgaggaggatgccgccgtcgcggccgccgccgccgccgtgcacgaacagcagatagatgaagatgaaatgaaaacgttcgtaccaattgcctgggcagctgcttatggaaacaattcagatggcatagagaacagaaatgggacggcgagcgcactccttcatattgacgagtcagccggcctgggccgtcttgcaaaacaaaaacccaagaaaaaacgtcgccctgatagccgccaataccagactgccattataatcggacccgacggtcatccactcactgtatacccctgtatgatctgcggaaagaagtttaagagccgcgggttccttaagagacatatgaagaatcaccccgagcaccttgcgaaaaaaaagtatcactgtaccgactgtgactacactacaaacaagaagatctctctgcataatcaccttgaatcacacaaactgacgagtaaagctgagaaggctattgagtgtgacgaatgcgggaagcatttttctcacgccggcgccctgttcacgcataagatggttcacaaggagaaaggcgcaaacaagatgcacaagtgcaaattctgcgagtatgaaaccgctgagcagggcctgctgaatagacacctcctcgccgtccacagtaagaatttcccacatatctgtgtcgagtgtggtaaggggttcagacacccatcagagctgcgcaaacacatgcgcatccacacaggagagaagccctaccagtgtcagtattgcgaatacagaagcgccgactcaagcaacctgaagactcatattaagaccaagcactccaaggaaatgccatttaagtgtgacatatgcctgctgacattctcggacaccaaagaggtgcaacagcacactctggtccatcaagagtctaaaactcatcagtgtctgcattgtgaccacaaatcttccaattccagcgaccttaagcggcacgtgatcagtgttcatactaaggattacccgcacaaatgtgagatgtgtgagaagggattccaccggccctcagaactgaagaaacacgtggctgtacacaaggggaagaaaatgcatcaatgccggcactgcgactttaagattgcagacccattcgtactttctagacacatcctgagcgtacacactaaagatctgccatttaggtgtaaacgctgccgcaaggggttccgccagcagaacgaactgaagaaacacatgaagacacactctgggcggaaagtctatcaatgcgagtactgtgagtattccacaaccgacgcctctggatttaagaggcatgttatctctattcacactaaggactatccacacagatgtgagtactgtaaaaaagggttccgtcgtccaagtgaaaagaatcagcatatcatgaggcatcataaagaggtcgggctcccctag

SEQ ID NO: 212464 - DNA, 2406 bp, synthetic construct
  misc_feature 1..2406: note = Description of Artificial Sequence: Synthetic coding sequence
  source 1..2406: mol_type = other DNA
atggacgaggacgagttcgagctgcagccccaggagcccaacagcttttttgatggtatcggcgccgacgccacccacatggacggtgaccaaatcgtggttgaaattcaggaggctgtattcgtttcgaatatcgtggactcagatattacggtgcacaactttgttcccgatgaccccgactctgtagtgatccaggacgtcgtggaggatgtggtgattgaggaagatgttcagtgtagcgacattcttgaagaggcggatgtatcagaaaatgtgatcatacctgaacaggtgctggactcagatgtgaccgaagaggtgtcgctccctcattgcacggttcccgacgacgtgctcgcaagtgatatcacgtccactagtatgtctatgccagagcatgtccttacttctgaaagcatgcatgtatgtgatatcggacatgttgagcacatggtgcacgattctgtggtggaggcagaaatcattacagacccactcacgtccgacatagtttctgaagaggttttagtcgctgactgtgcccccgaggctgtgatagacgcatctggaatttccgtagaccagcaggacaatgacaaagctagttgcgaagattacctcatgatctcactggacgatgccggcaagattgaacacgatggatctacaggtgtgacgattgatgctgaaagcgagatggacccctgtaaggtcgactctacttgccccgaggtcataaaagtatacatctttaaggctgaccccggcgaggatgacctgggcggcacggtggacatagtcgaatcagagcctgaaaacgatcacggagtggagctcctggaccaaaactcatctataagagtgccgcgcgaaaaaatggtctacatgacggtgaatgatagtcaacaggaggacgaggatctgaatgtggcggagatcgcagacgaggtgtacatggaggtcatcgtgggggaagaggacgccgcagtagccgccgctgccgccgcagtgcatgagcagcaaattgatgaggacgaaatgaaaacattcgtcccaattgcctgggctgctgcgtatggcaataattctgacggaattgagaaccgcaatggtacagctagcgccctccttcatattgacgagtccgccggcctcgggcgcttggccaagcaaaagccaaagaaaaagaggcggcccgattcaaggcagtatcaaactgccatcatcattggtccggacgggcatcctctcaccgtctacccctgcatgatctgcgggaagaaatttaaatcaaggggctttctcaaaaggcacatgaagaatcatcccgagcacctggccaagaagaagtatcactgcacagactgtgactacactacgaacaagaagatatctctgcacaaccacctcgagtcccacaagcttacgtcgaaggctgagaaggcaatagaatgtgacgaatgcggcaagcacttttctcacgcaggcgcactgttcactcataagatggttcacaaagaaaagggcgccaacaaaatgcacaaatgtaagttctgtgaatatgaaacggcagagcaagggctgctgaataggcaccttttggccgtgcactccaagaatttccctcacatatgcgtagagtgtggcaaaggttttagacatcctagcgagctgcgcaagcatatgcgcattcacaccggagaaaaaccatatcaatgccagtattgcgagtatagatcagcagactcttccaacctgaagactcacattaaaaccaagcatagtaaggagatgccattcaagtgtgacatctgcctgctgaccttttctgacaccaaagaggtccagcagcacacactggtgcatcaagagtctaagacacaccagtgcctgcattgcgatcataaaagttctaacagttcagacctcaagcgtcatgtgatctcagtgcacacaaaagattacccacacaagtgcgagatgtgcgagaagggtttccatcgcccgagcgagctgaagaagcacgtggccgtgcataagggaaaaaaaatgcaccagtgtcgacactgcgactttaaaattgcagaccccttcgtcctgtcccggcatatcctgagcgttcatacgaaagaccttccatttcggtgcaaacgctgcagaaagggattcaggcaacagaatgagctgaaaaaacacatgaagactcacagtggacggaaggtttaccagtgtgagtactgcgagtattccaccacagacgccagcggatttaagcgccatgtgatttcaatccacaccaaggactaccctcatcgctgtgaatactgtaagaaaggttttaggaggccatccgagaaaaaccagcatatcatgagacaccacaaagaggttggacttccatag

SEQ ID NO: 212465 - DNA, 1833 bp, synthetic construct
  misc_feature 1..1833: note = Description of Artificial Sequence: Synthetic coding sequence
  source 1..1833: mol_type = other DNA
atggacgaggacgagttcgagctgcagccccaggagcccaacagcttttttgatggtatagtcgacgacgccggcaagattgaacacgacggatctacaggtgtcactattgacgctgagagtgaaatggacccatgcaaggtggacagtacttgcccggaagtaatcaaagtatacatcttcaaagccgaccctggcgaagatgacttagggggtacagttgacatagtcgagtcagaaccagagaatgaccacggtgttgaactcctcgatcagaacagctcgatccgggtgccccgggagaaaatggtgtacatgaccgtgaatgactcccaacaggaagatgaggacctaaatgtggcagagatcgcggatgaggtctacatggaagtgattgtcggagaagaggacgcagctgtggctgctgccgccgctgcagtgcacgagcagcagatcgacgaggatgagatgaagaccttcgttcccattgcctgggcagctgcatatggcaacaattctgacggaatcgaaaaccgcaacggtaccgcctcagcgctgctgcacatagacgagagtgccggactcgggcgcttagccaagcagaaacctaaaaaaaagaggcggcctgatagtagacagtatcagactgctattataatcggccctgacggacatcccctgacggtttatccgtgcatgatctgtggaaagaaattcaagtctagaggatttctgaagcgtcacatgaaaaatcatcctgaacaccttgctaagaagaagtaccattgtacagactgtgattacacaacaaataaaaagatctccttgcacaatcatctagagtcccacaagttgacctcaaaggccgagaaggccattgagtgtgatgagtgcggcaagcatttcagtcacgccggagcactgttcacacataaaatggtgcacaaggagaaaggagccaataagatgcataagtgtaaattctgcgagtacgaaacggccgaacagggcctcctgaatcgacacctactggccgtgcatagtaaaaactttccccatatctgtgtggaatgcgggaaaggttttcggcacccttctgagctcaggaaacacatgcgaatccacactggcgagaagccctatcagtgccagtactgtgaatatcgcagtgctgactccagcaatctgaagacccatatcaaaactaaacacagtaaagagatgcccttcaagtgcgacatttgcttgttgaccttctctgatactaaggaagtccagcagcacacactggtacaccaggaatccaagacccatcaatgtctccactgcgatcataagtcttcaaattcctctgatttgaagaggcacgtcatttcagtgcatactaaggactacccgcacaagtgtgaaatgtgcgaaaagggttttcacaggccttctgaattgaaaaagcatgtcgcagtgcataaggggaaaaaaatgcaccaatgcaggcattgtgacttcaagatcgccgaccctttcgtcttaagccgacacatcttgagcgtgcacacaaaggacctgccattcaggtgtaagcggtgtaggaagggctttcgacagcagaacgaactgaagaaacacatgaagacacactcagggcggaaggtttaccagtgtgaatattgcgaatattcaactaccgacgcttcgggtttcaaaagacacgtcatttccatccataccaaggactaccctcatagatgtgaatattgtaaaaaaggctttcggcggcccagcgaaaaaaaccaacacattatgagacaccacaaggaagttgggttgccatag

SEQ ID NO: 212466 - DNA, 276 bp, synthetic construct
  misc_feature 1..276: note = Description of Artificial Sequence: Synthetic coding sequence
  source 1..276: mol_type = other DNA
atggacgaggacgagttcgagctgcagccccaggagcccaacagcttcttcgatggaattggcgccgatgccacccatatggacggggaccagattgtagtggagatccaggaggcagttttcgtttccaacatagtggattccgacatcacagttcacaacttcgtaccagacgatccagattcagtagtgatccaggacgttgtggaggatgttgtgatcgaggaagatgttcaatgtagcgacattctggaggaagcggatgtatcagaatag

SEQ ID NO: 212467 - DNA, 2175 bp, synthetic construct
  misc_feature 1..2175: note = Description of Artificial Sequence: Synthetic coding sequence
  source 1..2175: mol_type = other DNA
atggacggcgaccagatcgtggtggagatccaggaggccgtgttcgtatctaatatcgtggattcagatatcacagtgcataactttgtgcctgatgatcctgatagtgtcgtgattcaggacgtcgtcgaggacgtagtgattgaggaggacgttcagtgttcagatattttggaagaggctgatgtatccgaaaacgtcataatcccagagcaggtgctggactctgatgtgacggaagaggtcagtttacctcactgcaccgtacctgatgacgtgttggctagtgacatcaccagtacttctatgagtatgccagaacatgtactgacctccgagagcatgcacgtgtgcgacataggtcacgttgagcatatggtacacgatagtgtcgtcgaggccgaaattattactgaccctctgacgtcggatattgtctccgaggaagtgttggtcgcagattgcgccccggaagccgtcatagacgcttccgggatttctgtcgaccaacaggataatgacaaggcctcctgtgaggattaccttatgatcagcctcgatgacgctgggaaaatcgaacacgacgggtccaccggcgtcacaattgatgcggaaagcgaaatggacccttgcaaggtggactctacctgtccagaggttattaaggtgtatattttcaaggcagatccaggagaagatgacctcggtggaactgtggacattgttgaatccgaacccgagaatgatcatggagtggaactgctcgaccagaatagcagtataagggtgccacgcgaaaaaatggtctacatgaccgtgaacgattctcagcaggaggacgaagatttaagcaataattcggacggaattgaaaatcgcaatgggacagcttccgccctcctgcacatagacgaaagcgcaggtctaggaagactggccaaacagaaacctaaaaagaaacgtcgaccggacagtcgccagtaccagacagctataatcatcgggccagacggacatcccctgactgtttatccttgcatgatatgtggaaaaaagtttaaaagcaggggctttctgaagcgacatatgaaaaatcaccccgaacaccttgccaaaaagaagtaccactgtacagactgcgactatacaaccaacaagaagatctctctccacaatcatctcgagagtcacaagttaacaagcaaagctgaaaaagccatcgagtgcgatgagtgcggcaagcacttttctcacgccggagccttatttacacataagatggtacacaaagagaagggtgctaacaagatgcataagtgcaaattctgtgagtacgagacagcagagcaaggtcttctgaatagacaccttctggccgtgcacagcaaaaacttcccacacatctgtgtagaatgcgggaaaggatttcgtcaccctagcgagttgcggaaacatatgcggattcatactggggagaagccctaccaatgtcaatactgcgagtaccggagtgctgacagctcaaacttaaaaacccacattaaaacaaaacactctaaggaaatgccttttaagtgcgatatctgcctgttgacctttagcgacacaaaggaggtccagcagcacacactggtgcatcaggaaagcaagacccaccagtgtcttcactgcgatcacaagagtagcaatagcagtgacctgaagcgccacgtcatttctgtgcacactaaggactatccgcataagtgcgagatgtgcgaaaaaggttttcaccggccttctgagctgaaaaagcatgtggctgtgcacaaaggcaaaaagatgcaccaatgtcgacactgcgactttaaaatcgccgatccatttgtgttaagcaggcacatactgtctgtccacactaaggacctaccctttaggtgcaagcgctgtagaaagggcttccggcaacagaacgaactgaagaaacatatgaagactcattcaggccggaaagtttatcagtgtgagtactgcgagtactctacgactgatgcatcaggttttaagaggcatgtgatcagtattcacaccaaagattatccgcataggtgcgagtactgcaagaaaggctttaggaggccttctgaaaagaaccagcacatcatgcgacatcacaaggaagtcggactgccatag

SEQ ID NO: 212468 - DNA, 1617 bp, synthetic construct
  misc_feature 1..1617: note = Description of Artificial Sequence: Synthetic coding sequence
  source 1..1617: mol_type = other DNA
atggcccgggagctgagcgagagcaccgccctggacgcccagagcacagaagaccagatggagctgctggtcataaaggtcgaggaagaggaagctggcttcccgagcagccctgacctgggaagcgagggaagtagagagaggtttcggggtttcagataccccgaggccgccggcccccgggaggccctctcaagattgcgagaactgtgtcgacagtggctccaacccgaaatgcactccaaagaacaaatcttggagctgttggtccttgagcagtttctcaccatcttacctggaaaccttcaaagttgggtcagagagcaacatccagagagcggcgaggaagtcgtcgtgctgttagaataccttgagcgccagcttgatgagcctgcccctcaagtatccggcgtggaccaggggcaggaactcttgtgttgtaagatggctctcctgactccagccccaggttcccagtcctcccaatttcagctaatgaaagctctgttgaaacacgagtcggttggaagccagcctctgcaggaccgggtgctgcaggtgccagtgttagcacacggtggatgttgtcgggaggacaaggtcgtggcgagccggctaactccagagagccagggtcttctgaaagtggaggatgtggccctgactcttacccctgaatggacccagcaggatagttcccagggcaacctctgtagagacgaaaagcaggaaaatcacggtagtttggtgtccttgggggatgagaagcagactaaaagtcgcgatctgcccccggctgaagagctgcccgagaaagagcacggaaaaatttcctgccatctgagggaagacattgcacaaatccccacatgtgccgaggcaggggagcaggagggaaggcttcagaggaagcagaaaaatgccaccggagggcgtcgccacatatgtcatgagtgtggtaagtccttcgcacaatcttccggattgagcaaacatcgacgaatacataccggtgagaaaccctatgagtgcgaggaatgcggcaaggcgttcattggaagttcagcactcgtgatccaccagcgcgtgcacacgggggaaaaaccttatgaatgcgaagaatgtggcaaagctttttctcactctagtgatctgatcaagcaccagagaacccacaccggggagaagccctatgagtgtgacgattgtgggaaaacattctctcagagttgcagtttgctggagcaccatcggatccacaccggtgaaaagccctatcagtgctccatgtgtggaaaagcctttcggagatcttcccatctcctgagacatcagagaatccacactggagacaaaaatgttcaggagccggagcagggggaagcctggaagtcaagaatggagtcacagctggagaacgtggagacaccgatgtcctacaaatgcaacgaatgcgagcgatcctttacccagaacactggcctaatcgagcatcagaaaattcataccggcgagaaaccttaccagtgcaacgcctgtgggaagggcttcactcggatttcctatttggtacaacaccagcggtcccatgtcgggaagaatatcctgagtcaatag

SEQ ID NO: 212469 - DNA, 1173 bp, synthetic construct
  misc_feature 1..1173: note = Description of Artificial Sequence: Synthetic coding sequence
  source 1..1173: mol_type = other DNA
atggccctgctgacccccgcccccggcagccagagcagccagttccagctcatgaaggccctgttgaagcacgagtctgttgggtctcagcctcttcaagatcgtgtgctgcaggtgcctgtcctcgcccacggggggtgctgccgcgaggataaagtagtggcatcacgcctcactccagagagccaggggctgctcaaggtggaggatgtggcacttacattgacccctgagtggactcagcaggatagttcccagggcaacctatgccgggacgagaaacaggaaaaccacgggtcactggtgagcctgggcgatgaaaaacagacaaaatcgcgggaccttccacctgccgaggaactcccagaaaaggagcatggcaagattagctgtcatctccgagaagatatcgctcagatacctacttgtgcagaggcaggagaacaggaaggccggctgcaaaggaaacaaaagaatgccacaggaggccggagacacatttgccatgagtgcggaaagagcttcgcgcagtcttccggtttgagtaaacacagaagaatacatacaggggagaaaccctatgagtgcgaagagtgtgggaaagcatttatcggctctagtgcactggtgattcaccagcgcgtgcataccggggagaagccatatgagtgtgaggaatgcggcaaggcctttagccactccagcgacctgatcaagcatcagcggactcacacgggggagaagccctacgaatgtgacgattgtgggaagaccttcagtcagtcttgctcgctccttgagcatcacagaattcataccggtgaaaagccctaccaatgtagtatgtgcggcaaagcttttcgtcggagcagccacttgctgaggcatcagcgaatccataccggggataagaatgtgcaagagccagaacagggtgaggcgtggaagtcgcgtatggagagtcagttagaaaatgtggagaccccaatgtcatacaaatgtaatgagtgtgagcgaagcttcacacagaacaccggccttattgagcaccagaagatccacactggcgaaaaaccctaccagtgtaacgcctgcgggaaaggcttcacacgtatcagttacctagtccagcaccaaagatcacatgtaggaaagaacatcctttcacagtag

SEQ ID NO: 212470 - DNA, 1617 bp, synthetic construct
  misc_feature 1..1617: note = Description of Artificial Sequence: Synthetic coding sequence
  source 1..1617: mol_type = other DNA
atggcccgggagctgagcgagagcaccgccctggacgcccagagcacagaagaccagatggaattgcttgtcatcaaggtggaagaggaagaagctgggttcccttcttctccagacctcgggagcgagggatcgcgcgaaaggtttcggggcttcaggtaccccgaagcagccggcccacgggaggcgttgagtagactacgggagctttgtcgccaatggttgcagcccgaaatgcactcgaaggagcagattctcgagcttcttgttctggaacagttcttgaccatcctccccggtaacttgcagtcctgggtcagagagcagcatccggagtctggtgaagaggtggtggtgctcttagaatacctcgaacggcaactcgacgagccagctccgcaggtctctggcgtcgatcagggacaggaactgttgtgttgcaaaatggcattgcttactccagcacccgggtcccagtcgtcacaattccagctgatgaaagccctgcttaagcacgagtcggtgggttcccagcctctgcaagatagagtgctgcaagttccagtcttagcacacggaggatgctgtcgggaagataaagtcgtggcctccagacttacgcccgaaagccaggggttgctgaaggtcgaggatgtcgcactcactctcacgcctgagtggacacagcaggactcaagtcagggaaacttatgcagggatgaaaagcaagaaaatcacggctcactggtgagcttgggcgatgagaaacaaacaaagagtagagacctacccccagccgaagagctgcctgaaaaggaacatggcaaaatttcctgccaccttagagaggacatcgcgcagatcccgacatgtgccgaggccggcgaacaggaaggcagactacagcgaaaacagaaaaacgccactggcggaaggcgacacatttgccacgagtgcggtaagagcttcgctcagtcttccggcctctcaaagcacagacggatccacaccggggagaagccttatgagtgcgaagagtgtgggaaggcatttatagggagttccgctttagttattcatcagcgtgtccatacaggcgagaaaccatatgaatgcgaagagtgtgggaaagccttttcccacagttccgacctgattaagcaccagcgtacacataccggcgagaagccatacgaatgcgacgattgtggcaagacattctctcagtcatgttcccttctagagcaccatcggatacatacgggcgagaagccatatcagtgtagcatgtgtgggaaggcctttcggagatcatcacacttgctgcggcatcagcggattcacaccggtgacaaaaatgtccaggagcctgagcagggcgaggcttggaaaagcagaatggaaagccagctcgaaaacgtggaaaccccaatgtcatataagtgtaatgagtgcgaaaggtctttcactcagaatacaggcttgattgaacaccagaagattcatactggagaaaagccctatcagtgcaacgcatgcggcaaaggattcacacggatttcgtatctcgtgcagcatcagcggtcgcatgtgggcaagaatatactatcacagtag

SEQ ID NO: 212471 - DNA, 537 bp, synthetic construct
  misc_feature 1..537: note = Description of Artificial Sequence: Synthetic coding sequence
  source 1..537: mol_type = other DNA
atggcccgggagctgagcgagagcaccgccctggacgcccagagcactgaggaccagatggagctgctggtgatcaaggtcgaggaggaagaagctggttttccaagttccccagatctcggaagcgaagggtctagagagcgcttccgagggttccgctatcccgaagccgctggaccaagggaagccctgtcacgcctccgagagctctgccgccagtggctccagccagagatgcacagcaaggagcagattctggaattgctggttttagaacagtttctaacaatccttcccggtaatctgcagtcctgggttcgcgagcagcaccctgagtccggggaagaggtcgtggtgctgctcgaatatttggagcgccaactcgacgaacctgcccctcaagtggagcgtacaggtttagttagtgagcggtgcgggttattcccgcctgagattcccgaccagagtgaggggcatagctttaatatccaagagttctttatctcatttttgtaccgagagccgccttggcagtag

SEQ ID NO: 212472 - DNA, 993 bp, synthetic construct
  misc_feature 1..993: note = Description of Artificial Sequence: Synthetic coding sequence
  source 1..993: mol_type = other DNA
cggcagcggttccggggcttccggtaccccgaggccgccggccccagggaagccctgtcccgactgcgggaactctgtggacaatggctgcagcccgagatgcactccaaggagcagatattggagttattagttcttgagcaatttcttaccattctccccggcaacctgcaatcatgggttcgcgaacagcatccggagtcaggggaagaagtggtagtgctgctggaatatctcgagcgccagctggacgaacccgcgcctcaggtagagcgtactggactggtcagtgaacggtgcgcccggggaatcccattgagaagcagatcatcctcaagcttgtttgtattggcctttctgccctggcagggaatcactcacagttgcaggccatttgtggtctccggcggagaaatccagacaaagagcagggacctacctccagttaagaagttacccgagaaggaacacggaaaaatatgtcatctgagggaggatattgctcaaatccccactcatgcagaagccggcgagcaggagggtagattacagcggaaacaaaagaacgctatcggttcgcgacggcattattgtcacgagtgcggaaagtcttttgcccagagcagcggtctgacgaagcacaggcgcattcacaccggcgaaaagccctacgaatgcgaggattgtgggaagacctttattggatccagcgctcttgtaatccaccaacgcgttcatactggcgagaagccctatgagtgcgaggagtgtggcaaggtattttctcattctagtaacctcattaagcatcaacggacacacaccggagagaagccgtatgagtgtgacgactgcgggaaaacttttagccagtcctgtagcctgcttgagcaccataagatacacaccggggagaagccctaccagtgcaacatgtgtgggaaggcgttccgccgcaactctcatctgcttcgccatcagaggattcactag

SEQ ID NO: 212473 - DNA, 1638 bp, synthetic construct
  misc_feature 1..1638: note = Description of Artificial Sequence: Synthetic coding sequence
  source 1..1638: mol_type = other DNA
atggcccgggagccccggaagaacgccgccctggacgcccagagcgcagaggaccaaacggggctactgacggtaaaggtggagaaagaggaggcgagcgcccttaccgcggaggtccgggcaccctgctctcccgctagaggtcctgaacggtcacgccagagattccgaggcttccgatacccagaagcagccggtcccagagaggccctgagtaggctacgggagctgtgtgggcagtggctgcagccagagatgcattctaaagagcagatcctggagctcctggtcctcgagcaatttctgactatcctaccagggaatttacagtcctgggtgagggaacagcatcctgagagcggagaagaagtggtggttctgctggagtacctcgaaagacaattggatgaacccgctcctcaagtcccagtgggggaccaaggtcaggagttactctgttgcaaaatggccctattaacgcagacgcaggggtcacagagtagccagtgtcagcctatgaaggctctctttaaacacgagagcctgggttcgcaaccattacacgaccgggtactgcaggtgcctggcttagctcagggcgggtgttgtcgagaggatgctatggtagcatcccggctgacccccggttcccagggattattgaaaatggaggatgtggctctcactctgactcccggctggactcaactggacagctctcaggttaacctgtatagagatgagaagcaggaaaaccatagcagtcttgtctccctgggcggtgaaattcagaccaaaagccgtgacctccctcctgtgaagaagctgcccgagaaggagcatgggaaaatctgtcatctgcgggaagatatagctcaaatacctacccacgccgaggccggcgagcaagaaggcaggcttcaacgtaagcaaaaaaacgccatcggcagccgacgccactactgtcatgagtgcggtaagagctttgcccagtcttcaggattgaccaagcataggcggattcataccggagaaaagccttatgagtgtgaggactgcggcaagactttcattggatccagcgctctggtcatccaccagcgggtacacactggtgagaagccctacgagtgcgaggaatgcggcaaggttttttcacacagctcaaatttgatcaaacaccaaagaacccacacaggagagaaaccctatgaatgtgatgattgcggtaaaaccttcagccagtcctgttcgctgctggaacatcataagatccacaccggagagaaaccttaccaatgcaacatgtgtggaaaagccttccggagaaactctcatctattgcgccaccagaggattcatggagataaaaacgttcagaatcccgaacatggcgagtcatgggaatctcagggtcgcactgagtcacagtgggaaaacaccgaggctccggtcagttacaaatgcaacgagtgtgaacggagcttcactcgtaatcggtccctaattgaacaccagaagatccacaccggggagaaaccctatcagtgcgatacatgcgggaagggcttcacgagaacttcctaccttgtgcagcaccagcgaagtcatgtgggcaaaaagaccctctcacagtag

SEQ ID NO: 212474 - DNA, 1173 bp, synthetic construct
  misc_feature 1..1173: note = Description of Artificial Sequence: Synthetic coding sequence
  source 1..1173: mol_type = other DNA
atggccctgctgacccagacccagggcagccagagcagccagtgccagccgatgaaggccttgtttaagcatgaaagcctggggtctcagccattacatgaccgcgtgttacaggtgccgggcttagctcaggggggctgctgcagggaagacgctatggtcgcatctcgccttacccctggctctcaaggccttttgaagatggaagacgtggctctgaccctgacgcctggctggactcagcttgacagctcacaagtcaatttgtaccgcgacgagaagcaggagaaccactcttcgctcgttagtcttgggggggaaatccagactaagagtcgggacttgccacccgtcaaaaaacttccggaaaaggaacatggcaaaatttgccatttgagggaggatatcgctcagatcccaacacatgctgaggccggggagcaagagggccgtctgcaaaggaagcaaaagaacgcgatcggttcccgtcggcactattgccatgaatgcggaaagtccttcgcacaatcctcaggactgactaagcatcgacgaatacatactggggaaaagccctatgaatgtgaggattgtggcaagacatttatagggtcaagcgccctggtcattcaccagcgggtccacaccggcgagaaaccatatgagtgcgaagagtgtggcaaagtgttcagtcactcctctaacctaatcaaacaccagaggacgcacaccggtgagaagccttacgaatgtgacgactgtggaaaaacatttagccaaagctgtagccttctggagcatcacaaaatccatacaggtgagaagccataccagtgtaatatgtgcggcaaagcattccggaggaacagtcatttacttcgtcatcaaagaatccacggggataagaacgtgcaaaaccccgaacatggcgaatcctgggaatctcagggcaggaccgaaagccaatgggaaaacaccgaagcaccagtctcctacaaatgcaatgaatgcgagcggagttttactcgaaaccgctcactgatcgagcaccagaaaatccatacaggagagaagccttaccagtgtgacacgtgtgggaagggattcacccggacaagctacctagtgcaacatcagcgtagccacgtgggtaaaaagactttatctcagtag

SEQ ID NO: 212475 - DNA, 501 bp, synthetic construct
  misc_feature 1..501: note = Description of Artificial Sequence: Synthetic coding sequence
  source 1..501: mol_type = other DNA
cccacccacgccgaggccggcgagcaggagggccggctgcagcggaaacagaagaacgcgattggatcccggcgacactattgtcacgaatgcgggaaatcttttgcccagtctagcgggctaactaagcataggcggattcacacgggggagaaaccctatgagtgtgaggattgcgggaagacattcatcggctcttccgcccttgtgatacaccagcgagtgcacaccggtgagaagccatatgaatgtgaagaatgtgggaaggtcttttcccacagcagtaacctcatcaagcatcaaagaacccatactggggaaaaaccttatgaatgtgatgattgcgggaagaccttctcccaatcctgttcactgcttgaacaccacaagatccatactggcgagaagccgtatcagtgcaacatgtgtggaaaggcctttcgaagaaattctcatctcctccggcaccaacgcatccacgtcgtgaccgagatagtatag

SEQ ID NO: 212476 - DNA, 438 bp, synthetic construct
  misc_feature 1..438: note = Description of Artificial Sequence: Synthetic coding sequence
  source 1..438: mol_type = other DNA
atggagttccccgacctgggcaagcactgcagcgagaagacctgcaagcagttagactttcttcccgtgaaatgtgacgcctgcaagcaggatttctgcaaggaccactttccttacgcagcccacaagtgcccatttgctttccaaaaagatgtgcatgtgccagtgtgcccgctttgtaacactcccatccccgttaaaaagggacagattcccgatgtggtggtcggcgatcatattgatagagattgcgattcccatcccggcaaaaaaaaggaaaagattttcacataccgatgctccaaggagggctgcaagaaaaaagaaatgcttcaaatggtatgtgcacagtgtcatggtaacttttgtattcaacataggcaccctctggaccactcctgccgccacgggagtcggccaaccattaaggccggttag

SEQ ID NO: 212477 - DNA, 543 bp, synthetic construct
  misc_feature 1..543: note = Description of Artificial Sequence: Synthetic coding sequence
  source 1..543: mol_type = other DNA
atggagttccccgacctgggcaagcactgcagcgagaagacctgcaaacagctagattttctgcctgtgaagtgcgatgcatgcaagcaggacttttgcaaggatcactttccttatgcggctcataaatgcccttttgcattccagaaggatgtccatgtcccggtgtgtcctctctgcaatactcccattccagtgaaaaaaggacagattcccgatgtggtcgtcggcgaccacatcgatagagactgcgactcacaccccgggaaaaaaaaggaaaagatattcacctaccgatgttccaaagagggctgtaagaagaaggagatgctacagatggtatgtgcccaatgtcacggaaatttttgcatccagcaccgacacccgctggaccactcttgtcggcacggtagtcggcctaccattaaggcaggatgtagcccgatgacagtctcggaatctaggcctctgggcgatttcctgacccttgctcctggcggcctggcacagaggttggggtactggttcacacgcttgatgtag

SEQ ID NO: 212478 - DNA, 774 bp, synthetic construct
  misc_feature 1..774: note = Description of Artificial Sequence: Synthetic coding sequence
  source 1..774: mol_type = other DNA
atggagttccccgacctgggcgcccactgcagcgagcccagctgccagcgccttgactttctgcctctcaagtgcgatgcatgtagcggtatcttctgcgctgaccatgtcgcctatgctcagcaccactgcggctccgcttatcagaaggatatccaggtccccgtgtgtccactctgtaatgtgccagtaccagtggcgagaggcgagccccccgacagagctgtcggcgagcatatcgaccgcgactgtagatccgaccccgctcagcagaaacgcaagattttcaccaacaaatgtgaaagagcaggatgtcgccagcgggaaatgatgaaactgacctgcgagcgttgctcaaggaacttttgcattaagcaccgtcatccattggatcacgactgctccggcgaaggccacccgacaagtcgggcaggcttagcagccatctctcgcgcccaggccgtagctagcacaagtacagtaccctccccgtcccagacgatgccgtcatgcaccagcccctctcgggccaccacccgaagtccttcctggaccgccccgccggtcatcgcattgcagaacggactgagcgaggatgaggcgctgcagagagcgctggagatgagtctcgccgaaacaaagcctcaagttccttcctgtcaggaggaagaagacctggcactagcacaagccctgtctgcctccgaagccgaatatcaacgtcagcaggcgcagagccgctctagcaagccaagcaactgttctctgtgctag

SEQ ID NO: 212479 - DNA, 531 bp, synthetic construct
  misc_feature 1..531: note = Description of Artificial Sequence: Synthetic coding sequence
  source 1..531: mol_type = other DNA
atggagttccccgacctgggcgcccactgcagcgagcccagctgccagagactcgacttcctgcccctgaagtgcgatgcatgtagcggcattttttgcgcagaccatgttgcttatgcacagcatcattgcggctcagcctatcagaaggatatccaggtaccagtgtgtccactgtgcaatgtcccagtccctgtcgccaggggagagccccctgatagagctgtaggtgaacacatcgatcgcgactgccgatccgatcctgcccaacaaaaaaggaaaatcttcacgaataagtgtgaacgggctggctgccgacagcgcgaaatgatgaagcttacatgcgagcggtgtagtagaaacttctgcattaagcacagacaccctctggaccatgattgctccggcgagggtcaccctaccagccgtgccgggctggccgccatctcacgggcccaggccgtcgctagcaccagcaccgtcccttccccctcacagacgatgccttcttgcacaagcccctctcgctag

SEQ ID NO: 212480 - DNA, 774 bp, synthetic construct
  misc_feature 1..774: note = Description of Artificial Sequence: Synthetic coding sequence
  source 1..774: mol_type = other DNA
atggagttccccgacctgggcgcccactgcagcgagcccagctgccaaagacttgatttcttgcctttaaaatgcgatgcgtgctctggcatcttttgtgccgatcacgtagcttatgctcaacaccactgtgggagtgcatatcagaaagatatacaggttcctgtgtgtcctctgtgcaatgtgcccgtcccagtggcaagaggtgaaccccccgatcgcgctgtgggggaacacattgaccgtgattgccgttcagatcctgcccaacagaagcgtaaaatcttcactaataagtgcgagcgcgccggctgtagacagcgcgaaatgatgaagctgacatgcgaacgttgttcgcgaaacttttgcattaagcacagacatccactggatcatgattgctcgggagaagggcacccaacaagcagggccggcctagccgcaataagcagagcccaggctgtggcatcgacatccacagtcccatcaccctctcaaaccatgcccagttgtaccagccccagcagggcaaccactcggagcccaagctggacagctcctccagtgatagctctgcaaaacgggctgagcgaagatgaagcacttcagcgcgccctggagatgtctctcgctgagaccaagccacaagttccctcttgtcaggaggaggaggaccttgccctggctcaggccttgtctgcctcagaggccgagtaccagcgtcagcaggcacagtcccggagcagcaaaccttcaaattgcagtctttgctag

SEQ ID NO: 212481 - DNA, 531 bp, synthetic construct
  misc_feature 1..531: note = Description of Artificial Sequence: Synthetic coding sequence
  source 1..531: mol_type = other DNA
atggagttccccgacctgggcgcccactgcagcgagcccagctgccaaaggctggattttctgcccttaaagtgcgacgcctgctctggcatattttgcgctgatcacgtggcatatgctcagcaccattgcggaagcgcctaccaaaaggacatccaggtgccggtttgtcctctctgcaatgtgcctgtaccagtggcacgcggggagccgcccgatagggcagttggagaacacatcgatcgagattgccgaagcgaccctgcccagcagaaaagaaaaatctttacaaacaaatgtgagagagcaggctgccgccaacgcgagatgatgaaacttacttgtgagagatgctccagaaatttctgcataaagcaccgtcaccccctggatcatgattgtagcggcgaggggcacccgacttctcgggccggacttgcagccatctcgagggctcaggccgtggccagtactagcacagtgccctccccttctcagacgatgccatcatgcaccagccctagtagatag

SEQ ID NO: 212482 - DNA, 153 bp, synthetic construct
  misc_feature 1..153: note = Description of Artificial Sequence: Synthetic coding sequence
  source 1..153: mol_type = other DNA
atggagttccccgacctgggcgcccactgcagcgagcccagctgccaacggcttgatttccttcctctcaagtgtgacgcgtgcagtggaattttctgcgccgaccatgtggcttatgcacaacatcactgcggtagtgcctaccagaagtag

SEQ ID NO: 212483 - DNA, 678 bp, synthetic construct
  misc_feature 1..678: note = Description of Artificial Sequence: Synthetic coding sequence
  source 1..678: mol_type = other DNA
atggagttccccgacctgggcgcccactgcagcgagcccagctgccagcgccttgatttcctgcccctcaagtgcgacgcctgttcaggaatcttctgtgccgaccatgtggcttatgctcagcatcattgcggttccgcctaccagaaggacattcaggtgcctgtgtgcccgctatgtaacgtccccgtgcctgttgcgaggggagaacctccggatcgagccgttggtgagcatattgatcgcgactgtcgaagcgatcctgcacagcagaaaaggaaaatctttacaaataagtgtgaaagagctggctgtaggcagcgcgagatgatgaagcttacttgcgagaggtgttctagaaacttttgtattaaacaccgccatcctctggaccacgattgttccggtgagggacaccccacttctagagccggactggcagcaatctccagggcacaggcagtggcgagtacgagcaccgtcccgtctccgtcacaaacaatgccgtcctgcacatcccccagtagggcaaccacaaggtctcctagttggaccgcacctccggtgattgcactccaaaacggtttagttagctgggccgaggtgggctggacagagaccaacacccagagagtgaagagcaaggacgccgggctgctaagccccttcgtcgagtag

SEQ ID NO: 212484 - DNA, 684 bp, synthetic construct
  misc_feature 1..684: note = Description of Artificial Sequence: Synthetic coding sequence
  source 1..684: mol_type = other DNA
atgggcgacgccggcagcgagcggagcaaggcccccagcctgccccccaggtgcccctgtggcttttggggatcttccaaaactatgaatctttgctcaaaatgttttgccgatttccaaaaaaagcaaccagatgacgacagcgcccctagcacgagtaatagtcagtcggacctgttctctgaagagaccaccagcgataataacaacacgtccatcaccaccccaactctgtccccttctcagcagccgctacctacagagcttaacgtgacaagccccagtaaagaggaatgtgggccgtgcactgacaccgcccacgtttcgctcatcactcccactaaaaggtcctgcgggaccgactcccagtcagaaaatgaagcctcccctgttaagcgccctcgactgctggagaacacagagaggagtgaggaaacatctcgctccaagcagaagagcaggcgccggtgtttccagtgccagaccaaactggagctggtgcagcaagagcttggatcatgtcgctgtgggtacgttttttgcatgctccataggcttccagagcagcacgattgcacttttgatcacatggggagaggccgagaggaggcaatcatgaagatggtaaaactcgatagaaaggtgggacgatcatgtcaaagaatcggggaagggtgcagctag

SEQ ID NO: 212485 - DNA, 642 bp, synthetic construct
  misc_feature 1..642: note = Description of Artificial Sequence: Synthetic coding sequence
  source 1..642: mol_type = other DNA
atggcccaggagaccaaccagacccccggccccatgctgtgcagcaccggctgcggattttacgggaatccgcgcacaaacggaatgtgctccgtgtgctataaggagcatctgcagcgccaacagaactccggccggatgagccctatgggcaccgctagcggaagcaattcccccacttctgattccgcctccgtgcagcgagcagataccagtctgaacaactgcgagggggctgcgggcagcacaagcgagaagtccagaaatgtccccgtggccgccctgccggtgacccagcagatgacggagatgagcataagtagggaagataaaataactactccgaagactgaggtgtccgaacctgtcgtcactcagcctagtcctagcgtttctcagccctccacgagtcagagtgaggagaaagcaccagagttgccaaagcctaaaaagaaccggtgttttatgtgtcggaaaaaagtaggtctaactggcttcgactgtaggtgcggcaacctgttctgcggactgcaccggtacagcgataaacacaattgcccatacgactataaagcagaagccgctgccaaaataaggaaagagaaccctgtcgtggtcgctgaaaaaatacagcgaatctag

SEQ ID NO: 212486 - DNA, 642 bp, synthetic construct
  misc_feature 1..642: note = Description of Artificial Sequence: Synthetic coding sequence
  source 1..642: mol_type = other DNA
atggcccaggagaccaaccagacccccggccccatgctgtgcagcacggggtgcggcttctatggcaacccccgaaccaatggcatgtgctccgtctgctacaaagaacatctgcagcgccagcagaactctggaagaatgagccctatgggcacggcttccggtagtaattctcccaccagcgattccgctagcgtacagcgggctgatacaagcctgaataactgtgagggagctgcgggttccacatccgagaaaagcaggaatgtccccgtggccgccctgccggtgactcagcaaatgaccgagatgagcatctcccgcgaagataagatcaccactccaaagaccgaagtgtctgaaccagtggttactcaaccctcgcctagcgtgtcacagccaagtacttcacagtctgaagaaaaagcccctgagctgcctaaacctaagaagaaccgctgctttatgtgccgaaaaaaggtgggactcacgggattcgactgtcgctgcgggaaccttttttgcggactacacagatactcggataaacacaattgcccttacgactataaggcagaagctgccgcgaagattcgcaaagagaaccctgtcgtggtcgccgaaaagattcagagaatctag

SEQ ID NO: 212487 - DNA, 636 bp, synthetic construct
  misc_feature 1..636: note = Description of Artificial Sequence: Synthetic coding sequence
  source 1..636: mol_type = other DNA
atggccaagcccgagcaggccgccgacggcggcgtgcggggccggggtgcgaggccccccgcacaagaggctcaacgaagacgaaggcaccccgtggtcgtggcacgagatctggcacccggcgttccaggcagcttgcactccacacaaaagaatatggctcaagaaacgaaccagacacctggtcctatgctctgttccaccggttgtgggttttacggcaaccccaggacaaacggaatgtgctccgtgtgctataaagaacacctgcagagacagcagaactcaggacgcatgtcacctatgggaactgcaagcggaagcaacagccctacaagcgactcggccagcgttcagcgagctgacactagcctgaataattgcgagggagcagcggggagtacttcagaaaaatcaaggaatgtcccggtggctgcgctgccagttacccaacagatgactgagatgagcatcagtagggaggacaagatcactactcctaaaactgaggtgagtgagcccgtggtgacccagccaagcccaagtgtatctcagccaagtacttcgcagagcgaggagaaagctcctgaattaccaaagcccaagaagaaccggtgttttatgtgtaggaaatag

SEQ ID NO: 212488 - DNA, 642 bp, synthetic construct
  misc_feature 1..642: note = Description of Artificial Sequence: Synthetic coding sequence
  source 1..642: mol_type = other DNA
atggcccaggagaccaaccagacccccggccccatgctgtgcagcacaggttgtgggttttatggaaatcctcgaactaatgggatgtgctcagtgtgttataaagaacacctccaacggcaacagaactctggtcgcatgtcacccatggggacagcaagcggctccaactctccaacatccgacagcgcgagtgtccagagagccgataccagcttgaacaattgcgagggtgcggccggtagcacttcggagaaatccaggaatgtgcccgttgctgctctccccgtgactcaacagatgaccgaaatgtctatctcccgggaagataaaatcaccactccgaaaaccgaagtgagcgaacccgtcgtgactcaacccagtccttctgtgtcccagccttccaccagtcaaagcgaagagaaagctccagagctacccaaaccgaagaaaaaccgctgcttcatgtgcagaaagaaggtggggctgactggctttgactgcagatgtggaaacctcttctgcggtctgcaccggtacagtgacaagcacaattgtccatacgattacaaggctgaggccgcagctaagattcgcaaagagaatcctgtcgttgtggccgaaaaaattcaacgcatctag

SEQ ID NO: 212489 - DNA, 642 bp, synthetic construct
  misc_feature 1..642: note = Description of Artificial Sequence: Synthetic coding sequence
  source 1..642: mol_type = other DNA
atggcccaggagaccaaccagacccccggccccatgctgtgcagcacagggtgcggtttttatggtaaccctaggacgaacggaatgtgctctgtttgctataaggagcatctccagcgccagcaaaatagcggccggatgtcccccatggggacagcctctgggagcaattcccccactagtgattcagcatctgtgcagcgggccgataccagtctgaataactgtgaaggcgctgctggaagtacgagtgagaagagtaggaatgttccggttgcagctttgccggtgactcagcagatgacagagatgtcaatttcacgggaggacaaaataacgactcctaagacggaagtctctgagcccgtcgttacacagccatccccttccgtgtctcagcctagcacatctcagagcgaggagaaggcacccgagcttcccaagccgaagaagaatcggtgcttcatgtgccgaaagaaggtgggtctgacaggctttgattgccggtgtggaaatcttttctgtggcttacacagatacagcgacaaacacaattgcccatatgactacaaggccgaggcagctgcaaaaatcaggaaggagaaccctgtggtggtggctgagaagattcagagaatctag

SEQ ID NO: 212490 - DNA, 627 bp, synthetic construct
  misc_feature 1..627: note = Description of Artificial Sequence: Synthetic coding sequence
  source 1..627: mol_type = other DNA
atggcccaggagaccaaccacagccaggtgcccatgctgtgcagcactgggtgcgggttctatggaaatcctcgtactaacggaatgtgctccgtttgctacaaggagcatctgcagcgccaaaacagcagtaatggccggataagtccacccgccacctccgtcagcagtctgtcggagagtttgcccgtgcaatgtacagatgggtctgtccctgaggctcagtcggctctggacagtacttcttcatcaatgcaacctagccctgtcagcaaccagagtctcttgtccgagagtgtagccagttcccagctcgactcaacctcagtggacaaagccgtgccagaaacggaggatgtgcaggccagtgtgagcgatacagcacagcaaccttctgaagagcagagcaaaagtttggagaaacccaagcagaaaaagaatagatgcttcatgtgtagaaagaaagtgggactcactggctttgagtgtcgatgcggaaatgtgtactgcggcgttcaccggtattctgacgttcacaattgctcatacaactacaaggccgacgcagccgagaagataagaaaagagaaccctgttgtggtgggcgagaagattcagaagatctag

SEQ ID NO: 212491 - DNA, 627 bp, synthetic construct
  misc_feature 1..627: note = Description of Artificial Sequence: Synthetic coding sequence
  source 1..627: mol_type = other DNA
atggcccaggagaccaaccacagccaggtgcccatgctgtgcagcaccgggtgcggattctatggaaatcctcgaaccaacggtatgtgctctgtgtgctacaaggaacatttacaacggcagaactcctcaaatggtcggatttcccccccagctaccagcgtgtcatccctctcagagtccttacccgtgcaatgcaccgacggcagtgtgccagaagcccagtccgctcttgactctacctcaagctccatgcagccctctcccgtgtccaatcagtctctgctgagcgaatccgtggcaagctcccaactggattcaacatcagtcgataaagccgtgcctgaaacggaggacgtgcaagcaagcgtctctgacaccgcacagcagcctagcgaggaacaaagcaagtcactggagaaacccaaacagaagaagaataggtgcttcatgtgtcgcaagaaggttgggctgacggggttcgagtgccgttgcggcaacgtctactgtggagtgcacagatattctgacgtacacaattgtagttacaattacaaagcagatgccgctgaaaaaatccgcaaagaaaaccccgttgtggttggcgaaaagattcagaagatttag

SEQ ID NO: 212492 - DNA, 591 bp, synthetic construct
  misc_feature 1..591: note = Description of Artificial Sequence: Synthetic coding sequence
  source 1..591: mol_type = other DNA
atggcccaggagaccaaccacagccaggtgcccatgctgtgcagcacaggatgcgggttctacggaaatccacgcaccaatggaatgtgctccgtgtgctataaggaacacctgcaacgacaaaattctagcaatggccgcatctcgccgccagtgcagtgtacagatggcagcgttcctgaggcgcaaagcgcccttgacagcacttcatcttctatgcagccctctcctgtctccaatcaaagtctgctctccgagtccgtcgcctcctctcaactggatagcaccagtgtggacaaagctgttcctgagaccgaggatgttcaagcctctgtctctgataccgcccagcagccttcggaggaacaaagcaagagtcttgaaaaacctaaacaaaagaagaaccgttgctttatgtgccgtaaaaaggtgggcctgaccggttttgagtgcagatgtggcaacgtttactgcggggtgcaccgctactcagacgtccacaattgctcttataattataaggcagatgcagcagagaaaattagaaaggaaaacccagtggttgttggtgaaaaaatccagaagatttag

SEQ ID NO: 212493 - DNA, 627 bp, synthetic construct
  misc_feature 1..627: note = Description of Artificial Sequence: Synthetic coding sequence
  source 1..627: mol_type = other DNA
atggcccaggagaccaaccacagccaggtgcccatgctgtgcagcaccggatgcggcttctacggaaatcctagaaccaacggaatgtgctcagtgtgttacaaggagcacctgcagaggcagaatagcagcaatggccgcatcagtccccctgctacctctgtctcttctctctccgagagcttgcctgtacagtgcacggacggctccgtgccggaagcacagtctgctcttgactcgacttctagctcaatgcagcctagtcctgtaagcaaccagagtttactttcagagtctgttgccagcagtcagctggacagcacatctgttgataaagccgtaccagaaaccgaagatgtacaggcgtccgtcagcgatactgcccaacagccctcggaggagcagagcaagtctctggaaaaaccaaaacagaagaaaaacagatgcttcatgtgccggaaaaaagttggcttgaccggctttgagtgtcggtgcgggaacgtgtattgtggtgtacaccggtactccgacgtgcataattgcagctacaactacaaggcagacgccgccgaaaagattaggaaggagaatccagtggtggtgggggagaaaattcagaagatctag

SEQ ID NO: 212494 - DNA, 627 bp, synthetic construct
  misc_feature 1..627: note = Description of Artificial Sequence: Synthetic coding sequence
  source 1..627: mol_type = other DNA
atggcccaggagaccaaccacagccaggtgcccatgctgtgcagcaccggttgtgggttttacggcaatcctagaacgaacggcatgtgtagcgtgtgctacaaggagcacctccagcgccagaattcgtctaacggtcgcatcagcccccctgccacctccgtcagctccctctctgaatcattacctgtccagtgcactgatggaagtgtaccggaagcccagagtgccctggattctactagctccagtatgcagccctcaccagtcagtaatcagtcccttctgagcgagtcagtcgcatcaagtcagctcgattcaaccagcgtggataaggcagttcccgagaccgaggatgtgcaggcctccgtcagtgacacggcgcagcagccatcagaggagcagtctaaaagcctggagaaacccaagcagaaaaaaaatcggtgtttcatgtgcagaaaaaaggtgggcttaaccgggttcgagtgtcgctgtggcaacgtgtattgtggcgtgcataggtacagcgatgttcataactgctcttataactacaaggccgatgccgctgagaagattcgtaaagagaatccagtggttgtgggggagaagatccagaaaatctag

SEQ ID NO: 212495 - DNA, 627 bp, synthetic construct
  misc_feature 1..627: note = Description of Artificial Sequence: Synthetic coding sequence
  source 1..627: mol_type = other DNA
atggcccaggagaccaaccacagccaggtgcccatgctgtgcagcaccggctgcggcttctacggaaaccctcgcacaaatggcatgtgtagcgtgtgctataaagagcacttgcagagacagaattctagcaacggtcggataagccctccagccacttcagtgtcaagtctttctgaatctctgccagtacagtgcaccgatgggtctgtacctgaggcacagagcgcactcgactcaacttcctcctcaatgcagccgtcccccgtttccaatcagagtctgctgtccgagtcggtcgcgtcgagtcagcttgactcaacctctgtggataaggccgttccagagaccgaagatgtgcaagcctccgtgtccgataccgctcagcaaccgagcgaagagcaatcgaagtccttggaaaagcccaagcaaaagaagaaccgatgttttatgtgccgcaagaaggtgggcctgaccgggttcgaatgtcgttgtgggaacgtttattgtggcgtccataggtactcagatgtccataactgttcctacaattataaggcagatgctgccgagaagataaggaaggagaacccagtggtggttggtgaaaagattcagaagatttag

SEQ ID NO: 212496 - DNA, 2085 bp, synthetic construct
  misc_feature 1..2085: note = Description of Artificial Sequence: Synthetic coding sequence
  source 1..2085: mol_type = other DNA
atggagaacaagagcctggagagcagccagaccgacctgaagctggtggcgcacccccgtgccaagagtaaggtttggaaatactttggatttgacaccaacgccgagggctgcatcttgcagtggaaaaagatttactgcagaatttgtatggcgcagattgcatatagcggcaacactagcaatctgtcctaccacctggaaaaaaaccaccccgaggaattctgcgagtttgttaaaagcaacactgaacagatgcgcgaagcctttgccacagccttttcgaagcttaaacctgagagtagccagcagccaggtcaggacgcgcttgccgtcaaggcagggcatggatacgactctaaaaagcagcaggagcttactgcagcagttttggggttaatctgcgaggggctctaccctgccagtatagttgatgaaccaacgttcaaggtgctcctcaaaacagcagacccccgatatgagctccccagtaggaagtatattagcaccaaagcaattcctgagaagtacggcgcagtcagagaagtgattctgaaggagcttgccgaggccacttggtgcggaatctccacagatatgtggaggagcgaaaatcagaaccgcgcctacgtgactctggcagctcattttctgggcctgggagcccccaactgtctgagcatggggtcccggtgtttgaagacctttgaggtgcctgaggaaaacaccgccgagactataacccgggtcctgtacgaggttttcatcgagtggggaattagtgccaaggtctttggtgccacgactaattatgggaaagatatcgtcaaggcttgctctctgttggatgtggcagttcatatgccgtgccttggacacacttttaacgccgggatccagcaggcattccagctacctaaactcggcgccctcctgagccgttgtagaaaactcgttgagtatttccagcaatctgcggtcgccatgtatatgctttatgaaaagcagaaacagcaaaacgtagcacattgcatgctcgtcagcaacagagtgtcctggtggggtagtacattagccatgctgcagagattaaaagagcagcaatttgtgattgccggagttctggtcgaagactcaaataatcaccacctcatgctggaagcctccgagtgggcgacgattgaaggtctcgttgagctcctgcagccattcaagcaggtcgcagaaatgctgagcgccagtcgctatcctactatatccatggtgaaaccccttctgcacatgctgctgaataccaccttaaacatcaaggaaacggattctaaggagctgtctatggctaaagaggttattgccaaagagctgagtaagacatatcaggagacacccgaaatagatatgtttctgaacgtcgcaactttcctggatccgcggtacaagcggctacccttcctgagtgcctttgaacgccagcaggtggagaatcgtgtcgtagaggaagccaagggcctgctcgacaaggtcaaggatggcggttatagacctgccgaggataaaattttcccagtgcctgaagagccacctgtaaaaaaactgatgagaacttctactccaccccccgcctctgttatcaacaatatgctcgcagagattttctgtcagaccggtggtgtggaggaccaagaggaatggcacgcgcaggtggtggaagaactaagtaatttcaagagccaaaaggtgttgggtctgaacgaagaccccctgaaatggtggtctgatcggctagccttattccccctattaccaaaggtcctccagaagtactggtgtgtgactgctacgagggttgcaccagagaggctatttggctccgccgccaacgtggtatccgctaaaagaaaccggctggcccccgcgcatgtagacgagcaagttttcctgtacgaaaatgcacgttcaggggcagaggctgaacctgaggaccaagatgagggcgaatggggcctcgatcaggaacaggtgttctctctgggagacggcgtctccgggggcttctttgggatcagggattcctcctttctttag

SEQ ID NO: 212497 - DNA, 2085 bp, synthetic construct
  misc_feature 1..2085: note = Description of Artificial Sequence: Synthetic coding sequence
  source 1..2085: mol_type = other DNA
atggagaacaagagcctggagagcagccagaccgacctgaagctggtggcccatccccgggcgaaatccaaagtatggaagtattttggcttcgatactaatgccgagggatgcatcctccagtggaagaagatttattgtcgaatatgtatggcccagattgcgtattctggcaatacctctaatctgagctaccacctcgaaaagaaccatcccgaagagttctgcgaattcgtcaaaagcaatactgagcagatgcgggaagctttcgctaccgcattctctaaactgaagccagagtcatctcagcagccaggacaggacgcgttggccgttaaagccggacatgggtatgactcgaaaaaacagcaggagctgacagcagcagtgctgggtctgatttgcgaaggtctgtaccctgccagcatcgtggacgagcctacctttaaggtactgttgaagacagcggacccacggtatgagctcccctctcgtaagtatatttcaactaaagcaataccagagaaatatggagctgtccgtgaggtgatcttgaaggaactcgctgaggcaacatggtgtgggatctcaactgatatgtggcgctccgagaaccagaatcgagcctacgttaccctcgctgcgcactttctgggcttgggcgccccaaattgcctgagtatgggttcgagatgcctaaagactttcgaagtgcctgaagaaaacaccgccgaaactattaccagggtactgtacgaggtgtttatcgagtggggaatcagcgcaaaggtattcggagcaaccaccaactacggcaaggacattgtaaaggcctgttcactgctggatgtagccgttcacatgccttgcctcgggcacaccttcaatgctgggatccagcaggcctttcagttgcccaagcttggggccctcctgtcaaggtgcaggaaactggttgagtacttccagcaatctgctgtggcgatgtatatgctttacgagaaacagaagcagcagaacgttgcccactgcatgcttgtgagcaatagagttagctggtggggatctactctcgctatgttgcagcggcttaaggagcagcagttcgtgatcgccggcgtcctggtcgaagattccaacaaccaccacctgatgctcgaggcttccgagtgggcaactatcgaagggctggtggaactactccagccgtttaagcaggttgcagagatgctgagcgcctctagatacccaaccatttccatggtgaagcccctgcttcatatgttgctgaataccaccttgaatataaaggagaccgattcgaaagagttaagtatggcgaaagaagtgatcgctaaagagctatctaagacttaccaggaaactcctgaaatagatatgttcctgaatgttgctacgttcttagatccgcggtacaagaggttgccatttctgagcgctttcgagaggcagcaggtcgagaaccgggtggtggaggaggcgaaaggactacttgataaagtaaaagacggtgggtaccgcccggccgaggataaaatttttccggtgcctgaggagcccccagtcaaaaaattaatgagaacatctacgcccccacccgcaagcgttatcaataacatgcttgccgagatattttgtcaaacaggcggcgtggaagaccaggaagagtggcatgcccaagtagtggaagagctaagcaacttcaagtcccagaaagtgctgggcctgaatgaagatcccctgaagtggtggtcagatcggctcgcacttttcccacttctgccgaaagtgctgcagaagtattggtgcgtgactgcaacaagggtcgcacccgagcgattgttcggctcagctgccaatgtggtgtctgctaaaaggaatcggctggccccagcccacgtcgacgagcaggtctttctctacgaaaacgcaaggagcggggccgaggctgaacctgaagaccaggatgaaggcgaatgggggcttgaccaggagcaggttttttccctcggggacggtgtctctggggggttctttggcatccgagactccagttttctgtag

SEQ ID NO: 212498 - DNA, 2085 bp, synthetic construct
  misc_feature 1..2085: note = Description of Artificial Sequence: Synthetic coding sequence
  source 1..2085: mol_type = other DNA
atggagaacaagagcctggagagcagccagaccgacctgaagctggtggcccatccacgggccaaaagcaaggtctggaagtactttggattcgataccaacgccgagggttgtatactacaatggaagaagatctactgtagaatctgtatggctcagatagcttatagcggaaacaccagcaatctgtcttaccatttggagaagaatcaccctgaggagttttgtgaattcgtcaagtccaacaccgagcagatgcgggaagcctttgccacggctttctcgaagttgaagcctgagagttctcagcagcctggccaggacgctctcgccgtcaaagctggccacggctacgactctaagaagcagcaggagttaacagctgccgttctcggactcatttgcgagggcctctaccccgccagcatagtggacgagcccacattcaaagtgctcctcaagacggccgatccgagatatgagctgccatcaagaaagtatattagcaccaaagccattccggaaaagtacggcgccgttagggaagtgattctgaaggaacttgctgaagccacgtggtgcggcatctccactgacatgtggcggagtgaaaaccagaatcgagcatacgtgacactggctgcccatttcctggggctaggagcccccaattgcctctccatgggtagcagatgcctcaagaccttcgaggtcccagaagaaaacacagctgagactattaccagggtgctgtatgaggtattcattgaatggggaatcagtgccaaggtctttggcgctaccactaattacggcaaggacattgtgaaggcctgctcactcttggacgtggctgtgcatatgccttgtttaggccatactttcaatgctggaattcaacaggccttccagctacccaaactcggagctttgcttagccggtgtagaaagcttgtcgagtatttccagcagagtgcagtcgccatgtacatgctgtacgagaaacagaaacaacagaatgtggcacactgcatgttggtctcaaacagagtgtcatggtggggaagtacgctcgctatgctgcaacgccttaaagagcagcagttcgtaatagccggcgtactggttgaggactcgaacaaccaccatctcatgctggaggcttccgagtgggctactatagagggactggtggaactcctgcaaccttttaaacaggttgctgaaatgctcagcgcctcaagataccccacaatatctatggtgaaaccattgttacacatgctgctgaacaccaccctgaacattaaagaaacagactccaaagagctatccatggccaaagaagttatagctaaagaattaagcaagacgtaccaggagaccccagagattgatatgttcctaaatgtggcaacctttttagatccgaggtataaaaggcttccttttctgagtgcttttgagcggcagcaggtagagaatcgtgtcgttgaggaagccaaaggcctcctagacaaggtaaaggacggaggataccggcctgccgaggataagatctttcctgtgcctgaagagcccccagttaaaaaactgatgcgaactagcacccccccccccgcctctgtgattaacaatatgctggctgagatcttctgccagaccggcggtgtagaggatcaggaagaatggcatgcccaggtggtggaggagctgtcaaatttcaagagccagaaagtcctagggctgaacgaggacccccttaagtggtggagcgatcggcttgcactgtttcccctcttaccaaaagttcttcagaagtactggtgcgtaaccgctacccgtgtggctcctgagcgactgtttgggagcgccgccaacgtagtttccgctaagaggaacaggctagcccccgcacatgtggatgagcaggtgtttctatacgaaaacgctcggtccggagctgaagctgaaccagaggatcaggatgagggggagtggggccttgatcaggaacaggtgttctctttgggagatggcgtaagtggggggttctttggcattagagacagctcctttctctag

SEQ ID NO: 212499 - DNA, 819 bp, synthetic construct
  misc_feature 1..819: note = Description of Artificial Sequence: Synthetic coding sequence
  source 1..819: mol_type = other DNA
atggagaacaagagcctggagagcagccagaccgacctgaagctggttgctcacccgcgggcgaagtccaaggtctggaagtactttggattcgatacaaacgcagaggggtgtatcctgcagtggaagaagatttattgccggatttgcatggcgcagatagcgtacagcgggaacacatcaaatctgtcatatcatctggagaaaaatcatccagaagaattctgtgagttcgtcaagtcaaacacagagcagatgcgtgaggctttcgcaactgccttcagcaaattaaaacctgagagcagtcagcagccgggccaggatgcattggcagtgaaagcaggtcatggttatgactccaagaagcagcaagagctgaccgcagcagtgttgggactgatctgtgagggactttatcctgcctcgattgtggatgagcctactttcaaggtgcttctcaagactgcagatccaagatacgagctgcctagtcggaaatatatttcaaccaaagcaataccagagaagtacggcgccgtccgggaggtaatactgaaggaacttgccgaggccacttggtgcgggatctccaccgatatgtggcgcagcgagaatcaaaacagagcttatgtgactctggctgcacatttcctggggctgggggcccccaactgtctttctatggggagcaggtgcttgaagacattcgaggtgcctgaagagaataccgcagaaacaataactcgggtcttgtacgaagttttcattgagtggggcatttctgcgaaggtcttcggggctactacgaattatggctag

SEQ ID NO: 212500 - DNA, 3177 bp, synthetic construct
  misc_feature 1..3177: note = Description of Artificial Sequence: Synthetic coding sequence
  source 1..3177: mol_type = other DNA
atgcggcggaagggccggtgccaccggggcagcgccgcccggcacccatcgtctccgtgcagtgtgaagcacagtcccacccgggagactctgacgtatgcgcaggctcaacgaatggtggagattgagatcgaaggcagactgcatcgcatttcaatattcgatccattggagattattctggaggacgatctcacagcccaggaaatgtctgaatgcaactctaataaagagaacagcgaacgtcctcccgtgtgcttgcggaccaaacggcataagaacaatagggtcaagaaaaagaacgaagctttgccgtccgcccacggtactccagcaagcgcaagcgccctgcccgaacctaaggtaaggatcgtggaatattctccaccttcagcccccagacggccgcccgtctactacaaattcatcgagaagtccgcagaagagctggacaatgaggtggagtacgatatggatgaggaagactatgcctggctcgaaatcgtcaatgaaaagagaaagggagattgcgtacctgcggtctcccagtctatgtttgagtttctgatggacagatttgaaaaggagtcacactgcgagaaccagaagcagggcgagcagcaaagtctgattgacgaggacgcagtgtgctgcatctgcatggacggagagtgccaaaatagtaatgtaatcctgttttgtgacatgtgtaacctggctgtgcaccaggagtgctatggcgttccttacataccagaggggcaatggctttgtaggcactgtctacagtcccgggcacggcctgctgactgcgttctgtgtcctaataaaggcggggcattcaaaaagactgacgacgataggtgggggcatgtggtctgtgccctgtggattccagaggttggtttcgccaacacagtgttcattgaaccaatcgacggcgtgaggaatattcctccagccagatggaaactgacctgctacctttgtaaacagaagggggtgggcgcttgcattcagtgccacaaggccaactgttataccgccttccacgttacgtgtgcccagaaagcgggtctgtacatgaaaatggagcccgtcaaagagctcacaggcggaggtaccacgttttcagtgagaaaaacagcctactgtgacgtgcatacacctcccggatgtaccagacgccccctaaacatctatggggacgtcgaaatgaagaacggggtatgccgaaaggagtctagcgtaaagaccgtgaggtcaacttctaaagtgaggaaaaaagcgaagaaggcgaagaaagctctcgctgagccctgcgcggtcctacccaccgtgtgcgccccctatattccaccccagcgcctgaatagaatcgctaatcaggtggcaatacaacggaagaagcagttcgtggaaagagcacacagctactggctcctgaagaggctatctcgaaatggggcgcctttgctcaggcggttacagtcgagtctgcaaagtcagagaagtagccagcagcgcgaaaatgatgaagagatgaaagcggctaaagagaaactcaagtattggcagcggctgagacatgacctggagcgggcccgactgctgatcgagttgctgcggaaaagagaaaaactaaagcgagaacaggttaaggttgaacaagttgctatggaactgcggctgactcccctcaccgtcttgctgagaagcgtattagaccaactccaagataaagatcccgctcgcatcttcgcccagccagtaagcctcaaagaagtgccagattaccttgatcacattaaacacccaatggattttgctactatgaggaagcgcttggaagcgcaaggctataagaacctgcacgagtttgaggaggactttgacttgatcattgataattgtatgaagtataacgcacgcgacactgtcttctatagggccgctgttcgcctacgagaccagggaggcgtagtgctgcgacaggccaggagggaggtggacagcatcggactggaggaagctagtggtatgcacctccccgaacgccccgcagccgcccctcgtaggcctttcagttgggaggacgttgacagactcctagatcccgctaaccgggctcacctgggcttggaggaacagctaagggaactcttggatatgttagacctgacatgcgcgatgaaaagttccggatccaggtcaaaacgcgccaagctgctcaaaaaagagatcgcgctgctgcgcaacaagctgagccagcagcacagtcagccacttccaactggacccggtctggagggcttcgaggaggatggcgcagcactaggtccagaagccggcgaagaagtcctgccgcggctagagacgttgctgcagcccaggaagagaagtcggagcacctgtggggactcggaagtagaggaagagtccccagggaaacgcttggatgcgggcctgactaacggcttcgggggggcccggtccgaacaggagccgggaggcggcttgggccgaaaggccacgccaaggcgccggtgcgctagcgagagcagtattagctccagtaactccccgctgtgtgactcctcattcaatgcgcccaagtgtggaaggggtaagcctgctctcgtgagacggcataccctggaggacaggtctgaattgatttcttgcatcgagaacggtaattatgctaaggccgcccgtatcgcagctgaggtggggcagtcatccatgtggatcagcactgatgctgcggcaagcgttctcgaaccactcaaggtggtttgggctaagtgctcaggataccctagctatcccgctctgatcatcgatcctaagatgccgagggtgcctggccatcacaacggagtcactatccccgctcccccgctagatgtcttgaagatcggggaacatatgcagactaaaagcgacgagaagctgtttctcgtgttgttttttgacaacaaaagatcttggcaatggctaccaaagagtaagatggttccactcggcattgatgagaccatagacaagcttaaaatgatggagggcaggaactcctctattaggaaagccgtgcggatagccttcgacagagccatgaaccacctctcccgggtacacggagagcccacctccgatctgagcgacattgactag

SEQ ID NO: 212501 - DNA, 2940 bp, synthetic construct
  misc_feature 1..2940: note = Description of Artificial Sequence: Synthetic coding sequence
  source 1..2940: mol_type = other DNA
atgagcgtgtgcaccctgagcgtgcccgtgagcagcctgagccccggccgacggtgtaacactttctctgacagcggtattctcgggtgtgtgcccattaatagtaataccgacgaggaggacgttgtggaggaaaaaatggtcgcagagggggttaataaagaggcaaagcagccagcaaagaaaaaacgtaaaaaaggattaaggataaagggtaaacgccggaggaaaaaactcattctggccaagaaattcagcaaggacctgggttctggcagacccgtggcagacgcccccgccctgctagctagcaacgaccctgagcaggacgaagagtcacttttcgagtccaatatagaaaaacaaatttatttgccttctacccgtgcaaaaacgagcatcgtatggcacttctttcatgtggacccccagtacacatggcgcgcgatttgtaatttgtgcgagaagagtgtttcccgaggcaaaccaggatctcacctgggtactagcacattacagcgccatctgcaagcccgtcactctcctcattggacaagggccaacaagttcggcgtggcctcgggtgaagaagattttacactcgatgtctcactgtctccctctagtggctccaatggcagcttcgagtatatccccaccgatccccttgatgacaaccggatgggcaaaaagcatgacaagagcgcatcagacgccctccgcgcagaaaggggtcgatttctcattaagtccaacatcgtgaagcatgcactgattcccggcacccgcgccaagacaagcgcggtgtggaatttcttctatacagacccacaacacatctccagagccgtgtgcaatatatgcaaaaggtcagtgtctcgcggaaggcccggctcgcatctcgggacaagcacactgcagcggcatctgcaggcaacccaccccatccattgggctgtggccaataaagattctggtgccgtagccaacggtctggacgaggcagagaccgagcgatccgacttgcttagcgatacactgcatggtgagaagtcaaccggtagccaggacctgaccgccgaagacctctctgattccgactctgacgagccaatgttagaggtcgagaaccgatctgaaagccccattccagtcgccgagcagggcacattaatgcgggcccaggagcgagagaccacctgttgcggaaatcccgtgagcagtcacatatctcaggccatcatacagatgattgtggaggacatgcacccctacaactatttcagtacccccgccttccagagatttatgcagatcgtcgcaccagactaccgtttgccatcagaaacctacttcttcactaaggccgtgccacagctgtacgactgcgtcagggaaaaaatcttcctgaccctggagaacgttcagagtcaaaaaatccatctgacagtggacatttggacccacgatccatccaccgactatttcatcgtaacggtgcactgggtctcgctagagactgcatcgtttctgaacaacggcaggataccggattttagaaagtgggcagtcctctgtgtgacaggcctagcaaaggattgcctgattacaaatatcctgcaggaactcaatgaccagatcggcttgtggctctctccaaacttcttgattcctagctttattgtgagcgacaacagctcgaatgtggtgcatgcaataaaggacggaggctttacccatgttccctgcttcttacactgtttgaacatggtgatccaggactttttctgcgaacacaagtcaatagagaatatgctggtggcagcaagaaagacatgccaccacttttctcactcggttaaagcccggcagatccttcaagaattccagaatgatcaccagctgccctggaaaaatcttaaacaggatgaaaccggacattggatctctaccttctacatgcttaagtggctgctcgaacactgttacagtgtgcaccatagcctgggccgcgcctctggtgtggtgcttacatctctccaatggactctcatgacctacgtttgtgatatcctgaagccctttgaagaagcaacccagaaggtgtcggtgaagacggccggcttgaaccaggttttgccgctcatccaccacctgttgttaagcctgcagaagctgcgggaagattttcaggtgaggggaataactcaggcgctgaatcttgttgatagcctgtcccttaaactcgagacagatacacttctgagcgctatgttgaagtctaagccctgtattttagctacattgctggatccctgttttaaaaatagtctggaagacttctttccccaaggagctgatttagagacctataaacagtttctggctgaggaagtttgtaactatatggagagcagccctgaaatctgccagatccccacctccgaagcttcttgcccttccgtaacggttggtgctgacagctttactagctccctgaaagagggcaccagctcgtcaggctccgtcgattctagtgctgtggacaatgttgcgctggggagtaaaagttttatgttccctagcgcagttgccgttgtggacgaatactttaaggaaaagtacagcgagttctcaggtggcgacgacccattgatctactggcagaggaagatcagcatctggccagccttaactcaggtcgctatccagtatctatcatgtcctatgtgctcttggcagtctgaatgtatctttactaagaactcccacttccatccaaaacagattatgtcactcgatttcgataacatcgaacagttgatgttcttaaaaatgaatctcaaaaacgtgaattacgactacagtacactggtcctctcatgggatccagagcagaacgaggtggtccaaagcagcgagaaagaaatccttccatag

SEQ ID NO: 212502 - DNA, 4938 bp, synthetic construct
  misc_feature 1..4938: note = Description of Artificial Sequence: Synthetic coding sequence
  source 1..4938: mol_type = other DNA
atggaggagagcaagaccctgaagagcgagaaccacgagcccaagaagaatgtcatctgcgaagagtcaaaggccgtgcaagtgataggtaaccagaccttgaaggcgcgtaacgacaagagcgtgaaagaaatcgagaactcaagccctaataggaatagcagtaagaagaacaagcagaacgacatatgtatagaaaagactgaagtgaagagttgcaaggtgaacgcagcaaatcttcctggacccaaagacctgggcctggttctgcgggaccagtcccattgtaaagccaagaaatttccaaacagcccagtcaaggctgaaaaagcgacaattagccaagcaaaatcagaaaaagccacgtctctgcaggccaaagctgagaagagccccaagtctcctaattccgtaaaggccgagaaagccagcagctaccagatgaaatccgagaaagttccaagctccccggcggaggcagagaagggaccttcgctgctactcaaggatatgcgccagaaaaccgaactgcagcagatcggaaaaaagataccctcaagctttacatctgttgataaggttaacatcgaagccgtcggcggggaaaaatgcgcactgcaaaattcaccccgcagccagaagcagcaaacctgcactgataatactggggacagcgacgattctgctagcgggattgaagatgtttccgacgacttgtctaagatgaagaacgacgagagtaataaggaaaattccagtgaaatggattacctggagaacgcaacagtaattgacgaatcagccctcactcctgagcagcgactggggttgaagcaggcagaagagagactcgaaagggaccacatatttcgcctcgagaagaggtcaccagagtacacaaactgtcgctatctctgcaaattatgcctcatacacatagagaacatacaaggtgcacacaagcacatcaaagaaaaacgacacaaaaagaacattttagagaagcaggaagagtctgagctgcggtccctccctcctccctcacctgcgcacttagctgcattatctgtcgccgtcatcgaattggcaaaggagcacggcattacggacgacgatttgcgtgtgcggcaggagatcgttgaagagatgtccaaggtcattactacattccttcctgaatgctccctgagactgtatgggtctagtctgactaggtttgctctgaagtcttccgatgttaacatcgacatcaagttccctccaaaaatgaatcacccagatttgctgattaaggtgctgggcattctgaaaaaaaatgtactgtacgtcgatgtagagtctgacttccacgccaaggtgccggttgtggtctgtcgagatcgtaagtccggactgctatgcagagttagcgctggcaatgatatggcctgcttaactacagacctgctcactgcccttggcaagattgagccggtgttcatccccctggttctggccttcagatactgggcaaaactctgctacattgactctcagaccgacggtggcataccaagctactgcttcgcgctgatggtgatgttctttctgcagcagcggaagcccccgctacttccttgtctgctggggtcctggatcgaaggatttgacccgaagcggatggatgattttcagctgaaggggatcgttgaagagaagtttgtcaagtgggagtgtaatagttcttctgcgacagagaagaattccatcgccgaggagaataaagctaaagccgaccagcctaaagatgacaccaagaagaccgagacagataaccaatccaatgctatgaaagaaaagcacggcaagagccccctggccctcgagacgcccaaccgcgtctccctgggccagttatggctggaactgctgaagttttacactctcgacttcgcccttgaggagtatgttatctgtgtgcgcatccaggatattttaacacgtgaaaataagaactggccaaaacgccgcatcgctatagaagatcccttttctgtgaagaggaacgtagctcgcagcctgaatagccagctggtgtacgagtacgtggtggaaaggtttagggcggcttatagatacttcgcttgcccccaaactaagggaggaaataagtctacagttgatttcaagaagcgagagaagggcaaaattagtaataaaaagcccgtgaagtctaacaacatggctaccaatggttgcattctcctaggcgaaacgactgagaaaattaatgcagaacgggaacagccagtccagtgtgacgagatggactgcacatcgcagaggtgcatcatcgacaacaataacctgcttgtcaatgagctcgatttcgctgaccatgggcaggatagctccagcttgagcaccagcaagtcgtccgaaatcgagccgaaactggataaaaagcaggacgaccttgccccctcagagacttgcctaaaaaaggagctctcccagtgtaattgtattgatttatccaaatctcctgaccctgacaaaagtaccggaactgactgtcgttccaatctggagactgagtctagtcaccaatctgtctgcacagatacctcagcaacatcctgcaactgtaaggctactgaagacgcctccgatctgaatgatgatgacaacctgcctacccaagagctctactatgtctttgacaaattcattctaacttccgggaaaccaccgacaatcgtgtgcagcatctgcaaaaaagacgggcattcaaagaatgattgtcctgaagatttccggaaaatcgatttgaagcccctgcctccaatgactaataggtttagggaaatcctcgacctggtatgtaaacgatgcttcgacgagctctcacctccttgcagcgagcaacacaatcgggagcagattctgatcgggctggagaagttcatccagaaagaatacgatgaaaaggcacgtctctgcctttttgggagctccaagaacgggtttggtttcagggattcagatcttgatatctgcatgactctggaggggcatgaaaatgctgaaaagctgaactgtaaggaaatcattgagaatcttgccaagatccttaaacgccatccaggacttcgaaatatcctgccaatcacaacagctaaggtgcctattgtaaaattcgaacatcggcgatctggcctcgaaggcgacatatcattatataacacactggcccagcacaacacccggatgctggcaacgtacgcagcgattgaccctagagtgcagtatctgggatataccatgaaggtcttcgcgaagcggtgcgatatcggtgacgcctcgcggggcagtcttagcagctatgcatatatcctgatggtgctctattttctccaacaacgcaagcctcctgtaatacctgtgctgcaggaaatattcgatgggaaacaaatcccgcagcgcatggtggacgggtggaacgccttcttctttgataagacagaagaactcaagaagaggctgccctcactgggaaaaaacacggagtctttaggagagttgtggcttggtctgctgcgcttctatactgaggagttcgatttcaaggagtacgtcatctcaatccgacagaaaaagcttttgacaacatttgagaagcagtggacctcaaagtgcattgccattgaggacccatttgacctgaatcataacttaggcgcgggcgtctcaagaaagatgactaattttattatgaaggcattcataaatggacgcaagctgtttggaactcccttctatccactcatcggtagggaagctgaatactttttcgattcccgggtcctaactgacggggagctggcaccaaacgacaggtgttgtcgggtttgcggtaagattggccattacatgaaagattgcccaaaacggaaatcctctttgctgtttagactgaagaaaaaagatagcgaagaagaaaaggaaggcaacgaggaagaaaaggattctcgggacgttttggacccgcgggacctgcacgacaccagagattttcgcgatcctagagatttgagatgctttatctgcggagacgccgggcacgtacggcgcgaatgtccggaagtgaaactggccagacagcggaactcctccgtggccgccgcgcagcttgtccgcaacctggtgaatgcccagcaagtagctgggagcgcacaacagcagggggaccagtccatcaggacaaggcaatccagcgaatgctctgagtctccctcgtacagtccgcagcctcagcccttcccacaaaatagctcccagtctgccgctatcacacaaccgtcgtcacagcccgggtctcagcccaaactggggcccccccagcagggcgcacagccccctcaccaggttcagatgccactatacaatttcccgcagtcaccgccggctcagtatagcccgatgcataacatgggcctgttgccgatgcacccgcttcagatacccgccccaagctggccaatacatggccctgttatccactccgctccaggcagtgcgcccagtaacattgggttaaacgaccccagcattatctttgcccagcccgccgcccgtcccgttgccatccccaacacatcccacgacggccactggccgcggacagtggcacccaatagcctggtgaactcgggggctgtaggtaattcagagcccggattccgagggctgacaccccccatcccgtgggagcatgctccgaggccccattttcctctggtcccggcctcatggccctacggcctgcaccagaattttatgcatcaggggaacgcaaggtttcagcccaacaagccattctacacgcaggataggtgcgccacaagacggtgccgggagcgctgcccacacccgccgcggggcaacgtgtctgagtag

SEQ ID NO: 212503 - DNA, 4935 bp, synthetic construct
  misc_feature 1..4935: note = Description of Artificial Sequence: Synthetic coding sequence
  source 1..4935: mol_type = other DNA
atggaggagagcaagaccctgaagagcgagaaccacgagcccaagaaaaatgtgatatgcgaagagtctaaagccgtccaagttatcggcaatcagaccttgaaggccaggaacgataagtccgtgaaggagatcgagaactcctccccgaatcgtaatagctctaagaagaataaacagaatgatatttgtatcgaaaagaccgaagtgaaatcatgcaaagtgaacgccgcaaacctgcctgggccaaaagacctagggctggtgctgcgcgaccagtctcactgtaaggccaaaaagtttccaaattcccctgttaaggcagagaaggctaccatttctcaagccaagagcgagaaggctacgagcttgcaggctaaggccgagaagagtccaaaaagcccaaacagcgtcaaagccgagaaagcgtcttcttaccagatgaaaagcgaaaaggtgcctagctctcctgccgaagctgagaaagggccctctctgttactgaaagacatgcggcagaagacagagctccagcaaatcggtaagaaaataccgtcttccttcacttctgtggataaagtgaacatcgaggcagtggggggcgagaagtgcgccctgcagaactctcctcgctcccaaaagcagcagacctgtacagataacacgggggatagtgatgattctgccagtggaatcgaggatgtgtcagatgacctgagcaagatgaaaaatgatgagtctaataaggagaattcatcggagatggactacctcgagaatgctaccgtaatcgacgagtcagctctaactccagagcagaggctgggccttaaacaggctgaggagcggctggaacgcgaccacattttccggctggaaaagcgatctccggaatacactaattgccgttatctctgtaaactctgcttgattcatatagaaaacatacagggcgcccacaaacatatcaaagagaaacgccataaaaagaatatcttggagaagcaagaagaatcggagctccggagcctgcctcctccatctcctgcacacctggccgcactgagcgttgcagtgatcgagctggccaaagagcacggcataaccgacgatgatctaagagtgagacaggagattgtggaggagatgtctaaggttatcactacgtttctccctgaatgctctctgagattatacggtagttcactgacaaggttcgcactaaagagcagcgatgtgaacatcgacattaaattccctccgaagatgaaccaccctgacctcctcatcaaggtgctcggtattctgaagaagaacgtcctgtatgtagacgtcgagtctgacttccacgcgaaggtgccagtagttgtgtgtagagatagaaagtcaggactcctatgcagagtctccgccggtaacgatatggcctgccttaccacagacctcctgactgctctgggaaagatcgagcctgtgtttatccctcttgtgcttgcattccgctattgggccaaactgtgttacatagacagccagacagacggtgggatccccagctattgcttcgcccttatggtgatgttcttcctccagcagagaaaaccacctttgttgccgtgcctacttggaagttggatcgaagggttcgaccctaagcggatggacgactttcagctgaagggtatcgtggaagagaaatttgtaaagtgggagtgcaacagttcgtctgctaccgaaaaaaacagcatcgccgaggaaaacaaagcaaaggcagaccagcctaaggacgatactaagaaaacagagacagacaatcaatccaacgctatgaaagagaaacacggaaaaagccccctcgccctcgagacccccaatcgcgtatctttgggacagctttggttggagctgctgaagttctatacccttgattttgccctcgaggaatatgttatctgcgtgcgaatccaggacattttgacccgcgaaaacaagaattggcctaaacggaggatcgccatcgaagatccatttagcgtgaaacgaaacgtcgccaggtcactgaactcccagctggtctatgagtatgtggtggaacgctttcgggccgcttatcggtactttgcttgcccccaaacaaagggcggaaataagtcaacagtggacttcaaaaagcgtgagaagggcaagatttctaataagaagcctgttaaatcaaacaatatggctactaacggctgtatattactgggtgaaactactgaaaaaattaacgcagagcgggaacagccggttcagtgtgacgaaatggactgcactagccagaggtgtatcattgataacaataacctcttggtgaatgagctggatttcgccgatcacggacaagattcctcttcactctcgacaagtaaatccagtgaaatcgaacccaaactcgataaaaaacaggacgacctggccccgagtgaaacgtgtctcaagaaagagctaagccagtgtaactgcatcgacttgtccaagtcacccgaccccgataagtccacgggcactgactgtagaagcaatttggagacagaatcaagccatcaaagcgtgtgtaccgacacctctgccacatcttgcaactgtaaagcaacggaggacgcctcggatctgaatgacgacgataatcttcccacgcaggaactgtactatgttttcgataaattcatcctcacatcagggaagcccccaactatcgtgtgttccatctgcaagaaggacggacacagtaagaacgactgtcctgaagatttccggaagatcgacctaaaacctctgccccccatgactaaccggttccgagaaattttggacttggtgtgcaagcggtgtttcgacgagctgagccctccttgcagtgagcagcataatagagagcaaattctgatcggcctggagaagttcatccagaaagaatatgacgaaaaagcgagactgtgcttatttgggtcttctaagaacgggttcgggtttcgagattctgaccttgacatctgcatgacgctcgaaggacatgagaatgctgaaaaattgaactgcaaagagatcatagagaacctcgccaagatcctgaagcggcacccaggcctgcgaaatattctacccattacaaccgctaaggtgcctatcgttaagtttgagcataggcgctccgggcttgaaggcgacatttcgttgtacaacaccctagctcagcacaatacaagaatgctggccacatacgccgccattgaccccagggtgcagtacttagggtacacaatgaaagtatttgccaagaggtgtgatatcggtgacgcttccaggggatccttaagtagttacgcctatattcttatggtgctctattttctgcaacagcgaaaaccaccggtgatccccgtgctgcaagagatcttcgacgggaaacaaatacctcagagaatggtggacggctggaacgccttcttctttgacaaaaccgaggaactgaaaaaaaggctaccgtccctcgggaaaaatacggagagcttgggagagctgtggctcggactgctgcgcttctatacagaagaattcgatttcaaggagtacgttattagtatcagacagaagaagctgctgaccacctttgaaaaacagtggacatctaagtgcattgccattgaggacccattcgatctaaaccataacttgggggctggagtgtccagaaaaatgactaattttataatgaaagcttttattaatggcagaaagctcttcggtacccccttttaccccctcatcggacgggaggccgaatatttctttgactctagggttctgaccgacggagaactggctccaaatgacagatgttgcagagtgtgcgggaagatcggccattacatgaaggactgccctaagcggaaatctctgttatttaggctgaagaagaaagactcggaagaagaaaaggaaggcaacgaggaagaaaaagacagccgcgacgtgctggacccacgtgatctacatgacactagggattttagagatcctcgagatttgcgctgttttatctgcggtgatgctggacatgtccgccgggagtgtcccgaggtgaagctcgccaggcagcggaactcatccgttgctgccgcccaactggtaaggaacctggtcaatgcacagcaagtcgcagggagcgcgcagcagcagggcgatcagagcatccggactcgccagtcctccgagtgcagtgaatcacctagttactctccacagccacagcccttcccccagaatagtagccagtccgcggctataacccaaccttctagtcagccgggatcccagcctaagctggggcccccccaacaaggggctcaaccaccacaccaagtgcagatgccactgtacaatttcccccagagcccgccagcccagtatagtcctatgcataacatggggctcttgccaatgcacccgctacagattccggcgccatcctggcctatccatgggcctgtaatacactctgcccccggctcagccccttctaatatagggctgaacgatccctccatcatcttcgcacagccggccgcgcgtccagttgctataccaaacacaagccatgacggccattggccaagaactgtcgctccaaactcgcttgtgaactcaggggcagtgggtaactccgagcccggtttcagaggtctaacaccaccaataccgtgggagcacgcaccaaggcctcactttcccctcgtccccgctagctggccatacgggctacaccaaaacttcatgcaccagggcaacgcccgattccagcccaacaaacctttctatacccaagatcgctgcgccacaagacgttgtcgagagaggtgtcctcaccccccacgcggcaacgtgtcggaatag

SEQ ID NO: 212504 - DNA, 264 bp, synthetic construct
  misc_feature 1..264: note = Description of Artificial Sequence: Synthetic coding sequence
  source 1..264: mol_type = other DNA
atggaggagagcaagaccctgaagagcgagaaccacgagcccaagaaaaacgtgatctgcgaagaaagtaaggcagtccaggttattgggaatcaaacgttgaaagccagaaacgataagtctgtcaaggagatcgagaatagcagtcccaataggaacagttccaagaaaaacaaacagaacgatatatgcatcgagaagacagaggtcaagtcctgtaaggtaaatgccgctaatcttcctggacctaaagaccttgggtag

SEQ ID NO: 212505 - DNA, 234 bp, synthetic construct
  misc_feature 1..234: note = Description of Artificial Sequence: Synthetic coding sequence
  source 1..234: mol_type = other DNA
atggaggagagcaagaccctgaagagcgagaaccacgagcccaagaaaaatgtaatttgtgaggagagcaaggcggttcaggtgatcgggaaccagacgctgaaagcacgtaacgataagtcggtgaaggagattgagaactcaagccccaacagaaatagctcgaagaaaaataagcaaaacgacatttgcatagagaaaactgaggtgaaaagttgcaaagtgaacgcatag

SEQ ID NO: 212506 - DNA, 1209 bp, synthetic construct
  misc_feature 1..1209: note = Description of Artificial Sequence: Synthetic coding sequence
  source 1..1209: mol_type = other DNA
atggccagcatcatcgcccgggtgggcaacagccggcggctgaacgccccgctgccgccttgggctcatagtatgctgagaagtcttggaagaagtcttgggcctatcatggcatctatggcggaccgaaacatgaaactttttagcggtagggtcgtgcccgctcagggagaggagaccttcgaaaattggctcacccaggtgaatggggtactgccagactggaatatgtctgaggaggagaaactcaagaggctgatgaagacactgcgtggtccggcacgagaagttatgagagtcctgcaggcgactaaccccaacctgagtgtcgcggatttcctgcgggctatgaaactggtgttcggagaatcggagagctccgtgactgcccacgggaagttcttcaatactcttcaggcgcagggagaaaaagcttctctgtacgtgatcaggctggaggtacaactgcagaatgccatccaggctgggatcatcgctgaaaaggatgcgaacagaacaagactgcaacaactgctcctcggcggcgagttgtcgcgggacctcaggttgagactgaaggactttctccgcatgtatgccaatgagcaggaaagattaccaaacttcctcgaactgattcgaatggtccgggaggaggaggactgggatgacgccttcatcaaaaggaagcggccaaagcggtcagaaagcatggtggagagggctgttagcccggtcgcatttcaggggtcaccaccaatcgtaattgggagcgccgattgcaatgtaatcgaaattgacgatacgctcgacgactctgatgaagatgtcatcctagtggaaagtcaggatccaccactgccatcttggggtgcccccccgctgagggatagagcccggccacaggacgaggtgcttgtcatcgactctccgcataactctcgagctcagttcccatccacttctggcggatcaggctataagaacaacggcccaggtgagatgaggagagcacgcaaacgcaagcatactatacggtgttcctactgcggagaagagggacacagtaaggagacatgtgacaatgagtctgacaaagcccaagtgttcgagaatctcatcatcacactacaggaactgactcacacagagatggaaaggagtagggtggccccgggagaatataatgactttagcgagccactgtag

SEQ ID NO: 212507 - DNA, 1542 bp, synthetic construct
  misc_feature 1..1542: note = Description of Artificial Sequence: Synthetic coding sequence
  source 1..1542: mol_type = other DNA
atggccgccagccggaacggcttcgaggccgtggaggccgagggcagcgccggctgcagggggtctagtggaatggaggtcgtgttaccactggacccagccgtgcctgcacccctgtgcccacacggcccgacattgctattcgtgaaagttacccagggaaaagaggagacgcggaggttctacgcgtgcagtgcctgccgggacaggaaagactgtaacttcttccagtgggaggatgaaaagttatccggagcccggttggcagctcgagaggcccacaatcggcgttgtcaaccaccgctgtcccgcacccagtgcgtggagcgttatctgaagttcatcgagctgcccctgactcagcggaagttttgccaaacgtgtcagcagctcctgcttcccgatgattggggacagcactccgagcatcaggtgctcggcaatgtgtcaattacccagctgcgcaggccttcacagctgctttacccactagagaacaaaaaaacaaatgcccagtatctgttcgccgatcggtcttgtcaatttttggtggacctcctttctgccctgggattcagacgggttctttgtgtgggcacacctcgattgcacgagctcatcaaattaacagcatccggcgataagaagtcgaacattaagtctttactccttgacatagacttcagatattcccagttttatatggaagattctttttgccactacaatatgttcaatcatcatttttttgacggtaagaccgctttggaagtttgcagggcattcttgcaggaggacaagggggagggaatcattatggtgactgatccacccttcgggggccttgtggaaccgctggcaattacattcaaaaagcttattgccatgtggaaagagggacagtcccaagacgacagccacaaggaacttcccattttttggatcttcccctacttctttgaatcacgcatctgtcagttcttcccaagcttccagatgctggactaccaggtggattatgacaaccacgccctatataagcacggaaagaccggacgcaaacagagcccagtgcgtattttcactaatatccctcctaataaaatcattctgcctaccgaggaggggtacaggttctgtagtccctgccagcgatatgtctcactggaaaaccaacactgcgagctgtgcaattcatgcacctcaaaggacggaagaaagtggaaccactgctttctgtgcaaaaaatgcgtgaaaccgtcatggattcattgctctatttgtaatcactgcgccgtcccagaccacagctgcgaaggccctaagcacggttgcttcatttgtggcgaactagaccataaacgttctacttgtcccaacatagcaaccagtaagcgcgcaaataaagccgtgcgcaaacagaaacagcgaaaatctaataagatgaaaatggagacaactaaaggtcagagtatgaaccatacatctgcgactagacggaagaaacggagagaaagggcacaccagtacctgggatcttag

SEQ ID NO: 212508 - DNA, 384 bp, synthetic construct
  misc_feature 1..384: note = Description of Artificial Sequence: Synthetic coding sequence
  source 1..384: mol_type = other DNA
atggaggtggtgctgcccctggaccccgccgtgcccgcccccctgtgtccccatgggcctactctgctgtttgtaaaggtcacacaaggcaaagaagagacacggagattctacgcctgctcagcttgcagggatcgcaaagattgcaacttcttccagtgggaggatgaaaaactgtctggagctaggctggcagcgagggaagcgcacaatcggcgatgccagcctccgctgtccagaacccaatgcgggaggtacctgaagttcatcgagctgcctctgacccagagaaagttctgccagacctgtcaacagctgctcttgccagacgattggggacagcatagtgagcaccaattttgggtgtgtgttattacttcctag

SEQ ID NO: 212509 - DNA, 1479 bp, synthetic construct
  misc_feature 1..1479: note = Description of Artificial Sequence: Synthetic coding sequence
  source 1..1479: mol_type = other DNA
atggtgatcctgctgctgcagcacggcgccgaccccaccctgatcgatggtgaaggattctccagcatccatcttgccgtacttttccaacatatgcctattatcgcttacctcattagcaaagggcagtcagtgaacatgactgatgtaaatggacaaactccactgatgctcagtgctcacaaggtgatcggccccgagcccacgggattcctccttaagtttaacccctcactgaacgtagtagacaagattcatcaaaacacccccctgcattgggcagttgcagcaggcaatgtcaatgcggtcgacaaactgttggaagcagggagcagtctggacatccaaaatgtaaagggcgaaacgcctttagacatggctctgcaaaataaaaatcagcttatcatacacatgctgaaaacggaggctaagatgcgggctaatcagaaatttagattatggagatggctgcaaaaatgcgagctgtttctcctgctgatgttgagcgtgatcacaatgtgggcaataggctacatactagatttcaactctgatagctggcttttaaaggggtgtctcctcgtcaccctgttcttccttacatctctatttcccaggttccttgtgggctacaagaacctggtatatctccccaccgctttcctgttaagcagcgtgttttggatatttatgacctggttcattctgttcttcccggatctggcaggcgctccgttctacttctcatttatatttagcatcgtagccttcctgtattttttctacaagacatgggccacagaccccggtttcactaaggcgagtgaagaagagaaaaaagtcaacatcattacgctagcggaaaccggctctctggacttccggaccttctgtacctcctgcttgatacgtaaaccactgaggtccctgcattgccacgtctgcaactgctgtgtcgctaggtatgaccagcattgcctctggacaggcaggtgcataggtttcggtaatcatcactattacatttttttccttttttttctatcaatggtttgcggctggattatttatggaagtttcatctacctgtccagccattgcgcaactacctttaaggaagatggactgtggacttacttgaatcagattgttgcttgtagcccctgggtgctctatatactgatgctggccactttccatttctcctggagtacatttctcctactcaatcagctattccaaatcgctttcctgggattaacttcacacgaacgaattagtctgcagaagcagtctaaacacatgaaacagacgctctctctccggaagaccccatataatctgggtttcatgcagaatctggcggactttttccagtgtggatgcttcggactcgtcaagccttgtgtggtggactggaccagccagtacacaatggttttccaccctgcccgggaaaaagtcttgaggtcagtatag

SEQ ID NO: 212510 - DNA, 1869 bp, synthetic construct
  misc_feature 1..1869: note = Description of Artificial Sequence: Synthetic coding sequence
  source 1..1869: mol_type = other DNA
atggagggccccggcctgggcagccagtgccggaaccacagccacggcccacatccgcctggctttgggcggtacgggatttgtgcacatgaaaataaggagttagccaacgcaagggaagctctaccactcattgaagattcatcgaactgcgacattgtgaaggccacacagtacgggattttcgaaagatgcaaagaactggtcgaggctggctacgacgtgcggcaacccgataaagagaacgtaagcctgctgcactgggcagccattaataatagactggacctcgtgaagttctacatctccaaaggcgcagtggtggaccagctcggaggggatctgaattctacacccctgcactgggccattcgtcaggggcatctaccaatggtgattttgctattacagcatggggccgaccctactctgattgacggtgaaggcttcagctcaatccacttagcagtgctgttccagcacatgcccattatcgcctaccttatcagtaagggccagtcggttaacatgactgatgtgaatggccagacgccacttatgctgagtgcacataaggtgattggaccggagcctactggttttctgctgaagtttaatccttccctcaacgtggttgataaaattcaccaaaacacccctctgcactgggctgttgcagccggcaatgtgaatgccgtggataaactgctggaggctgggtcctctttggacattcaaaatgtgaagggcgagacccctctggatatggcccttcagaataaaaatcagcttatcatccatatgctgaaaacagaggcaaagatgagagctaaccagaagttccgcctgtggcgttggctgcaaaagtgtgaattgttcctattgctgatgctgtccgtaatcaccatgtgggccattggatatatccttgacttcaacagtgactcctggttgctgaaaggatgcctcctcgtgaccctgttctttctcacatcattatttccccggttcctggtgggctacaagaacttagtgtacctgccgactgcattcctcctctcatcagtcttttggatcttcatgacttggttcattctgtttttcccggacctcgctggtgcacctttctactttagtttcatcttcagcatagtcgccttcctgtatttcttttataagacctgggcaacggatccaggattcactaaggcatcggaggaggaaaaaaaggtaaacatcatcaccctggccgagacaggtagcctggactttcgcaccttttgtacaagctgcttaatacgtaagccattgagatctctccactgtcatgtgtgtaactgctgcgttgcccgatacgatcagcactgcctgtggacaggcaggtgtataggtttcggaaaccaccactattatattttcttcttgttcttcctgtctatggtctgcggctggattatatacggctcctttatctacttgtcttcccactgtgctaccacctttaaagaggacggcctctggacttacctgaaccagattgtcgcctgttcaccgtgggtgctgtacatattaatgctggcaacattccactttagttggtctacattcctcctgctgaatcagctgttccagatagcctttctcggcttgactagccacgagagaattagtttgcaaaaacaaagcaaacacatgaaacagacactctcactccgcaagaccccgtacaaccttgggttcatgcagaatctggctgatttttttcagtgcgggtgttttggactggtgaaaccctgcgtggtggattggacaagccaatatacaatggtctttcaccctgccagagaaaaggtgcttcgcagcgtttag

SEQ ID NO: 212511 - DNA, 564 bp, synthetic construct
  misc_feature 1..564: note = Description of Artificial Sequence: Synthetic coding sequence
  source 1..564: mol_type = other DNA
atgcggcggggctggaagatggccctgagcggcggcctgcggtgctgcaggagagttctgtcgtgggtgcctgttctcgtcattgtcctggtggtcctgtggagctattatgcctacgtctttgagctttgtctggtgacagtgctctctcctgccgaaaaggttatttatctgattctatatcatgcaatttttgtttttttcacatggacctattggaaatcaatatttactcttccacagcagccaaaccagaaatttcacctgtcatatacagacaaggaaaggtacgaaaacgaggagagaccagaagtccagaaacagatgttggtggacatggccaaaaaactaccggtgtataccagaactgggagcggtgccgtacgtttttgcgacagatgccatctcattaagcccgacaggtgtcaccattgttcagtgtgcgcgatgtgcgtgctgaagatggatcatcactgcccctggggaaattaccccgtgtttgctttatcctctatgtccttcttcttcagcctttggccggcgtgcttcctctctgcgctttag

SEQ ID NO: 212512 - DNA, 1014 bp, synthetic construct
  misc_feature 1..1014: note = Description of Artificial Sequence: Synthetic coding sequence
  source 1..1014: mol_type = other DNA
atgcggcggggctggaagatggccctgagcggcggcctgcggtgctgcagacgcgttctcagctgggtgcctgttctcgtaatagtgctggtggtcctatggtcttactatgcctacgttttcgagctctgcctggtgaccgtcctgtcccctgccgagaaagtgatctatctaatcctctaccatgcaatctttgtgttctttacatggacctattggaaaagtattttcacgctcccgcagcagccaaaccagaagttccacctctcctacaccgacaaggaaagatacgaaaacgaggagaggccagaagtgcagaagcagatgctcgtcgacatggcaaagaagctgcccgtctacacgagaactggatccggcgctgttagattctgcgataggtgccacctgatcaaaccagacagatgccatcattgtagtgtgtgcgcgatgtgtgtgctgaaaatggaccaccattgtccatgggtgaataattgcatcggcttttcaaactataaatttttcctccagtttctggcatattcagtcctttattgcctgtatattgcaacaactgttttctcttacttcatcaaatactggcgaggcgagctccctagcgtcaggtctaagttccacgttctttttctgttattcgtggcttgcatgttcttcgtctcactagtgattcttttcgggtatcactgctggctggtgagccggaataagaccacattggaggctttctgcacacccgtattcactagtggacctgaaaagaacgggttcaatctcggattcatcaaaaatatccaacaggtcttcggagataaaaaaaagttctggttgatcccaattggctccagccctggagatgggcacagctttcctatgaggtcaatgaacgagtcccagaaccctctgttagctaacgaggagacttgggaggacaatgaggacgataatcaggactatcctgagggctcttcttccctggctgtggaaaccgaaacatag

SEQ ID NO: 212513 - DNA, 987 bp, synthetic construct
  misc_feature 1..987: note = Description of Artificial Sequence: Synthetic coding sequence
  source 1..987: mol_type = other DNA
atgcggcggggctggaagatggccctgagcggcggcctgcggtgctgcagaagggttctctcctgggttccagtgttggtgatagtgctcgttgttttgtggtcttattatgcttatgtttttgaactgtgtcttgtcatctatctgattctttatcatgctatttttgtatttttcacttggacgtattggaaatcaatctttacactgcctcaacagccaaaccagaaattccatctgtcgtatacagacaaggagcggtatgaaaacgaggaacgacccgaggtccagaaacagatgctggtggacatggctaagaagctgcctgtgtataccagaacaggttccggcgccgtccgcttttgtgaccggtgccatctgatcaagcccgatcgttgccatcactgttcagtttgcgccatgtgcgtgttgaagatggatcatcattgcccctgggtaaacaactgtatcgggttctccaattataaattcttcttacaattcttggcttacagcgtcctgtactgcctctacattgctaccacagtctttagctatttcattaaatactggagaggggagcttccttccgtgcggtctaagttccatgtactttttcttcttttcgtagcctgcatgttttttgtcagcctggtgattttgtttggttaccattgttggctggtttcgcgcaataagaccaccctggaggccttctgcacccctgtgtttacttccgggcccgaaaaaaacggatttaatctaggctttataaagaatatccagcaggtgtttggcgacaagaagaagttttggctgatcccaattggctcctccccaggtgacggacattccttccccatgaggagcatgaacgaatcacagaatccactactggccaatgaggaaacatgggaagataatgaagacgataatcaagactatcccgagggcagttcatcactggcagtggaaactgagacttag

SEQ ID NO: 212514 - DNA, 2022 bp, synthetic construct
  misc_feature 1..2022: note = Description of Artificial Sequence: Synthetic coding sequence
  source 1..2022: mol_type = other DNA
atgccccggagccccggcacccggctgaagcccgccaagtacatcccagtcgcgactgccgccgcattgctggtgggttcgtcgaccctcttctttgtatttacttgtccctggctgactcgagccgtcagtccagctgtgccggtgtacaacggcattatatttctgttcgtcttggcaaacttttccatggcaacatttatggacccaggagtgtttcctagggctgacgaagacgaggacaaggaggatgactttagagctcccctgtacaagaacgtggatgtgcggggcatacaagtgagaatgaagtggtgcgcgacctgccacttttaccgtcccccaagatgttcacactgttccgtctgtgacaactgtgtagaagttactggcaaattccgggggggtgtcaacccatttactcgcggctgttgtgggaacgttgagcatgtgttgtgctcacccctggcccctcggtatgtggttgagcctccccgactgcctcttgccgtttctttgaaaccgccatttctgcgcccagaactgctggatagggcagctcccctaaaggtgaaactctctgataacggattgaaggctggactgggccgcagcaagtcaaaaggttctctggatagactcgacgagaagcctctggacctcggcccacctctgccacccaagatagaggccggcactttttccagtgacttgcagacacctcgacctgggtcggctgagagcgcactctccgtgcaaagaacaagtcctcccacaccagccatgtataaattccgcccagctttccccaccggacccaaggtgcccttctgcggtcccggagagcaggtccccggtccagacagtctgacgcttggcgatgactcaattcggagcctggacttcgtgtccgaaccttctctggatctcccagattatggcccaggaggcctccacgcagcatatccaccatctccaccactttcagcgtctgatgcattctctggcgcactaaggtctctcagccttaaggcatcatcgagaaggggcggagatcatgtcgcactccagcccttgagatccgaaggggggccgcctaccccccaccgcagtatcttcgcgccacacgccctaccaaatagaaatggcagcctgtcctatgattccttgcttaatcccggatcaccgggtggccatgcgtgccccgcccaccctgccgtgggtgtggcaggctatcactccccttaccttcatccaggagctactggagaccccccacgaccgttgccccgaagctttagtcccgttttagggccccgcccccgggaaccatcccccgtcagatatgataatttgtctcggacgatcatggcatctatccaggagcggaaagaccgcgaggagagggagcgtctgctgcggtcccaggccgactcacttttcggcgacagtggcgtctacgatgctcccagttcctactccctccagcaggccagcgtattgtccgagggcccccgaggtcctgctcttaggtacgggtcacgcgatgacctggttgctggacccggattcgggggtgccaggaatccggcactccaaacaagtctctcatccctgagctcaagcgtttcccgagctccccgtacctcttcgagctctctgcaggccgaccaggcttcatctaacgctcctggcccgcgccccagctctgggagccaccgatcgccagccaggcagggtctcccaagtcctcccggtactccccactcacctagctacgccgggcctaaggccgtcgcctttattcacactgacctgccggaaccacctcccagcctgactgtgcagcgcgaccatcctcagctgaaaacaccgccatccaaactcaatggtcaatctccaggccttgcaaggctgggcccagctaccggcccaccagggcccagtgcatctccaactagacacaccctggttaaaaaagtgagcggcgtgggcggaaccacttacgagatcagcgtttag

SEQ ID NO: 212515 - DNA, 2298 bp, synthetic construct
  misc_feature 1..2298: note = Description of Artificial Sequence: Synthetic coding sequence
  source 1..2298: mol_type = other DNA
atgccccggagccccggcacccggctgaagcccgccaagtacatccctgtcgccaccgcagccgccctgctggttggctcatcaacccttttcttcgtgtttacatgcccttggttaacccgagccgtatctccagctgtgcccgtgtacaacgggattatcttccttttcgtactcgctaacttctcaatggccaccttcatggatccgggagtgtttccacgagccgatgaggacgaggacaaagaagatgacttcagggcgcctttatacaaaaacgttgatgtcagaggcatacaggtgaggatgaaatggtgcgcaacatgccacttctaccgccctcctagatgtagtcactgctctgtgtgcgataattgcgtggaggactttgaccaccattgtccttgggtgaacaactgtattgggcgtagaaactacagatatttctttttattccttctttccctcagtgctcacatggtcggagtggtggcgttcggccttgtgtacgtccttaaccatgccgaaggcctgggggctgcccacacaacaatcactatggcggtgatgtgtgtcgccggcttgtttttcatccccgtaattggattgaccggcttccatgtagtgctcgtaactaggggtagaaccacaaatgagcaagtcaccggtaagtttcgcggcggagtgaatccctttaccaggggctgctgcggcaacgtcgagcatgtgttgtgctccccgctggcaccaagatacgttgttgaacccccacgcctcccactcgcagtctcattaaaacccccttttctccgcccagagcttcttgacagagccgcacccctcaaagtgaaactcagtgataatggactgaaagcagggctgggtcgctccaaatcaaaaggttctctggatcgactggacgagaaaccacttgatctggggccacctttgcctccaaaaatagaggcagggacattttcttctgatctccagaccccacgtcccggatcagccgaaagtgcccttagtgtgcagcgcactagtccccctacacccgcaatgtacaagttccggcctgcctttccaaccggcccaaaagtgccattttgtggccccggcgagcaagtacccggcccagactctctgaccctaggagacgacagcattagaagcctggacttcgtcagcgagccttcccttgacctcccggattacgggccaggcggcctgcacgctgcttaccctccaagcccccctctgtcagcctcagatgccttttccggagcactacgctccttgagcctcaaagcttcttcccgccgcggcggtgatcatgttgccttacagcctctgcggtctgagggtggacctcccacaccacaccggtcaattttcgcgcctcacgctctgccgaatagaaatgggtcactatcctacgatagccttctgaacccaggaagcccgggaggtcacgcttgcccagctcacccagcagtgggcgtagctggataccattcgccttacttgcacccaggagctacaggcgatccacctcgacccctaccccggtcttttagccctgttctgggaccccgtccgcgcgaacctagtccggtgcggtacgataatctatcacgaacaatcatggcctccatccaggagcgaaaggatcgggaagaacgggaacgccttctgaggtctcaggccgacagccttttcggagactctggagtatatgatgccccaagttcttactccctgcagcaagccagtgtgctctcagaggggccccgggggcccgccctccgctatggcagtcgggacgacctggtggccggacccgggtttggcggggcccgcaatccagcattgcagacttccttaagttctctctcaagttctgtatcgcgcgcgccgcgcacgtcctcttctagcctgcaggcagatcaggcctcttctaacgctcccgggcctagaccatctagtggctcgcatcggagccctgctcggcaaggattgccctccccacctggcacacctcattccccctcatacgctgggcccaaggcagtggcattcatccatacagacttacccgagcccccgccatctctcaccgtgcagcgggatcaccctcagctcaaaacacccccctcgaaactaaacggtcagtcacctgggttggctagactgggccccgctacggggccacccggacctagcgcctctccgacccgacacacccttgtgaagaaggtgtctggggtgggaggaactacatacgaaatctcagtgtag

SEQ ID NO: 212516 - DNA, 2337 bp, synthetic construct
  misc_feature 1..2337: note = Description of Artificial Sequence: Synthetic coding sequence
  source 1..2337: mol_type = other DNA
atgccccggagccccggcacccggctgaagcccgccaagtacatcccggtcgccacagcagccgcactattagtcggtagttcgaccctcttctttgtcttcacgtgcccatggctgactcgagccgtgagcccggccgtacctgtttataatggcattatttttctgttcgtgctggccaacttttctatggctacttttatggaccccggcgtctttccaagagcggatgaggacgaagacaaggaggatgatttcagagcaccactatataaaaatgtggatgtgaggggcatccaagtccgcatgaagtggtgtgccacctgtcatttttatcgacccccaaggtgtagtcactgctccgtttgtgataattgtgtagaagacttcgaccaccactgcccctgggtcaacaattgcattggccgtagaaattaccgttacttttttttattcctgctatctctttccgctcatatggttggggtggtggcgtttggattagtgtacgttttgaatcacgcagagggcctgggggccgctcatacaactattacaatggcagtgatgtgcgtggctggactcttctttatcccagtgatcggactgacaggttttcacgtagtgctcgtaaccagaggtcgcaccacgaatgagcaggtcactggtaagtttaggggaggtgtgaacccctttactagaggctgttgcggcaatgtggagcacgtgctctgcagcccgctagcacctagatacgtggttgaacccccaaggctgccgttagccgttagcttaaagcctcccttcttgaggccagaactcttggacagggctgctccccttaaggtcaaactgtccgacaacggccttaaggccggacttggcaggagtaaatctaaagggtccctagataggctcgatgagaagcctcttgaccttggtccaccgctaccccccaagatcgaagctggtaccttttctagcgatctgcagacccctaggcctggttcagctgagtccgctctgtcagtgcaaagaacatcaccacctacacccgcaatgtataaatttcgtcctgcctttcctacaggcccaaaggtgcctttctgtggtccgggcgagcaggtccctggaccggactcccttaccctgggagatgattctataaggtcgttggactttgtcagcgaaccatccctggacctgccagactatggccccggcggattgcacgcagcctaccctccatcccctcctctgtccgcctctgacgcattttctggagccttgaggtcgctttcactcaaggcctctagcaggcgagggggggaccatgttgctctgcaacccctcagatcagagggagggcctccaacacctcatcgatctatatttgcaccccacgccttaccaaataggaacgggtcactctcatacgattccctgcttaacccaggctcacctggtggacatgcatgtccggcccaccccgcagtgggcgtggccgggtaccattcaccctatcttcacccaggagcgaccggcgatcctccccgacccctgccccgaagtttctcccccgttctgggtcctcggccgagggagccaagccccgtcaggtatgataatctctcacgcacaatcatggcttcaatccaggaacgcaaggaccgcgaggaacgtgagcgcttacttaggtcacaggcagacagcctctttggcgactccggggtgtatgacgctcccagcagttactctctgcagcaggcgtctgtcctgtcagaagggcctaggggacccgccctgaggtacggaagtagggacgacctggtggcaggccctggatttggaggggcacgaaaccccgcgcttcagaccagcctctcttctctctccagcagcgtctccagagccccccggacgagttcatctagcctccaggcggatcaggccagttccaatgcccccggcccaagacctagttccggttctcaccggtccccagctcggcagggcttgccctctcctccagggaccccacactcacccagctacgcgggtcccaaagcggtagcattcattcacaccgaccttcctgagccgcccccatccttaacagtccagcggggcaggattggaacttgtacaaggggatggggcagacggggacaaccttgggtaccgcctggtctgcacctgtgccatctcgggcgtcctgaagatcgcccgccacttcgcgccccttggtctcaagcagctggggcccctccaaggggggctatgtgtcggctgcaccttgcggcaagctctctgttcccctctctgtccggtccttag

SEQ ID NO: 212517 - DNA, 1095 bp, synthetic construct
  misc_feature 1..1095: note = Description of Artificial Sequence: Synthetic coding sequence
  source 1..1095: mol_type = other DNA
atgagcgtgatggtggtgcggaagaaggtgacccggaagtgggagaagctccccggaagaaacacattctgctgcgatggccgcgtgatgatggcgcgacagaaaggtattttctatttaacactctttctaattctcgggacgtgcactctattctttgcatttgaatgccggtaccttgccgtgcaactttctccagcaatccccgtgttcgcagcgatgttattcctcttctcaatggcgaccctgttgcggaccagcttttcagaccccggggttatacctcgggcacttcctgatgaggcggcttttattgaaatggagattgaagccacaaacggcgcggtcccacaaggacagcgccccccacctcgcattaagaactttcagattaataatcaaattgtaaagctaaaatattgttacacttgcaagattttcagaccaccgcgggcatcccattgctctatttgcgataactgcgtggaacgctttgatcaccattgcccctgggtggggaactgtgtgggaaaaagaaactatagatacttctatctgttcatcctctcactgagcttgctgactatatacgttttcgccttcaatattgtctacgtcgctttaaagagcctgaagatagggtttctggagaccctgaaggagaccccagggacagtgctggaggtgcttatatgtttctttacattatggtcagtagttggtctgacggggttccatacatttcttgtagcactgaatcagaccacaaacgaagacatcaaggggagctggaccggcaagaaccgtgtccagaatccatacagtcatggaaacatcgtgaaaaattgctgcgaggtattgtgtggacccttaccaccgagcgtccttgatcgccgtggtatcctgcccctcgaagagtcgggaagcaggccaccctctacgcaggagacatcaagttcacttttgcctcagagtcccgctcccactgagcaccttaactcaaacgagatgccagaggattcctctacaccggaagagatgccacctcctgaacctccagaaccccctcaggaagctgccgaggccgaaaaatag

SEQ ID NO: 212518 - DNA, 1095 bp, synthetic construct
  misc_feature 1..1095: note = Description of Artificial Sequence: Synthetic coding sequence
  source 1..1095: mol_type = other DNA
atgagcgtgatggtggtgcggaagaaggtgacccggaagtgggagaagcttcccggccggaatactttctgctgcgacggacgcgtaatgatggcacggcaaaagggaattttttacttgacacttttcttgattctgggaacttgcacactgtttttcgccttcgaatgtcgatatctggcagtgcaattgtcccccgccatccctgtgtttgcggcgatgctgtttctgttttctatggctacactgctccggacatccttctctgatccaggggtgattccacgagccctgcctgacgaagctgcatttatcgaaatggagatcgaagcaacaaatggcgcagtaccacaaggccagcggccacccccgaggataaagaatttccagattaataatcagatcgttaagcttaagtactgttacacatgcaaaatctttagacccccccgcgcctcgcattgttcgatctgtgataattgcgtggaaaggtttgaccaccattgcccatgggtgggaaactgcgtgggaaagaggaactatcggtatttctatttgttcattctgagcctgtccctgctaacaatttacgtttttgcgtttaacatagtatacgtggcactcaaatcacttaaaattggctttctcgagacgctgaaagagacgcctggaaccgtactggaggttcttatctgtttcttcacgctgtggtcagttgtgggactaacagggtttcataccttcctggtggctctgaaccagacaaccaatgaagacataaaaggctcttggaccggcaaaaatcgcgtgcaaaacccttacagccatggaaacattgtcaagaactgttgcgaagtgctctgcggccctctgccaccctctgtgctggaccggcgtggaattctgcctctggaagagtccggtagtagacctcctagcactcaggaaaccagctccagcctgctgccacagagcccagcacctacagagcacttaaattcaaacgaaatgcccgaagactctagcacaccagaagagatgcccccaccagagcctcctgagcctccgcaagaggcggcagaggctgaaaagtag

SEQ ID NO: 212519 - DNA, 513 bp, synthetic construct
  misc_feature 1..513: note = Description of Artificial Sequence: Synthetic coding sequence
  source 1..513: mol_type = other DNA
atgagcgtgatggtggtgcggaagaaggtgacccggaagtgggagaagttgccagggagaaataccttctgctgtgacggacgagtgatgatggcaaggcaaaaaggtattttttatctgaccctgtttctcattctgggaacttgcacactattttttgccttcgagtgtaggtacctggccgtccaattgtctcccgctatccctgtgttcgccgccatgctttttttgttttctatggctactttattgcggacctcattctccgaccccggtgtcatccctagagctctgccagatgaggctgcgttcatcgaaatggaaatcgaagctacaaacggagcagtcccacagggccagcgcccacccccccggatcaagaatttccagattaacaatcagattgtcaaactgaaatactgctatacgtgcaagatcttccgacctcctagggctagtcactgttccatttgcgataattgtgttgagcggttcgaccaccattgtccgtag

SEQ ID NO: 212520 - DNA, 585 bp, synthetic construct
  misc_feature 1..585: note = Description of Artificial Sequence: Synthetic coding sequence
  source 1..585: mol_type = other DNA
tgactgttcctgatcctgggcacctgcaccctgttcttcgccttcgaatgtcgatacctcgctgtgcagttgagccccgccatcccagtgtttgctgccatgctgttcctattttctatggccacactgctccgaacttcattcagcgatccaggcgttatcccaagggctctgccagatgaggccgcttttattgagatggagattgaggccaccaatggggctgtccctcagggccaaaggccaccccctcggattaagaatttccagattaacaaccaaatcgtgaagctgaagtactgttatacatgtaaaatcttccgccccccccgtgctagtcattgtagcatttgtgacaactgtgtagaatcactgaaaattgggttcctggaaactctcaaagagacacctgggacagttttggaagtactgatctgcttctttacactttggtccgtcgttggcctaacggggtttcacacgtttcttgttgctctcaatcagactaccaatgaagacatcaaagggagctggactgggaagaacagggtgcagaacccttatagccatggtaatattgtctag

SEQ ID NO: 212521 - DNA, 897 bp, synthetic construct
  misc_feature 1..897: note = Description of Artificial Sequence: Synthetic coding sequence
  source 1..897: mol_type = other DNA
atggagcggggcatcagcgacgtgaccgaccggaagctgaccatggaggaggaagaggccaaacgtatcgctgagatgggcaagcctgtgctgggggaacacccaaagctggaggtaattatcgaagagtcgtacgagttcaagactaccgtagataagctcattaaaaaaaccaatctcgctctggtggtgggcacgcattcctggagggaccagtttatggaagctataacagtctccgccgccggagacgaggacgaagatgagtcaggtgaggaaaggttacccagctgcttcgattatgtgatgcacttcctgacggttttttggaaggtgcttttcgcttgcgtgccccccacagagtattgtcacggctgggcctgctttgctgtatcaattctcatcatcggcatgttaacagctatcattggagacttagcctcacactttgggtgtacaattgggctgaaggactctgttaccgcggtggttttcgtggcatttggcacctccgttcccgacacattcgccagtaaggctgctgccctgcaagatgtgtatgcagatgcatctattggcaatgtgacagggtctaacgccgtcaacgtctttctcgggattggactggcctggtctgttgcagcaatttactgggccttgcaaggccaagagttccacgtctctgccgggacattggctttttctgtcaccctattcacaatcttcgcatttgtctgcatctccgtccttctgtacaggcggcgccctcacttgggcggtgagctcggaggaccacggggctgcaaactcgccaccacctggctcttcgtgtctctgtggctgctctatatcctcttcgctacactcgaggcctattgctatatcaaaggtttctag

SEQ ID NO: 212522 - DNA, 705 bp, synthetic construct
  misc_feature 1..705: note = Description of Artificial Sequence: Synthetic coding sequence
  source 1..705: mol_type = other DNA
atgagcagcgaggtgagcgcccggcgggacgccaagaagctggtgcgcagtcccagcggtctccggatggttcccgagcaccgtgccttcggaagtcccttcggtcttgaggagccccagtgggttcccgacaaggaatgtcgcaggtgcatgcagtgtgatgcaaagttcgactttctaacacggaaacaccactgcaggagatgtgggaagtgtttctgcgatcgctgctgttcgcagaaggtgcccctgcgaagaatgtgtttcgtggacccagtacggcagtgcgccgaatgcgccctcgtttcgctgaaagaggcagagttttacgacaagcaattaaaggtgctcctatcgggagcaacctttctggtaactttcggcaacagtgagaaaccagagacgatgacctgcaggctgtctaacaaccagaggtacctgtttctggacggcgactcgcactacgaaattgaaatcgtacacatctctacagtgcaaatcctgactgagggtttccctccaggaggcgggaatgcccgggcaactgggatgttcctgcagtacacagtgcccgggactgaaggcgttacacagctgaaactaactgttgtggaagacgtaacagtgggtcgcagacaggcagtagcctggctggtggctatgcacaaagcagccaagctcctttacgaatctcgagatcaatag

SEQ ID NO: 212523 - DNA, 7620 bp, synthetic construct
  misc_feature 1..7620: note = Description of Artificial Sequence: Synthetic coding sequence
  source 1..7620: mol_type = other DNA
atgaaccaccccttcggcaaggaggaggccgccagccagaagcagctgttcggtttcttttgcgaatgtcttaggcggggcgagtgggaactggctcaggcctgtgtcccccagctgcaggagggtcagggagacataccaaagagagttgaagacatcctgcaggctctcgtcgtatgtccaaatctcctgagatgcggtcaggatataaacccacagcgagttgcctgggtctggctcctggtcctcgaaaagtggctggcccgggaaaaaaagttgttaccagtcgtctttcggagaaaattggagtttttgctgctctctgaggatctgcaaggtgatatcccggagaacattctggaagagctgtacgagactcttactcaaggggctgtcggtcacgtgccagacggtaacccaaggcgggaatcctggacaccaaggctgtcttctgaggccgtgtccgtactctgggaccttctgcgccagagtccacagcccgcacaggctctcctggaactactgctcgaagaggacgatggtactggcctgtgccactggccattgcagaatgctctcgtagacctgattcggaaagccctgcgcgccctacagggaccagattcagtacccccgggcgttgttgatgctatctacggcgctctcaggacacttcgttgccctgctgagccactcggggtagaactgcatctgctttgcgaggagcttctcgaggcttgtagaacagagggtagtccccttagagaagagcgactgctctcttgcctgcttcataaagcttcacggggactgctgtccttgtatggacacacttatgcagaaaaagtgaccgagaagccgccccgcgcgaccgcctctggcaaagtaagtcccgatcacttggatcccgagagggctatgttagctctgttcagcaaccctaatcccgcggaggcatggaaagttgcatacttttattgtttaagcaataacaagcacttcttggagcagattctggttaccgcactcactctgctcaaagaggaagatttcccaaatctaggatgtttgttagaccgcgaattccggccactgtcgtgcctgctggtactgctcggatggactcattgccagtcactggaatccgctaaacgactactccagaccctgcatagaacccagggtcccgggtgtgacgagctgctaagagacgcctgcgatgggctgtgggcacacttggaggtccttgaatggtgcattcagcagtcttccaatcccatcccaaagagggatttactgtatcacctgcacggaggagactcacattctgtgctgtataccctccatcatctcactaacttacctgctttacgagaggaggacgtgctgaagctgttgcagaaagtgcccgccaaggacccgcagcaggagccagatgccgtggatgcgcccgtcccagagcaccttagccagtgtcagaacctcacactttatcagggattttgtgcgatgaagtatgcgatttacgcgttgtgtgtaaatagccatcagcactcacagtgtcaagactgtaaagactcactgagcgaggatctggcctccgccaccgagccggcaaatgattctttaagctctccaggcgccgcaaacctcttctcaacctacctggcaaggtgtcaacagtacctctgctctatccctgactccctgtgtttagagctgttggagaacattttcagtctcttactcattacaagtgcggacttacatcccgagccccatctgcccgaagactatgccgaggatgatgacatagaaggtaagagtccgtccgggttaagatcccctagcgaaagcccccagcacatcgctcacccagagcggaaatccgagcgggggagtttgggggtaccaaaaaccctagcctatacaatgcccagccacgtgaaggccgaaccaaaagattcttaccctgggccccataggcacagcttcctggaccttaaacactttacgagcggcatctccggattcttggccgatgagttcgcaataggtgcgttcctgcgattgcttcaagagcagcttgatgagatcagctctcgctcccccccagagaagccgaagcaggaatcacagagttgtagtggatcccgggatggcctacagtcacgtctccaccgcctctccaaggtcgtgtccgaggcccagtggcgccataaggtggtgacgagtaatcatcggagcgaggaacaaccaagcaggagataccagccagccacccgccacccctcgttgcggagaggcaggagaaccagacggagccaggctgacgggcgcgaccgcggatctaaccccagtctcgaatcaacctcatcggagctcagcactagtacttcagaggggtcattgagcgccatgtctgggcggaacgaacttcactctagacttcacccacacccacaatcttccctgatccccatgatgttttctccacctgagagcctactcgctagttgcatactgaggggaaacttcgcggaggcccatcaggtgttgttcacctttaacttaaagtcaagcccttcaagtggcgagctcatgttcatggaacggtaccaggaggtgatccaagaattagcccaggtagagcataaaattgagaatcagaatagcgatgcagggtcttccaccatcagacgtactggctccgggaggtcaaccttgcaagcaatcggcagcgccgccgctgcgggcatggtgttctactcaatatctgatgtcacagataaactgctcaacacttccggcgacccaattccgatgctccaggaggatttctggatatcgacagccctggtggaacccactgctcccctgcgggaggtgctggaggatctcagcccacctgccatggcagcattcgacctagcttgcagtcagtgccagttatggaaaacatgtaagcaattacttgagaccgccgagcggcgactgaattcatcactggagaggcgtggtagacgaattgatcatgtgctgcttaatgcagacggtatccgaggctttcctgtggtactgcagcaaatcagcaaaagcctgaactatctcctgatgtctgcctcccagacaaaatcagagtctgtggaggagaagggggggggaccgcctaggtgtagtatcacagaattgcttcagatgtgctggcctagtctctccgaggattgcgtggcgtctcacactacgttatcccaacaacttgatcaggtgctccaaagcctgcgggaagctctggaactaccagagccccggacacctccgctgagcagcctggtggagcaggccgcccaaaaggctccagaggcagaggcccaccctgtgcagatccagactcaactgctgcagaaaaacctgggtaagcagacacctagcggcagccgtcaaatggattatttgggcaccttcttttcttactgctccaccttggcagcagtgctacttcaaagcctctcgagtgagcccgatcacgttgaagtaaaagtgggtaatcccttcgtgctcttgcagcagtcttcgtcacagctcgtttcccatctgttgttcgagagacaggtgcctccagaaaggctggctgcactgctcgcacaggaaaatctatccctttccgtgccccaagtgattgtgagctgctgctgcgagcccttagctctttgtagctcaagacagtcgcagcaaacatctagcctactgacccggctcgggacacttgcccagctccacgcctctcactgcctcgatgatctgcccctgagcaccccaagcagtccgaggaccacagagaatcccactttggaaagaaaaccatattcttctccaagagatagttctctaccagccctgaccagctcagcactggcctttctgaagtcacggagtaagttgctggccactgttgcatgtctgggagcaagcccccgcttaaaagtttccaaaccttcactgagctggaaagagctgcgcgggcgccgggaggtgccccttgccgccgagcaggtggcccgagaatgcgaaagactcctggagcagtttccactctttgaggcatttctcctcgccgcctgggaaccactgcggggttcccttcagcagggtcaatctctcgcggtgaacctgtgtggatgggcctccttatcaacagtgctgctggggctgcattctccaatcgcgctggacgtgctttcggaggcgttcgaggaatctctcgtggctcgcgactggagccgcgcacttcagttgaccgaggtgtatggacgagatgtggacgacttgtcaagtattaaggacgcggtattgagctgcgcagtggcttgtgataaagaagggtggcagtatttgttccctgtgaaagacgcatctctcaggagcaggctggctctccagtttgtcgaccggtggcccctagaatcctgtctggaaattctcgcttactgtatctcagacacagcggtgcaagaggggttaaaatgcgagctacaaaggaagcttgccgagctgcaggtatatcaaaagatcctgggattacagagccccccagtgtggtgtgactggcaaaccctcagatcctgctgtgtcgaagaccccagcaccgtgatgaatatgatccttgaggctcaggaatacgagttatgtgaagagtggggctgtttatatcctatccccagggaacatctcatatcattgcatcagaagcacctgcttcacttactggaacgcagagatcacgataaagcattgcagttgctgcgcagaatacccgacccaacaatgtgtcttgaggtcactgagcaatcactcgatcagcatacctctttggccacctcgcacttcctcgccaactacttaacaactcacttttacgggcagcttactgcagtgaggcaccgcgaaattcaggcactgtacgtgggttcgaagatcctgcttactctgcccgaacagcatcgagcatcctactctcatctatcgtctaacccactgttcatgctcgagcagctgctgatgaacatgaaagtggactgggcaaccgtcgctgtgcagactcttcagcaactgctcgtggggcaagagatcggattcacgatggacgaagtcgatagtctactgtctagatacgcagaaaaagctctggacttcccctaccctcagagggagaaaagaagtgatagcgtgattcacctccaggagattgtgcaccaagcggcagaccccgagacccttccgaggtctccctccgctgaattcagtcccgcggcaccacccggcatctcctccatccatagcccttccctgagagagaggtcttttcctcccacacagccgagccaggaattcgtccctcccgccacaccacctgccagacaccagtgggtccccgatgagaccgagtcgatctgcatggtttgttgtcgggagcacttcaccatgtttaacaggaggcatcactgcagacgatgcggccgcctagtttgctcaagctgttcgacgaaaaaaatggtagtagagggctgccgggagaacccagcccgcgtgtgcgatcagtgctattcttactgcaacaaagacgttcctgaagaaccaagcgaaaagcccgaggctcttgattccagtaaaaatgagtctcccccatatagttttgtcgtcagagtgcccaaggcggacgaagttgagtggatacttgatcttaaggaggaagagaacgaattggtgcgcagtgagttctattacgaacaagctcccagcgcctccctctgtattgccattttgaatctccatcgggatagcattgcatgtggccaccaattgatcgaacattgctgcagattgtcaaagggcctgaccaatcctgaggtggacgccggcctgctgacagacattatgaagcagttactattttcagctaaaatgatgttcgttaaggccggccagagccaagacttggcgctttgcgacagctacatctccaaagtcgacgtactcaacattttggtagctgcagcgtataggcacgtcccctcattggatcagatcctgcaacccgccgccgtgaccaggcttaggaaccagcttctggaagccgagtattatcagctaggagtcgaggtttctaccaaaactggtctcgatacgaccggagcatggcatgcttggggaatggcctgtctaaaggctggcaatcttacagctgcacgggaaaagttttcccgctgtctgaaacctccatttgatctaaatcagctgaaccacggttcgagacttgtccaggacgtagttgaatacctagaatcaacagtccggcccttcgtcagtctgcaggatgatgactacttcgctactctgagagagctcgaagccactttaaggacccagagtctgagcctagctgtcattcccgagggaaagattatgaataacacttactatcaagaatgtctattctatctgcataactattctaccaacctggcgataatctccttttacgtccggcactcctgccttcgcgaagccctgcttcacctgttgaacaaagagtctcctcccgaggtgttcattgaaggcatctttcagcccagttataagtccggcaagctccacaccctggagaacctgttagagagtatcgatcccacccttgagtcctggggtaagtacttaatagcagcctgccagcacttacagaaaaagaactactaccatatactgtatgagctgcaacagtttatgaaggaccaagtgagagctgcgatgacctgtatcaggttcttctcccacaaagccaagtcatatacagagctgggagagaaactcagctggctgctaaaagcgaaggatcacctaaaaatttatctgcaggaaacctcccggtctagcgggaggaaaaagactacctttttcaggaaaaaaatgactgccgctgatgtctcaagacacatgaatactctgcagttgcagatggaggtgaccaggttcctgcacagatgcgaatctgctggaacgagccagattaccacccttcctttaccaaccctgtttggaaataaccacatgaagatggatgtggcttgtaaagtaatgctcggcggtaaaaatgttgaggatggatttgggatagcctttcgcgtgctccaagatttccagctggatgctgcaatgacttattgtagggccgcaagacagctggttgagaaggaaaagtacagtgagattcaacaattgttgaaatgtgtgtctgagtcgggtatggccgcgaagtccgacggcgacacaattctcctgaattgcctggaagcattcaagcgcataccaccacaggagttagagggtctcattcaagcaattcataatgacgataacaaagtgagagcctacctgatctgctgcaaactgaggtctgcctatctgatcgcagtgaagcaggaacacagccgagccacagctctggtgcaacaagtgcagcaagctgccaagagtagcggcgacgcggtagtccaagacatttgtgctcaatggctcttaacttcacatccgagaggagctcatgggccaggtagcagaaagtag

SEQ ID NO: 212524 - DNA, 7557 bp, synthetic construct
  misc_feature 1..7557: note = Description of Artificial Sequence: Synthetic coding sequence
  source 1..7557: mol_type = other DNA
atgaaccaccccttcggcaaggaggaggccgccagccagaagcagctctttggttttttctgcgaatgcttgagacgcggcgagtgggagctagcacaggcatgcgtacctcagctgcaggaggggcagggtgacattcccaagcgcgtggaagacatcctccaagccctcgttgtatgccctaatcttctgcggtgtgggcaggacatcaatccccagcgcgtcgcctgggtgtggctcctggtcctcgagaagtggctggctagggagaagaaactattaccggtcgttttcaggagaaagttggagtttttgctgctcagtgaagacctgcagggcgatatccctgagaacatcttggaagagctatacgagactctgacacagggcgcagtgggccatgttccagatggcaatccccgtagagagagctggaccccacggttgtctagcgaggccgttagcgtgctttgggacctgctgagacagagtccacagccggcacaagccctgcttgagctcttattggaggaagacgatggaaccgggctatgccactggccactgcagaacgccctcgtcgatctgatcaggaaagccctgcgcactctgcgttgccccgccgagccccttggcgtcgaactgcacttactctgcgaggagttgcttgaggcctgtaggactgagggcagtccgctgagggaggagcggttgctttcgtgcctgcttcataaagcctcacggggactcctcagcttgtatggacacacgtacgctgagaaggttactgagaagcctccaagggccactgcctctggcaaagtaagtcctgatcacctggatcctgagagagctatgttggctctgttcagcaatcctaacccagccgaggcatggaaggtggcttacttttattgtctgtcaaacaacaaacactttttagaacagattctggtgacagcactgaccctcctaaaagaggaggacttcccaaaccttggctgcctgcttgaccgggagttccggccactgagttgcctgctcgtgctgctgggatggacccactgccagtccttggagtccgccaagcggcttctccagactctgcacaggactcagggcccagggtgtgacgagctgctgagggatgcgtgcgatggcctctgggcccacttggaggtgctggagtggtgcatccagcagagttccaaccccatcccaaagagggatctcctgtaccatctgcatggcggagattcccactcagtgctatatacattgcatcatctcaccaacctgcccgcactacgcgaagaagatgtcttgaagttattacagaaggtacctgcgaaagaccctcagcaggaaccggacgctgtggacgctcccgttccagagcacctttcccagtgccagaatctgaccctgtatcaaggtttttgcgctatgaaatatgctatttatgcactgtgcgtgaattcccatcagcacagtcagtgtcaggactgtaaggacagcttaagcgaggacttggcgtccgcgacagagcctgctaacgactcgctatcctccccaggcgcggcaaacctgttttccacctacttggcaagatgtcagcagtacctgtgttcaatccccgattcactctgtttggagctgttagagaatattttttctctgctccttatcacttctgcagatctgcatccggaaccacatcttcccgaagattacgccgaggacgatgacatagaaggcaagtcgccttcgggactcaggtccccttcggaatcaccacagcacatcgcacatcctgaacgcaaatcagaaagaggatctctcggcgtgccaaagacgcttgcttatactatgcctagccacgttaaagccgagccaaaagacagctacccaggccctcacagacacagcttccttgacctgaaacatttcactagtggcatctctggatttctggctgacgaatttgcgatcggcgccttcctccgcctgttgcaagagcagttagatgagattagctccagaagccctcctgagaagcctaaacaggagagccaatcctgctccggcagtcgagatggcctgcaaagtcgactgcacaggctgtctaaggtggtctctgaggctcaatggagacacaaggtggtgacatccaatcatcggtctgaggaacaaccttctaggcgataccagccagctactcgtcacccatctcttcggcgagggagacgcacgcggcgatctcaggctgatgggagggatagggggtccaaccccagcctagagtcaacatcatctgagctgagcacatctacctctgagggctcgctgagcgctatgtctggcaggaacgagcttcactcccgcctgcatccccatcctcaaagctctctcataccaatgatgttcagtcccccggagagtctgctggcctcttgcattctgcgagggaactttgcagaggcccatcaggtgctgttcaccttcaacctcaagagtagtccctcatccggagagttaatgtttatggagcggtaccaggaggtgatccaagagctggcacaggttgagcacaagatcgaaaaccagaatagtgacgccggatccagcaccattagaagaaccggttcaggacggagcactctccaggcgattggatcagcggcagctgctgggatggtgttctatagtatatctgacgtgacagacaagttgctgaatacgtcaggagaccccattcctatgctgcaggaggatttttggataagcaccgctttggtggagcctaccgcgccactgagagaagtcctggaggatctgtccccacctgccatggcagcctttgatcttgcttgcagtcaatgccagctgtggaagacctgcaagcagctgctcgagacagccgagcgaaggctgaatagctctctcgagcggagaggaagaagaatagaccacgtactgctaaatgctgatgggatacggggcttccctgtggtgttgcaacagattagtaagtccctgaattatctcttaatgagtgcctcccagacaaagagcgaatcagtcgaggagaaagggggtggaccccccagatgtagtattacagaactgttgcagatgtgctggccctccctctccgaggattgtgtagcaagccataccacccttagccagcaactggaccaggtgctacaaagcttgagggaggcattggaactgcctgagcctagaacccctcctctgtcctctctggtggagcaggccgcccagaaggccccagaggccgaagctcaccccgtgcagatccaaacccagttgttgcagaagaacctaggaaagcaaaccccgtccggatcgaggcagatggattacctggggaccttctttagttactgctcaacgctggccgcagtactactccaatctttgtcatccgaaccggaccacgtcgaagtcaaagttggcaaccccttcgttctcttgcaacagtcatcttcacagctcgtgagccacctgctgtttgaaaggcaggttccccctgaaaggctcgccgccctgttggcacaggagaacctgagcttatctgttccacaggtcatcgtgagctgttgttgtgaacccttggctctctgttcgtctcgtcaaagccagcaaacatctagtctgctcacaagacttgggactctggctcagcttcatgcttctcattgccttgatgacctgccactttccacaccatccagtccaagaactacagagaatccaactttagagcgaaagccttactctagccccagagatagctccctgccagcgctgacctctagcgccctcgccttcttgaagtcacgctccaagttgctcgctaccgtggcatgtctcggggctagtcccagattgaaagtgtcaaaacctagcctatcatggaaagaactgcgcggccgcagggaagtccccctcgctgctgagcaggtggctagagaatgtgagaggctgcttgaacagtttcccctgtttgaggccttcttgctggccgcctgggagccccttaggggaagtttgcagcagggacagagccttgctgtgaacctgtgtggttgggcttcactctctacagtgctgttgggactccactcccctattgccctagacgtgcttagcgaagccttcgaagagagcctagttgcgagggattggtccagggcactgcagctcacggaagtgtacggacgagacgtagacgatctctcaagcatcaaggatgccgtgctgagttgtgccgtggcttgcgataaggagggatggcagtatctgtttcctgtaaaagatgcatctctcaggagccgtctcgctctgcaattcgtagaccgatggccgctggagagttgcctcgagatactggcttattgcatctccgataccgctgtgcaggaggggctgaagtgcgagctgcaaagaaagctggcggaactgcaagtctatcagaagattctcggtctccaatctcctcccgtttggtgcgactggcaaaccctccgctcttgttgcgtggaggatccctctaccgtcatgaacatgattcttgaggctcaggaatatgagctttgcgaagagtggggctgcctttatccaataccacgggaacatctcattagcctgcaccagaaacatcttctgcacctccttgagcgtagagaccacgataaggcactccaattgttacggcggataccagatcccacaatgtgtcttgaggtgaccgagcaaagcttggaccagcacactagtctagcgacttcacacttcttggcgaattatctgaccacccatttctacggtcagctcaccgccgtacgtcatcgggagatacaggcgctgtatgtgggctctaagatcctgctgaccctgccagaacagcaccgcgcctcatacagtcacctaagcagcaaccccctcttcatgttagagcagctgctgatgaatatgaaggtggattgggcgactgtcgctgtgcagacccttcagcagcttcttgttggccaagaaatcggctttactatggatgaagtggactcattacttagccgatatgctgagaaggctctcgattttccctacccccagcgggaaaaacgctccgactcagtgatccatctgcaggaaatagtgcaccaggcagccgacccagaaactctacccaggagcccctcagcagagttctctcccgcagcccctccagggatcagcagcatccacagcccctccctccgggagaggtcttttccacctacacaaccaagccaagaatttgtgcctccagccacgccgcccgcccgacatcagtgggtccctgacgaaaccgagtctatatgtatggtctgctgccgtgagcattttaccatgttcaatcgaagacaccactgtagacggtgcggccgcctcgtctgcagctcatgttctaccaagaagatggtggtcgagggctgccgcgaaaaccccgcacgcgtatgcgaccagtgctatagctactgcaacaaggatgttcctgaggaaccttccgagaaacctgaggcactcgactcatctaagaatgaatctcccccctattctttcgtggtgagggtgcctaaggccgacgaggttgagtggatcttggacttgaaggaggaggaaaatgaactggtaaggtccgagttctactatgaacaggctccttcggcctctctttgtatcgcgatacttaacctgcatcgggacagcatcgcctgcggccaccagctcatcgaacattgttgtaggctaagtaaagggctgactaaccccgaagtggatgctggtctccttaccgacattatgaagcagctgttgttttcagccaaaatgatgtttgtgaaggctgggcagtctcaggatctggccctctgcgattcctacatcagcaaagtggacgtgctgaacatcctcgtcgctgcggcctatcggcacgtgccctcccttgaccagattttacagcccgctgctgtcactagattgcgtaatcagcttttggaagccgaatattaccagctgggggttgaggtgtctaccaaaaccggcctggataccactggcgcttggcatgcctgggggatggcatgcctgaaggcaggaaatctgacagccgccagagaaaagttcagccgatgtctgaagcctcccttcgatctgaatcaattaaatcacgggagccggctggtgcaagacgtagtggagtacttggagtcaacggtcagacccttcgtttctctgcaggatgatgattatttcgccaccctaagggagctggaagcaactctcagaactcaaagtctatccctagctgtgatccctgaaggtaagattatgaacaatacgtattatcaggagtgcctgttctatctccacaactacagtaccaaccttgcaatcatttctttttacgtgcggcacagttgcttgagggaggccctactgcacttgctgaataaggagtcaccacctgaagtattcattgagggcatatttcaaccttcctacaaaagtggcaagttacatacacttgagaaccttctagagagtatcgaccctaccctggagagctggggaaagtatctcatcgcagcttgccagcatctccagaagaagaactattatcatatcctgtatgagcttcaacagttcatgaaagaccaggtccgcgccgccatgacatgtatcaggttcttttcgcacaaggcaaagagctacactgaattgggcgaaaagctgagttggctattgaaagcaaaggatcacttgaaaatatatttacaggagaccagccgatccagtggaagaaaaaaaaccacattcttccggaagaaaatgacagccgcagatgtctcacggcacatgaacacccttcagttacagatggaggttacccgtttcttgcaccgatgcgagtctgctggcacatcacagataaccaccctgccactccctacacttttcggaaacaaccacatgaagatggacgtggcgtgtaaagtcatgctaggcggaaaaaacgtagaggatgggtttggtatcgctttccgagtgctgcaggacttccaactcgacgctgctatgacatactgtagagctgcaaggcagctggtggagaaggagaagtattcagaaatccagcagcttctgaagtgcgtctcagaaagtgggatggccgccaaatctgacggcgacacaattttattaaactgcctcgaggcgttcaagcgaattccacctcaggagctcgagggtctaattcaggccattcataacgacgacaacaaagtgagggcttatctgatatgctgtaaactgagatccgcatacttgatcgccgtgaaacaggaacacagtagagccaccgcccttgttcagcaagtgcagcaggcagccaagtcgtctggtgacgccgtggtgcaagacatctgcgcccaatggctgcttactagtcatcctagaggcgcacatggtccaggcagtcgaaagtag

SEQ ID NO: 212525 - DNA, 1119 bp, synthetic construct
  misc_feature 1..1119: note = Description of Artificial Sequence: Synthetic coding sequence
  source 1..1119: mol_type = other DNA
atgcagaccagcgagcgggagggcagcggccccgagctgagcccctcagtgatgccagaagccccactggagagtcccccattccctaccaagtctcctgcctttgatctcttcaatctggttctgagctacaagcgcttagagatatatctggagcctctgaaagacgccggtgcctggtatagcgtaggcgcactgatgatcagcgtccccgccctgttaggctaccttcaggaagtatgcagagctaggctgccagattccgagcttatgcggaggaaatatcattctgtgaggcaggaagacctccaacgagggagactatctcgcccagaggctgtggcggaagtcaaaagctttctcattcagctggaggcttttttgtctcggctgtgttgtacgtgtgaggcggcctaccgtgtcttgcactgggaaaatccagtggtgtcgtcacagttctacggagccttactgggaacagtatgcatgctttacttactgccactgtgttgggtgctgacactgttgaacagcacactcttcctcggcaacgtggagtttttcagagtggtgtcggagtacagggcctcattgcaacagcgcatgaaccctaagcaggaagagcacgccttcgagagtccgccacccccagacgtgggcgggaaggatggcctgatggactctaccccagctcttaccccaacagaggacctgactccgggtagtgtggaggaagctgaagaagccgagccagacgaggagttcaaggatgcgatcgaagaggatgacgaaggtgcgccttgcccagcagaagacgaactggctttacaggacaacggctttctctcaaagaatgaggtcctgcgtagcaaagtcagccggttgacagaacgactcagaaaacggtaccctacaaataactttggtaactgcactgggtgtagcgcgacatttagcgtactgaaaaaaagaagaagctgctctaactgtggaaactctttctgctcacgatgctgttccttcaaagtgccgaagagttcaatgggggcaacagcccccgaggcccagagagagacagttttcgtgtgcgcctcctgcaatcagacattatctaagtag

SEQ ID NO: 212526 - DNA, 1251 bp, synthetic construct
  misc_feature 1..1251: note = Description of Artificial Sequence: Synthetic coding sequence
  source 1..1251: mol_type = other DNA
atgcagaccagcgagcgggagggcagcggccccgagctgagcccctcagtcatgcccgaagctccccttgagagcccccctttccctacaaagagtccggctttcgacctgttcaatttggtccttagctataagagactggagatctacctggagcccctgaaagacgcaggcgatggggtgagatacctgctccgctggcagatgccactttgttctctactgacttgcttggggctgaacgttctcttcctgaccctgaacgaaggagcgtggtatagcgtcggcgcactgatgatctccgtcccagctcttctcggctacttacaggaggtgtgccgcgcaagactgccagatagcgaattaatgcggaggaaataccattctgtgaggcaagaggacctgcaaaggggccgtttgtcccggcccgaggccgtcgccgaggtgaaatctttcctgatccaacttgaggcattcttaagccggttgtgttgtacatgcgaggccgcctacagagtcctccattgggaaaatccggttgtcagtagccagttttacggagccctcctgggtactgtttgcatgttatacctgctcccgctctgttgggtcctaacattgctgaacagcactctcttcctcggaaatgttgagtttttcagggttgtgtctgaatatagggccagtctgcagcagagaatgaacccaaagcaggaggagcacgcctttgagagtccccctcccccagatgtgggcgggaaggatggtctcatggacagcactcctgctctgacccccaccgaaagcctgtccagtcaagacttgactcccgggtccgtggaggaagcagaagaggcagagcctgacgaggagttcaaagacgcaatcgaggagactcatctcgtcgtgctcgaggacgacgaaggcgctccttgcccagcagaggacgaattagcgttgcaggataacggcttcctgtctaaaaacgaggtcctgcggtctaaagtctccagactgacggagcggctcagaaaacgctacccaacaaacaacttcgggaactgcacagggtgttctgccactttctccgtgttgaaaaaacgaaggtcgtgttcaaactgtggaaactcgttctgctcccgatgctgcagctttaaggttcctaaatcctctatgggcgctacagcacccgaggcgcagagggagacagtgtttgtgtgcgcatcctgcaaccaaactctgtcaaaatag

SEQ ID NO: 212527 - DNA, 957 bp, synthetic construct
  misc_feature 1..957: note = Description of Artificial Sequence: Synthetic coding sequence
  source 1..957: mol_type = other DNA
atgcagaccagcgagcgggagggcagcggccccgagctgagccccagtgtgatgcctgaggcccccctcgaatcgccaccgtttcccaccaagtctccggccttcgatctgttcaatctagtcctctcatacaagagacttgaaatctatctggagccactcaaagacgccggagacggcgttcgttatctgttgtcgctcatccaactagaagcattcctgagcaggttgtgctgcacttgcgaagccgcttaccgggtgctccactgggaaaatcccgtggtgagttcccagttttacggcgccttgctgggaacagtgtgtatgctgtaccttctccccctgtgctgggtcctgacgcttctgaacagcactctcttcctcggtaatgttgagttctttcgggtggtgtccgagtaccgggcatctttgcagcagagaatgaatcccaagcaagaagagcacgctttcgaaagtccaccacccccggacgtcggcggtaaggatggcctgatggatagcacgccagctctcacacctacagaggacctcactcccggttccgttgaggaggcagaagaagccgagcctgatgaggaattcaaggacgccattgaggaggatgacgagggggcgccctgcccagctgaggacgagttagctctacaagataatggttttctttcgaaaaacgaggtactgcggtctaaagtctcccgtctaaccgagaggctaagaaagagatatccaacaaataacttcggtaactgcacgggctgtagcgcaaccttttctgtgcttaagaagcgcagaagctgcagcaactgcggtaatagcttttgtagcaggtgctgtagcttcaaagtccctaagagttctatgggcgcaacagctcctgaagcccagcgggagactgtcttcgtatgtgcttcttgcaatcagaccctaagcaaatag

SEQ ID NO: 212528 - DNA, 1215 bp, synthetic construct
  misc_feature 1..1215: note = Description of Artificial Sequence: Synthetic coding sequence
  source 1..1215: mol_type = other DNA
atgcagaccagcgagcgggagggcagcggccccgagctgagccccagtgtgatgcccgaagcccccctcgagagtcccccttttcctacaaagtccccagcatttgacctgttcaacctggttttgtcatacaaacgcctggaaatataccttgagccgctgaaagatgctggagacggtgtgcgttatttgctgagatggcagatgcctctttgcagccttctaacttgcctgggactcaatgtcctgtttctcacactgaacgaaggcgcatggtactccgtcggagctctgatgatctccgttcccgccctgctgggctatctgcaggaagtgtgccgggccaggttgcccgactcggagctcatgagacgaaagtaccattcagttcggcaggaagacctgcagaggggccgactgtcacgccctgaggccgtcgccgaggtgaagtcatttctcatccagctggaagcctttctctccagactgtgctgtacatgtgaagccgcctacagggttctgcactgggagaatcccgttgtgagctctcagttttacggagcgttactgggcactgtgtgtatgctgtacctactccctctgtgttgggttctcacactgctcaactctacattgtttctgggcaatgtggagttttttcgtgtggtgtcagagtacagggcttccctgcagcagaggatgaatcccaaacaggaggagcatgctttcgagtcaccgcctcctccagacgtcggcgggaaggatgggctcatggattccacgccagcccttactccaaccgaagacctcactcctggcagcgtggaggaagccgaggaggccgagcctgatgaggagtttaaagatgctatcgaggaagatgacgaaggagccccgtgcccagcagaggatgagcttgccttacaggacaatggattcttaagcaaaaatgaagtgcttagatcaaaggtgagcagactcacagaacgcttgcggaaacggtaccccaccaacaacttcggaaattgtactggatgttcagcaactttcagcgtgcttaaaaaacgaagatcctgttccaactgtggcaactctttctgttccaggtgctgctctttcaaggtaccaaagagttcgatgggggctaccgcacctgaagcccaacgggagactgttttcgtttgcgcttcatgtaaccagacactttctaagtag

SEQ ID NO: 212529 - DNA, 936 bp, synthetic construct
  misc_feature 1..936: note = Description of Artificial Sequence: Synthetic coding sequence
  source 1..936: mol_type = other DNA
atgatcagcgtgcccgccctgctgggctacctgcaggaggtgtgcagagcacggctccccgactccgaattgatgcgccggaaatatcatagtgtccggcaggaggatctgcagcgtggacgactgagtcgaccggaggcagtagccgaggtgaagagttttctgattcagctcgaggcatttctgtcaagattgtgctgcacctgtgaggccgcatatcgtgttctgcattgggaaaacccggtggtctcttctcaattttacggagccctcctggggaccgtatgcatgctttacttactgcccctctgctgggttctgacactcctgaattctaccttattccttggcaatgtcgaatttttcagggtggtatccgagtatcgggccagccttcaacagagaatgaatcctaagcaggaagaacacgcctttgaatccccgcctccccccgatgtgggagggaaggacggcctgatggattcaactcccgccctcaccccgaccgaatcgctatcctcccaagacctgactcctggatctgtggaggaggccgaagaggcagaacctgacgaagaattcaaggacgccatagaggaggacgatgaaggcgctccctgcccagctgaagatgagctggcacttcaagataacggatttctgtcaaaaaatgaggtgctccgaagtaaggtctcacggttgacggagaggctacgcaaaaggtacccaaccaataattttggtaactgtactggctgcagtgccacatttagtgttctgaagaaacgccggtcatgcagtaattgcggaaattccttctgtagccggtgctgcagtttcaaagtacctaagagtagcatgggcgcaaccgcgccagaagcccagagggagacagtgtttgtgtgcgcaagctgtaatcagacgctgtctaaatag

SEQ ID NO: 212530 - DNA, 861 bp, synthetic construct
  misc_feature 1..861: note = Description of Artificial Sequence: Synthetic coding sequence
  source 1..861: mol_type = other DNA
atgcagaccagcgagcgggagggcagcggccccgagctgagccccagtgtaatgcccgaagcccccctggagagtcctccatttcctaccaaatcaccagcattcgatctttttaacctggtcctgtcctacaaacggctcgaaatttatctggagccactaaaggacgccggcgatggtgtcagatacttactgaggttctatggagcgcttctaggtacagtttgtatgctttatcttctcccgctgtgctgggtgttgaccttgttgaattccaccttgttcctgggcaacgtagagttctttcgagtggtgtcggaataccgcgccagtttgcaacaaagaatgaacccaaaacaggaagagcacgcattcgaatcccccccccctcctgacgttggcggtaaagacggcctgatggattctacacctgcactaactcctaccgaagacctgacgcccggcagcgttgaagaggccgaggaagccgaacctgacgaagaattcaaagacgccatagaagaggacgatgagggtgctccatgccccgcagaagacgagctcgcgctccaagataatggcttcctgagcaagaatgaagtgttacgcagtaaggtgtctcgtctgactgaacgtcttagaaaacggtacccaacaaataactttggcaattgtactgggtgcagtgcaacgttttcagtgctaaagaagagaaggtcttgttctaattgcggcaattccttctgttcccggtgttgtagcttcaaagtccccaaaagctctatgggtgctactgccccagaggcacaaagagagaccgtgttcgtgtgcgcttcttgcaaccagacactgagcaaatag

SEQ ID NO: 212531 - DNA, 1236 bp, synthetic construct
  misc_feature 1..1236: note = Description of Artificial Sequence: Synthetic coding sequence
  source 1..1236: mol_type = other DNA
atgcagaccagcgagcgggagggcagcggccccgagctgagccccagcgtaatgcctgaggccccgctggagtcccctcctttcccaactaagagccccgcatttgacctctttaacttggtgctctcttacaagagactcgagatctacttagagccactcaaagatgcaggcgacggcgtgcgctaccttcttcggtggcaaatgcctctctgctcacttctaacttgcctcggtctcaatgtcctgttcttaacgctgaatgagggcgcatggtatagtgtaggggctctgatgatttctgtccccgccttgctgggatatctccaggaggtatgtagggcgagactccctgatagcgagttaatgcgtcggaagtatcacagcgtgaggcaggaagatctgcaaagaggaagactcagtcggcctgaggctgtcgcggaggtcaaaagcttcctgattcagttagaggcattcctctcacgtctgtgctgcacttgcgaagccgcttacagggttctgcactgggagaacccagtggtgagcagccagttttacggcgcattgttggggactgtatgcatgctatacctccttcctctctgctgggtgctgaccctgttaaacagcaccttgtttttgggaaacgtagagttcttccgggttgtttccgagtatcgggcaagcctgcaacagcggatgaacccaaagcaggaagagcatgcctttgagtccccaccgccaccagacgtgggaggaaaggacggactgatggactcaacaccggcccttacacctacagaagacttgacaccaggctcagtcgaagaggcagaagaagcagagcccgatgaggaatttaaggacgcaatcgaagaaacgcatctggtagtgctggaagatgacgaaggcgctccctgccccgccgaggacgagctcgcacttcaagacaatggcttcctatccaagaatgaggtgctgaggtcaaaagtgtcccggcttacagagcgtttaagaaagcgttaccctacgaacaacttcggtaattgcaccggctgttctgctacttttagtgtgctgaagaagaggagaagttgctcaaactgcggaaatagcttttgttcccgatgttgttccttcaaggtgcccaaaagttccatgggagccacggctccagaagcccagagagagacagtgtttgtgtgcgccagctgcaatcaaaccttgtcaaagtag

SEQ ID NO: 212532 - DNA, 1185 bp, synthetic construct
  misc_feature 1..1185: note = Description of Artificial Sequence: Synthetic coding sequence
  source 1..1185: mol_type = other DNA
ctggagagcccccccttccccaccaagagccccgccttcgacctgttcaatcttgttctgagctataaaagactcgaaatttatctggagcctctgaaggacgcaggagatggagttcgctatctattgaggtggcaaatgccgctttgctcattactgacgtgcctcggcctgaatgtgttgttcttgaccctgaatgagggggcttggtactccgtgggcgccttgatgattagcgttccagcactgctcggctatctgcaagaagtgtgccgtgccaggttgcccgattccgaactcatgcgcagaaagtatcactccgtccggcaagaagatcttcagagaggtcgactttctagaccagaggcggtggcagaggtaaaatctttcttaatccaactggaagctttcttaagtagactgtgctgtacctgcgaagcagcttaccgagtcctgcactgggagaatcccgttgtaagcagtcagttctacggggccctactgggtaccgtgtgtatgctctacctcctgcctctttgctgggttttaaccctactgaattcgactcttttcctaggcaatgtggagttctttagagttgtctccgagtatagggcttctttacaacagcgaatgaaccctaaacaggaagaacacgcttttgagagcccacctcccccggacgtcggcggaaaggacggtctgatggattccacgcccgcactgacacctaccgagtcactctctagtcaagacctcactcccggctcggtggaagaagctgaggaagccgagccagatgaagagttcaaggacgccattgaggaaacccacctggttgtgctggaggatgacgagggcgctccctgccccgccgaagacgagctggcgctgcaggacaatgggttcctttccaagaacgaggtgttgcgctcaaaagtcagtcggctgactgaaaggttacgtaagcggtaccctacaaacaatttcggtaattgtacaggttgttctgctaccttctcagtgctgaagaaaaggagaagttgctccaactgcggtaatagtttctgtagccgatgctgttcatttaaagtacctaagtcctcaatgggcgccacggcccccgaagcccagcgtgagacggtatttgtgtgtgcgtcttgcaaccaaaccctctccaagtag

SEQ ID NO: 212533 - DNA, 1047 bp, synthetic construct
  misc_feature 1..1047: note = Description of Artificial Sequence: Synthetic coding sequence
  source 1..1047: mol_type = other DNA
atgcagaccagcgagcgggagggcagcggccccgagctgagcccctcagtgatgcctgaggctccactcgaaagtcccccctttcctactaagtcccccgcatttgacttgtttaatctggtcctgtcctacaagagactggagatctacctggagccccttaaagatgccggcgatggagtgaggtacctgttgcgatggcagatgcccctttgctcgcttctcacctgcctgggcctgaacgtgcttttccttacattgaacgagggcgcatggtattccgtcggcgcgctcatgatctccgttcccgccctgcttgggtacctgcaagaggtatgtagagcccgcttaccagactccgaactgatgaggagaaagtatcatagcgtgcgtcaggaagatctgcagagaggtcggctgtcaagacctgaggccgtcgcagaagtgaaatcctttcttatccagttggaggctttcctcagcaggttatgctgcacctgcgaggcagcctacagagtgctacactgggagaaccccgtggtgtcaagccagttctatggtgcactgttaggtactgtgtgcatgctatatctgctaccgctttgttgggtcctcactctgctgaatagtacgctctttcttggcaacgtggagttctttagagttgtcagcgaataccgcgcaagcctgcagcagagaatgaatcccaagcaggaggagcatgcattcgagagcccccctccgccggacgtgggcggcaaggatggcttgatggactccaccccagcactgacacctaccgaagatcttacccctggcagcgtagaggaagcggaggaggcagagccagacgaggagttcaaagatgccattgaggaggacgacgagggggctccctgtcccgcggaagacgaattggctctacaggataacggatttctgtctaagaacgaagtgctgcggtccaaggtctctcggctaacagagcgcctgagaaagcgttatccgacaaataattttggtgttactggggcgggctcgtcgtag

SEQ ID NO: 212534 - DNA, 2664 bp, synthetic construct
  misc_feature 1..2664: note = Description of Artificial Sequence: Synthetic coding sequence
  source 1..2664: mol_type = other DNA
atgatgaaccggttccggaagtggctgtacaagcccaagcggagcgatcctcagctgcttgccaggttctattacgccgatgaggagctgaatcaggtcgctgcagagctcgattcgcttgatgggcgaaaggacccccagagatgcaccctgctggtttcccagtttcgatcttgtcaggataatgtacttaacattatcaatcagattatggatgaatgtatcccgcaagatagagctccgcgtgacttctgcgtgaagtttcccgaagagatacggcacgataacctggccggccagctgtggttcggagctgagtgtcttgcggctgggagcatcatcatgaacagagagttggaatctatggcgatgcgccctttggcaaaagagctcacccgcagtctggaggacgttagaggggctcttcgggaccaggccttgcgtgatcttaatacatatactgagaagatgagagaggcgctccggcattttgacgtactcttcgctgagtttgaattgtcttacgtaagcgccatggtgcccgtgaagagccctcgagaatactacgtccagcaggaggtgatcgtgctgttctgcgagactgtggaacgagcactggattttggctacctcacccaggacatgatcgatgattatgagccagcccttatgttttctatcccacgactagcaattgtctgtggactcgtggtctacgcagatggccctctcaacctcgatcggaaggttgaggacatgagcgaactgtttcgaccttttcataccctgctcaggaagatacgagacttgttgcagacactgactgaggaggagctacacactctggagagaaacctgtgtatctcgcaggacgttgagttcccaatccgtgccgatgtgcagggccctgccgccctcgcacctgctttgagtgcccctttgccgccagagggaccgttatctgccaaagccaaggatccagatgctgagctagcgtgctctatgcagtacgatgaccaggagctggaacaactgagtcgcatggtgcaccgggctggagacgagatgtccagccttctttcaccacctattgcatgccagtcacccgctcatcggcccggggctgagggcagccctggcggagaggcttctcctggccgccccaggttacgttctgggtccgacgaagaggaaagagtgttctttatggacgatgtggaaggtacggcagaagctttggccaggcccgagtcccctgccgggccgtttggctgggcagggtcaacctgggcagacccgcaggagaagggacagggaggccccggtggagcagccggaatatctctgcccgccagtgagaaggaggaagacctctctaacaataatctggaggctgagggtaccgatggggcatccctggctgggacctctagttgtagctgtctcgacagccggctgcacctggatggatgggaagtcggcgccgacgatgcggagacagccgaaatgatcgctcaccgcaccggtggcatgaagctctccgctaccgttatcttcaacccaaagagtcctacttccctggatagcgccgtagccacccaagaggcagcctctgaacccgtggcagaaggtatggatggggggccgcataaattgtcaactggtgcaactaattgcctcctgcattcgtgcgtgtgttgcggttcctgtggcgacagcagagaggatgttgtcgagcggctcagggaaaagtgctcccccgggggtgttattggcgcttcctacgccgctggcctcgccaaggccagcgatagggcacctgagcgccaggaggaagccccacccccttctgaggatgcatctaacggacgtgaacccaaggcacccacctcagacaaatgtctcccgcataccagcggcagccaggtggatacagcctctggattgcagggcgaggctggtgtggccggacaacaggagcccgaggcccgcgagcttcacgctggctctccatcagctcacgaggctcctcaggctttatctggcagctcaagctccacagcggggtcttgtagtagcgataagatgggccccgaagccgcccccgccgctactcacgcagctccacaagctactagagagaagatcagaagtcgattccatggcagtcatgatttgattcaccggctttttgtgtgtatatctggggtcgctgatcagttacagactaattacgcctctgatctgcgaagcatcttgaagactctcttcgaggtaatggccacgaaaccagaaacagatgacaaagagaagctcagaaaggttactcagaccttgaggagtgccgctctggaggactgtgccctgtgtcaggaaaccctcagtagctctgaactggcagcaaaaacgagagacggggacttcgaggatcccccagaatgggtacctgatgaggcctgcgggttctgcaccgcctgcaaggcccccttcacagtgatacggagaaagcaccattgcagatcttgcggcaagatcttttgctcccggtgcagtagtcatagtgcacctcttccgcgttatgggcaggtcaaacccgtgcgtgtttgcactcactgttatatgttccatgtgacacctttctactcagacaaggccggactgtag

SEQ ID NO: 212535 - DNA, 2574 bp, synthetic construct
  misc_feature 1..2574: note = Description of Artificial Sequence: Synthetic coding sequence
  source 1..2574: mol_type = other DNA
atgatgaaccggttccggaagtggctgtacaagcccaagcggagcgacccccaattgctagcacgcttctactatgcagatgaggaacttaatcaggtagccgctgaattggattctcttgatggccgtaaagaccctcaaaggtgtactctactggtctcgcagtttagaagctgtcaggataatgtgctcaacatcatcaaccaaattatggacgagtgtatcccccaggatcgggcccctcgggacttctgcgtaaagtttcctgaagaaattcggcacgataacttggccggacagctgtggttcggggcggagtgcctggcggctggatctatcatcatgaatagagaactggagagtatggcaatgcgacccttggccaaggagctcacaagaagtcttgaggatgttagaggagctctaagagatcaagcgctacgagatcttaacacctacacagagaaaatgagggaggccctgaggcattttgacgtgttgttcgcggagttcgaattgagttacgttagcgcaatggttcctgtcaagtctcctagggagtactacgtccagcaggaagtgatcgtgttattttgcgagaccgtcgagagtgggctcgttgtgtacgctgatgggcctctgaatctggacaggaaggttgaggacatgagtgagttatttagacctttccatacactactgaggaagattagggatctcctgcaaacactcactgaggaagagttgcacacactagagaggaacctctgtatcagccaggacgttgagtttccaatccgagccgacgttcaggggcccgccgcattagctcctgcattgtctgccccacttccgccagaagggcccctgagcgcaaaggccaaggatcccgacgctgagctcgcatgttctatgcagtacgacgaccaggagctcgaacaattgtcccgcatggtgcatcgagccggcgatgagatgtccagcctgctcagtcctcctatagcctgtcaatcacccgctcacagacccggcgccgaaggatcgccagggggcgaagcaagccctggccgacccaggttgcgcagtggctccgatgaggaggagagagtattctttatggatgatgtcgagggtacagcggaggctttggctaggccagaatctcccgcagggccatttggttgggcgggttcaacttgggccgacccacaagagaaaggtcagggggggcccgggggtgccgccggaatctcgcttccagccagtgagaaggaggaggacctctcaaataataacctggaggcggaaggtaccgatggtgcgagccttgcaggcactagctcctgttcttgtctcgactccaggctccatctcgacggctgggaagtgggcgccgacgacgcagagacagcagagatgattgcccacaggacaggtgggatgaaactctccgccaccgtcatttttaaccctaaatccccgacctcactcgattcagccgtggcgactcaggaggccgcctcagagccagtagcagagggtatggacggaggcccccacaagctgtcgacgggggcaaccaactgcctactccattcatgcgtgtgctgtggtagctgtggcgatagtagggaggacgtagtggaaaggttgcgggaaaagtgctcaccggggggagtgatcggggccagctatgctgctggcttagctaaggcttcggaccgcgcacctgaacggcaagaggaggctccccctccaagtgaagatgcctcaaatggcagggaaccgaaggccccgacaagtgacaagtgtctgcctcataccagcgggtcacaagtggacactgcctcaggtctgcaaggagaggctggggtcgctggtcaacaggaaccagaagcccgagaactacatgctgggagtcccagcgcgcatgaggcccctcaagccctgagtggatcgagttcttctactgcagggtcctgctctagtgacaaaatgggaccagaggctgcacctgctgccacgcacgctgctccacaggcaaccagagaaaaaattaggtcgcgcttccatgggtcccacgacctgatccaccggttattcgtatgtatttccggtgtggccgatcagctgcagaccaattatgcttccgacctcaggtccatcctgaagacgctgtttgaggttatggccaccaagcccgagacagacgacaaggaaaagttacgtaaggttacacagaccttacggtctgctgctctcgaggactgtgcgttatgtcaggaaacactgtcttcttccgagcttgccgcgaaaacccgggacggcgatttcgaagatccacctgagtgggtgcctgatgaggcctgtggattctgtacagcctgtaaggcaccattcaccgtgatccggcggaaacaccactgccggtcctgtggaaagatcttttgctcccgttgcagttcccatagtgctcctcttccccgatatggtcaagtaaagccagtcagggtatgcacccactgttacatgtttcatgttacacctttttattcggacaaggcgggcctctag

SEQ ID NO: 212536 - DNA, 2454 bp, synthetic construct
  misc_feature 1..2454: note = Description of Artificial Sequence: Synthetic coding sequence
  source 1..2454: mol_type = other DNA
atggacgagtgcatcccccaggaccgggccccccgggacttctgcgttaagttcccagaggaaattcggcatgataaccttgcgggacagttgtggtttggagccgagtgcttggccgcgggcagtattatcatgaatagggaacttgagagcatggccatgcgcccactggccaaagagctcacacggagcctggaagatgtcaggggggctcttcgcgaccaagccttacgggacctcaacacctataccgagaaaatgagagaagcacttcggcattttgacgtgctgttcgccgaattcgagctgtcttatgtgtcagcgatggtacccgtcaaaagccctagagaatattacgtccagcaggaagtcatcgttctcttttgcgagacggtggagcgagcgctggactttgggtacctgacacaggacatgattgatgattacgaacccgccttaatgttcagtatccccaggctcgccatcgtgtgtggactggtggtctacgcagacggccctctgaatctggacaggaaagtggaagatatgtctgaactctttagaccgttccatacactgcttaggaagatccgcgacctgctgcagacccttacagaagaggaattacataccttggagcggaacttatgtatctcacaggacgtggaattccccattagggccgatgttcagggtcctgccgcgctagcccctgctctctccgcccccttgccacctgaaggaccgttatcagccaaagccaaggaccccgacgccgagctggcctgttccatgcagtatgatgaccaggagcttgaacagttgtccaggatggtccatagagctggggacgagatgtctagtttgctgtccccaccaatcgcctgccaatcaccagcccacagaccgggagccgaagggtcacccggcggtgaagcttccccaggacgcccccggttgcgctcaggctccgacgaggaggaacgggtattcttcatggatgacgttgagggtacagctgaggctctcgcccgccctgaatcaccagctggtcccttcggctgggcggggtctacgtgggccgacccccaggagaagggacagggaggccccggcggagctgctggtatctccctgcccgcgagcgaaaaggaagaggacctgtcaaacaataacctcgaggccgaggggacagatggagcgagcctggccgggacttcgagttgtagttgtttggacagccgcttgcacctggatgggtgggaagtgggagctgacgatgctgagactgcggaaatgattgcgcatcggacaggtgggatgaagctgtctgctacagtgatttttaaccccaagagtcccacttcactggattccgccgtggccacacaggaggccgcaagtgagccagttgctgaggggatggatggcgggcctcataaactgtctactggggcaacaaactgcctgctgcactcctgtgtctgctgcggatcctgcggcgatagccgagaggacgtcgtggagcgtttgagagaaaaatgttcccctggtggcgttattggggcctcctacgccgctggtctcgctaaggcgtcggatagagctcctgaaagacaggaggaagctccccctcctagcgaagacgcctccaacggcagagagccaaaagcgccgacaagtgataaatgcctgccccacacctccggctcacaagtggataccgcaagcgggcttcagggggaggccggtgtcgccgggcagcaagaacctgaggctagagagctgcatgctggatctcccagtgcccatgaagctccgcaggcactgtcgggatcctctagcagcacagccgggtcctgtagcagtgacaaaatgggccccgaggctgcccctgccgctacccacgcggctccccaggcaacccgagaaaagatccgctcccgattccacggcagccatgacctgattcaccgcttgtttgtatgcattagcggggtggccgatcagctgcagacaaactacgcatcagacttaaggtccatccttaagacactcttcgaggtgatggcaactaaacccgaaactgacgacaaagagaaactgcggaaggtgacacagaccctacgctctgccgcgctagaagattgcgcactatgtcaagagacactgtcgtcttccgagctggcagctaagacaagggacggagatttcgaggatccgcccgagtgggtcccagacgaagcctgtggtttttgcaccgcatgtaaagcacctttcaccgtgattcgacgaaaacatcactgccgatcctgtgggaagatattctgcagccgctgcagcagccacagcgccccgctcccccgctatgggcaggttaagccagtgcgggtttgcacacactgctatatgtttcatgtgaccccattctatagcgataaagctggtctgtag

SEQ ID NO: 212537 - DNA, 1212 bp, synthetic construct
  misc_feature 1..1212: note = Description of Artificial Sequence: Synthetic coding sequence
  source 1..1212: mol_type = other DNA
atggagcccgccggcccctgcggcttctgccccgccggcgaggtgcagcctgctcggtatacctgtcctcggtgcaatgccccctattgctcattacgatgttatcgcactcacggaacctgcgctgagaacttctatagagatcaggtgcttggggagctgcggggctgttcagcacctccgtctagattagccagcgcccttagaagattaagacagcagcgggagaccgaagatgagcctggcgaggctggtctgagttcaggtccggctccagggggactatccgggctgtgggaaaggcttgctccaggggagaaagcggctttcgagcggctgctgagccggggggaggccggtcggctgctgccaccatggaggccgtggtggtggaacagaggcgcggggcctcagttgctggaagagcttgacaatgccccggggtccgatgcagccgagctggagttggcccccgctagaacgcctcctgattcagtcaaggacgccagcgcagccgaacctgcggccgctgagcgtgttctgggggatgtgcctggcgcctgtacccctgtggtcccgacaaggattcctgccatcgtctccctgagccggggacctgtgtcgcctctggtgaggtttcagctgccaaacgtgttgttcgcctacgcccacacgttggcactgtatcacggcggcgatgacgccctcctttctgatttttgcgccaccctcctgggagtaagtggcgccttgggagcccagcaagtgttcgcctctgcagaggaagccttacaggccgcggctcacgttctagaggccggtgagcacccaccaggtccattgggcacaagaggcgctatgcatgaggtggccagaatcctgctgggggaggggccaacaaaccagaaaggatatacgttggccgctctcggggatctcgcacaaaccctgggccgtgcgcgcaagcaggctgtcgctcgcgaggagagggatcacttgtatcgggccaggaagaagtgccagttcctactggcatggaccaacgagaacgaggctgcgctgacaccactcgctctagactgcgctcgggcccaccaagcacatgcagtggtcgctgaagaagttgccgccctaaccggcgaactcgaacggctgtggggaggcccggttcctcctgcccctcggactctaatagaggagctgccctcctag

SEQ ID NO: 212538 - DNA, 1683 bp, synthetic construct
  misc_feature 1..1683: note = Description of Artificial Sequence: Synthetic coding sequence
  source 1..1683: mol_type = other DNA
atggccggcccccagcccctggccctgcagctggagcagctgctgaaccctaggccctctgaggccgaccccgaggctgacccagaggaggcgaccgcagctcgcgtgatcgatagatttgatgagggtgaggatggcgaaggggacttcctggtcgtagggagcatccggaagctcgctagcgcatcattgctcgacacagacaaacggtattgcggtaaaacaacatctcgtaaggcatggaacgaagaccactgggaacagaccctaccagggtcatcagacgaggagatcagcgatgaagaaggtagcggtgacgaggactctgagggcttgggactggaggagtacgatgaagatgatctcggagcggcggaagaacaggagtgcggtgatcaccgagagtcaaagaagtcccggtcacacagcgctaaaacaccgggcttcagtgtgcagagtatcagtgactttgaaaagttcacaaaaggcatggatgatctggggagctcggaggaagaagaggatgaggagtcaggcatggaagaaggagatgacgccgaagatagccagggcgagagtgaggaggaccgggccggcgacaggaatagtgaggacgatggggtggttatgacattttcatcagtcaaagtgtcagaggaggtcgagaaggggcgggccgtaaagaaccagatagccctctgggatcagctgctggagggcagaattaagctccagaaagccttgctgaccacaaaccagctgccccagccagatgtattcccgcttttcaaagacaagggcggccctgaattctcgtccgcccttaagaactcgcataaggcactgaaggctttattgaggtccctcgtcggactgcaggaagagctactgttccagtaccccgacaccaggtatctcgtggacggtacaaagccgaacgcaggaagcgaagagatatctagcgaggacgacgaactcgtcgaggagaagaagcaacagcggaggcgcgtgcctgcgaagcgtaaattggaaatggaggactacccatcatttatggcaaagcgattcgctgattttaccgtgtacagaaatagaactttacagaaatggcacgataaaacgaagctggcctcaggaaagctgggcaagggcttcggcgccttcgaaagatccattctaacacaaatagaccacatcctaatggataaggagagacttctgagaagaactcagaccaagcgctctgtttaccgggttttagggaagccagaacccgcagcgcagcctgttccagagagtctgcccggggaaccagagattctcccacaagcacccgcaaacgcccacctgaaagatttagacgaagaaatctttgatgatgacgatttctaccaccaattgctccgagaactcattgagaggaagacctccagtctagacccgaacgaccaagtggctatgggaaggcagtggctggccatccagaagctaagatccaaaatacacaagaaggttgacaggaaagccagtaagggccgtaaattaagatttcatgtcttatctaagctgctctcatttatggctcccatcgaccacacaacaatgaatgatgatgcgaggacagaattgtataggtccttgtttggacaacttcaccctcctgacgaaggccacggtgactag

SEQ ID NO: 212539 - DNA, 4134 bp, synthetic construct
  misc_feature 1..4134: note = Description of Artificial Sequence: Synthetic coding sequence
  source 1..4134: mol_type = other DNA
atggacaccagcagcgtgggcggcctggagctgaccgaccagacccccgtccttttggggagcactgctatggccacgtccttgactaacgtggggaattcctttagcggtccggcaaatccacttgtaagccgatccaacaaattccagaactcttcagttgaagatgacgacgatgtggtctttattgagccagtgcagccaccccctccatcagtcccagtggtcgcagatcagcgaaccattaccttcacatccagtaaaaatgaagaactgcagggtaacgacagtaaaattacaccgtcgtcaaaagagctggcatcgcagaaagggtccgtcagcgaaactattgtgatcgacgacgaagaggacatggagacgaatcaggggcaggagaagaattcctctaatttcatcgaacggagaccgcccgaaaccaagaataggaccaatgacgtggactttagtacttcctcgttcagtcggtcgaaggtgaacgctggcatggggaattctgggatcaccaccgagcctgattccgaaattcagattgcgaatgtgactactctagagactggcgtcagtagcgtgaatgatgggcagttggagaacacagatggaagagatatgaatcttatgattacgcacgtcacctccttgcagaatacaaatctcggtgatgtgtcaaacggactgcagtccagcaacttcggtgtgaacattcaaacctataccccaagccttactagccagactaagaccggcgttggacctttcaatcccggccgcatgaacgtggctggcgacgtgttccagaacggggagtctgcgacgcatcacaaccctgactcttggataagtcagagcgctagtttcccaaggaatcagaaacagcccggtgtggatagcttgtccccagtggcaagtctgccgaaacaaatattccagccttctgtccagcaacaacccacaaaaccagtcaaagtaacctgcgccaactgcaaaaaaccactccagaagggtcaaaccgcctaccagaggaagggttcagcccacttgttttgctctaccacatgtctgagctcatttagtcacaaacccgcccccaaaaagctatgtgtgatgtgcaagaaggacattacaacaatgaaggggactatcgtagcccaggtggatagttcagaatcctttcaggagttctgcagcacctcctgtcttagtctgtacgaagacaagcaaaatccaaccaaaggggctttgaacaagagtaggtgcactatatgtgggaagttgactgagatcaggcatgaggtgtcattcaaaaacatgactcataaactgtgctctgaccattgtttcaaccggtataggatggccaatggcctaattatgaactgctgtgagcagtgcggagaatacctgccctccaaaggtgccggtaacaatgtgttggtaatcgacggccagcagaagcggttctgttgccagtcatgcgtctctgaatataaacaggtaggatcccatccttcattcttgaaagaggtgcgtgatcatatgcaggatagcttcctcatgcaaccagagaagtatggaaagctgaccacttgcacaggctgcaggacgcaatgcaggttttttgacatgacccagtgtatcgggcccaacggatatatggagccctattgctccacagcctgtatgaactctcacaaaacaaagtacgccaaatcccagtccttgggcataatctgccacttctgcaagcgcaatagcttgccacagtaccaggcgacaatgcccgacgggaagctctataatttttgcaattcctcctgtgttgctaaatttcaggccttgtccatgcagagtagccccaacggccaatttgtggctccaagtgacattcagctgaaatgcaactactgcaagaatagtttttgcagtaagccggagatcctagagtgggaaaacaaagtacaccaattttgtagtaagacgtgctctgacgactacaagaagctgcattgtatcgtgacttactgcgagtactgccaggaggaaaagaccctacatgagacggtcaacttctctggcgtgaaacgacccttctgtagtgagggctgtaaattgctgtacaagcaagattttgcgcgccgcttaggcctgagatgcgtgacttgtaactactgttcccagctttgcaagaaaggtgccacgaaagagcttgatggtgtggtgagggatttttgttcagaggactgttgcaagaagtttcaggattggtactacaaggctgcccgctgcgattgctgcaagagtcagggtactttgaaggagcgggtccagtggagaggggagatgaaacacttctgtgaccaacactgtctgttgaggttctattgtcagcaaaacgagcctaatatgaccactcagaagggaccggagaacttgcattatgaccagggctgtcagaccagtaggacgaaaatgactgggtcggccccacctccctcgcctactcccaataaggagatgaagaacaaggcagttctgtgtaagcctttaactatgacaaaggcgacttattgtaagccacacatgcaaactaagagttgtcagactgatgacacgtggcgaaccgaatatgtgccggtccccattcccgtgccagtgtacataccagtgcccatgcacatgtacagccaaaatattcccgtcccaactacagtgccagtcccagtgccggtccccgtgttccttccagcccctctggactcaagcgagaagattcctgccgccattgaggagctgaagtctaaagtctcttccgacgccctggatacagagctccttaccatgacagacatgatgagcgaggacgaaggtaagacagaaaccacaaatattaattccgtcataatcgagactgatatcatcggcagtgatctgcttaaaaactctgaccccgagacccaatcaagcatgcctgacgtgccgtacgaaccagatcttgatatcgagatcgactttcccagggccgccgaggagctggacatggaaaacgaattcctcctgcctcccgtctttggtgaggaatatgaggaacagccacgaccccgaagtaagaaaaaaggtgctaagcggaaagcagtcagcggctaccagagccatgatgactcttccgataacagcgagtgttcttttccttttaaatatacatacggggtcaacgcttggaaacactgggtcaaaacacggcagctcgatgaagatttgctggtgctggacgagttaaaaagttccaagtcggtgaagctgaaagaggacctgctttctcataccaccgcagagctcaactatggtctggctcatttcgtcaacgaaattcgacgccctaatggagaaaactatgcccccgactccatatactatctttgtcttggaatccaggaatatttatgtggcagtaatcgtaaagataacatcttcattgatcccggctatcagaccttcgagcaggaactgaataaaattctccggtcatggcagcctagcatactgcctgacggtagtatattcagccgagtggaagaagactatctgtggcgaataaagcagctggggtcccactcccccgtcgcgctgcttaacactctgttctattttaacactaagtacttcgggctgaaaactgttgagcagcatctgcgactctcctttggcacagttttccggcactggaagaaaaatccactgaccatggaaaataaggcttgcctcagatatcaggtgagtagcttgtgcggcacggacaacgaagataagattactacgggtaagcgaaaacatgaagatgacgagcctgtctttgaacaaatcgaaaacacggctaatccgtccaggtgcccggtcaaaatgttcgaatgttacttgtcaaaatccccgcagaatctgaaccagcgaatggacgttttctacctgcaaccggagtgtagttccagcacagacagtcccgtctggtacacctccacttcactcgataggaacaccctcgaaaacatgctcgtacgtgtgctcctggtcaaagacatatatgacaaagacaattacgagctcgatgaggacaccgactag

SEQ ID NO: 212540 - DNA, 4128 bp, synthetic construct
  misc_feature 1..4128: note = Description of Artificial Sequence: Synthetic coding sequence
  source 1..4128: mol_type = other DNA
atggacaccagcagcgtgggcggcctggagctgaccgaccagacccccgtcctcctgggatccacagctatggcaacttcactcactaacgtgggtaatagtttcagtggaccagcaaaccccctggtctctagatcgaacaagtttcagaattctagcgtcgaagatgatgatgacgtagtcttcattgaacctgtgcagcctccccccccgagcgtcccggtagtcgcagatcagagaacaatcactttcacttcttccaagaatgaagagttgcagggcaacgactctaaaataactccttcatctaaggaactggcgtcacaaaaagggagcgtcagcgagactatagtcatcgatgacgaggaagacatggaaactaatcagggtcaagagaaaaattctagcaatttcatcgaaaggcggccgcccgagacaaagaatcgcacaaatgatgttgatttttcaactagcagtttcagcagaagcaaggtgaatgcaggaatgggaaattccggtatcactactgagccagattcggagattcagattgccaacgtcaccactctggaaaccggtgtgagcagcgtgaacgacgggcagctggaaaacacggatgggcgggatatgaatttaatgataacgcatgttacgtcactgcagaacacaaacctgggggatgttagcaatggactgcagagttccaatttcggcgtgaacatccagacatatacaccctctttgacaagtcagaccaaaaccggcgtgggtccttttaatcctggtcgcatgaacgtggctggagatgttttccagaacggagagagcgcaacacaccacaatcctgatagttggatctcacagtcagcctcctttccaagaaaccagaaacaaccaggcgtcgattcactgtccccggtcgcctctctccctaagcagatcttccagccatcagtgcaacaacaacccacaaagcctgttaaagtaacatgcgccaactgtaagaaacccctccagaaaggtcaaacagcctatcagcgaaaaggtagcgcacatcttttttgcagcaccacttgcttatccagcttttctcacaaacctgcacccaagaagttatgcgtcatgtgcaagaaagacattacaacaatgaaaggcactattgtggcccaggtggacagtagcgagtccttccaggagttttgctcaacatcctgcctgtccttatatgaagacaagcaaaacccaacaaaaggagcacttaacaaaagtcggtgtactatttgcggtaagttaaccgagatccggcacgaggtatcttttaagaatatgacccataagctgtgctcagatcactgttttaacaggtataggatggcaaacggcctgataatgaactgttgcgaacagtgcggtgaatatcttccttcgaaaggcgccggaaacaatgttctggttattgatggacagcagaagcgattctgctgccagtcctgcgtatctgaatacaagcaggtggggagtcacccctcctttctgaaggaagtacgtgaccatatgcaggatagctttttaatgcagcctgaaaaatacggaaagctcactacctgcactggctgtagaacacagtgccgcttctttgacatgacccagtgcatcggacccaacgggtatatggaaccttactgttctacggcctgcatgaacagccacaagactaagtatgctaaatcacagagcctgggaatcatctgtcacttttgtaaaaggaactctctcccgcaataccaggccacaatgccagacgggaagctgtacaatttctgtaactcctcctgcgttgccaagttccaggctttgtctatgcaatccagcccaaacggacagttcgtggcaccttctgatatacaactcaagtgcaattattgcaagaattcattctgttctaagccggagattttagaatgggaagcttcactgcatcaattttgctctaagacttgctccgacgattataaaaaactccactgcatcgttacatattgcgaatattgccaggaggaaaagaccctacatgagacggtgaacttttccggagtcaaacgaccattttgtagcgaaggatgtaaattactttacaagcaggactttgcaaggcgcctcgggctgcggtgcgtaacgtgtaactactgttcacagctgtgcaagaaaggtgccactaaggagctggacggggtggtccgcgatttctgttctgaagactgctgcaagaagttccaggactggtattacaaagcctgcgactgctgtaaaagccagggcaccctgaaagagagagttcaatggcggggggagatgaagcatttctgcgatcagcactgccttttacgcttttactgccagcaaaacgagcccaatatgactacacagaaggggccagagaatttgcactatgatcagggatgccaaacctcccggacgaaaatgaccgggtctgctccgcccccaagccccacaccaaataaagagatgaaaaataaagccgtgctatgcaagcccttaacaatgaccaaagccacatactgcaaaccccacatgcagaccaagtcttgtcagacagatgatacttggagaactgagtacgttcccgtccccattccagtgcctgtttacataccagtgcctatgcacatgtattctcagaacatcccagtacccactacagtgcccgtaccagtgcccgtgccagtgttcctgcctgcccccctagacagcagcgagaagattcccgctgccatcgaggagctcaagtctaaggttagcagcgatgcacttgacaccgagttgttaaccatgacagacatgatgagcgaagatgagggaaaaacagagacaacgaacatcaatagtgtgataatcgaaaccgatatcatcggttccgatttattgaagaattctgaccccgaaacccagtcaagcatgccggatgtgccttacgagccagatcttgacatcgagatcgactttcctcgtgctgccgaggagcttgatatggaaaacgaattcctcctgccgcctgtgttcggagaggagtacgaagaacagcctaggcctaggagcaagaagaagggtgctaagcggaaagcggtttctggctatcagtcacacgatgactcatctgacaatagcgagtgttctttccctttcaagtatacctacggtgtgaacgcttggaagcactgggtgaaaacacggcaactggacgaggatctcctggtcctggatgaactgaagtctagcaaatcggtgaagctgaaagaagacctgctcagtcatacaacagcggagctaaattatggactcgcccatttcgtgaatgagatcagacgcccaaacggcgagaactatgccccagactcaatttattatctgtgtctgggcatccaggagtacctctgtggctccaaccggaaagataacatctttatagaccctgggtatcagacatttgagcaggagctaaataagatccttagatcctggcaaccttccatccttccagatggctcaattttctcccgggtggaggaagactatctgtggcgaataaaacaactcggcagtcacagtcctgtggctttgctaaatacacttttttatttcaacacgaagtacttcggactcaaaacggtggagcagcatttgcgcctttcctttggcaccgttttccgacactggaaaaagaatccactgaccatggagaataaggcttgcctgaggtaccaggtttccagtttgtgtgggactgataacgaggacaaaattacgaccggaaagcgcaaacatgaggacgacgaacctgtgtttgagcaaatcgagaatactgccaacccatctcgttgtcctgtgaagatgtttgaatgctatttatccaagtcaccccagaatctgaatcagagaatggatgtgttctacctgcagcccgaatgctcgtcgtccaccgattcgcccgtatggtatacctcaactagtctcgaccggaacactctggaaaatatgttagtccgggtgttactcgtcaaggacatttatgataaggacaactacgagttggatgaagatacagactag

SEQ ID NO: 212541 - DNA, 4128 bp, synthetic construct
  misc_feature 1..4128: note = Description of Artificial Sequence: Synthetic coding sequence
  source 1..4128: mol_type = other DNA
atggacaccagcagcgtgggcggcctggagctgaccgaccagaccccagtgctgctcggcagtactgccatggccaccagcctcaccaacgtagggaactcttttagtggaccagccaatcctctggttagtcggagcaataagttccagaacagcagcgtcgaggatgatgacgatgtggtttttatagaaccagtccaaccgccccctcccagcgtgcccgtggtagctgaccagaggacaattaccttcactagtagtaaaaacgaggaactgcagggtaatgactccaaaatcactccttcctcaaaagagttggcatcacagaaaggcagtgtgagtgagactatcgtcattgacgacgaagaggatatggagaccaaccagggccaggaaaagaactcctcaaacttcattgagaggcgtccccccgaaacaaagaatcgtacaaacgacgtggatttctccacctctagcttttccaggtcaaaggtaaatgcaggaatgggcaacagtggcataactactgagccagatagtgaaatccagatcgccaacgtgaccactctcgaaacaggggtgagcagcgtgaatgacggtcagctggaaaacaccgatggaagagatatgaacctgatgatcactcacgtgaccagtcttcaaaatacaaacttgggcgatgtgtccaacggcctgcagtctagcaactttggggtgaacattcagacatatacaccctccctaacctctcagaccaagacaggcgttggcccattcaatcccggacgcatgaatgtggccggggacgtctttcagaacggggaaagtgccacacaccataatccagattcttggattagccagagcgcttcatttcccaggaaccagaaacaacctggagtcgacagtttgtcccccgtggcctctctccccaagcagattttccagccgagcgtgcaacagcaaccaactaaaccagttaaggtgacctgcgcaaattgtaaaaaacccctccagaagggccagacagcctaccagagaaaggggtctgcccatctgttttgtagcactacatgcctgtcttccttcagccacaagccggctcctaaaaaactgtgtgtcatgtgtaaaaaagacattaccaccatgaaaggcacaattgtggcccaggtggattcttctgagagctttcaagaattttgtagcacatcatgcctgagcctgtatgaagacaaacagaatcctaccaagggggctctgaacaaatccaggtgcactatctgtggtaagctgaccgaaatccgacatgaggtgagttttaagaacatgacgcacaaactgtgttccgatcactgcttcaaccgatacagaatggcaaatggattgattatgaactgctgcgagcaatgcggggaatacctccctagcaaaggggccggaaataatgttctggtgattgatggtcagcaaaagcgcttttgttgccagtcatgcgtcagcgagtataaacaggtgggcagtcatccatcattcctcaaggaagtccgggatcacatgcaggactctttcctgatgcagcctgagaagtacggaaagctgacaacatgtacaggatgtcgtacacagtgccgcttcttcgatatgacccagtgtataggccccaatgggtatatggagccctactgctctacagcttgtatgaactctcataaaaccaagtacgcaaaaagccaatcccttggaataatttgccacttttgcaagaggaatagccttccacagtatcaggccacgatgcctgacggcaaactgtataatttttgtaattcatcgtgtgtagctaagtttcaagctctttcaatgcagtcttcgcccaacgggcagtttgtggccccttccgacattcagctgaagtgtaattattgtaaaaattccttctgtagtaagcccgagattctcgaatgggaggccagcctccaccagttttgcagcaaaacctgctccgatgactataagaaattgcactgcatagtcacctactgcgagtactgccaggaagagaaaaccctccatgagacagtgaatttttctggggtcaaacggcccttttgcagcgaaggatgtaagctgctgtacaaacaggatttcgccagacgcctgggtctccgttgcgtgacatgcaattactgctcacagctctgcaagaagggggctacaaaggagctggacggagtcgtgcgagacttctgttcagaagactgctgtaaaaagtttcaggactggtattacaaagcgtgtgactgctgcaagtcccaggggacccttaaagagcgggtgcagtggcgaggagagatgaagcatttctgcgatcagcattgcctgctcagattttactgtcaacagaatgaacctaatatgacgacgcaaaaaggccccgagaatctccactatgatcagggctgccagacatctcgaactaagatgacgggcagcgcacccccgccgtccccaacaccaaacaaagagatgaaaaacaaggccgtgctgtgtaaacctttaaccatgacgaaagctacatattgcaaacctcatatgcagaccaagtcatgtcagactgatgacacctggaggaccgagtacgttcccgtaccaattccagtgcccgtgtacattcctgtgcctatgcatatgtatagccagaacattcctgtcccaaccaccgtgccagttccggtgcccgttcccgtatttctgccagcacccctggactcttcagagaaaatccctgctgcaatcgaggagctgaagtccaaggtgtcgtcagacgcgctggatacagaactacttacaatgaccgacatgatgagcgaggatgaagggaagacagaaactaccaatattaactcagtgattatagagaccgacatcatcggatccgatttactgaaaaactccgaccccgaaacacagagctcaatgccggacgtcccctatgaacctgacctcgatattgagatagacttcccaagggctgccgaggaactggacatggaaaacgaattcctgctgccaccagtctttggtgaagagtatgaggagcaaccacgccctaggtctaagaaaaaaggcgcaaagaggaaagctgtgtctggataccagtctcatgacgatagctccgataactctgaatgtagtttcccattcaagtacacttacggcgttaacgcctggaaacattgggtaaagaccagacagctagacgaggaccttctcgtgctggacgagttgaagtccagtaagtctgtgaaattgaaagaagatctgctaagtcacaccacagccgagctcaactacggactagctcatttcgttaacgaaattcggcggcctaacggtgaaaactacgcccctgattccatatactatctgtgtcttggaatacaggagtatctttgcgggtctaatcggaaagacaacatttttatcgatcccggataccagacattcgagcaggagcttaataaaatcctgcgttcatggcagccctccattttgcccgacggttctatcttctcccgcgtggaggaagactatctgtggcgtattaagcagctaggatctcactcccccgtggccctcctcaatactctcttttattttaacacaaagtacttcggcctcaaaaccgtggagcagcacctgagactaagcttcggcaccgtgttccgccactggaagaagaatccattaacaatggaaaacaaggcttgcttacggtaccaggtgagttctttgtgtggcacagataacgaggacaaaatcacaaccggaaagcgcaaacacgaggacgacgagccagtgtttgagcagattgagaatacggctaacccaagtcgctgtccggtgaagatgtttgagtgctatcttagcaagtctccccagaatttgaatcaaaggatggacgttttctacctgcaacctgagtgttcctctagcaccgacagccctgtttggtatacttcaaccagcctggacagaaatacgctcgagaatatgctggtgagggtgttgctggttaaggatatttatgacaaagataactacgaactggatgaagacacagactag

SEQ ID NO: 212542 - DNA, 1134 bp, synthetic construct
  misc_feature 1..1134: note = Description of Artificial Sequence: Synthetic coding sequence
  source 1..1134: mol_type = other DNA
atgcaggacagcttcctgatgcagcccgagaagtacggcaagctgacaacatgtactggctgccgcactcaatgcaggttcttcgacatgacccagtgtattggccctaatggttacatggagccttattgcagcacagcctgcatgaacagccacaagacaaaatatgctaaatctcagtcgcttgggattatttgtcacttctgtaaacggaactccttgccacagtatcaggccacaatgccggatggaaaactgtacaacttttgcaattcctcctgtgtggccaaatttcaggctttaagcatgcagtcttcgcctaacggtcagttcgtggccccttccgatatacagctgaagtgtaactactgtaaaaattcattctgtagcaaaccagaaatattggaatgggagaataaagtgcatcagttttgttctaagacatgtagcgacgattacaagaaactgcattgcattgttacatattgcgagtattgccaagaggagaaaacgctgcacgaaactgtcaatttctctggggtgaaacgccccttctgctctgagggatgcaagctgctttacaagcaagatttcgcaagaaggctcggtctgcgctgtgtgacatgcaactactgctcccagctttgtaagaaaggagccacaaaggagctggatggcgtggtgcgggatttctgcagcgaggattgctgtaaaaagttccaggattggtattacaaggcagctcgttgcgactgctgcaagagtcaaggcactttgaaggaacgcgtgcagtggcgtggcgagatgaaacatttctgtgaccagcactgtctcttgagattttactgtcaacagaacgagcccaacatgacgacccaaaaggggcctgaaaacctgcactacgatcagggctgtcagactagtcgaacaaaaatgacagggtctgctcccccccccagccccacaccaaacaaagagatgaagaataaggccgtgttatgtaagcctctcacaatgactaaggcaacatactgcaaacctcatatgcagactaaaagctgccaaactgatataacatggaggatacagcacttgattctgaatcattacgaccagagcctgataaaggcctag

SEQ ID NO: 212543 - DNA, 4134 bp, synthetic construct
  misc_feature 1..4134: note = Description of Artificial Sequence: Synthetic coding sequence
  source 1..4134: mol_type = other DNA
atggacaccagcagcgtgggcggcctggagctgaccgaccagaccccggtgctgctgggaagtaccgcaatggctacctctctgactaacgtgggcaactcctttagtggccccgcaaaccccctggtgtcccgttctaataagtttcagaactcgtctgtggaggacgacgatgacgttgtgttcatcgagccagtgcagccacccccaccctctgtcccagtggtcgccgatcagcggactataacttttacctcctctaaaaatgaagaattacaaggaaatgatagcaagatcacgcccagcagtaaggagttggccagccaaaaagggagcgtcagtgagaccattgtgatagacgacgaagaagacatggagactaaccagggccaggagaaaaactcctctaatttcatcgagaggcggccccctgaaaccaaaaacaggaccaatgatgtggactttagtacatcttcatttagcaggtcaaaggtaaatgccggcatgggtaacagcggtatcactacagagccagattcagagatccaaattgcgaatgtcacaactcttgaaaccggtgttagttcagtgaacgacggccagctcgagaataccgacggccgggacatgaacttgatgattactcatgtgacctctctacaaaacactaatctcggagacgtgtccaatggcctccagagctccaatttcggcgtgaatatccaaacatacaccccctcgcttacctcacaaaccaaaaccggcgtgggcccctttaatcccggcagaatgaatgtggctggcgacgtattccaaaacggcgagagcgcaacacatcacaacccagattcatggatctctcagagcgcaagctttccacgtaatcagaagcaacctggagtggactccctgtctcctgttgcctccttaccaaagcagattttccagccctcggtgcagcagcagcccaccaaacccgtgaaagtgacttgtgctaattgtaaaaagcccctgcagaaagggcagacagcgtaccagcgaaagggatccgcccatctgttctgcagtaccacttgtttaagctccttttctcacaaacccgcgcctaaaaagttgtgcgtcatgtgcaagaaggatattaccaccatgaaagggacaattgtggcccaagtagacagcagcgagtcttttcaggagttctgttccaccagctgcttgtctctgtatgaggacaagcagaatcctactaagggagctctgaacaagtctagatgcacaatttgcgggaagttgacagagatacggcacgaggtgtccttcaaaaacatgacccataaattatgctccgaccattgctttaatcgttaccgtatggccaacggcctcatcatgaattgctgcgaacagtgcggcgaatacttgccctccaagggggctggcaataatgtactcgttatcgacggccagcaaaaacggttctgctgtcagagttgtgtttctgagtacaaacaagtcggtagtcatccatcattcctcaaggaggttagggaccatatgcaggattctttcctgatgcagcccgaaaaatacggcaaactgacaacctgtacagggtgcagaactcaatgcagattcttcgacatgacccagtgcatcggaccgaacggatacatggagccctactgtagtaccgcctgcatgaattctcataaaacaaaatatgccaaatcccagagcttaggcatcatatgccacttttgcaaacgaaattctctcccccagtaccaggccacgatgcccgatgggaagctctataatttttgtaacagttcatgcgttgccaagttccaggcactgtcaatgcagagcagccccaacgggcagtttgtggccccatctgacatccagctgaagtgcaactattgcaagaactccttttgtagtaaaccagagattttagaatgggagaacaaagtccaccagttttgttcaaaaacttgctccgatgactataagaagctgcattgtattgtgacctactgcgagtactgccaagaggagaaaacactgcatgagactgtaaacttctccggggttaaaaggcccttctgtagtgaagggtgcaagctattgtacaagcaggatttcgcccggcgactcggtctgcggtgtgtcacctgtaactattgttcccagctgtgcaaaaagggggccacaaaggaactggatggggtcgttagggacttctgttccgaggactgctgcaagaagttccaggattggtactacaaagcagccaggtgcgactgttgcaagagccaaggtacccttaaagagcgggtacagtggcgaggagagatgaagcacttctgtgaccagcactgcctgctgcggttttattgccagcagaacgaaccaaatatgacaactcagaaagggccagaaaacctgcactacgatcaaggttgtcagacatcaaggacaaagatgacgggctccgccccaccccccagccctactcctaataaagagatgaagaacaaggctgtcctctgtaaaccgctgactatgacaaaggcaacatactgtaaaccgcatatgcaaacaaagtcttgccaaactgacgacacctggcgcactgaatacgtgcccgttccaattcccgttccagtgtatattccagttccgatgcatatgtatagtcagaatattccggttcccacaacggttcccgttccagtgcccgtgcccgtgtttctgcccgctcctttggatagctccgagaaaataccagccgcaattgaggaactgaaatctaaagtgtcctccgatgctttggataccgagcttctgaccatgactgatatgatgagcgaagacgaaggaaaaaccgaaactactaatattaacagtgtcattatcgaaactgacatcatcggttcagatctcctgaaaaactctgatcctgaaacacaatcctctatgcctgacgtgccttatgaacctgatcttgatattgagatcgacttcccacgggcggccgaggaactggatatggagaacgagtttctgcttccgccagtttttggagaggagtacgaggagcagccccgccctcgctcaaagaagaagggcgctaagcgaaaggcagtaagtggatatcaaagccatgatgattcttcagacaattcagagtgctcttttccatttaaatatacatatggtgtgaatgcctggaaacactgggtgaagaccaggcaactggacgaagacttgctggtgctagacgagctgaagtcatccaagtcagtgaaacttaaggaggacctgctttcgcacacgaccgctgaactgaactacgggctcgcacacttcgtaaacgagatccgcagacccaatggagagaactacgctcctgacagcatctactacttgtgcctcggtatccaggagtatttgtgtggatccaataggaaggacaatatcttcatagacccaggctaccagacctttgagcaggaactcaacaaaattctgagatcctggcagcccagcattctgccggacggctccatcttctcacgggtggaggaggattatttgtggcgcattaagcagttaggcagtcacagccctgtggcactgttgaacactctgttctattttaatactaagtattttgggctcaaaactgtagagcagcacctgcggctctctttcggcactgtctttcgccattggaagaaaaaccctctaaccatggagaataaagcttgcttgcgttaccaagtgtcatctctgtgcggaaccgacaacgaagacaagattactaccggcaagaggaagcatgaggacgatgaacctgtctttgaacagatcgagaatacggccaacccaagtcgctgtcctgtcaaaatgttcgaatgctatctatctaagagcccccagaatctcaaccagcgcatggacgtgttttatctccagccggaatgctcaagttctaccgatagtccggtgtggtataccagcacttcacttgacagaaatactttagagaatatgctggttagggtgctcctggtgaaggacatatacgacaaggacaactacgagctcgatgaagacaccgactag

SEQ ID NO: 212544 - DNA, 4113 bp, synthetic construct
  misc_feature 1..4113: note = Description of Artificial Sequence: Synthetic coding sequence
  source 1..4113: mol_type = other DNA
atggaccccagcgacttccccagccccttcgaccccctgaccctgcccgaaaagccccttgccggagatctgccagttgatatggagtttggcgaagatttgttggagtcccagaccgcacccacacggggctgggcccctcccgggccttcccctagtagcggggctttagatcttcttgatacccccgccggcttagagaaagaccccggcgtcttggacggggccacagagctcctgggtttggggggcctgctatataaagctcctagtccaccagaggtggatcatggtccagagggcaccctggcatgggacgccggtgaccagactttggagccaggtcccggggggcaaactcctgaagttgtgccaccagaccctggggccggagccaacagctgttctcctgaaggacttctggagcctctggctcccgatagtcctatcacactgcagagtccacatatcgaagaggaggagaccacttccatcgctaccgcccgacgcggctctcctggccaggaagaggagttaccccagggacaaccacagagccccaacgctccgcctagtcctagtgtgggggaaaccctcggggatggaataaacagctcacagaccaaacctgggggcagttcacctcccgcacacccatcactgccgggagatgggctgacggcgaaggcaagcgagaagcccccagagagaaaaaggtctgaaagggtgcgacgagccgaaccgcctaagcccgaagtggtcgattcgactgaatcaattccagttagtgatgaggattcagatgcgatggtggatgatcccaatgacgaggacttcgtgccattcagacctaggcgcagcccccgcatgagtcttagatcttcggtgagccagcgggcaggccgtagtgctgtgggtaccaaaatgacatgcgctcattgcaggactccgttgcagaaggggcagaccgcataccagagaaaaggcttgccgcagttgttctgttcgtccagctgtctgacgacattctccaagaagccttccggcaaaaagacatgcaccttttgcaagaaggagatatggaacacaaaggattcggtggttgcacagacaggctcaggagggagctttcacgagttctgtacctcagtttgcctgagcctttacgaagcccagcagcagcgaccgattccacaatctggggaccctgccgacgctactcggtgctcgatatgccagaagacaggcgaggtgttgcacgaagtcagtaatgggtcagtggtacataggctgtgctcagacagctgtttcagtaagttccgagcaaataaaggtcttaaaacaaattgctgcgaccagtgcggtgcatacatctataccaaaacaggctcccccggtccagaactgttgtttcacgaaggccaacagaagcggttctgcaataccacctgcctaggtgcgtataagaagaagaacacccgcgtgtacccatgcgtttggtgtaagactttgtgcaagaatttcgaaatgctttcccatgttgacagaaacggaaagacttccttgttctgttctctgtgctgcaccaccagctataaagtcaaacaggctggcctgactggacctccccggccttgtagtttctgccggcgatccctgagtgacccgtgctattacaacaaggtggacaggactgtctaccagttctgttcaccgagctgctggacaaagttccagcgaacctccccagagggaggcatccaccttagctgccactattgccatagtttgttcagcggaaagcctgaggtcctagactggcaggaccaggtctttcagttctgctgtagagattgttgtgaggattttaaaagactgcggggcgttgtgagccagtgtgagcactgcagacaggagaagctgttgcacgaaaaactgcgtttcagcggagtagagaaaagcttctgttctgagggatgcgttctcctatacaaacaggatttcaccaaaaagttgggactgtgctgcatcacctgcacctattgcagccagacctgtcagagaggagttaccgaacagctggatggcagcacctgggacttttgcagtgaggattgtaagagtaagtatctactgtggtactgtaaagcagcgcggtgccacgcgtgtaagcgccaaggcaagctgttggaaaccattcactggcgcgggcagatccggcacttttgtaaccagcagtgtctgctgcggttttactctcaacagaaccagcccaatctcgacactcagtccgggcccgaatccctgctcaattcacagagccctgagagcaagccccagacaccgagtcaaactaaggtggaaaactctaacaccgtgaggaccccggaagagaacgggaatctcgggaaaatccctgtaaaaacccgctccgcccctactgcacccacccctcctcctccacccccgcctgctactccccgcaaaaataaggcggctatgtgcaagcctttgatgcaaaataggggagtcagctgcaaggtggaaatgaagtctaaagggtcgcagacggaagagtggaagccacaggtgatcgtactgccaattcccgtgcctatttttgtccccgtgcccatgcacctctattgccagaaggtccctgtgcccttttctatgcctatccccgtgcccgttcctatgttcctcccaacaacattggagtcgaccgacaagatcgtggagactatagaggagctgaaagtaaaaatcccttcgaatccactagaagctgatattctggctatggccgagatgattgcagaggctgaggagctagacaaggccagttcagatctgtgcgacctggtctcaaaccagtcggccgaggggctcttagaggactgcgacctgttcggccctgcacgagatgatgtgctggctatggctgtgaagatggctaatgttctggatgagcctggtcaagacctagaggctgattttcccaagaatccattggacattaaccccagcgtcgactttctgttcgactgtggactggttggtcccgaggacgtttccactgagcaagatcttccacgaacaatgcgcaagggtcagaagaggctggtgctatccgaaagctgctctcgggattcaatgagcagtcagccgagttgtacaggccttaactattcatatggagtgaacgcttggaagtgttgggtacaatccaaatatgccaatggcgaaaccagtaagggcgacgagctacgttttggtcctaaacctatgcggatcaaggaagacatacttgcctgctcagcagctgaactgaattacggccttgcacagttcgtacgggaaataacccgacctaacggagaaagatatgaacccgacagtatctactacctgtgtttaggaattcagcagtatctcctcgaaaataaccggatggtgaatatcttcactgatctgtattacctcacattcgttcaggagttaaacaagagcctgtcaacctggcagcccaccctcctgccaaataatactgttttttctcgggtggaggaggaacacctctgggagtgcaagcagcttggggtctacagtccttttgtgctgctcaacacacttatgtttttcaataccaagttcttcggcctgcagacagctgaggaacatatgcagttgtcttttacgaatgttgtcagacagtctcggaagtgtactacccccagaggcacaacgaaggtggtctccattaggtattacgccccggtgcgccaacgtaaagggcgagataccggtcccggcaaaagaaagagagaagacgaagccccgatactggagcaaagggagaacagaatgaatcccctgcgttgcccagtcaaattttatgaattttatctaagcaagtgccctgaaagcctgcgaactcggaacgatgttttctacctgcagccagagcgatcttgtatcgctgaatcccccctctggtattcggtgattcccatggaccgatccatgctggagagcatgttaaaccgaatcctggccgtgcgggaaatctacgaggaactgggccgaccgggcgaggaagatttggactag

SEQ ID NO: 212545 - DNA, 4113 bp, synthetic construct
  misc_feature 1..4113: note = Description of Artificial Sequence: Synthetic coding sequence
  source 1..4113: mol_type = other DNA
atggaccccagcgacttccccagccccttcgaccccctgaccctgcccgaaaaaccactcgcaggagacctgccggttgatatggagtttggtgaggatctcctggaaagccagacagctccaaccagaggatgggccccccccggccccagtccgtccagcggggccttggacttgctggacacacccgccggactcgaaaaggaccccggcgttttagatggggccacagagctactaggactgggcggtctattatacaaagccccttcccctccagaggtggatcacggccccgagggaacactggcctgggatgccggtgaccagacacttgagccaggcccgggcggacagacccctgaagtggtcccacctgacccgggcgccggtgccaactcatgtagcccagaaggattgctggaacccctggcccccgatagccccattaccctgcagagccctcacatcgaagaagaggagacaaccagcatcgccacagccaggcgtgggtccccggggcaggaggaggagctgccccagggacaaccacagtctcctaacgcccctccgtctcccagtgtgggggagaccctcggggacggaattaactcaagtcaaaccaagccgggcggtagtagccccccagcccaccctagcttaccaggcgacgggctgactgcaaaagcatcggagaaaccacctgagagaaaaagatccgagagggtgaggcgtgcggagccaccaaaacctgaggtggtggacagcaccgaaagtattccagtgagcgacgaggatagcgacgccatggttgatgaccccaatgacgaggatttcgtgccctttcgaccaagaagatcacctcgaatgagcctgcgaagctctgtgagccagcgtgctggccgatctgccgtaggcacgaagatgacttgcgcgcattgtcgcacccccctgcagaaggggcagactgcctaccaacggaaagggttgccgcagctcttttgctcaagtagctgtcttacaaccttctccaagaagccctctggcaaaaaaacttgcacattctgcaagaaggaaatttggaatacaaaagactcagtggtcgctcagaccggctccggcggaagcttccatgagttctgtacatctgtgtgcctgagcctgtatgaagctcagcagcagcgccctatcccccagtccggggacccagccgatgccaccagatgttcaatctgtcagaaaaccggcgaggtgctgcacgaggttagtaacggatcagtggtccaccggctctgctctgattcttgcttttcgaaattccgggcgaacaagggcctgaagactaactgttgtgatcagtgtggggcctatatatatacgaagactggaagccctgggccagaactgttgttccacgagggccagcagaaacggttctgtaacacaacttgcctgggagcctataaaaagaagaacacgagggtgtacccatgcgtgtggtgtaaaactctgtgcaagaatttcgaaatgctctcccatgtagatagaaacggcaagactagcctgttctgctccctttgttgcactacttcttacaaagtgaaacaagcaggcttaactggcccaccacggccctgtagcttttgtagacggtctctgtccgacccctgctattacaacaaggtggaccgtacagtgtaccaattttgctccccttcctgctggaccaagttccagaggacaagtcccgagggagggatccacctctcatgccattactgccactccttgttcagtggtaaacccgaggtacttgattggcaggaccaggtgtttcagttctgttgcagggactgctgtgaggactttaaaagactgcgtggcgtagtctctcagtgtgagcattgtagacaggaaaagctgcttcatgagaagttgaggttctcaggagtcgaaaaatcattctgctctgaaggatgtgtgctgctgtacaagcaggatttcaccaaaaagctaggcctgtgctgtatcacatgtacctattgcagccagacatgccaaagaggcgtgactgagcagctggatgggtcaacttgggatttttgttctgaggactgcaaatctaagtaccttctttggtactgcaaggctgccagatgccacgcctgtaaacggcagggcaagttgctcgaaactatccactggagagggcagatcaggcatttctgtaatcaacagtgcctgcttagattttattcccagcaaaatcagcccaatctggacacacagagtgggcccgaaagtttgctgaactctcagagccccgagagtaagcctcagaccccgtctcaaacaaaggttgaaaattctaacaccgtccggaccccagaggagaacggaaacctgggcaagatccccgtgaagacacgctctgctcccacagcccccactcctccgccgcctccaccacctgctactccacgtaaaaacaaggccgctatgtgcaagcccctcatgcagaacaggggtgtcagctgcaaagtggaaatgaaatcgaagggttcccagactgaagagtggaaacctcaggtgatcgttttgcctatccccgtcccgatatttgtgccagtgcccatgcatctttactgtcagaaagtaccagtcccattctccatgcccattcccgtgcctgtccctatgtttctccccacaacgttggagtcgaccgacaagattgtggagacaatcgaggaactcaaggtgaagatcccatctaatcctctcgaggccgatatcttggcgatggctgaaatgatcgccgaagccgaggagctggataaagcaagttctgatctctgtgacctcgtttcaaatcaaagtgccgaaggcttgctggaagattgtgatttatttgggccagcccgtgacgacgttctagccatggcggtgaaaatggctaacgttctggacgagcccggacaagacctcgaagcagatttccctaagaatcccttagatattaaccctagtgttgacttcctcttcgactgtgggctcgttgggccagaagatgtgtccaccgagcaagacttgcccagaaccatgcggaagggacaaaagcgcctggtgcttagtgagtcctgttcgagggacagcatgagttcacagcccagttgcacaggcctgaattactcttacggggttaacgcctggaaatgttgggtgcagtccaaatatgcgaatggcgaaactagcaagggagatgagttaagattcggacccaaaccgatgagaattaaggaggatatccttgcgtgtagcgccgccgaactcaactacggattggcacagtttgttagggaaattactagaccaaacggtgagagatatgaacctgattccatctattacctgtgccttggtattcagcagtatttgctggaaaacaaccggatggtgaatatattcacggacctgtattaccttaccttcgttcaagaactcaataagtccctatccacttggcagcctaccctcctaccaaacaacaccgtgtttagccgtgtggaggaagaacatctgtgggagtgcaagcagctgggtgtgtacagtccattcgtattgctgaatacactcatgttttttaatactaaattctttgggttgcagaccgccgaagaacatatgcaactctcgtttactaatgtcgttcgccaaagtaggaaatgcacaactccccggggcacaaccaaagtggtctctatcaggtactatgccccagtgagacagagaaaaggccgggacaccggtcccggcaaaagaaagagggaggacgaagctcctatcctggagcagagggagaataggatgaatccactacgatgccccgtgaaattttatgaattctatctgtccaaatgtcccgagagtctgagaactcgcaatgacgtgttctatctgcaaccagagcgctcctgtattgctgagtctcccctttggtactcagtgatccctatggacagatcgatgttggagtctatgctgaaccgaattctcgccgtgcgggaaatctacgaagaactgggcaggcccggagaggaggatctggactag

SEQ ID NO: 212546 - DNA, 1050 bp, synthetic construct
  misc_feature 1..1050: note = Description of Artificial Sequence: Synthetic coding sequence
  source 1..1050: mol_type = other DNA
atggaccccagcgacttccccagccccttcgaccccctgaccctgcccgaaaaacccctggcgggtgatctgccagtcgatatggaatttggcgaagacttgttggagtcccagacggcccccacacggggctgggcccctcccggcccctcacctagcagcggcgccctggatctattagatacacccgcaggactagaaaaggaccctggggtgctggacggcgcaacagagctactcggtctcggaggactactgtacaaggcccccagccctccagaagtggaccacggtcccgagggcaccttagcttgggacgctggagaccagaccctcgagccaggacctgggggccagactcctgaggtagttccccccgaccccggagccggggccaactcttgtagccccgagggtctcctcgagcccttagcccccgacagtccaatcaccctccaatctccccacatcgaagaggaggaaactacgtcaatcgctaccgctagacggggtagccccggtcaagaagaagagctcccgcaagggcagccccagtctcccaacgccccacctagcccctcggtcggcgaaacactgggggatggcataaatagctcccagactaagccaggaggatcgtctccccctgcgcatccctccctcccaggagacggactgaccgccaaggcttccgaaaagccaccagaaagggtgcagaagcgctccgagcgggttagacgagcggagccgcctaagcccgaggttgttgattccactgaatcacgaagatctggcacgccccgtacaaggttatggagacgcctcgtccttgaggcgccaagtatgtcctcagcccatccgtctgtgagtccctgcatgcggccgtctagcagcgcgaggagccccagcctgggcataccacccaccttgttggcggcagcttacgcccgcagacttgaaagatcctgcacgagatccgctatggcggcctggtatactgggagtgcagctatcctcgcttcaccaaattcagggccaacccgggactag

SEQ ID NO: 212547 - DNA, 1488 bp, synthetic construct
  misc_feature 1..1488: note = Description of Artificial Sequence: Synthetic coding sequence
  source 1..1488: mol_type = other DNA
atggaccccagcgacttccccagccccttcgaccccctgaccctgcccgagaaacccttagctggcgaccttccagtggatatggaattcggcgaggatttgctcgagtcccagacggcccctactagaggctgggccccacctggtccttccccctcttctggggctctggatcttctggacacacctgccgggctggaaaaagacccaggagtgctcgacggggccactgagttactaggtctaggcggcttgctgtacaaggcgccatccccaccagaggtcgatcatggtccagaggggacccttgcttgggacgccggcgaccaaaccttggaaccaggacccggcggacagaccccagaagtcgtgcccccggatccaggcgcaggcgccaatagctgttctcctgaaggattgttggagcctctggcgcccgattccccaatcactttgcaatccccccatatagaagaagaggagaccacttccatagcaacagcccgccggggttcaccaggacaggaggaggaattgcctcaggggcagccgcaaagccccaacgcaccgcccagcccatctgtcggagagaccctcggagacgggataaattcatctcagacaaagccaggaggctcttccccccctgcccatccatcactgcctggtgacgggctcaccgcgaaggcctcagagaagccccccgagcggaaacgctctgagcgcgtgagacgggccgagcccccaaaacccgaggtcgtcgacagtaccgaaagcatcccggtgtccgacgaagactccgatgccatggtggatgatcccaacgatgaggacttcgtgccatttcgccctaggcggtccccccgcatgtctctgcggagtagcgtgtcccagagggctggacgctcggccgtgggcacaaagatgacctgcgctcattgcaggacacctcttcagaagggccaaaccgcctatcagcggaaaggtctgccgcagctgttctgcagttcttcctgtctcaccacgtttagcaagaagcccagtgggaagaaaacttgtaccttttgtaaaaaggaaatctggaacacgaaggatagtgtagttgcacaaacagggagtggtggaagcttccatgaattctgtaccagcgtgtgcctgagtctgtacgaagcccagcagcagcgaccaatcccccagtcaggtgacccagccgacgcgacgaggtgcagcatctgtcagaaaacaggagaagtactccacgaagtgtccaacggtagcgttgtgcaccgcctgtgttctgacagctgcttctctaagttcagggcaaacaaaggactgaagacgaactgctgcgaccagtgcggggcgtacatctacacaaagacaggatctcccggtccagagctgcttttccacgaaggccagcagaagaggttctgcaatactacctgtctgggcgcctataaaaaggtcgggccacgagaatag

SEQ ID NO: 212548 - DNA, 1494 bp, synthetic construct
  misc_feature 1..1494: note = Description of Artificial Sequence: Synthetic coding sequence
  source 1..1494: mol_type = other DNA
atggaccccagcgacttccccagccccttcgaccccctgaccctgccagagaagccactcgccggtgacctgcccgttgacatggaattcggcgaagacctattggagtctcaaaccgcccccacaagaggatgggcccccccagggccctccccgtcttccggcgctctggacctgctcgatacaccagccgggctcgagaaggacccgggcgttctggacggcgccactgaactccttggactggggggcttgctctataaagccccttccccacctgaagtcgaccacggaccagaaggcacactggcatgggacgctggagatcagaccctggaacccggccctggtggccaaacccccgaagttgtgccgcccgaccccggagctggagcaaattcctgtagcccagaaggcctgctcgaacctctagctccagatagtccgatcactctacagagcccgcacattgaggaggaggaaaccacaagcattgcaaccgccagacggggcagccctggtcaggaagaagaacttcctcagggacagcctcagagccccaatgcccctcccagtccaagcgtgggcgagactttgggcgacggtattaattcctctcagactaaacctgggggctcgagtccccccgcgcatccatcgcttccaggcgacggattgacagctaaggctagtgaaaaaccgcctgagcgggtgcagaagcggtctgagcgggtgagaagagcggagcctcctaaaccagaggtggtggacagcacagagtccattcccgtctccgatgaggatagcgatgccatggttgacgaccctaatgacgaggactttgttcctttccggccaaggcgcagcccgcgcatgtcactccggtcgagcgtgtcccaacgagccggccggtccgcagtgggcacaaagatgacgtgcgcccactgtcgtacccctctccagaagggacagaccgcctaccagaggaaaggtctccctcagctgttctgcagcagttcatgtctgactaccttctcgaagaaaccttcaggaaagaaaacttgtacattttgcaagaaagaaatatggaacacgaaagattcagtggtggctcagaccggaagcggtggcagctttcacgaattttgcaccagcgtgtgtctctctctgtacgaggcacagcagcaaaggcctattcctcaatccggggatcctgctgacgccacccgatgctctatctgccagaaaaccggcgaggtgctgcatgaggtatctaatggatcagtcgttcaccgactttgttccgatagctgcttttctaaatttcgagcaaacaagggccttaagactaattgctgcgatcagtgcggagcttatatctatacaaaaacagggtccccgggtccagagctgttgtttcacgaggggcagcagaaacgattttgtaacaccacctgtcttggcgcttacaaaaaggtggggcctagggagtag

SEQ ID NO: 212549 - DNA, 3843 bp, synthetic construct
  misc_feature 1..3843: note = Description of Artificial Sequence: Synthetic coding sequence
  source 1..3843: mol_type = other DNA
atggaccccagcgacttccccagccccttcgaccccctgaccctgcccgagaagccattggcgggggatctgccagtagatatggagtttggggaggatctgctggaatctcaaactgctcctacgaggggatgggcccctcctggaccttcaccttcaagcggggctctggacctcctggatacacctgccgggctcgagaaggatcctggagtattagatggagctactgagctgttgggcctgggcgggctgctctacaaagcccccagcccacccgaggttgaccacggtcctgaagggactttggcgtgggacgccggcgaccaaaccctcgaacccggcccaggggggcaaacacccgaggtggtgcctcctgatcccggtgctggggctaatagctgttctcctgagggccttctagaacctctagccccagactcgcctatcaccctgcagtcgccgcatattgaggaagaagaaacgacttcgatcgccaccgcccggagaggttcaccagggcaagaggaagagttgcctcaggggcagcctcagtcccccaacgctcctccaagtcctagcgtgggggagacactcggcgatgggattaattcatcccagacaaagcccggagggagctctcctccagcacatccttcattgcccggcgacggactgaccgccaaagcgagtgaaaagccccctgaaagggtgcagaagcggtcagaaagagttcgccgagccgaacctccgaagccagaagtggtggactccactgaatccatccctgtgtccgatgaagattcagatgccatggttgatgaccccaacgatgaggacttcgtccccttccgaccgcgccgcagtcctagaatgtcccttaggagctccgtgtcccagcgcgctgggcggagtgccgtgggtactaaaatgacatgtgcccattgtcgcacacctctgcaaaagggacagaccgcttaccagaggaaggggctgcctcagctgttctgctccagtagttgtctgaccacattcagtaagaaaccctcaggaaaaaaaacctgcaccttttgtaagaaagagatttggaataccaaggattccgtcgtggcccagactggttcgggcggaagctttcacgaattctgcaccagcgtgtgtctttcattgtatgaagctcaacagcagcgtccaattcctcagtcaggtgatcccgcggatgctacacgttgcagcatctgccagaagaccggtgaagtgcttcatgaagtatccaacggctccgtggttcatagactgtgctcagactcctgtttcagcaagttccgcgcgaataagggcctgaaaaccaactgctgtgatcagtgcggcgcttacatttacaccaagaccgggagcccaggcccagagctactgtttcatgaaggtcagcagaaacgcttttgcaacactacctgtcttggtgcttataaaaaaaagaacacaagggtgtacccctgtgtgtggtgcaagaccctctgcaaaaatttcgaaatgctttcccacgtcgacaggaacggaaaaacgagcctattctgctcactgtgttgcaccacctcttacaaggtgaaacaggcgggcctcactggaccaccacgaccatgcagtttttgtcgaagaagccttagcgacccgtgctactataacaaggtagatagaaccgtctaccaattctgctctccatcctgctggacaaagttccaaagaacaagccctgaaggcggaatacatctgtcttgccactattgccactctctattctcaggcaagcctgaagtgctcgattggcaggatcaggttttccagttttgctgtcgcgactgttgtgaggacttcaagcggctcaggggcgttgtgagtcagtgcgagcattgccgccaggaaaagctgttgcacgagaagcttcggtttagcggcgttgagaagtcattttgctcagagggatgtgttctactatataagcaggactttacaaaaaagctgggcttgtgctgcatcacgtgcacatactgtagccagacctgccaaagaggggttaccgaacagctcgacggatccacttgggatttctgctccgaagattgtaagtccaagtatttactttggtactgtaaggctgccagatgccatgcttgcaagagacaggggaagctcctcgaaaccattcattggaggggccagatcagacacttttgcaaccaacagtgtctcctgcggttttatagtcaacagaatcagcccaacctggatactcagtcaggacctgagtcactcctcaactcccagagcccagagtcaaagcctcagactccatcgcagaccaaggtggagaatagcaacacagtcagaactcccgaagaaaatggtaatctcgggaaaataccagtgaagacacgctctgctcctactgctcctacgcctccccccccgcccccccccgccacacctcggaaaaacaaggcggccatgtgcaagcctctcatgcagaatcgcggcgtgagctgcaaagtagagatgaaatctaagggctctcagaccgaggagtggaagccgcaggtaatagtactgccaatccctgtgcctattttcgtcccagtgccaatgcacctgtactgccagaaggttccagtgcccttttctatgccgattccggtacccgttcccatgttcctgcctactactctggagagcaccgacaaaattgttgagacgatcgaagagttgaaagttaaaatccccagcaatcccttagaagctgacattttagcgatggctgaaatgattgcggaggccgaagagttagataaggcatcctcagacctgtgtgatcttgtatccaaccagtcagccgaaggtctgctggaggactgtgaccttttcggacccgccagagacgacgtcctggctatggctgttaaaatggctaacgtcctcgatgagccggggcaggatcttgaggcggactttccaaagaacccgttggatattaaccctagtgtggacttcctgtttgactgtggtctcgtgggcccggaagacgtgagcacagagcaggatctccccagaactatgcgcaaaggtcagaagcgacttgttctgtccgaatcatgcagccgcgactctatgtcgtctcagccctcatgtaccggactgaactacagttacggggtcaacgcctggaaatgctgggtgcaatctaagtacgcaaatggggagacctctaaagcaaaacctatgcgtatcaaggaagatatactggcttgctccgcggcagaactgaattacgggctcgcccaatttgtacgggagattacgagacccaatggggaacggtatgagccggattccatctactacctgtgtctgggcattcagcaatacctgctggagaataatcgcatggtaaatatcttcaccgatttgtattacttaactttcgttcaggaactgaataaaagcctgtcaacatggcaaccaaccctgctgccgaacaacaccggacctggcaagcggaagagagaggatgaggcccccatcctggagcagcgggagaaccggatgaaccccttgcgttgcccagtgaaattttatgaattttacctgtccaaatgccccgagtcactaaggactaggaatgacgttttctacctgcagcccgagcgatcttgtattgctgagtcaccactttggtatagcgtaatcccgatggacagatctatgttggagtctatgctcaatagaatcctggccgtgagagaaatttacgaagaactgggtaggccgggcgaggaagatctggattag

SEQ ID NO: 212550 - DNA, 4119 bp, synthetic construct
  misc_feature 1..4119: note = Description of Artificial Sequence: Synthetic coding sequence
  source 1..4119: mol_type = other DNA
atggaccccagcgacttccccagccccttcgaccccctgaccctgcctgaaaaaccgctcgctggggatctgccagtggatatggaattcggcgaagatttattagagtctcagaccgctccgacccgaggatgggctcccccggggccctccccgagtagcggtgccttggacctgttagacacgcccgctgggctcgaaaaggaccctggcgtcctggatggggccaccgaactcctgggtctaggcggtcttctatacaaagctccctcaccccccgaggtggaccatggtccagaggggacactggcttgggatgcaggagaccagaccttggaacctggtccaggcggacagacccccgaagtcgtccccccggatccgggcgcaggggcgaattcctgctcccccgagggtctgctcgagccccttgctcctgacagcccgatcactcttcaatctcctcatatcgaagaggaagagaccaccagtatcgcaacagccagacgcgggagccccgggcaggaagaagagctcccacaggggcagccccaaagccctaacgctcctccttctccctcagtcggagaaaccctgggggatggtattaacagttcacagactaaacctggcggcagtagcccaccagcccacccttccctgcctggagacgggcttacggctaaggcttcggagaagccccctgaacgcgtccagaagcgaagcgagagggtgcggcgtgccgaaccacctaaacccgaagtggtggattcaacggaatccattccagtcagcgatgaggacagtgatgccatggtggacgatcctaatgacgaggacttcgtgccgttccggcccaggaggtctccccgcatgagcctgcgctcaagcgtgagccagcgggccgggcgatcggccgtgggtaccaaaatgacttgtgcccactgccgcacccccttgcagaaagggcaaaccgcttatcagaggaagggtctcccacaactgttctgtagctccagctgcctgactacatttagcaaaaaaccaagcggaaagaaaacttgcactttttgtaagaaagagatctggaataccaaggattctgtggtcgcacagactgggtcgggcggctcctttcatgagttctgcacaagtgtgtgcctgtcgttgtacgaagcccagcagcagagaccaattcctcaaagtggcgatcccgccgatgctacccgttgttcaatatgccagaagaccggcgaggtgctacacgaggtctccaacggatctgtggtgcatcggttatgttcagattcttgtttcagcaagttccgagcaaacaagggactgaagaccaattgttgcgatcaatgcggtgcatatatctataccaagaccggtagtccagggcccgagcttctgttccacgaaggccagcagaagaggttctgcaatactacgtgccttggtgcatataaaaagaagaatacccgggtctacccctgtgtgtggtgcaagacattgtgcaaaaactttgagatgctgtcacacgtggatagaaacgggaaaacttctctgttctgctccctgtgctgcacgacaagttataaggtgaagcaagcaggcctgaccggccctccccggccatgttctttttgtcgtagaagtctctcggacccctgctactataataaagtggatcggactgtatatcagttttgtagcccatcatgttggacaaaattccagagaacatctccagagggcggtatccacttgagctgccactattgtcactcactgtttagtgggaaacccgaagtgctcgactggcaagaccaggtctttcagttttgctgtcgcgactgctgtgaggatttcaagcgcctgagaggggtcgtgtcccagtgcgagcattgccggcaagaaaagctcctgcacgaaaaactgaggttcagcggagtagaaaagagcttctgctccgaaggatgcgtgctgctgtataagcaggactttacgaagaagttgggcttgtgctgcatcacatgtacttactgttcccaaacatgccaacgtggcgtaactgagcagcttgatgggtccacctgggacttctgtagtgaggattgcaaatccaagtaccttctgtggtattgtaaggctgcccgttgtcacgcctgcaagcgccagggaaagttgttagagacgattcattggcgaggccagatcaggcatttttgcaatcagcagtgtcttctgagattctatagtcaacaaaaccagcccaacctggatacacagagcggccccgaaagccttttgaatagtcagagcccagaaagcaagccacaaacaccatctcagaccaaagtagaaaatagtaacacggtgaggacaccggaggagaacgggaacctaggcaaaatcccagtaaagacacgttcggcccccactgctcctacccccccgccccctcccccacctgcaactcctcgaaagaataaagccgcgatgtgcaagcctctgatgcaaaataggggagtcagctgtaaggtggaaatgaagtctaaaggaagccagaccgaggaatggaaaccacaggtgatagtcctaccaatccccgtgccaatatttgttcccgttcccatgcacctgtactgccagaaagttccagtccccttctccatgccgattcccgtgcctgtgcctatgtttctgcctactacccttgagagcacggacaaaattgtggaaacaatcgaagaactgaaagtaaaaataccaagcaacccgctggaagcagacatcctcgcgatggcagagatgatcgctgaggctgaggagctagataaagcgtctagcgatctgtgcgatctcgtgtcaaaccagtccgcagaaggcctgctcgaggactgtgatctttttggccccgccagggacgacgttctggctatggcagtcaagatggcgaacgtcctggatgaacccggacaggatttggaagccgacttccctaagaatccattagatataaatccatctgtggattttctcttcgactgcggcctagtaggccccgaagatgtctctacagagcaggatctaccaaggacgatgcggaagggccagaaacggttggtgctgtccgagagctgtagcagagactctatgagcagccaacctagctgcaccggtctaaactactcatatggggtgaacgcttggaagtgctgggtgcagtcaaagtatgcaaacggcgaaactagtaagggtgacgagcttcgctttggacctaagccaatgaggatcaaagaggatatactggcctgctccgccgccgagctgaattacggcctagcacagtttgtgagagagattacccgcccaaatggagagagatacgagccggactccatctactacctgtgccttggcatacaacagtacctcctggaaaacaaccgtatggtgaacattttcaccgacctgtactatctgacatttgtacaggagttgaacaaaagtctgagcacgtggcagccaaccctgttacccaacaatactgtgttttctcgggtcgaggaggagcatttatgggagtgtaaacagttgggggtgtacagtccctttgtccttcttaacactttgatgttctttaacacgaaattctttggactgcagacagccgaagagcatatgcaattgagttttaccaacgtagtgaggcaaagtcggaagtgcacaactccgagaggcacgacaaaggtggtgtccatccggtattatgcaccagtgcgccaaagaaaaggcagggataccggcccaggcaagcggaagagggaagacgaggcccccatcctggaacagagggagaacagaatgaaccccctgaggtgtcctgtgaaattctacgagttctatctgagtaaatgccctgaaagccttcggacccgaaatgatgtcttctatctgcagcctgaacgaagctgtattgctgagagcccactgtggtatagcgtaatccctatggaccgctcaatgctcgaaagcatgctgaacaggatcttggcggtgcgcgagatctatgaagagctggggagaccaggcgaagaggatctggactag

SEQ ID NO: 212551 - DNA, 4077 bp, synthetic construct
  misc_feature 1..4077: note = Description of Artificial Sequence: Synthetic coding sequence
  source 1..4077: mol_type = other DNA
atggaccccagcgacttccccagccccttcgaccccctgaccctgcctgagaagcctctcgccggggacctgcctgtggatatggagtttggtgaagacctcctggagagccagacggcgcctaccagaggctgggcccctcctgggccctctcctagttctggagccctggatttgcttgatactcctgcagggctggagaaggatccgggagtgctcgacggagcaacggagttactggggctggggggactgctctataaggctcccagcccgccggaagtcgatcacggcccagagggaacgttggcgtgggacgccggagaccagaccctggagccaggcccaggcgggcagacaccagaggtcgtcccgcctgacccgggcgccggtgccaatagctgctcacctgagggactactggagcccctggccccggactctccaataacactgcagtcccctcatattgaggaagaagagacaactagcatcgccacagcccgtcgcggaagtcccggtcaggaagaggagctaccacagggtcagccccagtcccccaatgccccgcccagccctagcgtcggtgagacgctgggcgatgggatcaacagtagccaaactaaacccggcggatcctctcctcccgcgcatccctctctgccaggtgacggcctgactgctaaagcctcagagaaaccacctgagcgaaaaaggagcgagagggtgcgcagagcagagccccctaagcctgaggtagttgatagcacagagtcaattcccgtgtctgatgaagactccgatgctatggtggatgacccaaacgatgaagatttcgtgcccttcaggcctcgcaggtctcctaggatgtcactccgcagtagtgtgtcccagcgcgccggtaggagcgctgtaggaaccaagatgacttgcgcacactgtagaactcctctccaaaaaggacagactgcctatcagaggaagggcctcccacagctattctgttcgtcaagttgtctcacaacattctccaagaaacctagcggcaagaaaacctgcaccttctgtaagaaagagatctggaatactaaggatagtgtggtggctcaaacagggtccggcgggtccttccacgagttctgcacgtcggtatgtctgagtctgtacgaggcgcaacagcagagaccaattccccagtccggagatccagcggacgccactcggtgcagtatctgtcagaagacaggcgaggttttgcacgaggttagcaatggttccgtcgtgcaccgcctctgctccgacagctgcttctcaaagtttcgagcgaacaaggggctcaagacaaattgctgcgaccaatgcggtgcatacatctacactaagaccggtagccccgggcccgagctcctcttccatgaaggccaacaaaaaaggttttgcaacaccacatgtcttggagcttataaaaaaaaaaacactcgtgtctatccatgcgtgtggtgcaaaacattatgcaaaaattttgagatgctgagccatgtggaccgcaacgggaagacctccctgttctgctccctatgttgtacgacatcctacaaggtgaaacaagccgggctgacagggcccccccgcccgtgctccttttgccggaggtctttatccgacccttgctattacaacaaggtggatagaacagtgtatcaattctgcagcccgtcttgttggactaagttccagcgcacttcaccggagggcgggatccacctgtcttgccactattgccattctttgttcagtggcaagcctgaggtactcgattggcaagatcaggtgtttcagttttgctgccgggattgctgcgaggacttcaaaaggctgaggggcgtggtcagccaatgtgagcattgcagacaggagaagttactgcacgagaagctcagattctcaggagtcgaaaagagcttctgcagcgaaggctgtgtgctgttgtataagcaggatttcacgaaaaaactgggattatgctgtatcacatgcacttattgctcacaaacgtgccagcggggcgttaccgaacagcttgacggctccacgtgggatttttgttctgaagactgcaagagtaaatacctcctgtggtattgcaaagccgccagatgccacgcctgtaaacggcaaggcaaattgcttgaaactatacattggaggggccagatcagacacttctgcaaccagcagtgcctcctgcgcttttactcgcagcaaaaccagccaaatctggatacacagtcagggcccgaaagtcttctcaacagccaaagcccagagtctaagccccagactccatcccagacaaaggtggaaaattctaatacgatccccgtgaagacaagatcagcccccacagcccctactccgcctcctccaccacctcctgccacaccgcgcaaaaataaggccgccatgtgtaaaccacttatgcaaaatagaggggtttcctgcaaagttgagatgaagagtaagggatcacaaaccgaggagtggaagccacaggtgatcgtactacccattcctgtcccgatttttgtacctgtacccatgcatctgtactgccaaaaggtgcccgtccctttcagcatgcctatcccggtcccagtgccaatgttcctccccacgactcttgaaagcactgacaagattgtggagactatcgaagaattgaaggtcaagatccccagtaatcctcttgaagcagacattctagccatggccgagatgatcgccgaagccgaagaacttgacaaggccagcagcgatctgtgcgatctggtctctaaccagtccgctgagggcctcctagaagattgtgatctcttcggtcctgcacgtgatgacgttttagcgatggcggtgaaaatggccaatgtgctggacgaaccaggacaggacctggaggctgactttccgaagaacccccttgatattaatccctccgtcgacttcctatttgactgcggtttagtagggcccgaggacgtgagcacggagcaggatctcccacgaacaatgcggaaaggccagaaacgactggtgctttctgagtcttgctcacgcgattccatgtcaagccagcctagttgtacaggcctgaactactcctatggcgtgaatgcgtggaagtgttgggtacagagcaaatacgctaatggggaaacttcaaagggcgacgagctacgcttcggccccaaaccaatgagaattaaagaagatattctggcctgcagtgccgccgagctgaactacggattggctcaatttgtacgcgagattactcgtcctaacggtgagagatacgagccagactcaatttattacctgtgcctcgggattcagcaatatttactagaaaataatcgtatggtaaatatatttacggatctgtattatttgacatttgttcaagaactgaacaaatcactgtctacatggcagccaaccctacttccaaacaacacagtgttttctcgagtggaggaagaacacctctgggagtgcaaacagctgggagtgtatagccccttcgtccttcttaacacattgatgttttttaacacaaaattttttgggctgcagactgctgaggaacacatgcaattgagctttactaacgttgtcaggcagtcacgaaagtgtactacacctaggggtaccactaaggtggtctccatacgatattatgctccggtccgccaaaggaaagggagggatactggcccaggcaaacggaagcgagaagacgaggcccctatcttggaacagcgagagaatcgtatgaatccgctgcggtgtcccgtcaagttctatgagttttacctatcaaagtgcccagaaagcctcaggacgcgtaacgacgtgttctacctgcagccagagcggagctgcatcgcagaatccccgctgtggtatagcgttattcctatggaccggtctatgctggagagcatgttgaaccggattcttgccgttagggagatttacgaagaactggggcggcctggcgaggaggacctagactag

SEQ ID NO: 212552 - DNA, 2112 bp, synthetic construct
  misc_feature 1..2112: note = Description of Artificial Sequence: Synthetic coding sequence
  source 1..2112: mol_type = other DNA
atggagttcgtgagcggctaccgggacgagttcctggacttcaccgctctgcttttcggttggttcaggaaatttgtagccgaaaggggggccgtcggaacatcattagaggggcggtgccgtcagcttgaggcacagattagacggcttccccaagacccagccctgtgggtcctccatgttctgccaaaccactccgtaggcatctcactgggacagggagccgagccgggcccaggaccaggcctagggacagcttggctactaggtgataatcctccccttcacttaagagatctgagtccttacataagcttcgtctccctagaggacggcgaggagggggaagaggaggaagaagaggacgaggaagaggagaagagagaagatggcggggccggctctacagaaaaggtagaacccgaggaggaccgggagcttgcgccgacatcaagggagtcaccacaagagacaaaccccccaggcgagtccgaagaagcagcccgcgaggctggaggcgggaaagatggttgccgcgaagaccgcgtcgagaatgagaccagaccacagaagaggaaaggtcagcgttccgaagcggcacctctgcatgtctcatgcctgctccttgttacagatgaacacggcactatactcgggatcgacctgctcgtggacggcgcccagggtactgcaagctggggcagtggaacaaaggacctagccccatgggcatacgcactgctgtgtcacagcatggcgtgtcctatgggctcaggcgaccctcgtaagccgcggcagcttaccgttggggatgcacggctacaccgcgaactggaaagtctcgtgccaagactgggggtaaagctggctaagactccaatgcgcacctggggccctcgacctgggttcacctttgctagcctgcgcgcgcggacgtgtcatgtgtgtcaccgccacagctttgaggcgaaacttaccccatgccctcaatgttcagcagtgctgtattgcggagaggcgtgtctcagggccgactggcagagatgtccagacgatgtaagccataggttctggtgcccaagactcgctgcctttatggaacgggctggcgaactagcaacattacccttcacctacaccgccgaggtgaccagcgaaaccttcaataaagaggccttcctcgcttccagaggtttgacccgtgggtattggacccagctgtccatgctgatacccgggcccgggttttcacgccacccccggggcaatactccatccctgagcctgctacgtggtggcgacccttaccaactcctgcagggcgatggcactgcgctaatgcctcccgtaccaccgcatcctccgcggggagttttcgtgcctgagctcaatattcagaacaaacagagtctcaaaatacacgtagtggaagccggaaaagaattcgatcttgtgatggtcttctgggaactgttggtgttgctgccccatgtggccctggaactccaatttgtcggggatggactgcctccggaatccgatgagcagcactttacacttcagcgtgactctctagaagtttccgtgagaccgggttctggaatctcagctcgcccctcgagcggcacgaaggagaaaggaggcaggcgtgacctgcagattaaggtgtccgccagaccctatcatctgttccagggccctaagcctgatcttgtgattggattcaactccggctttgccctcaaagacacttggctacgctctttgcccaggcttcagagcctgcgcgtgcccgcattttttaccgaaagcagcgagtactcgtgcgtgatggatggccagaccatggccgtggccaccggtggaggtaccagcccacctcagcctaacccgtttcgatcacccttcaggctccgcgcggcagataattgtatgagttggtactgtaacgcattcatcttccatctggtgtataagcccgcgcagggttccggggcccggcccgccccaggacctcctccaccttcacccacgccctctgctccgccagctcctacccgtcggcgcaggggggagaagaagcccgggaggggcgccaggagaagaaaatag

SEQ ID NO: 212553 - DNA, 2229 bp, synthetic construct
  misc_feature 1..2229: note = Description of Artificial Sequence: Synthetic coding sequence
  source 1..2229: mol_type = other DNA
atggagttcgtgagcggctaccgggacgagttcctggacttcaccgctctgctgttcggctggtttcgtaaattcgtggctgagcggggcgctgtgggaactagtctggagggacgatgtagacagttggaggctcaaatccggcgtctcccacaagatccggccttgtgggtcctacatgtgctgcccaatcattctgtgggcataagcctcggccagggcgctgagcccggcccaggacccggcctcggtacagcttggttgcttggggacaacccaccactgcatttgcgggacctctccccctatatatctttcgtaagtctcgaggacggggaggaaggtgaagaagaggaggaggaggacgaggaagaggaaaaacgtgaggacggcggagcagggagcactgagaaagtagagcccgaggaggacagagaactcgcccctacgtctagagaatcaccacaggagacaaatcccccaggtgaatctgaagaagcagcccgcgaggcaggtggtggcaaggatggatgcagagaagatcgggtcgagaacgagacccgccctcaaaagaggaaggggcagcgaagcgaagctgcccctctgcacgtctcttgtctacttttggtgaccgacgaacatggcaccattctggggatcgatcttctggttgatggcgcccaaggtactgcttcttggggatcagggacaaaggacctcgcaccttgggcctacgcactgttgtgtcatagcatggcctgccctatgggctctggcgacccacgtaagcctcgacaactgaccgtaggggatgctaggttgcaccgtgagttggagtctctcgtcccgaggcttggcgtcaaacttgcgaagacgccaatgcggacttgggggccccggccaggattcacttttgcgtcattgagagcccgaacatgccacgtgtgtcataggcactctttcgaagccaagctcaccccatgtcctcagtgcagtgctgtattatattgcggagaggcatgcctgcgcgccgactggcagagatgtcccgatgatgtgagccacagattttggtgccctaggttggcagcgtttatggaaagggcgggcgagctggccactcttccgttcacttacactgcggaagtgacaagtgagacctttaacaaggaggctttcctggcctcgcggggcctgacccggggctattggacacagctgagcatgctgatccccggacccggctttagtcggcatccgcggggcaataccccttccttgtccctgctgaggggaggagacccatatcagctgctgcagggggacggaactgcactcatgccccctgtccctcctcacccccctagaggcgtctttgggagctggcaggactattacacttggcggggactgagcctagactccccaatcgctgtactgctgacatatccccttacagtgtactatgtcatcacacatttagtccctcagtcatttccggagttaaatatccagaataagcagagtctgaaaatccacgttgttgaagccggcaaggagtttgatctcgtgatggtgttttgggaactgttggtgttactacctcacgtcgcccttgagttgcagttcgtcggcgatggcttacccccagagtctgatgagcagcatttcactctgcaacgtgacagccttgaggtttctgtgagacctggttctggaattagcgccaggccaagcagtgggactaaggagaaaggggggaggcgcgacctccagatcaaggtctcagctagaccttaccacctttttcaaggccccaagcctgatctggtcataggcttcaatagcggtttcgccttaaaagacacgtggctgagatcccttcccaggctccagtctcttcgagttccggccttcttcaccgagagtagcgaatacagttgcgtgatggatggccaaacaatggcagtggcgacagggggcggaacgagcccaccgcagcccaatccttttaggtctccctttcgcctgcgggccgcggataattgcatgagctggtactgcaatgctttcattttccacctagtgtataaacctgctcagggctctggcgcaaggcccgcaccggggccacctcccccttccccgacccccagtgctccacctgccccgaccaggcgccgacggggtgaaaagaagcccggccgcggggcccggcgccgaaagtag

SEQ ID NO: 212554 - DNA, 684 bp, synthetic construct
  misc_feature 1..684: note = Description of Artificial Sequence: Synthetic coding sequence
  source 1..684: mol_type = other DNA
atgaccgacttcaagctgggcatcgtgcggctgggccgggtggccggcaagacaaagtatacgttgatcgatgagcaagacattccgctggttgaaagttattccttcgaagctagaatggaggtggacgcagacgggaacggtgccaaaatctttgcatacgccttcgacaaaaacagagggcgaggcagtggtaggctgctgcacgagctcctgtgggagcggcacagaggcggagtcgctcccggatttcaggtggtgcacctcaacgctgtgactgtggataaccgtctcgataatttacagctggtcccgtggggttggcgcccaaaggccgaggagacctccagcaagcaaagggagcagagtctctattggctcgctattcagcagttgccaaccgaccccatagaagagcagtttcccgtgctcaacgttacgaggtactacaatgcaaatggagacgtggtggaagaagaagagaattcctgtacctattacgagtgccactatcccccctgtacagtgatcgaaaaacaattgcgcgagtttaacatatgtggacgttgccaggtggctcgctactgcggatcacagtgccagcagaaggactggccagcacacaaaaagcactgccgggagagaaaaagaccttttcagcacgagctcgagcccgagcggtag

SEQ ID NO: 212555 - DNA, 2127 bp, synthetic construct
  misc_feature 1..2127: note = Description of Artificial Sequence: Synthetic coding sequence
  source 1..2127: mol_type = other DNA
atgagcgagcggggcatcaagtgggcctgcgagtactgcacctacgagaactggccgagtgccataaagtgcactatgtgccgtgctcagcgtccttcaggtacaattatcacagaggatccttttaagagcggcagcagcgatgtgggacgagactgggatccgtcctccaccgagggcgggtcatcccccctgatctgccctgattcgtcggctcggccgcgcgtgaaaagttcgtactccatggagaacgccaacaagtggtcctgccacatgtgtacttacctgaattggcctcgggcaattcgctgcacacagtgcttgagccagcgccgtacaagatctcccacagagagtccccagagctctgggtctggctcgagacctgttgccttctccgtggatccctgcgaagaatataatgatcgcaacaagctgaacaccagaactcagcactggacttgttccgtctgtacatacgagaactgggctaaagctaagcgctgtgtagtgtgtgaccatcccaggcctaacaatattgaggcaatagaactcgcagaaactgaagaggcctcgagtatcattaacgaacaagatagggctagatggagaggttcttgctcgagcgggaatagtcagaggcgaagcccacctgctacaaaaagggactccgaagtaaagatggatttccagagaatagaattggctggtgccgttggcagcaaggaggaattagaagttgatttcaaaaaactgaaacagattaaaaatagaatgaaaaagacagattggttgttcctgaacgcatgcgtgggagtggtcgaaggtgacctggccgctatagaagcatacaaatctagtgggggagatatagctagacagctgacagcagatgaggtgagactgttgaatagaccgagcgcattcgacgtcggctacacgctcgtgcacctagccatacgtttccaacggcaggatatgttggccattcttttgaccgaggtgtcacagcaggctgccaaatgcatccctgccatggtctgcccagaactgacagagcagattagaagagaaatagcggcctcgctgcaccagcgcaagggagatttcgcctgttacttcctgacagacttggtgacattcacacttccagccgacatcgaagacttgcccccaactgttcaagaaaagctgttcgatgaagttctggatcgggatgtccagaaagagctggaggaagaaagccctatcattaactggagtttggagcttgccaccaggttggacagccgcctctatgcactgtggaaccggacagctggcgattgtctcctggacagcgtcctccaggcaacttgggggatttacgacaaagatagcgtccttaggaaggccttacatgattcactccacgattgctcccactggttttacactaggtggaaagactgggaaagttggtattctcaatctttcggtctgcacttctctctgcgtgaggagcaatggcaggaggactgggccttcatcctaagcctcgcctcccaaccaggcgcttcacttgagcaaacccacatctttgtcttagcacacatcctacgcagaccaataatcgtgtatggcgtgaagtactacaaatcctttcgcggagagacgctaggctacactcgcttccagggagtttacctcccccttctgtgggaacagagcttctgctggaaatctccgatagccctgggctacaccagaggccacttctccgctctggttgccatggagaatgatggctacggaaatcgcggtgctggagccaacctcaatacggacgatgacgtcaccattaccttcttacctctagttgatagcgagcggaagctgcttcacgtacactttctaagcgcccaggaactcgggaacgaagagcagcaggagaaattgctgagagaatggcttgattgttgcgtgactgagggcggtgttctcgtcgcaatgcagaagtcctccaggcgccgcaaccaccccctggtgacacaaatggtggagaaatggcttgacagatatcgtcagatcagaccctgtacttccctgagcgatggagaggaggacgaggatgatgaggatgaatag

SEQ ID NO: 212556 - DNA, 2400 bp, synthetic construct
  misc_feature 1..2400: note = Description of Artificial Sequence: Synthetic coding sequence
  source 1..2400: mol_type = other DNA
atggagatccccaagctgctgcccgcccggggcaccctgcagggcggcggcggcgggggtattcccgccggtggggggcgagtgcaccgcggaccagattctcccgctggacaggtgccaacgcgcaggctgctgttgccccgtgggcctcaggacggagggcctggaagacgcagggaagaggcctcaactgccagccgcggccctggtccctccctgtttgcgccccgacctcaccagccctccggcggcggggacgactttttcttagtgctcctcgatcccgtggggggtgatgttgaaactgcaggaagcggccaggcggcaggtccagttctgcgagaggaggcaaaggctggtcccggcctccagggggatgagtcaggtgcgaatccagccggctgctccgcgcagggtcctcactgcctgtccgcagtccctacaccggcccccatatccgcccccgggcccgcagcagcatttgctgggaccgtaacaattcacaaccaggatctgctgctccgatttgaaaatggagtacttaccctcgccacacctccgccccacgcctgggagcccggtgcagcaccagcccaacagccacggtgtttaatagcaccccaggcagggttccctcaggctgcacatccaggcgactgtcccgagctgagatcagatctcttattggcagagcccgcggagcctgcgcctgcccctgccccccaggaggaagccgagggcctagcggccgctctagggcctcggggactccttggctcagggcccggggtcgtgctctacctctgccctgaggcactgtgcgggcagacattcgcaaagaagcaccagcttaagatgcatttgctcacccatagctcatcacagggacaaaggccatttaaatgtccgctgggaggctgcggctggacattcaccacatcttataagttgaaacggcatctgcagtcccatgacaagctgagaccattcgggtgtccagccgaaggttgcggaaaatcatttaccacagtctacaatcttaaggcccacatgaaaggacatgagcaggagaactctttcaaatgcgaggtctgtgaggaaagtttccctacacaagccaagttgggcgcacaccagaggagccatttcgagcccgagaggccctaccaatgtgctttttccggatgtaagaagacctttattacagtttcagcgctgttctctcacaaccgtgctcatttcagagagcaagagctgtttagttgttcctttcctggctgtagcaagcaatatgacaaggcttgccgacttaaaatccaccttcgaagtcacaccggcgaaagaccattcctctgcgacttcgatgggtgtgggtggaactttacatcaatgtctaaactgctgcgtcacaaacgtaagcacgacgatgaccgccgcttcatgtgtcctgtggaaggatgcggaaagtcatttacccgggcggagcacctgaaagggcactccataactcatctggggaccaaaccattcgtgtgccccgttgccggctgctgcgcgagattctcagcgaggagttctctctacatacattccaaaaagcatctccaggacgtggatacatggaaaagtagatgtccgatcagcagttgcaacaaacttttcacgtctaagcattccatgaagactcacatggtcaagagacataaagtaggccaggatttgctcgcccagctcgaagcagccaattctttgaccccatcaagcgagctaactagccagcgtcagaacgaccttagcgatgctgaaatcgtcagcctgtttagcgacgttccagactctacctcagccgcccttctcgacacggccttagtgaactctggcatccttacaatcgatgtcgcctccgtaagtagcaccttggccggccacctcccagcaaataacaacaactccgtgggacaggcagttgatccaccaagcctgatggcaaccagtgatcctccacagtcactggacacttccctgttctttggcacagctgctacgggttttcagcagtcctcactcaacatggatgaagtgtcttccgtatcggttggtcctctgggctcccttgattctctggctatgaagaactcaagcccggagccccaggcactaacgccatcttcaaagctcactgtagacactgatacactaacaccatcctctacactctgtgaaaactcagtctccgagctgctaacacctgccaaagccgaatggagcgtgcaccccaactccgacttttttggccaggagggggagactcagttcggcttcccaaatgccgctggcaatcatggcagccagaaagagcgcaatttaataaccgtgaccggaagcagtttcctggtttag

SEQ ID NO: 212557 - DNA, 2412 bp, synthetic construct
  misc_feature 1..2412: note = Description of Artificial Sequence: Synthetic coding sequence
  source 1..2412: mol_type = other DNA
atggagatccccaagctgctgcccgcccggggcaccctgcagggcggagggggtggtggcatcccagcgggcggaggacgagtccaccgcggacccgattcccctgcagggcaggtacctaccaggcgactgctccttctcagaggaccccaggatgggggaccaggtagacgccgagaagaagctagtactgccagccgggggccaggaccttccttgctggcccctaggacagaccaacccagcggaggcggtgggggcggcggcgatgacttctttctggttcttctcgacccggtcggaggggatgtcgagactgccgggtctggtcaggcggctggaccggtcttaagggaagaagccgaggaggggccaggactccagggcggcgagtctggggccaaccccgctggacccaccgccctcggccctcggtgcctttcagccgtgcccacgcctgcgcccatttctgcaccaggaccagccgccgctttcgccggcactgtcacaatccacaaccaggatttgttacttcgattcgagaatggagtgctgacattagccacccctcccccccacgcttgggaacccggagctgccccagctcagcagcctgggtgcctcattgcaccgcaggcaggatttcctcacgccgcacacccaggggattgtccagaattaccacccgacctgctgctcgcagaacctgccgagcccgccccagcccctgcaccagaagaggaggcagagggccccgccgcggccctgggcccacgtggcccgttgggaagcgggccaggcgtggtactgtacttgtgtccagaggcccagtgtgggcagacttttgcgaaaaaacatcagcttaaagtgcacctgctgactcattcctcctcacaaggccagaggccattcaagtgtcctctcggggggtgcggatggacatttaccacaagctacaaactgaaaaggcatctgcagtcgcatgataagctgcgtccttttggctgccctgccgagggttgcgggaaaagctttaccactgtttacaatcttaaggcccatatgaagggacatgagcaggaaaactcttttaaatgtgaagtgtgtgaggaatctttcccaacccaggccaagctctcggcgcatcagcgctcacacttcgaacccgaaagaccataccagtgcgcgttctccggctgtaaaaagacgttcatcacagtctccgcgctcttctctcacaaccgggcccattttcgagaacaggaactcttctcctgctctttcccaggctgctccaagcaatatgacaaggcatgtcgtctgaagatccatctgcggtcgcataccggcgaaaggccattcctgtgtgactttgatggatgcggatggaattttacaagcatgtccaaattgctccggcacaaacgaaaacacgacgacgacaggagatttatgtgtccggttgaagggtgtggcaaatcatttactagggctgagcatttaaaggggcatagtataactcatctcggcaccaagccatttgtctgcccagtcgcggggtgctgcgcccggttcagcgcccgatcttctttgtatatccactcgaaaaagcatctgcaggatgttgatacgtggaagtcgcgctgccccattagctcgtgtaataagttgtttaccagtaagcattcaatgaaaacacacatggtgaaaaggcacaaggtcggccaggatctcctggcccagttggaggcagctaactctcttacacccagcagcgagctcacctctcagcggcaaaacgacctgtctgacgccgaaattgtcagtctcttcagtgacgtgccggacagtacttctgctgctctgttagataccgcactggttaacagtggaattcttactattgacgtggcctccgtgtcctccactctcgctggtcacctccccgcaaataacaacaactctgtaggtcaggctgtcgacccgcctagtcttatggcgaccagcgatcctccccaatccctcgacacaagtctgttcttcggaacagcagcgaccgggtttcaacaaagctctctgaatatggacgaggtcagctcagtcagcgttggcccgcttggcagcctcgactcactggctatgaagaactcatcccctgaaccacaggctctcacaccctcttctaagttgaccgtcgacacagacgctctgacaccgtcaagtaccttgtgcgaaaactccgtgtctgagctgctgacacctacaaaagctgaatggaacgttcaccccgatagtgacttttttggccaggaaggagaaacccaattcgggttccctaacgccgccggaaatcatggcagccaaaaggaaaccgatctgattacagttacgggctcttctttcctcgtctag

SEQ ID NO: 212558 - DNA, 2622 bp, synthetic construct
  misc_feature 1..2622: note = Description of Artificial Sequence: Synthetic coding sequence
  source 1..2622: mol_type = other DNA
atggccagccggcggaagagcaccaccccctgcatggtgctggccagtgagcaggatccagatttagagctgatatccgatctagacgaggggcctcctgttctgactccagttgagaacacccgggcagaatcaatctcttccgacgaggaggtgcacgagagcgtggattctgacaatcaacagaataaaaaggtagagggagggtacgaatgcaaatactgcacatttcaaacccccgatctgaatatgttcacctttcacgtagacagcgagcatcctaatgtagtattaaactcgagctatgtgtgtgttgagtgcaactttttgactaagagatatgatgccctttctgaacacaacctaaaataccacccgggtgaagagaattttaaactgactatggtcaagcgcaataatcagacaattttcgaacaaaccattaacgaccttaccttcgatggttctttcgtgaaagaggaaaatgctgaacaggcagaatctaccgaggtgtcaagtagcgggatatctataagcaagacacccataatgaaaatgatgaagaataaggtggagaacaagaggatcgccgttcaccataacagtgtagaagatgtgcccgaggagaaggagaacgagatcaaaccagaccgggaggagatcgtggaaaatccatcgtcttcggcatctgaatcaaacacaagcacatccattgtcaataggattcacccatctacggcttcaaccgttgtgacccctgccgccgtgctgcccggactggcacaagtgatcactgccgtttctgctcaacaaaacagtaatctcattccgaaagtgctcattcctgtcaacagcatcccaacatacaatgctgcactcgacaataaccccctcttgcttaacacctacaataaatttccataccctacgatgagcgagatcaccgtgctgagcgcacaggcaaagtacaccgaggagcagattaagatctggttctccgctcagcggctgaagcacggagtgagttggacacccgaggaagtggaggaggctcggagaaagcaatttaacgggaccgttcacacggtgcctcaaaccatcaccgtgattcctacccatattagcacaggctctaacgggctaccttctatcctgcaaacatgccaaatagttgggcaacccggactggtgcttacacaagtcgccggtaccaacacactgcctgtgacagctcccatcgcattaacggtcgccggcgtgccaagccagaacaatattcagaaatcccaagtgcctgctgcccaaccaaccgctgagactaaacccgcaacagctgccgtgcctacttcccagagcgtgaaacacgaaacagccctcgtgaaccccgactcctttggaatccgagctaagaagaccaaagaacaattggctgaactcaaagtgtcatacctgaagaatcagtttcctcacgacagcgaaattatcaggctgatgaaaataacaggccttacgaaaggagagatcaagaagtggtttagcgataccaggtacaatcaacgaaattccaagtctaatcaatgtctgcatctcaacaacgacagcagtaccaccataattattgatagcagcgatgaaaccacggaaagcccgaccgtgggcaccgctcaacctaaacagagctggaacccctttcccgactttacgcctcagaagttcaaggaaaagaccgccgagcaattgagggttcttcaggcgagctttttgaactcaagcgttctgactgacgaagagttaaaccgcctacgcgcgcagaccaagcttacccgaagggagattgatgcatggttcaccgagaagaaaaagagtaaggcactcaaggaagaaaagatggagatcgacgaaagcaacgcagggtccagcaaggaggaagccggtgagaccagcccagcagatgaaagcggcgctcccaagagtggcagcactgggaagatttgtaagaaaaccccggagcagttgcatatgctgaaaagtgcctttgtccgcacacagtggccttctcccgaggaatatgacaagctcgccaaggaaagcggcctggctcgcactgatatcgtgagctggttcggcgatacgcggtacgcgtggaaaaacggcaaccttaaatggtactactattatcagagtgctaactcatctagcatgaacgggttgtctagcctgagaaagagaggacggggccggccaaaaggtcgagggcgtgggaggccccgggggcgtccaagaggatccaaacgaatcaacaactgggataggggtccttccctgattaaatttaaaaccggaacagccatactcaaggattactacctgaaacacaaattcctcaatgaacaggacctagatgagctggtgaacaagtcccacatgggctatgaacaggtgagggagtggtttgcagagcggcagcgccggagcgaactgggcatagagctcttcgaggagaacgaagaagaggacgaagttattgacgaccaggaggaggatgaggaagaaaccgatgatagcgacacctgggaaccccctcgccatgtgaaaagaaagctgtccaaatctgacgattag

SEQ ID NO: 212559 - DNA, 2622 bp, synthetic construct
  misc_feature 1..2622: note = Description of Artificial Sequence: Synthetic coding sequence
  source 1..2622: mol_type = other DNA
atggccagccggcggaagagcaccaccccctgcatggtgctggcctccgagcaggaccccgacctcgagctcattagtgatttagacgagggcccccccgtgctgaccccagtcgaaaacacccgcgcagaaagtatcagtagtgacgaggaggtgcacgagtccgtcgattctgataaccagcagaataaaaaggtggaggggggctacgagtgcaagtattgcacttttcagacccctgacctgaatatgttcacatttcatgtggactccgagcatcccaatgtggtgctgaattcttcctatgtgtgcgttgaatgtaacttcctcacgaagcggtacgacgctctgagtgagcacaatctcaagtatcacccgggcgaagagaactttaaattgactatggttaagcgaaacaaccagaccatctttgagcaaacaatcaacgacctgaccttcgatgggagcttcgttaaggaggagaatgctgagcaggctgagagcacggaggtgtcctcatcgggaatcagcatcagtaagacccccattatgaaaatgatgaagaataaggttgagaacaagcgcattgcggtccaccataattccgttgaggatgttccagaggagaaagaaaacgagataaaaccggaccgagaggagatcgtggaaaacccatcaagctcagcctctgagtctaatacctccaccagcatcgtaaaccgcatccacccttcaaccgcatccaccgtggtgacgcccgctgccgtactgccgggcctcgcccaagttattacggccgtctctgctcagcagaattccaatctgatccccaaagtgctgatccccgtaaatagcatacctacttataatgcagctctggacaacaatccgctcctcctgaatacctacaataagtttccctatcccaccatgtccgaaatcacggtcctcagcgcccaggccaagtatactgaagagcagattaagatctggtttagcgcgcagcggttgaaacatggcgtgagttggactcctgaagaggtggaggaggcacggcgcaaacagttcaacggcacagttcataccgtgcctcagactatcaccgtgattcctacacacatatccaccggctccaacggcctgccctcaatcctgcagacctgtcagatcgttggccagccagggctggtcttgacacaagtggctgggacgaatacgctaccagttactgctcccattgccctaacagttgcaggggtgccatcccagaataacatccagaaatctcaagtccctgctgcccagcccacagctgaaacgaaaccggccacggcagcagtgccgacaagccaatccgtgaaacatgagactgccttggtaaatccggatagtttcggaatcagggctaaaaagaccaaagagcagctggccgagttaaaggtgagctatctgaagaaccagttcccacacgactctgaaataatccgattgatgaagatcactggcctcactaaaggtgagataaagaaatggtttagcgataccagatataatcagaggaattccaagagcaaccagtgccttcacctaaacaacgatagctctactaccatcatcatcgacagctccgacgagaccactgagagtccaaccgtggggaccgcccagccgaaacagtcgtggaacccattccccgatttcaccccacagaagtttaaagagaaaacagcagaacagctgcgagtgttacaggcatcgttcttgaattcttccgtcctgactgatgaggaattaaatagactcagagcccagaccaaactgaccagaagagaaatcgatgcatggtttaccgagaagaaaaagtccaaagcccttaaggaggagaagatggaaattgacgagtccaacgccgggagttctaaagaggaggctggcgagacctccccagctgacgagagcggcgcaccaaagtctggttctactggcaaaatatgcaagaaaactcctgagcagttgcatatgctgaagtcggcctttgtgcggacccagtggccgtctcctgaggagtatgacaaactggctaaggaaagcgggctcgctagaactgacatcgtctcttggtttggagataccaggtacgcgtggaagaatggcaatctcaaatggtactattattaccagtcagccaattctagttcaatgaacggtttatcctcccttcggaagcgaggaagaggccgaccaaaggggaggggcaggggcagacctaggggaaggccccgggggtcaaagcgcataaataattgggatcgcggtccatctttgatcaagttcaagacaggcacggctatcctgaaagactattacctgaaacacaagtttctgaatgaacaggatctagacgagctggtgaacaagtcacatatgggctacgaacaggttcgcgaatggtttgctgaacgtcagcgccgctcagaactcggaatcgaattatttgaggagaatgaagaagaggacgaagtgatcgatgatcaggaagaggacgaggaggagaccgacgattcagacacgtgggagccaccaagacatgttaagaggaagctcagtaaatccgatgattag

SEQ ID NO: 212560 - DNA, 2622 bp, synthetic construct
  misc_feature 1..2622: note = Description of Artificial Sequence: Synthetic coding sequence
  source 1..2622: mol_type = other DNA
atggccagccggcggaagagcaccaccccctgcatggtgctggccagcgaacaggaccccgacctcgagctgatttcagatctggatgagggtcctcccgtattaacccctgtggagaacacacgggccgaatccatttcgtctgacgaagaagtccatgaatctgtggattctgataaccaacagaataagaaggttgagggtgggtacgagtgtaaatactgtacatttcagacaccagacctcaatatgtttacctttcacgtggacagcgagcaccccaacgtagtgcttaactcctcttatgtgtgtgtagaatgtaatttccttacaaagagatatgatgccctgagcgaacacaacctgaaataccaccccggcgaggaaaacttcaagcttactatggtcaaacgaaacaatcaaaccattttcgaacaaactatcaacgacctgacctttgacgggtcgtttgttaaggaggagaatgccgaacaagcagagtcaacagaagtaagcagcagtggcatttctatatccaagactcccattatgaagatgatgaaaaataaggtggagaataaacgcatagctgtccatcataattccgttgaggacgtgccagaagagaaggagaacgagattaagcctgacagagaggaaattgtggagaatccgagctcgagcgccagtgaatcaaacaccagcaccagtatagtcaaccggatacatccgtccactgctagtacagtggtgacaccagcagccgttcttcccgggctcgcccaggtgataacagccgtgtcggcccagcaaaatagtaaccttataccaaaagtactgattcccgtgaacagcataccaacttataatgccgctctggataataatcccctcctgcttaatacgtataacaagttcccatatccaacaatgtctgagatcaccgtcttgtcagcacaagccaagtacacagaggagcaaataaagatttggttctccgctcagagactcaagcatggcgtcagctggacacctgaggaggttgaagaagcccggcgcaagcagttcaacggaactgtgcacaccgtgccccagaccatcacagtaataccaacccacatatcaactgggtctaatgggttgcctagtattctccagacatgccaaatagtgggccaacctggtctcgttctgacgcaggttgctggtacgaatacactgccagtcaccgctccgatcgccctgaccgttgccggagtgccctcacaaaataacatccagaaatctcaggtcccagcagctcagcccaccgcggagaccaagcccgccactgcggctgttccaaccagccaaagtgtaaaacacgaaaccgcgctggtaaatccggactctttcgggattcgcgctaaaaaaacaaaggagcagctggcggagctgaaggtctcgtatttgaagaaccagttcccccatgactctgaaataatcaggctgatgaagattacgggacttacgaaaggcgaaatcaaaaaatggttctctgacacccggtataatcagcgcaatagtaagtccaatcaatgcttacatctgaacaacgattccagtacaacaatcattatcgacagctccgacgagaccacagagtcaccgacagtgggaaccgctcaacccaagcagtcatggaatcccttcccagacttcacgccccagaagtttaaagagaagacggcagagcagctgagggtgttacaggctagcttcctgaacagcagcgtgcttacagatgaggagttaaaccgcctccgagcccagaccaagttgacccgccgagaaatcgatgcttggtttaccgaaaagaagaagagcaaggccctcaaggaagaaaaaatggagattgacgaatctaacgctggctcttcaaaagaggaagcgggggagacctcccccgccgacgagtcaggggcacccaagtctggaagcacaggaaagatttgtaagaaaacacctgaacagttgcacatgctcaagagtgcatttgttaggacacagtggccctccccagaagagtacgacaagctggcaaaggagagcgggctggcaagaacagacatcgtatcctggttcggcgacacaaggtacgcctggaagaatggaaaccttaaatggtactactactatcaatccgcaaactccagtagcatgaatgggctgagctccctgcgcaagcgtgggagagggcgtcccaaaggacgcgggcgcggacgccctcgggggaggcctcgcgggtcaaagaggattaataattgggaccgtggtcccagcctaattaaatttaagaccggcaccgcgattctcaaggactattatctcaagcataagttcctgaacgaacaagatctcgatgagttggtgaacaagagccacatgggctacgagcaggtgcgcgaatggttcgcagaacgacaacgtcgaagcgaactgggaattgaactgttcgaggagaacgaagaggaggatgaggttatcgacgaccaggaagaggacgaagaagagaccgatgattccgacacttgggagcccccacgccatgtgaaacgcaagctctcgaaatcagacgactag

SEQ ID NO: 212561 - DNA, 1497 bp, synthetic construct
  misc_feature 1..1497: note = Description of Artificial Sequence: Synthetic coding sequence
  source 1..1497: mol_type = other DNA
atggccagcaagcggaagagcaccaccccctgcatgatccccgtgaaaaccgtggttctgcaggacgctagtatggaggcccagcctgccgagaccctaccagaaggcccacagcaggaccttccccccgaagctagtgcggctagctccgaggccgcccagaatccttccagcaccgatggaagcacactggccaacggccacagaagcactttggatggttacctgtacagctgtaagtattgtgattttaggtcacacgacatgacccagttcgtgggccacatgaattctgagcacaccgactttaataaagatccaacatttgtgtgttccggctgctcgttccttgcgaagaccccggaggggctgagcctgcacaacgccacatgccattcaggcgaggcttccttcgtgtggaacgtagcaaagcccgataatcacgtcgtggttgagcagtccatcccagaaagtacctctacccccgacctagctggagagccatccgctgagggtgctgacgggcaggctgagataataatcactaagacacccattatgaagataatgaagggtaaggctgaagcaaaaaagatacatacacttaaggaaaacgtaccatcgcagcccgtgggcgaagctctaccgaagctcagtactggggagatggaagtgcgtgagggagaccactcctttattaacggagccgtccctgtttcacaggcctcggcctcttctgcgaagaacccacacgcggccaacggcccgttaatcggaacagtacctgtcctgcctgcggggatcgcccagttcctctcacttcaacaacagcctccagtgcacgcacaacatcatgtgcatcagccgctacccacagccaaagctctcccaaaggtgatgattcctttgtcgtcaatacccacttataatgcagccatggattctaactcttttctaaagaatagttttcataaatttccttaccctaccaaagctgagctttgttatttgacggtcgtgactaagtaccccgaagaacagctgaaaatttggtttacagcacaaaggctcaaacaggggattagttggagcccagaagagatcgaggacgctagaaaaaaaatgttcaacaccgtcatccagtccgtgcctcaacccacaatcacagtacttaatactcccctcgtggcctcagccggaaacgtgcaacacctcatacaggcggcactgccaggacacgttgtgggtcagcctgagggcaccgggggcggactgcttgtgacacaacccttgatggctaacggcctccaggccacgagctccccactacccctgacagttacatccgtcccaaaacagcccggcgttgctcccattaacacggtgtgttccaatacaactagcgctgtcaaagttgtgaacgctgcccagtccctcctgaccgcctgccctagtattacatcgcaagcttttttggacgcaagtatctacaagtag

SEQ ID NO: 212562 - DNA, 291 bp, synthetic construct
  misc_feature 1..291: note = Description of Artificial Sequence: Synthetic coding sequence
  source 1..291: mol_type = other DNA
atggccagcaagcggaagagcaccaccccctgcatgatccccgtgaaaactgttgtgctacaagacgcctccatggaggcccagcccgccgagaccctgcctgaaggcccccaacaggacctcccacctgaggctagtgccgcctcctcagaagcagcccagaatccaagctcaacagacggaagcacacttgcaaatggacacagaagcaccctggacggctacctctatagctgtaagtattgtgactttcggtcccatgatatgacgcagttcgtcggtcacatgtag

SEQ ID NO: 212563 - DNA, 2244 bp, synthetic construct
  misc_feature 1..2244: note = Description of Artificial Sequence: Synthetic coding sequence
  source 1..2244: mol_type = other DNA
atggaggtgcgggagggcgaccacagcttcatcaacggcgccgtgcccgttagtcaggctagtgccagctctgccaaaaacccacatgctgctaacggaccgctcatcggtacggtgcccgttctgcctgctggaatcgctcagtttcttagcctgcagcagcaacccccggtgcacgcccagcaccacgtacaccaaccactgccaaccgccaaagcacttccaaaggtgatgatccctctcagtagtatcccaacctacaatgctgcgatggacagcaacagttttctgaaaaactcctttcataaattcccgtatcccaccaaggctgagctatgctacctaacggttgtgacaaagtatcctgaagagcagctgaaaatctggtttaccgctcaacgactgaagcagggaatatcctggagtcctgaagaaatagaagacgctcggaagaagatgtttaacactgtgattcaatccgtcccccaacctaccattaccgtgttaaacacacctctggtggcctctgccgggaacgttcagcacctgattcaggcagctctcccaggccatgtggtaggccagcctgaaggaacaggcggtgggcttctagtcacgcagccgctgatggcaaatggtctgcaggcaacctcctctccgttgcccctgactgtcacctctgtcccaaaacagccaggggttgcccctattaacacagtttgcagcaacactacttccgccgtgaaagtcgtaaatgcagcacagtccctgctgactgcatgcccaagcatcacaagccaggcttttctggacgcctctatctacaagaacaagaaatcgcacgaacagctctctgcgctcaagggaagtttttgtaggaaccagtttcccggacagtctgaagtggagcaccttactaaagtgacagggctgagcacccgggaagtgcgaaagtggttctctgatcgccgataccattgtaggaatttgaagggctcccgagcgatgatccccggagatcactcatccatcatcatcgatagtgttccagaggtcagcttctcccccagctccaaggtgcccgaagtcacttgcattccgacaaccgctacactagcgacacacccaagtgcaaagcggcaatcatggcaccagactcctgactttacgcccacaaaatataaggagagagcacctgagcagctgagagcattagagagtagcttcgctcagaatcccttgccacttgacgaggagctcgataggttgcgatcggaaaccaagatgaccaggcgtgagatagatagttggttcagcgaaaggaggaaaaaggtgaatgccgaggaaacaaagaaagctgaagaaaatgccagccaagaggaagaggaagccgcagaagacgagggtggcgaagaagacctggcttctgaattgcgcgtgtctggagagaatggcagtctggagatgccgtcctcacacatccttgcggagcgcaaggtcagcccaataaagattaatctcaagaatttgcgggtcacagaagcgaacggccgcaacgaaatccccggcctcggcgcttgtgatccagaagacgacgagtctaacaagctggccgaacagttaccggggaaggtgtcatgcaaaaaaaccgctcaacagaggcacctcctgagacaactgtttgtgcagacgcagtggccatcaaatcaggactatgactccattatggcccagaccggtttacctcggccggaagtcgtccgctggtttggggatagtagatatgcgctgaaaaatggacagttgaagtggtacgaagactacaagcgcgggaactttcctcctggcctgttggttatcgcacctggaaatagagagctcctgcaggactattacatgactcataagatgctatatgaagaggatctccagaatttatgtgataaaacccagatgtctagtcagcaggtgaaacagtggttcgcagagaagatgggagaggaaaccagagccgtggctgacaccggaagcgaggaccagggacccggcacgggtgaactcaccgccgtgcataagggtatgggggatacctatagtgaagtgagtgaaaattcagaaagctgggagcccagggtcccagaagccagtagtgagccctttgacacgtcaagtcctcaggccggaagacaactgggctcttggtccctgtcctctcagcctctccctagcttactgactctgtag

SEQ ID NO: 212564 - DNA, 2871 bp, synthetic construct
  misc_feature 1..2871: note = Description of Artificial Sequence: Synthetic coding sequence
  source 1..2871: mol_type = other DNA
atggccagcaagcggaagagcaccaccccctgcatgatccccgtgaagacagttgttcttcaagatgccagcatggaagctcaacccgctgagacactgcccgagggaccccagcaggacttaccaccagaagccagcgcggcctcctctgaggcagctcaaaatccttcatccacagatggcagcacacttgcgaacggacaccgctcaaccctggacgggtatctctattcttgtaaatactgcgatttccggagccatgatatgacccagtttgttggccatatgaattcggaacacacagattttaataaagacccaacttttgtgtgtagcggatgttctttcttggccaaaaccccagagggcctgtctctgcacaatgccacctgtcattcaggcgaagccagcttcgtgtggaatgtggccaagccagataatcatgtggtggtggagcagagcattcctgagagtactagcacccctgacctggcaggcgaaccgtccgccgaaggagcagatggccaggctgagataattattactaaaacgccaattatgaagatcatgaagggaaaggccgaagccaagaagatacatacactgaaagagaatgtgccctcccagcccgtgggcgaagccctgcccaagctctcaactggcgaaatggaggtccgagagggagaccactctttcatcaatggggcagtgcctgtctcccaggcctctgcctccagtgcgaagaatccccacgccgccaacggcccattaatcgggaccgtgccggtgctcccggctggaatcgcacaattcctaagcctccagcaacaacctccagtccatgctcaacatcacgtgcatcagccgctgcctactgccaaggcactcccgaaggttatgatcccactcagttccatccctacatataacgccgcgatggatagcaactcctttttaaagaactcctttcacaagtttccttacccaacaaaagctgaactgtgttacctgaccgtcgtcactaagtacccagaagaacagctcaaaatctggttcacagcccagaggctgaagcaggggatcagttggtcacctgaggagatcgaggacgccaggaaaaaaatgtttaatacggtgatacagagcgtcccacagccgaccatcaccgtgctgaacactccactggtggctagtgccggcaatgtccagcatttgattcaggcagccctccccggccatgtagtgggccagcctgagggaacaggtgggggactgctggtcacccagcctcttatggcaaacggcctgcaggctacatcctcacctctccctctgacagtgacgtcagtgcctaagcagccaggtgtggcccccataaataccgtttgctctaacacaacatcagcagtgaaggtggtcaacgccgcacagtctctcctgactgcctgtccctctatcacctcacaggcctttctcgatgcatctatttataagaataagaagagtcatgaacagctgagtgctcttaaaggaagtttctgtaggaaccaatttccaggacagtccgaggtggaacacctgaccaaggtaacaggactctctaccagggaggtgagaaaatggttcagcgataggcgctatcattgccgcaacctgaagggatcgagggctatgattccgggagaccactcatctataatcatcgactccgtcccagaggtgtcattcagcccatcttcaaaagtcccagaagtaacctgtattccaacaaccgctacattggccactcatccttccgccaaaagacagtcctggcaccaaacgcccgatttcactcctacaaaatataaagaacgggctccggagcagctgcgtgcattggaatcatccttcgcacaaaacccgttacctctggacgaagagctcgacagactgagaagcgagactaaaatgactaggagggagatcgattcttggttttcagagaggaggaaaaaggttaacgctgaggagaccaagaaggccgaggagaatgcctcacaagaagaggaggaggcagccgaagatgagggcggcgaggaggatctcgcctcagagcttcgcgtttccggagagaatgggtccttagaaatgccctcatctcacatactggctgaacgcaaggtgagtccaatcaaaataaaccttaagaacctcagggtcactgaagcaaacggtcgtaatgagatccccgggctaggcgcctgtgaccccgaggacgacgaatccaacaagctggccgaacagctcccaggcaaggtatcctgtaagaagacagcccagcagagacacctgctcagacaactttttgtgcaaacgcaatggccttcaaatcaagactacgactcgattatggcacagacagggctgcctcgccctgaggtggtgcgctggttcggggattcgcgctacgccctcaaaaacggtcagcttaagtggtatgaagactacaaacgtggcaacttcccgcccggattgttagtgattgcccccggtaacagggagctgctgcaggactattatatgacacacaagatgctgtacgaggaagacctgcagaatctatgcgacaagacccagatgtcctcccaacaggtaaaacagtggtttgctgaaaaaatgggagaagagacaagggcagtggccgacaccggcagtgaagatcagggccctgggacgggcgaacttacagctgtacataagggcatgggggacacatactccgaggtcagcgagaacagcgagagctgggaaccaagagtacctgaagcatctagtgaaccatttgataccagttctcctcaggccggacggcaactggaaaccgattag

SEQ ID NO: 212565 - DNA, 141 bp, synthetic construct
  misc_feature 1..141: note = Description of Artificial Sequence: Synthetic coding sequence
  source 1..141: mol_type = other DNA
atggccagcaagcggaagagcaccaccccctgcatgatccccgtgaagactgtggtcttacaggacgcatccatggaggcccagccagctgagacgttaccagaaggccctcagcaggatctcccccccgaggcctcttag

SEQ ID NO: 212566 - DNA, 1497 bp, synthetic construct
  misc_feature 1..1497: note = Description of Artificial Sequence: Synthetic coding sequence
  source 1..1497: mol_type = other DNA
atggccagcaagcggaagagcaccaccccctgcatgatccccgtgaagacagtggtcctgcaggacgcttctatggaggcccagcccgccgagacactgcctgagggcccccagcaggatttgcccccggaagcgagtgctgctagttcagaggccgcccaaaacccatcctctactgatggctctacactggcgaatgggcatcgctctaccctggacgggtatctgtattcttgcaagtattgtgacttccgctcacatgatatgacacagttcgtcggccatatgaattctgagcatacagactttaataaggatccaacattcgtttgctccggctgctcatttctggctaagactcccgagggactgagcctgcataatgcgacatgccactccggagaagcttctttcgtgtggaacgtggccaaacccgataaccatgtcgtggtagaacagagtatccccgaatccacttccacgcctgatctggccggcgagcccagcgctgaaggggcagatggacaggctgagataatcatcaccaagacaccgataatgaaaatcatgaagggcaaagcagaggctaagaagatccacacactgaaagagaatgtgccttctcagcctgtcggtgaggccctacccaagctgtcaactggcgagatggaagtgcgggaaggagatcactcctttatcaacggggcggtccccgtgagtcaggcaagtgccagttctgctaaaaacccacatgctgcaaatggtcctcttattgggaccgtgcctgtgctccccgctggaattgcacagtttctgtctttgcagcagcagcccccagttcacgctcagcatcacgtgcatcagcctctgccaactgctaaagccctacctaaagtgatgattcccctgtcgagcatacctacctacaacgctgcaatggattcaaactcttttctgaagaatagttttcacaagtttccttacccaacaaaagcagaattgtgctacttgacggtagtgacaaagtaccctgaggagcagttaaaaatttggttcacggcacagcgcctaaaacaaggcatctcatggtcacccgaggaaattgaggatgcccggaaaaagatgtttaataccgtcattcaatccgtgccacagcctacaattacggtcttaaatacccctctagtcgcctctgccggcaacgttcaacatctgatccaggctgctctgccagggcacgtggtgggccaaccggaaggtactggcggcggcctgctggtcacacagcccctgatggcaaacggtctgcaggcaacctctagtcccctcccactgacagtgacctcggtacccaagcagcctggggtcgcccctatcaacaccgtatgtagtaacacaacatctgctgtaaaagtggtaaacgcagctcagagtctcttaacggcctgcccgagtattaccagccaggcattcctggatgcaagcatctataagtag

SEQ ID NO: 212567 - DNA, 147 bp, synthetic construct
  misc_feature 1..147: note = Description of Artificial Sequence: Synthetic coding sequence
  source 1..147: mol_type = other DNA
atggccagcaagcggaagagcaccaccccctgcatgatccccgtgaagacagttgtgttgcaagacgcatcgatggaagctcaacctgccgaaactttacctgagggcccacaacaggatcttcctccagaagccagcgcagcttag

SEQ ID NO: 212568 - DNA, 273 bp, synthetic construct
  misc_feature 1..273: note = Description of Artificial Sequence: Synthetic coding sequence
  source 1..273: mol_type = other DNA
atggccagcaagcggaagagcaccaccccctgcatgatccccgtgaaaaccgtggtcttgcaggatgcgagcatggaagcccagcccgcggagactttacccgaaggacctcagcaggacttgccccctgaagcatctgctgcaagcagtgaagctgcgcagaatcccagtagcacagatgggagcacgctggctaatgggcaccgtagcacactcgatgggtatctgtactcttgcaagtactgcgactttcgcagtcacgatatgacatag

SEQ ID NO: 212569 - DNA, 357 bp, synthetic construct
  misc_feature 1..357: note = Description of Artificial Sequence: Synthetic coding sequence
  source 1..357: mol_type = other DNA
atggccagcaagcggaagagcaccaccccctgcatgatccccgtgaaaacagtggtgctgcaggatgccagcatggaggcgcagcccgccgaaacactgccagaagggccacagcaggacctgccacccgaggcatcagccgcgtcctcagaggcagctcagaatccctcttccaccgatggcagtacgctagccaatggacatcgcagtacattggacggctacctatacagttgtaaatactgtgacttccgatcccatgacatgacacagtttgtcggtcacatgaatagcgaacacaccgacttcaataaagatcccacatttgtatgtagtgggtgttcattcctcgcatag

SEQ ID NO: 212570 - DNA, 2871 bp, synthetic construct
  misc_feature 1..2871: note = Description of Artificial Sequence: Synthetic coding sequence
  source 1..2871: mol_type = other DNA
atggccagcaagcggaagagcaccaccccctgcatgatccccgtgaagacggttgtacttcaagatgcatctatggaagcccaacccgctgagactttgccagaagggcctcagcaggatcttccgccagaggcatctgcagcctcaagcgaagccgcacaaaacccatccagcacagatggtagtactctagccaacggacaccgaagcaccctggatggatatctgtattcctgtaaatactgcgacttccgctcccatgacatgacacaatttgtaggacacatgaactccgagcatactgattttaacaaagatcccactttcgtttgcagcggttgttcctttctggccaagacccctgagggactgtcgctacataatgctacttgccattcaggggaggcgagtttcgtgtggaatgttgcgaaacctgacaatcatgtcgtggttgagcagtccatcccggagtcaacaagtactcctgacctggctggcgagcctagcgccgagggagctgacggccaggccgaaatcataataaccaagaccccgatcatgaagatcatgaagggaaaagctgaagcaaagaaaatacacaccctgaaggaaaatgtgcctagccaacctgttggcgaggcccttcccaagctctctacaggcgaaatggaagttcgcgagggtgatcatagcttcatcaatggggctgtccctgtatcacaagcctccgctagttcagccaagaaccctcatgccgccaatggacccttgattgggacagtgcccgtgctgcccgcaggcattgctcaattcctatcccttcaacagcaaccccccgttcatgcccagcaccacgtgcatcaaccactccccacggccaaggccctgcccaaagttatgatacccttatcctccattccaacctataacgcggctatggattccaactcatttttaaagaattcttttcataagttcccctatcctaccaaggcagagctttgttacctgaccgttgtgacaaaatatcctgaggagcagctgaagatctggtttaccgcccagcgcctgaagcagggaatttcctggagtccagaggagatcgaagatgcccgaaagaaaatgttcaataccgtgatccagagcgttccacagcctaccattaccgtactgaatactccactcgtggcttccgcggggaacgtacaacacctcatccaggcggcactgcccgggcacgtcgttggccaaccagagggcaccggcggaggcctgctggtgacccagccactcatggccaacggtctacaggctactagcagcccacttccactgaccgttacctccgttcccaagcagcccggagtggcgccgattaacaccgtgtgcagtaacaccacaagtgcagttaaggtagtcaatgctgcccaaagcttgcttacagcctgtccttccattacttcccaagcatttttggatgcaagtatatataaaaacaagaagagccacgaacagctgtcagcactgaagggcagcttctgccggaatcagttccctggtcaatctgaggtagagcatctcacaaaggtcacgggactcagcaccagagaagttcggaagtggttctcagatcgtagataccactgccgcaatctgaaaggatctagagcaatgattcccggcgatcactcctcgataattatagattctgtacccgaggtgtcgttctctccaagctccaaagtgcctgaggtgacatgcatccctactactgcaaccctcgccactcacccctctgccaagcgccagagttggcatcagaccccagacttcacgcccacaaagtataaagaaagagcgcccgaacagctgcgcgcccttgagtcaagtttcgctcagaaccccctgcccctggacgaggagcttgatagacttagaagcgagacgaaaatgaccaggagagaaatcgactcttggttcagtgagcgccggaaaaaggtaaatgcggaggaaaccaaaaaagccgaggagaacgcatctcaggaggaagaggaggccgcagaggacgagggcggggaagaggacctcgccagtgagctcagagtgtcaggcgaaaatgggtcactggagatgcccagttctcacattctggccgagcgaaaggtcagcccaattaagatcaatctgaagaaccttagggtgaccgaagcaaacggccgaaatgaaatccccggcttgggtgcctgcgaccctgaggacgatgagagtaataaactggccgaacagctgccaggcaaggtttcttgtaagaagactgctcagcaaagacacttgctgaggcaactgttcgtgcagacccagtggccaagtaaccaggactatgatagcattatggcacagacagggttgccccggcctgaagtggtccggtggttcggcgattcaaggtatgcgctcaaaaatggacaactgaaatggtacgaagactacaaaagaggtaactttccccccggcctgctggttatcgcacccggcaatagagagttactgcaggattactacatgacccataagatgctctacgaagaggacctgcagaacttatgtgataaaacccaaatgtcctctcagcaggtgaagcagtggtttgcagagaagatgggtgaagagactcgggccgtggcagatactgggtctgaggaccagggacccggaacaggagagcttaccgccgtccacaaaggtatgggagatacttacagcgaagttagtgagaactcagagtcgtgggagccacgtgtccccgaggcgtcaagcgaacctttcgatacctcttctcctcaagccgggcgacagctggaaacagactag

SEQ ID NO: 212571 - DNA, 2910 bp, synthetic construct
  misc_feature 1..2910: note = Description of Artificial Sequence: Synthetic coding sequence
  source 1..2910: mol_type = other DNA
atggccagcaagcggaagagcaccaccccctgcatgatccccgtgaagacagtcgtcttacaggatgcatccatggaggcccagccggccgaaactttacctgagggaccccagcaagacctgccgcctgaagcttcagctgcaagcagtgaggccgcacagaatccatcgagcaccgacggaagcaccttggcaaatggtcacaggagcaccctcgatggttatttatacagttgtaaatactgtgattttcgaagtcatgacatgacacagttcgtgggccacatgaactctgaacacaccgattttaacaaagacccgacttttgtgtgtagcggctgttctttcctggcaaagacccccgaagggttgagtctgcacaacgccacctgccacagcggggaagcaagttttgtttggaatgttgctaaacccgacaatcatgtggttgttgagcagtctatccctgagagcacaagcactccagatctggcgggagaacccagtgccgaaggggccgatggtcaggcggagataattattactaagactcccatcatgaaaattatgaaggggaaggcagaggctaagaagattcataccttaaaggagaacgtcccctcacagcccgtgggcgaagctctccccaagcttagtactggcgagatggaggtgcgggagggtgatcatagtttcatcaatggagccgtgcccgtaagtcaggcgtccgccagcagtgcaaagaatccacacgccgcgaatggccccttaatcggaactgtgcccgtccttcctgccggaatcgcacagtttttgagtcttcagcagcagcccccagtgcacgctcaacaccacgtgcatcagccattgccaacagccaaagctctgcccaaggtaatgattcctctatcctctatcccgacctacaatgccgccatggattcaaacagcttcctgaagaattcgtttcataagttcccctaccccaccaaggcagagctgtgctatttaactgtagttaccaagtaccccgaggaacagctaaagatctggtttactgcccagcggctgaagcaggggatttcctggagccccgaggaaatcgaggacgcacgcaagaagatgtttaataccgtaattcagagcgtgccacagcctacgatcaccgtcttgaacaccccactcgtcgcatccgctggcaacgtacagcatctgatccaggccgctcttcccggacacgtagtcggacaacccgaggggaccggggggggtctgctcgtgacacagcctctcatggccaacgggttgcaggctacctcaagtcctctccccctcactgtcacttccgtcccgaaacaaccaggcgttgccccaatcaataccgtgtgctccaacacgaccagcgccgtgaaggtcgtgaacgctgcacaatccctcctgacggcctgcccctccatcacaagccaagcgtttcttgatgcgagtatatataagaataagaagtcccatgaacagctgtccgcactgaagggaagcttttgtcgaaaccaattccctggtcagagtgaggttgaacacctgaccaaggtgacaggcctctccacaagagaggtacgaaagtggttcagcgacaggcggtaccattgtagaaaccttaaggggtccagagcgatgatccctggagaccattcttccatcattattgatagtgtaccggaggtgtccttcagtccttcttcaaaagtccccgaagtcacctgcatcccgaccacagccactctcgctacacacccgtctgccaaaaggcaatcatggcaccagacccctgattttaccccaaccaagtacaaggagagggcccccgaacagttaagggccctggaaagttcgttcgcgcagaacccattgcctctggacgaggaactggacaggctgcgtagcgagacaaaaatgacgcgacgggaaatcgacagctggttttctgagaggaggaaaaaagtaaatgccgaggagacaaaaaaagccgaggagaacgcttcccaggaggaagaagaagccgccgaggacgaggggggtgaggaggaccttgcctccgagctccgcgtgagtggcgaaaatggaagtttggaaatgcctagttcacacatcctagcagagagaaaggtcagcccgatcaagattaacctgaagaacctgagggttacagaagccaatggccgcaatgagatcccgggtctgggggcatgtgaccctgaggacgacgaatcaaataagctcgccgaacagcttcccgggaaggtgagttgtaagaagacagcccagcagaggcatctgctccggcagctttttgtgcagacgcagtggccaagcaaccaggactacgacagcatcatggcccagaccggattaccccgcccagaagtggtgcggtggtttggagactccagatatgccctgaagaatgggcaactcaagtggtacgaagactataagaggggcaacttcccacccggcctgcttgtgatcgctcctggcaaccgggagctgctgcaagattactatatgacccacaagatgctgtacgaggaagatctccagaatttgtgtgacaagacccagatgagttctcagcagaagcagacagagttcgatctcattaatgtgaaagactggccagtatgggagactgcctgccacgtggaagaacccaatccgaccctgtgctgtcatatgccattcccctgtccagccgctggtcacctgggcgagcttcccgaatcatcccaaaccgcccagtcgcttccactgcccagcgcatgtcctcctccttcaaagcagcaggcccggtggggatcccaccagtttttcctgcctcagtgccgaacttttcctctacccagtaatggttag

SEQ ID NO: 212572 - DNA, 948 bp, synthetic construct
  misc_feature 1..948: note = Description of Artificial Sequence: Synthetic coding sequence
  source 1..948: mol_type = other DNA
atggccagcaagcggaagagcaccaccccctgcatgatccccgtgaaaaccgtggtgcttcaagacgcttccatggaggctcagccggccgaaacactccccgaagggccacagcaggatttaccgcctgaagcaagcgccgccagctcagaagccgctcagaacccatccagcactgacggaagtaccctcgcgaacggtcatcggtccacgctggatggatatctttacagttgcaaatactgcgactttagaagccacgacatgacacaatttgttgggcacatgaattctgaacacacagacttcaataaggaccctacatttgtatgttcaggatgttccttcttagccaagaccccagagggcctgagcctgcataatgctacctgccacagcggggaggcctcttttgtgtggaacgtggccaaacctgataaccatgtggtagtcgagcagtcaatccctgaatcgaccagcaccccagacttggcgggtgagccgagcgccgagggcgccgatggtcaggccgagataattattacaaagacccccattatgaaaatcatgaagggcaaggcagaggccaaaaaaatacatacccttaaggagaatgtacccagccagcccgtcggggaagctttgcccaagcttagcactggcgagatggagaagcaaaccgaatttgaccttatcaatgttaaggactggccagtgtgggagactgcctgtcatgtcgaggagcccaaccccaccctctgctgtcatatgccgttcccttgccccgccgccgggcatctgggggaacttcccgaatcatcccagacggcccagtcccttcctctaccttccgcttgtcctccgccgagcaagcagcaagcaaggtggggaagccatcagttttttctcccacagtgccgaaccttccctctgccttcaaacggttag

SEQ ID NO: 212573 - DNA, 501 bp, synthetic construct
  misc_feature 1..501: note = Description of Artificial Sequence: Synthetic coding sequence
  source 1..501: mol_type = other DNA
atggccagcaagcggaagagcaccaccccctgcatgatccccgtgaaaacggttgtcctgcaggatgcgtcaatggaagcccagcccgcagaaacactgcccgagggcccccagcaggatttaccacccgaggcttctgccgcatcaagcgaggctgcccagaacccttccagtacagatggttccacactcgccaacggccatagatcaacgcttgatggttacctgtactcttgtaagtattgcgatttccgctcgcatgatatgactcagtttgtgggacacatgaactccgaacataccgacttcaacaaggaccctacattcgtttgttcgggttgctcctttctggccaagactccggaaggactgtctctgcataacgccacctgtcatagcggggaggcatcttttgtgtggaacgttgcgaagcctgataatcacgttgtggttgaacagagcatccccgaatccacctcgacccctgacctagctggctag

SEQ ID NO: 212574 - DNA, 2871 bp, synthetic construct
  misc_feature 1..2871: note = Description of Artificial Sequence: Synthetic coding sequence
  source 1..2871: mol_type = other DNA
atggccagcaagcggaagagcaccaccccctgcatgatccccgtgaaaaccgtggttttgcaagacgccagcatggaagcccaaccagcagagaccttgccggagggcccacaacaggacttgcctcctgaggcctctgctgcgtccagcgaagcagcccagaatccgagctccaccgacgggagcacacttgccaacgggcacaggagtactctggacgggtacctctacagctgcaaatactgtgacttccgatctcacgatatgactcaattcgtgggccatatgaattcagaacacaccgatttcaacaaagatccaaccttcgtctgttcgggctgttctttcttagcaaagacaccagaaggcttatctctgcataacgcgacatgccactccggcgaggcttcttttgtatggaatgtggctaaaccggataaccatgtagttgtggaacagagtataccagagagtacatcaacaccagacttggccggagaaccaagcgccgagggggctgacgggcaagcagagatcattatcactaagacccccattatgaagatcatgaaaggcaaggcagaggccaagaagatccacacattaaaggagaatgtgccaagccagcccgttggcgaggctctacccaaactcagtacgggcgagatggaagtgagggaaggcgatcacagtttcatcaacggagccgtgcccgtctcccaggccagtgccagttcggccaagaatcctcacgccgcaaacgggcctctcataggaacagtgcccgtcctgccagccgggattgcacagtttctgtccctgcaacaacagccacccgtccacgcccagcatcacgtgcaccagccccttcctactgccaaagccctacccaaggtcatgatccctttgtcctccatccctacttacaatgccgccatggattcgaatagcttccttaaaaactcttttcataagttcccttaccccactaaggccgaattatgttatcttacagtcgttactaaataccctgaggaacagctcaagatttggttcaccgcccagagactcaagcagggaatcagttggtcccccgaggagatcgaggacgctcggaaaaaaatgttcaacacagtgatccagagcgtgccacagcccacgattacagttcttaacacaccactggttgcatcggccggcaacgtgcagcacctgatccaagctgctctgccaggacatgtggtgggtcagccagaagggacgggtgggggtctcctggtgacccagcccctgatggcgaacggattgcaagctaccagcagccctctgcccttaaccgtaactagtgtccctaaacagccaggcgtggctcctatcaacacagtctgctctaatacaacgagcgctgtgaaggttgtcaacgctgcacaaagcttgttgactgcctgccccagcataacttctcaggccttcttagatgcttcgatttacaagaacaagaaatcccacgagcagttaagcgctctgaagggatcattttgcagaaatcagttcccagggcaaagcgaagtggaacacctgacgaaggtcactgggctctcaaccagagaggtccgcaagtggttcagcgatcggcgctatcattgcaggaatctcaaaggcagccgagctatgatcccaggcgaccattcgagcattatcatagactctgtacctgaagtctcctttagcccctcatccaaagtgccagaggtaacctgtatccccaccaccgcgaccctcgcaacacacccttcagccaagcgccagtcttggcatcagacacctgactttacaccgacgaaatataaagaaagggccccagagcagctgagagctcttgagagtagcttcgcccagaatcctctaccactggacgaagagctggatcgtctcagaagtgagaccaagatgacccggcgggagatcgactcctggttctccgagcgacggaagaaggtaaacgctgaagaaactaagaaagccgaggagaatgccagccaggaggaggaggaggctgcggaagatgagggaggggaagaggaccttgcgagcgagcttagggtgagcggcgaaaatggatcactcgaaatgccctcaagtcatatcctggctgagcgtaaagtcagcccgataaagattaatcttaagaacctaagagttactgaggccaacggtagaaatgagattcctggccttggcgcctgcgatccagaagacgacgaaagcaacaaactggctgagcagttgcccggtaaggtctcttgtaagaaaactgctcagcagcgccacctgctgcgacagctgtttgtgcagacccaatggccctccaaccaggattacgattctatcatggctcaaaccgggctgccacggcctgaagtcgtccgctggttcggtgattctagatatgcccttaagaatgggcagttgaaatggtacgaagactacaagaggggcaactttcctcccggtcttttagtgatcgctcctggtaatcgcgagctgctccaggactattacatgactcacaagatgctctacgaagaagacctccagaatctatgcgacaaaacccaaatgtcgagccagcaagtcaaacagtggtttgccgagaagatgggcgaagaaactcgagcggttgctgacacgggatccgaggatcaaggccctggtacaggggagctcactgcagtgcacaagggtatgggcgacacctactctgaggtgtcggaaaacagtgagtcctgggaaccaagggtcccagaggcgagttccgagcccttcgatacaagttccccgcaggccgggcggcagctggaaaccgattag

SEQ ID NO: 212575 - DNA, 2871 bp, synthetic construct
  misc_feature 1..2871: note = Description of Artificial Sequence: Synthetic coding sequence
  source 1..2871: mol_type = other DNA
atggccagcaagcggaagagcaccaccccctgcatgatccccgtgaaaaccgtggttctgcaagatgctagtatggaagcccagcctgctgagacccttccagagggcccgcaacaggatcttcctcctgaggctagtgccgcgagtagcgaagcagcccagaacccaagctccactgacggctctacactcgcgaatggacacaggtctacccttgacggctacttgtattcatgtaaatattgcgacttcaggtctcatgacatgacacagttcgtgggtcacatgaattctgaacatacggatttcaacaaagacccaacgttcgtgtgcagcggctgctcctttttggcgaaaacacctgagggtcttagtcttcataacgcaacttgccactcgggagaagcgagcttcgtgtggaacgtcgctaagccagacaaccatgtagtggtcgagcagtccattcctgagtcaacaagcacacccgacctggccggagaaccatccgccgagggggcagatggacaggctgaaatcattatcacaaagacacctataatgaagattatgaagggcaaggcagaggccaaaaaaatccacaccttaaaagagaatgttcctagccagcccgtcggagaggctttgcccaagttatctactggcgagatggaggtcagggaaggcgaccattccttcataaatggcgccgtaccagtgtcacaggcctccgcatcctcagccaagaacccacacgctgctaatggaccacttatcgggacagtgcctgtgctgcccgccggtatagcgcagttcctatcactgcagcaacagccaccggtacacgctcagcaccacgtgcatcagcctctccctacggctaaggcattgccaaaggtgatgattccccttagtagcatcccaacttataacgcagccatggactcgaactcgttcctcaagaacagctttcacaaatttccctaccctactaaggctgaactgtgctatcttacagtagttaccaagtatcctgaagagcagcttaagatctggttcaccgcccagagactcaagcagggtataagttggagtcctgaagagattgaggatgcccgaaaaaaaatgtttaatacggtgatccagagtgtcccacaacctacaattactgtactgaataccccgctcgtcgcctctgcaggaaatgtgcaacaccttatccaggctgcgctgcctggtcatgtggtaggtcagcccgaaggcacaggaggtgggctgctcgtcacacagccgctcatggctaacgggttgcaagctaccagcagtcccctccctctaacagtaactagtgtgccaaaacagccgggcgtagctcccattaatacagtgtgtagtaatacgacatcggcggtgaaggtggtgaatgcggctcagtccctcctgacagcctgtccctccattactagtcaggcgtttctggatgcatctatttataagaacaagaagagtcacgaacagctctcagccctcaaggggtcattctgccggaaccagttccccggacaatccgaagttgagcaccttacaaaggtaactgggctgtcaactagagaagtaagaaaatggttcagtgatcggcgctatcattgtcgcaaccttaaggggagccgggccatgatccctggcgatcattcgtccattattattgattctgtgccggaggtttcgttttccccaagtagtaaggttcccgaagtgacctgtatccccacaactgctactctggccactcaccctagcgctaaaaggcaatcatggcaccagacacccgactttactcctactaagtataaggagcgtgcccccgaacaactccgggctctagagagttcgttcgctcagaatccattgccgctcgatgaggagctggatcgcttgagatccgagaccaaaatgactcggcgtgagatagacagttggtttagtgagaggcgcaaaaaagtcaacgccgaggaaaccaaaaaagcagaagagaatgccagtcaggaggaggaagaggctgctgaggatgaagggggagaggaagatttggcatcagagctgcgggtgtcgggtgaaaacgggagcctggagatgccatcctcacacattctcgcagagcggaaggtcagtccaattaagattaacctgaaaaacctgagagtgaccgaagccaacgggcgtaacgaaattccgggcttgggagcctgtgaccccgaggatgatgaatccaataaactggccgaacagttacctggtaaggttagttgtaagaaaactgcgcaacagcgtcacttactgagacagctgttcgtgcagactcagtggcctagtaatcaggactacgacagcattatggcccagacgggattgcctcggcccgaggtggtccgctggttcggagactctcgttacgctctgaaaaacggtcaactgaagtggtatgaagattacaaaagaggtaattttcctcccgggctattggttatcgcacccgggaatagagaactgttacaagactactatatgacacataaaatgttgtacgaagaagacctccagaacctgtgtgataaaacccagatgagtagtcaacaggtcaaacagtggtttgcggaaaaaatgggggaagagacccgcgctgttgcggatactggctccgaagatcagggcccgggcacaggagagcttacagccgtgcataaaggaatgggtgacacctattctgaagtgtctgaaaacagtgaatcatgggaacctcgagtccccgaagcatcttccgagccattcgatacatcttcccctcaagctggtagacagctagaaaccgattag

SEQ ID NO: 212576 - DNA, 501 bp, synthetic construct
  misc_feature 1..501: note = Description of Artificial Sequence: Synthetic coding sequence
  source 1..501: mol_type = other DNA
atggccagcaagcggaagagcaccaccccctgcatgatccccgtgaagaccgtggtccttcaggacgccagcatggaagctcaacccgcagaaaccttacccgaggggcctcagcaggatctcccgcccgaggcctctgctgcaagttccgaggcggcgcagaatcctagctccactgatgggagtacattggcaaacgggcatcgctcaacccttgatggctatctgtatagctgtaagtattgcgatttccgatcccacgatatgacccaatttgtgggacatatgaattcagaacatactgacttcaacaaggacccaactttcgtatgctcaggttgttcctttctggccaaaactcccgagggcctctcactgcacaacgccacctgccattcgggtgaggccagcttcgtgtggaatgtcgccaagcccgataatcatgtagtcgtcgagcagtcaattccagaatcgaccagcacgccggatctggcgggttag

SEQ ID NO: 212577 - DNA, 1428 bp, synthetic construct
  misc_feature 1..1428: note = Description of Artificial Sequence: Synthetic coding sequence
  source 1..1428: mol_type = other DNA
atgggcatgtgggccagcctggacgccctgtgggagatgcccgccgagaaaagaatttttggtgctgtgttgcttttttcctggacggtgtatctgtgggaaacattcttggctcaacgccaacggcggatctacaaaacaacaactcacgtgccccctgagctgggacagataatggactcagagactttcgaaaaaagccgactgtatcagctcgataaaagcacattttccttttggtccggtttgtatagcgagactgaagggactttaatcctcctctttgggggcatcccctacctgtggcggttaagcgggagattctgcgggtacgccggtttcgggccagaatacgaaattacccagagtctcgtgtttctgctcctggctacactcttcagtgccctcaccggcctgccatggtctctctataacaccttcgtgatagaagagaaacacggatttaatcagcagaccctggggttcttcatgaaagatgccatcaaaaagtttgtcgtgactcagtgcatcttgctaccagtgagctctctgctgctctatattatcaaaataggcggagattacttctttatatatgcgtggttatttaccctggtggtgagcctggttctggtgaccatctacgccgattacatagcccctctgtttgacaagtttactcctctgccggaaggtaaactgaaggaggaaatcgaagtgatggcaaagagcatcgacttcccccttaccaaggtgtacgtggtggagggttctaaaaggagttcccacagtaacgcatacttttacggctttttcaagaataagcggattgtcttgtttgatacactgctagaagagtacagtgtgctaaacaaggacatccaagaggacagcggcatggagccgcggaacgaggaagagggtaacagcgaggaaattaaggccaaggtgaaaaataaaaagcagggatgcaagaacgaggaagtgcttgctgtactgggccacgaactcggccactggaagctcgggcacacggtcaaaaacatcatcattagccagatgaacagcttcttatgctttttcttgtttgccgtgctgatagggcgaaaggagcttttcgcagctttcgggttctacgattcacagcccacccttattggcctgctgatcatctttcaatttattttttcaccatataatgaggtactgtcgttctgcctgaccgtgctcagccgccgctttgagttccaggccgacgcttttgcaaaaaaactggggaaggccaaagacctctattccgctctaatcaaacttaacaaggacaacctcggattccctgtttccgattggttgttttccatgtggcattatagccacccgcccctgctggaacgactgcaggctctgaaaacaatgaaacagcattag

SEQ ID NO: 212578 - DNA, 1017 bp, synthetic construct
  misc_feature 1..1017: note = Description of Artificial Sequence: Synthetic coding sequence
  source 1..1017: mol_type = other DNA
atgatgcggacctgcgtgctgctgagcgccgtgctgtggtgcctgactggcgtgcagtgcccgcgctttaccttattcaataagaaaggtttcatctatggcaagaccgggcagccagacaaaatctatgtggagctacatcaaaacagcccagtgttgatctgtatggactttaaattatcgaagaaagaaatcgtggatccgacttatctgtggatcggccctaacgagaagaccctcactggcaacaaccgcattaacattactgagacaggccagttgatggtcaaagattttctcgagcctctgtcagggctgtacacctgtaccctgtcctataagacggtaaaggcagagacccaagaggagaagacagtcaaaaaacgctatgacttcatggtcttcgcttatcgggaacccgattattcttatcagatggctgtgcgattcactacacgatcttgcattggtaggtataacgacgtatttttccgtgtgctcaagaagattctggacagtcttatatcggacctgagctgccatgtgattgagccgagttacaagtgccattccgttgaaattcccgaacacggcctgatacatgagctgtttattgcctttcaggtaaaccctttcgcacccggctggaagggagcgtgcaatggtagcgtggactgcgaggatacaaccaatcataacatcctacaggcgcgggaccgaattgaggacttttttagaagccaggcctacatcttctatcataactttaacaaaaccctcccagcaatgcactttgtcgaccatagcctgcaggtcgtcagactggacagctgtagacctggatttggcaaaaatgagagactccattccaactgtgcaagttgctgtgtagtttgttctcccgctacttttagccccgacgtgaatgttacatgtcaaacatgtgtcagcgtattgacgtacggcgccaagtcatgtccccagacttccaacaaaaaccaacagtatgaggattag

SEQ ID NO: 212579 - DNA, 951 bp, synthetic construct
  misc_feature 1..951: note = Description of Artificial Sequence: Synthetic coding sequence
  source 1..951: mol_type = other DNA
atgatgcggacctgcgtgctgctgagcgccgtgctgtggtgcctgaccggtgataaaatatatgtggagctccaccagaactctccagtcttgatttgtatggattttaagctctctaaaaaggaaattgtggatcccacctatctgtggatcggcccgaacgaaaagacactgacagggaataacagaatcaacataactgaaacaggacagctgatggtcaaagactttctcgagccactgtcgggtctctacacatgcaccctatcttataagactgtcaaggcggaaactcaggaggaaaaaactgtgaagaaaaggtacgactttatggttttcgcatatagagaacctgattattcgtaccagatggccgtaagattcaccacaaggagttgtattgggcgctataatgatgtgtttttccgtgttttaaagaaaatcttagattctttaattagcgatctttcatgtcacgtcatcgaaccgtcctacaagtgccactccgttgagattccagagcacggacttattcatgaattgtttatcgcttttcaagtgaacccattcgcccctggctggaaaggagcgtgtaacgggtccgtcgattgtgaggataccacaaaccacaatatccttcaggcccgtgatcgcatcgaggacttctttcgctctcaagcctacatcttctaccacaattttaataaaactcttcctgcaatgcacttcgtggatcacagtttgcaggtggtccggctggactcatgtcggccaggattcggcaaaaacgagcgccttcactcaaactgtgcaagttgttgcgttgtgtgctcacctgccacattctctcctgacgtgaacgtgacttgtcaaacctgcgtctcagttttaacctacggtgcaaagagctgcccgcagacgtctaacaaaaatcagcaatacgaggactag

SEQ ID NO: 212580 - DNA, 1917 bp, synthetic construct
  misc_feature 1..1917: note = Description of Artificial Sequence: Synthetic coding sequence
  source 1..1917: mol_type = other DNA
atggccggcggcagcgccaccacctggggctaccccgtggccctgctcctgcttgttgctacattaggcctcggacggtggttacagcccgaccctggcttgcccggtcttcgccactcatatgactgtggaatcaaaggtatgcagttactggtgtttccaaggcctggtcagacgctgcgcttcaaggtggtggacgagtttggaaatcggttcgacgtgaacaactgcagtatctgttaccactgggtaacttcgcgccctcaggagccagccgtattttcagcagattacaggggatgtcacgtgcttgagaaggatggccgcttccacttgagggttttcatggaggcagtgctgcccaacggtagagtagatgtggcacaggatgctactcttatctgcccaaagcctgacccttcccgcaccctcgattcacagctcgctcctcccgccatgttcagcgttagcacccctcagaccctatcgttcttaccaacttcggggcacacaagtcagggctctggccatgcctttccatctcccctcgaccctgggcatagctctgtgcaccctacacccgcgctgccttctcctggacctggccccactcttgcgacattggcccagccacattggggaacccttgaacattgggacgtgaacaagagggattacatcggcacccacctgtcccaagaacaatgtcaggtcgcgtctgggcacctgccgtgcatagtgaggaggactagcaaggaggcctgtcagcaggctggatgctgctatgataatactagagaggtaccgtgctactacggaaatacagcaactgtgcagtgtttccgcgacggctatttcgtgctggtggtttcgcaggagatggccctgacccacagaataaccctcgccaacattcatctcgcttacgcacccacgtcatgctctccgacgcaacacacagaggctttcgtcgtcttttactttcccttaacgcactgtgggaccaccatgcaagtggcgggagaccaactgatttacgaaaactggcttgtgtccggcatccacattcagaaaggaccacaagggtcaattacgcgcgacagcacttttcaactgcacgtgcggtgtgtgtttaatgcgagcgactttcttccaatccaggccagcatttttccacctccgtctcctgctcccatgacccagccgggccccctgcgtttggaactacgaatcgctaaggatgagaccttctctagctactacggagaggacgattatcctattgttagactgttgcgagaacccgtgcatgtcgaggtcagactgctgcagaggacagaccctaacctggtgctattgctccaccagtgctggggcgccccatcagccaaccctttccaacagcctcagtggcccatactaagtgatggatgccccttcaaaggtgactcctatagaacacaaatggtggccttggacggcgccaccccatttcaaagtcactatcaaagattcactgtggcaacattcgcactactggactccggcagccagcgcgccctaaggggtctggtttatttattctgctctactagcgcatgccacacatctggcctggaaacatgcagcactgcatgcagcaccggtactaccagacagagaagaagcagcgggcaccggaatgatacagcccgtccacaggacattgtctcgtcgccaggccctgttggcttcgaagactcttacggccaggaacccactttggggcctacggatagcaacggcaactcctccctgaggcctctgctttgggcagttctgctccttcccgctgtggccctggttctgggctttggcgtgtttgtaggcctatctcaaacttgggcccagaagctgtgggaatcaaataggcaatag

SEQ ID NO: 212581 - DNA, 993 bp, synthetic construct
  misc_feature 1..993: note = Description of Artificial Sequence: Synthetic coding sequence
  source 1..993: mol_type = other DNA
atggccctgacccaccggatcaccctggccaacatccacctggcctacgccccaacatcatgcagtccaacacagcatactgaagcctttgtcgttttctattttcctctgacacactgtgggacaactatgcaggttgctggagaccagctcatatacgaaaattggttggtgagcggtatacacatccagaaaggcccacagggctctattactcgagacagcacattccagctccatgtcagatgtgtatttaacgcgtcggattttctaccaattcaagcgagcatttttccaccaccttcccccgcccctatgactcaaccgggcccattgcggctggaactgagaattgccaaagacgagactttttctagctattatggcgaggacgactaccctattgttcggctgctccgtgagcccgtgcacgtagaggtcagacttcttcagcggacagatcctaatctagtgctgttgctgcatcaatgctggggtgctccaagcgctaatccatttcagcagcctcaatggcctattttgtcggatggatgccccttcaagggagactcttatagaacgcagatggtagccctggacggggccacccccttccagtctcactatcaacggttcaccgtcgccaccttcgcactgttggacagcggcagccaacgggcactacgggggctcgtgtacctgttctgctctacatcagcctgccatactagtggcctggagacgtgctccacagcttgctcaaccgggacaacgagacagagacggtcttctggccataggaacgataccgctcggcctcaagatattgtttcatcccctgggccagtaggctttgaagattcctacgggcaggagccgactcttggccccacggattcaaatgggaactcctcactgaggcctcttctctgggctgttctcttgctgcctgctgtggctctggtgctgggattcggcgtattcgtcgcatag

SEQ ID NO: 212582 - DNA, 1317 bp, synthetic construct
  misc_feature 1..1317: note = Description of Artificial Sequence: Synthetic coding sequence
  source 1..1317: mol_type = other DNA
atgggccgggtggaggacggcggcaccaccgaggagctggaggactgggatccaggcacttccgcgctgcctgctccaggaattaaacagggccctagggagcagacaggtactgggccactcagtcaaaagtgttgggaaccggagcccgatgccccttctcagcctggccctgccttgtggagcagaggacgagctcgtacgcaagctctcgctggggggagctccctgcagcagttggatcccgaaaacaccggtttcataggtgcagacacctttacaggcctcgtgcactcacacgagctgcctctggatccagcaaagctagacatgttagtggctttggctcaaagcaatgagcaggggcaggtgtgttatcaggagctggtggacctcatctcttccaagaggagctccagcttcaagcgcgcaatcgctaatgggcaacgagcactaccgcgggacgggcctctggatgaacccggcctgggtgtttataaacggtttgtgcgctacgttgcctatgaaattctaccttgtgaagtggatcggaggtggtacttttacagacaccggtcgtgtccgccccctgttttcatggcctcagttaccctggcccaaattatcgtttttttatgctacggcgcccggctgaataagtgggttctgcagacctaccatccagagtatatgaagtcccccctggtgtaccacccaggccaccgggcgcgagcttggagatttcttacctatatgtttatgcacgtgggtcttgagcagctcggatttaatgccttgctccaactgatgattggcgtacctctggaaatggttcacggacttctgagaatcagcttgttataccttgccggagtcctggccgggtccttaactgtgtctattacggacatgcgagcccccgtcgtggggggctccggtggcgtatatgcgctctgctccgcccacttggccaacgtagttatgaactgggccggtatgcgttgcccatataagctgttgagaatggtgctggctttggtttgtatgtcctccgaggtgggacgggctgtctggctcaggtttagccctcccctgccagcatcaggtccacagccttcattcatggcccacctggcaggggcagtggtgggtgtgtcaatgggcttgaccatcttgaggtcatacgaggagcgtctcagagatcagtgtgggtggtgggtcgtactgttagcctacgggacattcctcctgttcgccgtgttctggaatgttttcgcctacgatctactgggcgctcacatccccccaccaccctag

SEQ ID NO: 212583 - DNA, 1122 bp, synthetic construct
  misc_feature 1..1122: note = Description of Artificial Sequence: Synthetic coding sequence
  source 1..1122: mol_type = other DNA
atggtgatggtgagcaaggacctgttcggcaccggcaagctgatcagagcagccgatctgacactcggcccagaagcttgcgaaccgcttgtgagcatggatacagaagatgtcgtccgctttgaagtgggcttgcacgagtgcgggaactcaatgcaggtcaccgacgatgcacttgtgtattcaacattcctgcttcatgaccctcggccagtgggcaatctgtctatcgttaggacaaatagggccgagatacctattgagtgcaggtacccaaggcagggaaatgtatccagccaggcaattcttcccacatggctgcccttccgaaccacggtctttagtgaggagaaactgacattctccctgagactgatggaggaaaactggaatgctgagaaacggagtccaacattccatcttggcgatgcggcacatctccaggctgagattcatactggcagtcatgtgccgcttaggctttttgtggaccactgcgtcgctacccccactcccgaccaaaacgcttctccataccatacaatcgtggattttcacggctgcctcgtagacggtctcacagacgcatcatctgcattcaaggtgccgcgaccaggacctgacaccctgcagttcacggttgacgtctttcatttcgcgaatgatagcagaaatatgatctacataacatgtcatctgaaagttacgctggcagagcaggatccagatgaactgaataaagcctgttcctttagtaaaccttccaactcttggttccccgtcgaggggagtgctgacatctgtcagtgttgtaacaaaggggattgcggcactccctcacatagccgacgccagcctcacgttatgagtcagtggagtcgctccgctagccgcaatagacgccatgtcacggaggaagctgacgtgactgtcggccctttgatcttcctggatcgacgcggagaccatgaagtcgagcaatgggctttaccatccgacacaagtgtcgtcctgctcggcgtagggcttgccgtggtcgtatctctgaccctgactgctgttattctggtcctgacccggaggtgccgtactgccagtcatcccgtgtcagcctcagagtag

SEQ ID NO: 212584 - DNA, 1275 bp, synthetic construct
  misc_feature 1..1275: note = Description of Artificial Sequence: Synthetic coding sequence
  source 1..1275: mol_type = other DNA
atggagctgagctaccggctgttcatctgcctgctgctgtggggctccaccgagttgtgttaccctcaacccctatggctcctgcagggaggcgcttcccaccccgagacctcagtgcagcctgtgctcgtggaatgtcaagaggccacgctcatggttatggtgagcaaggaccttttcggcaccgggaagctcatcagggccgcagacctaaccttagggccagaggcctgtgaacctctagtttctatggataccgaggacgttgtgcgattcgaggtggggctccatgaatgcggcaactccatgcaggtgactgatgatgctctggtgtatagtacttttctgctgcacgacccccgcccagtgggaaatctctccatcgtcaggactaatcgggccgaaatacctatcgagtgccggtatccaagacagggaaacgtatcatcacaggcaatcctccctacctggttaccatttaggactaccgtgtttagcgaggaaaagctcaccttcagtctgaggctcatggaggagaactggaacgccgagaaacggtcacctactttccacctgggcgatgctgctcacctccaggctgaaattcacacaggatctcatgtgcctctgaggctttttgttgaccactgcgtcgccacacctactccagatcaaaatgcttccccttatcacaccattgtggatttccacggatgtttagtggacggcttgacggacgcctctagcgctttcaaagtgcctaggcccggccctgataccctgcagtttactgtggatgtgttccactttgccaacgactcacgcaacatgatatatattacctgtcatcttaaagtgactcttgctgaacaggacccggatgaactcaacaaggcgtgtagtttctccaagccctctaacagttggttccctgttgagggctctgctgatatatgtcagtgctgcaacaagggggactgcgggactccttctcatagtcggcggcagccacacgttatgtcgcagtggtccaggagcgcctcaaggaatcgcagacacgtaaccgaggaggccgacgtcacagtggggcccttgatttttctcgacagaagaggggatcatgaagttgaacagtgggcgctgccgtcggacacttccgtggtgctgctgggggtgggactggccgttgtcgtgtccttgacgctcaccgcagtcattcttgtgctgactcgccgatgtcggactgcaagccatcctgtgtctgcaagcgagtag

SEQ ID NO: 212585 - DNA, 1116 bp, synthetic construct
  misc_feature 1..1116: note = Description of Artificial Sequence: Synthetic coding sequence
  source 1..1116: mol_type = other DNA
atggagctgagctaccggctgttcatctgcctgctgctgtggggcagtaccgagctgtgctacccacagccgctgtggctcttgcaggggggggcctctcacccagaaacatccgtgcagcctgtgctcgtggaatgccaggaggccactctgatggtgatggtgtccaaggatttgttcggcaccgggaagctcattcgtgccgccgacctcaccttagggcccgaggcctgtgagccattggtctctatggataccgaggacgttgtacgatttgaggtcgggctgcatgaatgcgggaatagtatgcaagtgactgatgacgctctggtgtatagtacttttctgctccacgacccacggccggtaggcaatttgagcatagtcaggacgaaccgggccgagataccgatcgagtgtagatacccacgacagggtaacgtgtctagccaggccatcctccctacatggctgccattccggacaaccgtgttctctgaagagaagctgacattcagtctcaggttgatggaagagaattggaatgccgagaagcgcagtccaacctttcacctgggggatgctgcccacctgcaggccgagatacacacaggctcacacgtgcccttgagactcttcgtggaccactgtgtggccacccccactcctgaccagaatgcctctccgtatcatactatcgtggatttccacggatgcctggtggacgggttaaccgatgcgagtagtgctttcaaggtgcctagacctggccccgacacactccaattcacggtagatgtgttccattttgcaaatgatagccggaatatgatttacataacatgccacttgaaggtgacacttgcagagcaggatcccgatgagctaaacaaggcctgttccttctcaaaaccatctaactcttggttcccagttgaaggctcggcagatatctgtcagtgctgcaacaagggagactgcggcacgccgagtcactccaggcggcagccacacgtgatgagccagtggtccaggtctgcatcgaggaaccgcagacacgtaactgaagaggccgatgtcacagttgggaccgacctgccgggacaggagggatag

SEQ ID NO: 212586 - DNA, 1623 bp, synthetic construct
  misc_feature 1..1623: note = Description of Artificial Sequence: Synthetic coding sequence
  source 1..1623: mol_type = other DNA
atgtggctgctgcggtgcgtgctgctgtgcgtgagcctgagcctggcggtcagcggacagcacaaaccggaggcccccgattattccagtgtgctgcactgcggcccttggagctttcagtttgctgtgaacctcaaccaggaggccactagtcctcctgtactcattgcctgggacaatcagggactattgcacgagctgcaaaacgattccgactgcggtacctggatcaggaagggccctggcagctctgttgttctggaggcaacttattcttcatgctatgttactgaatgggacagccactatatcatgcctgtgggcgtcgagggcgctggagccgcagagcacaaggtggtaaccgagcgcaagctcctgaagtgcccaatggatctactagcccgcgacgcaccggacacggactggtgtgattcgattcccgctcgcgataggctaccatgtgccccatctcccatctctaggggcgactgcgagggccttggttgctgttatagctccgaggaagtgaattcctgttattatggcaacacggtaacgctgcattgcaccagagagggacatttctctatcgctgtctcgagaaatgtcacaagccctcccctcttgctggacagcgttcgacttgctctccggaatgactctgcttgcaacccagtgatggcgacgcaggctttcgttctcttccaatttcctttcactagctgcggcacaacccgccagattaccggagacagagctgtttacgaaaacgagctggtggccactcgagacgtcaaaaatggttcacggggtagtgtcacccgcgactccatattcagactgcatgtgagttgttcctattccgtaagcagcaattctttgccgatcaatgttcaggtgtttaccctgcctccaccattcccagaaacacagcccggaccactaactctcgaacttcagattgccaaagacaaaaattacggctcatactatggggtaggggattaccccgttgtgaagttgctgcgggatccgatttacgtggaggtctctatcctccataggactgacccctacttgggcttgttgctacagcagtgctgggctactcctagcacagacccactgagtcagccacagtggccaatactggtgaagggatgtccttacattggcgataactatcaaacacagttaataccggttcagaaagcccttgatctcccattcccctcccatcaccagcgcttctctatatttactttctcttttgtcaatccaaccgtcgaaaaacaagccctgcgtgggccggttcaccttcattgctccgtttcagtttgccagccagccgaaacacccagctgtgtagtcacatgccctgacctttcaaggagacggaattttgacaatagtagtcaaaatactactgcatcagtctcctcgaaggggcccatgatcttgctccaggctactaaggatcctccagaaaagctgagagtccctgtggattctaaggtgttatgggttgcaggcctgagcggcacccttatccttggggctttgctcgtgtcgtatttggctgtaaagaagcaaaaaagttgtcctgaccaaatgtgccagtag

SEQ ID NO: 212587 - DNA, 2340 bp, synthetic construct
  misc_feature 1..2340: note = Description of Artificial Sequence: Synthetic coding sequence
  source 1..2340: mol_type = other DNA
atggccagcttcgtgaccgaggtgctggcccacagcggccggctggagaaggaggacttgggtacaagaatcagcaggctgaccaggagggtggaggaaatcaagggggaggtctgtaacatgatctccaagaaatactccgagtttttacccagtatgcaatcggcccagggactgattactcaagtagacaagctgagcgaggatattgacctgctgaagtcaaggatcgaatcagaggtgcgaagagatctccacgttagcaccggggagtttaccgatttaaagcagcagctggaacgcgactcggtcgtcctaagcctgctcaagcagttacaggagtttagcactgcaatcgaggaatacaattgtgcactgaccgaaaagaaatacgtgactggggctcaaagattagaggaggcccagaaatgtttgaagctgttgaaatctcgaaagtgttttgacctcaaaatcctgaaaagtttatcaatggagcttaccatacagaagcagaacatcctttaccatctcggtgaagagtggcagaaattgattgtttggaaatttcctccatcgaaggacacgagttcactggagtcctacctgcagacagagctccatctgtacactgaacagtcacacaaggaggaaaaaaccccaatgcctccgattagttctgttttactggcctttagcgtgctcggagagctgcactcaaaactgaagagcttcggccagatgcttctaaagtacatactgcggcccctggccagttgtcccagtctgcacgctgtcattgagtcacagcctaatatcgtgatcattcgtttcgaaagtatcatgaccaatctggaatatccatccccgagcgaggtgtttactaagatccggctggtcctggaggtgttacagaaacaattgctggatctgccattagatactgacttagagaatgagaaaacttcaaccgtgcctctggctgaaatgctgggcgacatgatctgggaggatctgtcggaatgcctgattaaaaactgcctcgtctacagcattccaaccaatagcagcaaactgcagcagtacgaagagatcattcagtccacagaggagttcgagaatgcgctgaaggaaatgaggttcctgaaaggggatactaccgatctgctgaaatacgctcgcaatattaacagccatttcgccaacaaaaagtgtcaggatgtgatcgtcgctgctaggaacctgatgactagtgaaatccacaacactgtgaagatcattcccgatagtaagatcaatgtgccagagctgcctactcccgatgaggataataagcttgaagtccagaaagtgagcaacactcagtaccatgaagtaatgaacctggagccagagaatactttggaccaacattctttttcccttcccacatgcaggatctccgagtctgttaagaaacttatggagctggcttaccaaaccctactcgaagcaaccacttcttccgaccagtgcgcggttcagctgttttacagcgtgcgaaatatcttccatctgtttcacgacgtggttccaacttatcacaaagagaatctgcaaaaactacctcagctcgctgccatccatcataataactgtatgtatattgcccaccatctccttacgttgggccaccagtttcgactgcggctagcacctatcttgtgcgacggaaccgccacgttcgttgatctggttcctgggttcagacgcctggggactgaatgtttcctggcccagatgagagctcagaaaggcgaactgctagagcgcctgtcaagcgcgcggaatttctcaaacatggacgatgaggagaattactcagctgctagcaaagcggttcgacaagtgctgcaccagctcaagcgtctgggcattgtgtggcaggatgtgttgcctgtaaatatatactgtaaagccatgggcactctccttaacacagccatttccgaagttatcggcaaaatcacggcactcgaggacatatcgaccgaggacggcgatcgactgtattctctgtgcaaaaccgttatggacgaaggacctcaagtatttgctcccctgagcgaggagtcaaaaaacaagaagtatcaggaggaggttcccgtatatgtacccaaatggatgccctttaaggagcttatgatgatgctgcaagcctctctgcaggagattggtgataggtgggccgacggcaagggacccctcgccgccgcattcagctcctccgaagtaaaggctctgatccgggcactcttccagaatacagagcgcagggctgcagcactggcaaagattaaatag

SEQ ID NO: 212588 - DNA, 2019 bp, synthetic construct
  misc_feature 1..2019: note = Description of Artificial Sequence: Synthetic coding sequence
  source 1..2019: mol_type = other DNA
atggccagcttcgtgaccgaggtgctggcccacagcggccggctggaaaaggaggatctcggcaccagaattagccgattgacacgcagggtggaggagattaaaggcgaagtctgtaacatgatctctaagaaatactctgaattcctgccctccatgcagtccgcccagggattaatcacacaggtagacaagctgtcagaggacattgatctcttaaaatcccgcatcgaatctgaagtgcggagagatttgcacgtgtccacgggagagttcaccgatttgaaacagcagctcgagcgcgatagtgtggtgcttagcttactgaagcagctgcaggagtttagtacagccatcgaggagtataattgcgccctgactgagaaaaagtatgtgactggggctcaacggttagaggaagcccagaaatgcctcaaattgctgaagtctcgaaagtgttttgatcttaaaatcctgaagtctcttagcatggaactcactatccagaaacagaatatcctatatcatttaggcgaggagtggcagaagctgatcgtgtggaagtttccccctagcaaagatactagtagcctcgagtcttatctgcagaccgaactccacctctataccgaacaatctcataaggaggaaaaaaccccgatgccccctatttcgtcagtgttgctggcattcagcgttttgggcgaactgcactccaaactgaagagcttcggtcagatgctcctaaaatacatccttcggcctttggccagctgcccatcactgcacgccgtcatcgaatcgcaaccaaacatcgtgattattaggtttgaatcaatcatgacaaacttagaatatccgtctccttccgaagtctttacgaaaattcggctggtcctggaagtactgcaaaagcagctgctcgacttacctctggatactgatttagagaatgagaagacaagtactgtgcctctggcggaaatgctcggtgacatgatctgggaggacctaagtgagtgtctcattaagaattgcctcgtctactctattcccactaattcctccaagttgcaacagtacgaggaaatcattcagtctactgaggagttcgaaaatgccttgaaggaaatgagattccttaaaggagacacaaccgacctgctcaaatacgcgcgaaatattaattcgcactttgctaataagaaatgtcaggacgtcattgtggctgcacggaacctgatgaccagtgaaatccacaatactgtgaagataattcccgattccaagattaatgtgcctgagttgcccaccccggatgaggacaacaaactggaggtacaaaaggtgtcgaacactcaatatcatgaggtgatgaaccttgaaccggaaaacaccctcgaccaacatagctttagtctgcccacctgcagaatctcagagtcagtaaagaagttaatggagctagcctaccagactctgctggaggcaaccacatcatccgaccaatgcgccgtccagctgttctattctgtgaggaatattttccatctctttcatgacgtggtgccgacataccacaaagaaaatctccagaaattgccccaactcgccgccatccatcacaacaattgcatgtatattgcccatcatctgctgaccctgggccaccaattcaggctacggttggcgcctattctttgtgatggcaccgccaccttcgtggacctcgtgcctggatttagaagactgggcaccgaatgcttcctcgcccagatgcgggcacaaaagggcgagctgctggaaagactttcatctgctagaaacttttcaaacatggacgatgaggaaaactactcggcagccagtaaggccgtgcggcaggtactccatcaacttaaaagattaggcatagtctggcaggacgttctgccagtgaatatctactgtaaggctatgggcacactcctgaacaccgcaatctctgaggtgattggcaagataaccgcactggaatag

SEQ ID NO: 212589 - DNA, 1776 bp, synthetic construct
  misc_feature 1..1776: note = Description of Artificial Sequence: Synthetic coding sequence
  source 1..1776: mol_type = other DNA
atgtgggagcggctgaactgcgccgccgaggacttctacagccggcttttgcagaagtttaatgaagagaaaaagggcattcgtaaagatccgtttctgtacgaggcagacgttcaagtgcagcttatctcaaaggggcagcctaatcctctgaaaaatatcttgaatgaaaacgacattgtctttattgtagagaaggtcccattagaaaaagaggaaacctctcacattgaagaactgcaaagcgaagagactgctattagcgattttagcactggagagaacgtgggccctctggctcttcccgtaggtaaagcacggcagcttatcgggctgtacacaatggcacataatcctaatatgacacacctcaagatcaaccttcctgtaactgcgcttccaccgctgtgggttcggtgtgattcctcagatccggagggtacttgctggctgggcgcggagctaatcactactaacaactctataactggcattgttctttatgtcgtctcttgtaaggctgataaaaattacagcgttaatctcgaaaatttgaagaacctacacaaaaagcggcaccatctgagtaccgttactagtaaaggctttgctcagtatgaactcttcaagtcctccgcgctcgatgatacgatcacagcctcacaaaccgccattgccctagatataagttggtcgcccgttgacgagattctgcagatcccgccactctctagcaccgcaactctaaacataaaggttgagtcaggggagccacggggacccctaaaccacctgtacagagaacttaagtttctcctcgtactggctgatggtctcagaactggggtcacagaatggcttgaacctctggaggctaagtctgcagtggaacttgttcaggaattcctgaatgatctgaacaagttggacggtttcggagactctacaaaaaaagacacagaggttgaaacccttaaacatgatacagcagctgttgatagatcagtgaagagactattcaaggtgcgttctgacctcgacttcgccgaacagctctggtgtaaaatgtcaagcagcgttatatcttaccaggacttagtcaagtgttttaccctgatcatccaaagtctgcaaagaggagatatccagccgtggttgcactcaggttctaacagtttgctgtcaaaactcatccaccaatcataccacgggaccatggatacagtgtcactgtcaggcaccatccccgtccaaatgctactggagatcggcctggataaacttaagaaagattatatatcattctttatcggacaggagcttgcctcccttaaccaccttgaatacttcatagcaccttctgtagatattcaggaacaggtctatcgagtgcagaagctgcaccatatccttgaaattctggtgagttgtatgccgtttattaaatctcaacacgaactgctgttttcactgactcagatttgcataaaatactacaaacagaaccccctcgatgaacagcatatcttccagctacccgtccgccccacagccgtgaagaacctataccagtcggaaaagcctcaaaaatggagggtcgagatttatagcggtcaaaagaagatcaagaccgtttggcagctgagcgatagtagccctattgaccacctcaatttccataaacccgatttctcagagctcaccttgaatgggtccttggaggaacgtattttctttaccaacatggtgacttgttctcaggtgcactttaagtag

SEQ ID NO: 212590 - DNA, 1434 bp, synthetic construct
  misc_feature 1..1434: note = Description of Artificial Sequence: Synthetic coding sequence
  source 1..1434: mol_type = other DNA
atggcccacaaccccaacatgacccacctgaagatcaacctgcccgtcacagccctcccgcctttatgggtgcgttgcgactcgtcagacccggaggggacatgctggctgggagctgagctgatcaccacaaacaactccatcacagggattgtgctgtacgtggtgagctgtaaagctgacaagaattattccgtcaatctagaaaatctcaaaaatctgcataagaagaggcaccacttatccaccgtaacaagcaaaggctttgcccagtacgagctgtttaagagctccgccctggacgacacaatcacggcctcacagacagcaatcgccctggacatcagttggtcccccgtcgacgaaatactccagattccccctctgtcctctaccgcaacgctgaacatcaaggtagagtccggggaaccgagaggacctctcaatcacctttacagagagctcaaattccttctggtgctagcagatggcctcagaaccggtgttacagaatggcttgaacccttagaggccaagagcgcagtagagctggtgcaggagtttttgaacgatctgaataaactggatgggtttggagattctaccaagaaagatactgaagttgagacactcaagcacgatacggccgcagtggatcggagtgttaagcggctctttaaagtgagaagcgatctggactttgctgaacagctgtggtgcaaaatgtcatcctctgtcattagttatcaggatctggtgaaatgcttcacgctcatcatccagtccctccagcgcggcgacatacaaccctggctacattctggctccaactctttactctctaaactaatccaccagtcttaccacgggaccatggacactgtcagcctcagcgggactatcccagtccagatgcttcttgagattggattggataaactgaagaaggattacatcagcttctttataggacaagagctggcttccctaaaccacctggaatattttatcgccccttccgtggacattcaggagcaggtataccgcgtccagaaactgcatcacatcctggagattctcgtgtcttgtatgcccttcattaaatcccaacacgaactgctcttttctttaacccagatttgcatcaaatactataaacaaaatcctctagatgaacagcatatcttccagctcccggtgagaccgaccgccgtcaagaatctttatcagtctgagaaaccacaaaaatggcgggtggagatctactctggccagaagaaaatcaaaacagtgtggcagttatcggattcatcacctatagaccacctcaacttccacaagcctgatttttccgagctcactcttaatggatctcttgaagaaagaattttctttactaacatggtgacctgctcgcaggttcactttaaatag

SEQ ID NO: 212591 - DNA, 1434 bp, synthetic construct
  misc_feature 1..1434: note = Description of Artificial Sequence: Synthetic coding sequence
  source 1..1434: mol_type = other DNA
atggcccacaaccccaacatgacccacctgaagatcaacctgcccgtcacggctctaccgccactatgggtccggtgcgactcatccgatcccgaaggcacatgctggctgggagcagagttaatcacaaccaacaattcaattaccggaatcgtgctgtatgtggtaagctgcaaggctgacaaaaactattcagtgaatcttgaaaacttaaagaatctgcataaaaagaggcaccacctgagcacagtgacatcgaagggtttcgctcagtacgaactgtttaaaagtagcgcattggacgacactataaccgcatcccagacggcgatcgcactggacatctcctggtctcccgtggacgagattctgcagatcccacccctgtcttctaccgctaccctgaatatcaaggtggaatctggggaacctcggggaccactgaaccatctgtaccgggaacttaagtttctattggtgctcgctgatggtctccgaacaggcgtcaccgagtggctcgaaccgctggaggccaagtccgcagttgagctggtgcaggagttccttaatgatctgaacaagctcgatgggttcggtgacagcaccaagaaggacacagaagtggaaactttgaaacacgatacagcagctgttgatcgctccgtgaagcggttgttcaaggtacgaagcgacttagactttgccgaacagttgtggtgtaagatgtcttcctctgtcatttcttaccaagatctcgtgaaatgctttacgctgatcattcagagccttcagcgcggggatatccaaccgtggctgcatagtggaagtaactcattactgagcaaacttatccaccagtcttatcatggcacgatggacacggtgagcttatccgggactatccctgttcaaatgcttctggaaatcggactcgataaattaaagaaggactatatctccttttttatcggtcaggagctggcctctctgaatcacctcgagtatttcattgcgccatccgtggacatccaggagcaggtttatcgggtgcagaagctgcatcatatactggagatcctggtgagttgcatgccttttataaaaagccagcatgaactgttgttttctctgacacagatttgcattaaatactacaagcaaaatccactggacgaacaacacatcttccagctgcctgtgaggccaacagcggtcaagaacttgtaccagtcagagaaaccccaaaagtggcgcgttgaaatctacagcgggcagaagaagattaagacagtctggcaacttagcgattccagccccatagaccacctcaatttccacaagcccgactttagcgaactaacactcaacgggtcgctggaagagagaattttctttacaaatatggtgacgtgctcacaggtccatttcaagtag

SEQ ID NO: 212592 - DNA, 1275 bp, synthetic construct
  misc_feature 1..1275: note = Description of Artificial Sequence: Synthetic coding sequence
  source 1..1275: mol_type = other DNA
atggccgccctgggcgacgaggtgctggacggctacgtgttccccgcgtgcccgccttgttcataccgatacccctatcccgcagcaaccaagggcaagggagccgcaggaggttcatggcagcagcggggacgtgggtgtctacctgcttcatccccctgttccgccggggcggccagcctatcatttccagggtgtggtcgattaaccgccgccgaatacttcgacagctaccaaagggaacgcctgatggccctgctggcccaagtgggcccaggactagggcctcgagctcggcgagccggctcctgcgacgttgctgtccaagtatcccctaggattgacgctgccgtgcagtgttccctgggaagaaggaccttacagcgacgagcgagagatccagaatctcctgccggtccaggagccgaaggcacaacgggtggcgggtctttctcacagcagccgtccagacgtgggctcgagcagggttcacctcagaatggtgcccctaggcccatgcgctttccccgcaccgtagcagtttattcacccttagcactccggaggctgaccgcctttctggagggccccggaccagcggctggagagcagcggtccggagctagcgatggtgagcggggcccccctcctgctcgcctccaggggccagaggagggggaagtctggactaagaaagcccctcggaggcctcagagtgacgatgacggggaggcacaggccgctgttagggcttcatgggaacagcctgctgacggaccggaactgcctcctcgggaggcgcaggaaggtgaagccgccccacggagcgctctgcggtctccagggcaacctccctctgcggggcgcgccagagacggtggcgacggtcgggaagctgcagtagccggagagggccccagcccaagaagtccggaactcggaaaggagaggctgcggttccagtttctcgagcaaaaatatggctactaccactgcaaagattgcaatatcagatgggaatccgcctacgtctggtgtgtccaggggacaaacaaggtctacttcaagcagttttgccggacctgtcagaagtcatacaacccttaccgtgtggaggatatcacctgccaaagttgcaaacagactaggtgtagttgccctgtgaagctgagacatgtggacccaaagcgccctcacaggcaggatctgtgtggtaggtgcaaaggtaagcggttatcttgcgattccaccttctcattcaagtacatcatctag

SEQ ID NO: 212593 - DNA, 1719 bp, synthetic construct
  misc_feature 1..1719: note = Description of Artificial Sequence: Synthetic coding sequence
  source 1..1719: mol_type = other DNA
atggccgccccccggcccagccccgccatcagcgtgagcgtgagcgcaccagccttttatgctccacaaaagaaatttggaccagtggtagctccgaaaccaaaggtcaatccttttcgtccaggcgattctgagccccctcccgcccctggagctcaacgagctcaaatgggcagagtgggcgaaataccccctcctccgcccgaagactttcccttaccacccccccccctggcaggagacggtgatgacgcagagggcgcactgggcggggcgttccccccacctcctccacctatcgaggaatccttcccacctgctccattggaggaggaaatattccctagtcctccaccgccacctgaggaggagggaggcccagaagctcctatacccccacctccccagccacgcgagaaggtttcttctatcgacctggaaatagactctttgagctctttgctcgatgatatgactaaaaatgaccccttcaaagccagggtcagcagcggctacgtccccccacccgtcgctacaccattctcttctaagtctagtacaaagcctgccgcgggggggactgcccccttgccaccctggaagtccccaagctcatctcaaccattgcctcaggtccctgctcccgcccagagccagacgcagtttcatgttcagccacaacctcaacccaaaccccaagtccagctgcatgtccagagccagacgcaacctgtgtctctggctaacacacagccacgaggtccacctgccagtagccctgcccccgcccccaagttctctcccgtgactccaaagtttacgccggtggcatcaaagttctcaccaggcgctcctggcggctctggcagccagcccaaccagaagttgggacatcccgaggcactgtccgctggaacgggctccccccagccaccctccttcacatacgctcagcaacgtgaaaaaccccgggtgcaggaaaaacagcatccagtgcctcctcctgcccagaaccagaaccaggtgcgcagtccaggtgcccccggtcccctaaccctgaaggaggtagaggaactggaacagctaacccagcaattaatgcaggacatggagcatccacagagacagaacgtggccgtgaacgagctttgtgggcgctgtcaccagccgctcgcccgggctcagccagcggtgcgggcactcggccaactgttccacattgcctgcttcacatgtcaccagtgcgcccagcagctccaaggacagcagttttattctctcgagggcgctccctattgtgaaggctgttacaccgatacccttgagaaatgtaatacttgtggggaaccaatcacagaccggatgctgcgggcaaccggtaaggcttatcatccccactgtttcacctgcgtagtgtgcgcccgcccactggaagggacgagctttatcgtggaccaggctaacaggccccactgtgtcccagattatcataaacagtacgctccacgttgcagtgtctgtagcgaacccattatgccggaacctgggcgggacgaaaccgtgagagtcgtcgcattggataagaactttcatatgaagtgctacaaatgtgaagactgtggcaagccgctgtcaattgaggcggacgacaatggttgctttccgctggacggacacgtcctatgtcggaaatgccacactgcacgggcccagacgtag

SEQ ID NO: 212594 - DNA, 1623 bp, synthetic construct
  misc_feature 1..1623: note = Description of Artificial Sequence: Synthetic coding sequence
  source 1..1623: mol_type = other DNA
gccgccccccggcccagccccgccatcagcgtgagcgtgagcgccccagcgttttacgcaccacagaagaagtttggaccggttgtggctcctaagccaaaagtgaatcccttcagacccggtgacagcgaaccaccccccgcaccgggagctcagcgggcccagatggggcgggtcggagagattccacctccaccacccgaagacttccctttaccccctcctccgctggctggcgacggcgacgatgccgagggagccctgggcggggccttcccccccccacctccacccattgaagaaagtttcccccccgcacccctggaagaagagattttcccaagtccacctcccccacccgaggaggagggaggacccgaggccccaattcctcctcccccgcaagtttcaagcggttacgtacctccacccgtcgccaccccattctcgtcgaaatcgtctacgaagcccgccgctggcgggaccgcccccctgccgccgtggaagtctccctcctcatcacagcctctgccccaggtccctgctcctgcccagtcccagacgcagtttcacgtgcagccccaacctcaaccaaagccgcaagtccagctccacgttcaaagtcagactcagcccgtatccctcgccaacacgcagccccgtggtccaccagcctctagtccagctcctgcacccaagttctcccccgttactccgaagtttacccctgttgccagcaaatttagccctggggcccccgggggcagcgggagccaaccgaatcagaaattgggccaccccgaagcgctaagcgccggaaccggctcaccccagcctccctctttcacctacgcccagcagcgggagaagccacgggtacaggaaaaacagcatcctgtgcccccacccgcccagaaccagaatcaagttcgtagccctggagcaccagggcctctaaccttgaaggaggtcgaggaactggaacagctcacacagcagttgatgcaggatatggagcaccctcagcggcagaatgtagcagtgaacgagctgtgcggtcgttgtcatcagcccctggctcgcgcacagcctgcagtgcgagccctgggacaacttttccacatcgcatgctttacatgtcatcagtgcgcgcagcagctgcaaggtcagcagttttacagcctcgaaggcgccccatattgtgagggctgctacaccgacacgctggaaaaatgtaacacatgcggggagcctataacagaccgcatgctgagggcaacaggtaaggcttaccatcctcattgctttacgtgcgttgtgtgcgcccggcccctggaagggacaagctttatcgtggaccaggccaaccggccccactgtgtacctgattatcacaagcagtatgccccacggtgcagtgtctgcagtgaacctataatgccggagccaggtcgagacgagaccgttagggtggtcgccctggacaagaatttccatatgaagtgctataaatgcgaagattgtggaaagcccttatcaatagaggcagacgataacggctgcttccccctcgacgggcacgtcttgtgtcgcaaatgccacactgccagggcgcagacatag

SEQ ID NO: 212595 - DNA, 1248 bp, synthetic construct
  misc_feature 1..1248: note = Description of Artificial Sequence: Synthetic coding sequence
  source 1..1248: mol_type = other DNA
atgaccaagaacgaccccttcaaggcccgggtgagcagcggctacgtccctccaccagtggcgacaccgttcagcagcaaatcaagtaccaagccggcagccggcggaactgccccgttaccaccctggaagagccccagtagctcgcagccactgccccaggttcccgcaccggcacagtcacaaacacagttccatgtgcaaccacagccacagcccaagccgcaggttcagttgcatgtgcagtcccagacacagccggtctctctggctaacacccagccaagaggccctccagcgtcgagcccagcacctgctcctaagttttcaccagttactccaaagtttacccccgtcgcctccaagttcagccccggagctcctgggggcagtggtagtcagcccaatcaaaaactgggtcatcctgaagcactgtccgccgggacgggtagtccccagcccccctccttcacctatgcccagcaacgggaaaagcctcgcgtacaggaaaaacagcatcctgtgcccccacctgcccaaaaccaaaaccaggtccgatcaccaggcgcccccggcccccttaccttgaaggaagttgaagaactggaacagctgacccagcagttgatgcaagacatggagcacccccagagacaaaacgtggccgtgaacgagctgtgtgggcgttgccatcagccactggctcgggcacagccagccgttcgtgctttgggacagttattccatatagcctgcttcacctgtcatcagtgcgcccagcagctccaaggtcagcagttctacagcctcgagggggctccatactgcgaagggtgttacactgacacactggaaaaatgcaatacatgcggcgagcctattactgaccgcatgctccgggcgactgggaaagcctatcatccccattgttttacttgtgttgtttgtgcacgtcccctggaggggacaagcttcatcgtcgatcaagccaatagaccacattgcgtccctgattatcacaagcagtacgccccccgctgctctgtttgcagcgagccaatcatgcctgaaccgggcagggatgagacagttagagtagtggcgttggacaaaaacttccatatgaagtgctataaatgtgaagattgtggtaagccactttcaattgaggccgatgacaacggctgcttccccctggatgggcatgtcctgtgccgtaaatgtcacactgccagggcccagacatag

SEQ ID NO: 212596 - DNA, 1458 bp, synthetic construct
  misc_feature 1..1458: note = Description of Artificial Sequence: Synthetic coding sequence
  source 1..1458: mol_type = other DNA
atgggccgggtgggcgagatccccccccccccccccgaggacttcccactcccgcccccccccttagccggcgacggagacgatgctgaaggcgctttgggtggcgcattcccccctcctccaccgcctattgaagagtcatttccaccggctcctttggaggaagagatcttcccaagcccccctcctccacccgaggaagagggggggccagaagcacccatcccacccccaccgcaggtcagttcaggatacgtaccaccaccagtggctacgcccttcagttctaagtcatctaccaaaccagcagctggcggcacagctccactccccccctggaagtctccttccagtagtcagccgctgccacaggtgccagccccggcccaatcccaaacccagttccatgttcagccccagccgcaacctaagcctcaggtccaactacacgtgcagtcacaaacccagccagtgtccttggccaacactcagcctcgtggccctcctgcatcttctcccgccccggctccgaagtttagcccggtgacgcccaaatttactcctgtggcctccaagttcagccccggggcaccggggggttccggaagtcagccaaaccagaagcttggtcatcctgaggccctttcagcgggcaccggctccccacagcctcctagttttacctacgcccaacagcgcgagaaacccagggtgcaggaaaagcagcacccagtgccgccacctgcccagaatcagaatcaggtgcgttcgcctggtgccccaggccctttaacattgaaggaggttgaagaactggagcagctcacccagcaactgatgcaggacatggagcacccacagcggcagaacgttgcagtgaacgagctgtgtggtcggtgccatcagccactggctagagcacaacctgccgtgcgcgccctgggccagttgttccacatagcctgttttacatgtcatcagtgcgcccagcagcttcaaggtcagcaattctactcgctcgaaggcgcgccctattgtgagggatgttacactgataccttggagaagtgcaatacttgtggcgaaccaatcacagatcgaatgctacgggccacaggaaaggcttaccatcctcactgtttcacatgtgtcgtgtgcgccagaccactggaaggcacatctttcatcgtcgaccaggcgaacaggccgcactgcgtccccgattatcacaaacaatatgcaccgagatgttcagtctgctccgagcctattatgccagagccaggaagagacgaaaccgtaagagtggtcgccttggataagaatttccacatgaagtgttacaagtgtgaggattgtggcaagcctctgtctattgaggctgatgacaacggatgctttcccttggacgggcatgttctctgccgtaaatgccacacagcccgggctcaaacatag

SEQ ID NO: 212597 - DNA, 495 bp, synthetic construct
  misc_feature 1..495: note = Description of Artificial Sequence: Synthetic coding sequence
  source 1..495: mol_type = other DNA
atggccgccccccggcccagccccgccatcagcgtgagcgtgagcgcccctgcgttctatgccccccagaagaaatttggtcctgttgtggcccccaagcctaaagttaatccatttcgccctggggattccgaacctccgccggcgcccggagcacagcgggcgcaaatgggaagggtgggagaaatacccccccctcccccagaggacttccctctgccccccccaccacttgcaggggatggagatgatgctgagggtgcactaggcggggccttccctcctcctccccccccaattgaggagagcttcccccccgcccctctggaagaagaaatctttccctcaccccctcccccgcctgaggaggaaggcggccccgaagcacccattcctcccccccctcagcctagagagaaggtgtcgagcattgaccttgagatcgacagcctgagctccttactcgatgatatgactaagaacgatcctttttag

SEQ ID NO: 212598 - DNA, 852 bp, synthetic construct
  misc_feature 1..852: note = Description of Artificial Sequence: Synthetic coding sequence
  source 1..852: mol_type = other DNA
atggatctgtggcccggtgcgtggatgttgctattactcctgttcttacttctattattcctgctgcccacgctgtggttttgctcgcctagcgccaagtacttttttaaaatggctttctacaacggatggatcctatttctagcagtactggccattcctgtttgtgccgtccggggacgcaacgtagaaaatatgaaaattctgcgcctgatgctgctccacatcaaatacctgtacggtattagggtagaagtccggggagctcatcattttccgccatcccagccctatgtggtcgtgagtaatcaccagtcatccctggatttgctcggtatgatggaggtgttgccaggcagatgtgtgcccattgccaagagagagctgttgtgggcgggtagcgctgggcttgcatgctggttggcaggcgtgatttttatagataggaagagaacaggggatgctattagcgttatgagcgaggtggcccagaccctgttgactcaggacgtgcgcgtctgggtgtttcctgaaggaacacgtaaccataacggcagcatgcttccgttcaagagaggcgctttccacctcgccgtgcaagcacaggtgccaatagtcccaatagttatgtcctcataccaggatttttactgtaaaaaggaacgcagattcacttccggtcagtgtcaggtgagggtgctcccgccagtgcctactgaggggctgacacctgacgacgtccccgcactggccgatagagttagacactcaatgcttactgtgttccgggaaataagtacggacgggcgaggaggtggagactacttgaaaaagcctggcggtggaggctag

SEQ ID NO: 212599 - DNA, 852 bp, synthetic construct
  misc_feature 1..852: note = Description of Artificial Sequence: Synthetic coding sequence
  source 1..852: mol_type = other DNA
atggatctgtggcccggtgcgtggatgctgctcttactgttatttctgctgctgctgtttcttcttcccaccttatggttctgctccccgagcgctaaatattttttcaagatggccttctataatggatggatattgttcctggcagtgctcgctattcccgtttgtgcagtgagaggcagaaatgtcgagaatatgaagattctccggcttatgctgctgcacattaaatatctatacggaataagggttgaggtgagaggggcacaccactttcccccatcacagccttatgtcgtcgttagtaaccaccagtcgtccctggacttactgggaatgatggaggtcctgccaggacgctgtgtgcccatagccaaaagggaactgctctgggccggatccgctggcctggcttgttggcttgccggagtgatcttcatcgaccggaaacggacaggtgatgccatcagcgtcatgtctgaggttgctcagaccctgctgacacaggatgtccgagtgtgggttttccccgaagggacacgaaatcataatggcagcatgcttccctttaaacgtggggcatttcaccttgccgtccaggcccaagttcccattgttcctattgttatgagcagttaccaagatttctattgcaagaaagagaggcgattcacctctggtcagtgccaggtcagagtcctgccaccggttccaacagagggactgacgcctgacgatgttccagccctcgccgacagagtgaggcatagcatgctgactgtctttagagaaatttcaaccgatgggagagggggaggcgactatctgaagaagccgggaggaggtggctag

SEQ ID NO: 212600 - DNA, 852 bp, synthetic construct
  misc_feature 1..852: note = Description of Artificial Sequence: Synthetic coding sequence
  source 1..852: mol_type = other DNA
atggacttgtggcctggagcatggatgcttttactgcttctctttctgcttcttctattcctgctccccaccctgtggttctgctcccccagcgctaaatacttctttaaaatggctttttataacgggtggatccttttcctcgctgttttggccataccagtctgcgccgtgagagggaggaatgtagaaaatatgaagatacttaggttgatgttgttacatatcaagtatctgtatggcatccgtgtcgaagtacgaggcgcacatcatttcccaccctcacagccctacgtcgttgtttccaaccatcagagtagcctagatctgctcggtatgatggaggtgctcccgggtcggtgtgtacctattgccaagcgggagctcttatgggcaggaagcgccggtctggcatgctggctagcaggtgtgatcttcattgacagaaaacgtacaggcgatgcaatatccgtcatgtcagaggtcgcccagaccctgctcacacaagatgtaagggtatgggtgtttcccgagggcacgcgcaaccataacggaagcatgctcccttttaaaaggggcgctttccacctagcggtccaggcccaggtccccatagtgcccatcgtcatgagttcctaccaggatttttactgcaagaaagagcgcagatttacctccggccagtgtcaggtccgagtgctcccacctgtgcctacagaaggactgacccccgacgatgtacctgcgttggccgatcgagtgcggcattcaatgctcaccgtcttccgagagatctcaactgacggacggggtggaggcgattacctgaaaaaacctggtggtggcggatag

SEQ ID NO: 212601 - DNA, 852 bp, synthetic construct
  misc_feature 1..852: note = Description of Artificial Sequence: Synthetic coding sequence
  source 1..852: mol_type = other DNA
atggatctttggcctggcgcttggatgttgcttctgctcttgtttctgctgctgctgtttctattgccgaccctgtggttctgcagccccagcgctaagtatttttttaaaatggccttctataatggatggatactctttttagcagttctggccatccccgtgtgtgctgtccggggtaggaacgtggagaatatgaaaattctccgccttatgttgttacatattaagtatctctacggcatccgggtagaagtacggggagcacaccacttcccaccaagtcagccttatgtggttgtctcaaaccaccagtcatccctcgatctgctgggaatgatggaggttctgcctggtagatgcgtgcctattgcgaagagagagctgttgtgggcagggagtgccggtcttgcctgctggctagcaggagtcatatttattgataggaagcgtacgggtgacgcaatctctgttatgtcggaagttgctcagaccctgctgacccaggatgtgagggtgtgggtgttccccgagggcacaagaaatcacaacggcagcatgctcccattcaaaaggggagcattccatcttgctgttcaggctcaagttcccatcgttcccatcgtgatgagcagctaccaagacttctactgtaaaaaggagaggaggttcacgtcgggacagtgccaggttagagtgctgcctccagtgccaacggaggggctgacacccgacgatgtgcctgcgcttgccgaccgagtgcgccattctatgctgaccgtctttcgagagatatctaccgatggccgaggcggtggcgactacctgaaaaaaccagggggtgggggttag

SEQ ID NO: 212602 - DNA, 852 bp, synthetic construct
  misc_feature 1..852: note = Description of Artificial Sequence: Synthetic coding sequence
  source 1..852: mol_type = other DNA
atggatttgtggcctggcgcatggatgctgctactcctcctatttctgctgctgctgtttctcctgccgactctctggttttgttctccctctgccaaatacttcttcaagatggccttctacaatgggtggattctgttcctggcggtcctggccataccggtgtgcgccgttagaggccgtaacgtcgagaatatgaagattttgcgcctgatgctactgcacattaaatatttgtacggaattcgagtagaggtgcgcggagctcatcacttcccccctagccagccgtacgtagtggttagcaatcatcagtccagcctcgatctgctggggatgatggaagtactgcccggtcggtgcgtaccgatagcgaagcgcgaactgttatgggcgggaagcgcgggtttggcctgctggctggcgggagtgatctttattgatcgcaagagaactggcgacgcaatatcggtcatgagcgaggtcgctcaaaccctgttaacccaggatgtgagagtgtgggtattcccggaaggaacaaggaatcataacggctccatgctgccttttaaacggggagccttccacttagctgtgcaggcccaggttccaattgtgcctatcgtgatgtcgtcctaccaagacttttactgcaaaaaagaaaggcgatttacttccgggcagtgccaggtccgcgtgttgcctcccgtgcccacggagggattaacccccgacgacgtgcccgctcttgccgacagggtgaggcactctatgctcacagtgttcagagaaatttcaacggatggacgcggaggcggagattacctgaaaaaacccggagggggtggctag

SEQ ID NO: 212603 - DNA, 852 bp, synthetic construct
  misc_feature 1..852: note = Description of Artificial Sequence: Synthetic coding sequence
  source 1..852: mol_type = other DNA
atggacctatggccaggtgcctggatgttacttcttcttttattcctgcttttgctgtttctgttgccaaccctttggttttgcagcccctccgcaaagtacttctttaaaatggctttttacaacgggtggattctgttcttggcagtgctggcaataccggtgtgcgccgtcagagggaggaacgtggagaacatgaaaatattgcgtctgatgttgcttcacatcaagtatctgtatggtatccgcgtcgaagtgcgcggagcccatcattttcccccatcccagccttacgtagtggtatcgaaccaccagtcaagcttagacttgctcggtatgatggaagttctgcccggacgatgtgtccccatagccaagcgcgaactcctgtgggctggctcagcgggtttagcttgctggctagccggagttatcttcatagataggaaacggaccggggacgccattagcgtaatgagcgaggtggcccagaccctgttaactcaagacgtgcgagtttgggtatttcctgagggcacacgtaatcacaatggttcaatgctgcctttcaaacgtggcgctttccatctggctgtgcaggctcaggtgccaatcgtccccattgtgatgtcctcttatcaggacttctactgcaagaaagaacgcagatttacgtccggccagtgtcaggtgcgggttctgccgccagtccctactgaaggcttaacgccagatgatgttccagcccttgcagatcgcgtacgacattctatgctgacagtgtttagggaaattagtacagacgggagaggcggaggcgattatttaaagaaacccggaggaggaggttag

SEQ ID NO: 212604 - DNA, 852 bp, synthetic construct
  misc_feature 1..852: note = Description of Artificial Sequence: Synthetic coding sequence
  source 1..852: mol_type = other DNA
atggacctatggccgggtgcttggatgctcctgctattgctgttccttctgttactatttctgctacccactctatggttttgttccccctccgcaaagtatttttttaaaatggccttttacaacggatggatactgtttctcgctgttctcgccattccagtgtgtgcagtccggggacgaaatgttgagaatatgaagattctgcgactgatgctccttcacataaagtacttgtatgggatcagagttgaagtcagaggtgctcaccatttccccccaagccagccgtacgtggtcgtgagtaatcatcagtcatccctggacctgctgggaatgatggaggtgctgcccggaagatgtgtgcctatagcaaaacgggaacttctttgggcaggttctgctggactggcttgctggctcgccggtgtcatattcatcgatcggaagagaaccggtgacgcgatcagtgttatgtccgaggtcgcgcagactctgttaacacaggatgttagagtgtgggtgttcccagaaggaacgcgaaaccataatgggtctatgctgccatttaagcgtggcgcatttcatcttgcagtccaggcccaggtacctatcgtgcccatagtgatgagtagctaccaggatttttactgcaagaaagagcgacgattcacgtcgggtcagtgccaggtgcgggtactccctcctgtccccactgagggccttacacctgacgatgtgcctgcgctggccgaccgcgtccgccattcaatgctgacggtgttcagagagattagcacagacgggagaggcggaggcgactatctgaagaaacccggtggaggaggctag

SEQ ID NO: 212605 - DNA, 852 bp, synthetic construct
  misc_feature 1..852: note = Description of Artificial Sequence: Synthetic coding sequence
  source 1..852: mol_type = other DNA
atggatctgtggccaggtgcttggatgctgttgctgctgctgttcctcctccttcttttcctgctgccaacactttggttttgtagcccatcggctaagtactttttcaagatggctttctataatggctggatcctctttctggcagtgctggccattcctgtttgcgctgtgagggggagaaatgttgaaaatatgaagattcttagacttatgctcctgcacattaagtacttatatggaattcgagtcgaggtgcgtggagcccatcactttcctcctagtcagccctacgtggtggtgtccaaccatcaatcttccctggatttgttgggcatgatggaagtgctgccaggacgatgtgtaccaattgccaagagggaattgttgtgggcgggttcagcaggcctggcttgctggctggctggggtgatatttatagataggaagcgcaccggtgatgccatatctgtgatgtcagaagtagcacaaaccttgctgacccaagacgtgagggtgtgggtttttcccgaaggaacaaggaaccataatggcagcatgttgccctttaagcgcggagccttccatcttgccgttcaggcacaggtcccaattgtcccaatagtgatgagcagctaccaggacttctactgcaaaaaagagcgtagattcacctctggccagtgtcaggtgcgcgtcctgccccctgtgcctaccgaaggccttactccggatgacgtcccggcactcgcggaccgcgtcagacatagcatgcttacagtttttcgggaaatttcaacagacggccgtgggggaggtgattacttaaagaagccaggagggggagggtag

SEQ ID NO: 212606 - DNA, 852 bp, synthetic construct
  misc_feature 1..852: note = Description of Artificial Sequence: Synthetic coding sequence
  source 1..852: mol_type = other DNA
atggatttatggccaggagcctggatgctccttctgctgctgtttttgctgctgctctttctgcttcctaccctctggttttgctctccgagcgccaaatattttttcaaaatggctttttataatggctggattctcttcctggctgtgcttgctatcccggtatgcgctgtccggggaaggaacgttgagaacatgaagatacttcgcttgatgctcttgcatattaaatacctttatggcattcgtgtggaagttcgaggagcccaccatttccccccatctcagccctatgtagtggtgtccaatcaccagtcttctctggacctcctgggcatgatggaggtgcttcccggtagatgtgtgcctatagccaaaagggaattgctgtgggccggttcagctgggttggcctgctggctagcgggtgtgattttcatcgacagaaaacgaactggcgacgcaatcagcgtcatgtctgaggtggcacaaactctgctgacacaggatgttcgcgtctgggttttccccgagggtactaggaatcacaatggatcaatgctgccctttaaacggggtgcatttcacctggcggttcaggcccaggtgccgatcgtgccaatcgtgatgagcagttaccaggatttctactgcaagaaagaacgccgattcacatcaggtcaatgtcaggtcagggtcctgcctcctgtgccaacagagggacttactccggatgatgtccctgctttggctgacagggtgcggcatagtatgttgactgtctttagagagatttcgaccgatgggaggggcggaggagactaccttaagaaaccagggggtggcggatag

SEQ ID NO: 212607 - DNA, 852 bp, synthetic construct
  misc_feature 1..852: note = Description of Artificial Sequence: Synthetic coding sequence
  source 1..852: mol_type = other DNA
atggacctgtggcccggtgcatggatgctcctactgctgctgtttctcctcttgttatttctgcttcctaccttgtggttctgttctccatctgctaagtacttcttcaaaatggctttctacaatgggtggatcctgtttttagctgtattggctattccggtctgtgctgtccgtgggaggaacgtggagaatatgaagattctgcgcctgatgctactgcatatcaaatatttgtacgggattagagtggaagtccgcggagcccaccacttcccaccatctcagccctatgtcgtggtgagtaatcaccaaagtagtttagatttactcggaatgatggaggtgctccccggtcgctgtgtacccattgccaagcgagaactattatgggcaggctcagccggtctcgcgtgctggttggcgggtgtaattttcattgaccgaaaaaggaccggggatgctatcagcgtcatgagcgaggtcgcacagacgttactcacacaggacgttcgtgtttgggtctttccagaggggacccggaaccataatgggagtatgttgccatttaagaggggtgcatttcatctagccgtgcaggcacaagtgccaattgttcctattgtcatgagcagctatcaggacttttattgcaaaaaggaacggcgattcacgtccgggcagtgccaggtgagagtgctaccccctgtcccgactgaaggtctcacgccagacgatgtgcccgcactcgctgaccgggtcagacatagtatgctgaccgtctttagggaaatcagtaccgacggcagggggggaggggactaccttaaaaagcctggcggtggcggttag

SEQ ID NO: 212608 - DNA, 852 bp, synthetic construct
  misc_feature 1..852: note = Description of Artificial Sequence: Synthetic coding sequence
  source 1..852: mol_type = other DNA
atggacctgtggcccggagcctggatgctgcttctgctactcttcctcctgctcctgttcctacttcccaccctgtggttttgctctcctagcgccaaatacttcttcaagatggcgttctataacgggtggatcctgtttcttgcggtcctagccatacctgtgtgcgcagttagaggacgcaatgtcgagaacatgaagatcctacggcttatgctgctacacattaagtacttgtacgggattcgcgtggaagtacggggtgctcaccatttcccaccaagccagccctatgtcgtggtctctaaccatcagtcctccctggacttgttaggaatgatggaggtcctcccagggcgttgtgtccccatcgccaaacgcgaactcttgtgggctggctcggccggacttgcctgttggctggctggagtgatttttatcgacaggaagcgaacgggggatgccatctccgttatgtcagaggtagcccagaccctgcttacacaagatgtgagagtgtgggtcttccccgaagggacccggaaccataatggatccatgctacccttcaagcggggtgcttttcatctcgcagtgcaggcccaggtaccgatcgttcccattgtcatgagttcctaccaggacttttactgtaagaaagagagaaggttcacctcgggccagtgccaggtgcgcgtgctgcctcccgtgcctacagagggactgacgcctgacgatgtacccgctctagccgaccgagtccgtcattcaatgttgactgtgtttagggagatatccacagatgggcgtggaggcggtgattacctcaaaaagcctggcggtggaggctag

SEQ ID NO: 212609 - DNA, 852 bp, synthetic construct
  misc_feature 1..852: note = Description of Artificial Sequence: Synthetic coding sequence
  source 1..852: mol_type = other DNA
atggatctatggccaggggcttggatgttgctactgctgttatttctacttctgctgttcctgctccccaccctgtggttttgtagcccatctgcgaaatatttttttaagatggctttttataatggctggatcctctttctggccgtgctggcaatccccgtgtgcgccgtccgagggaggaacgtcgaaaatatgaagattctccgcctgatgttgctgcacatcaaatacctgtatggcatcagggttgaggtacggggtgcccaccatttcccaccatcacagccttatgttgtggtgtcgaatcaccaatcctcgttggacctgctggggatgatggaggtcttgcccggacggtgtgtcccaatcgccaagagagaactgctttgggcaggctccgctggtcttgcatgctggttagctggggtgatattcatagatagaaagaggacgggcgacgctatctccgtgatgtcagaagtggcacagaccttgctaactcaagatgtcagggtctgggtgttcccagagggaacccggaatcacaacggatctatgctgccttttaaacgcggtgcttttcaccttgccgtccaggctcaggtaccaattgtcccgattgtgatgtcgagctaccaagatttctactgtaaaaaggagagaaggttcacaagtggccagtgtcaagtcagagtgctccctccagtgcccacagagggcctgacccctgacgacgtgcctgccctcgccgatcgggtacggcactctatgctgaccgtgtttagagagataagtaccgatggacggggtgggggagattacctcaaaaagccgggtggtgggggatag

SEQ ID NO: 212610 - DNA, 516 bp, synthetic construct
  misc_feature 1..516: note = Description of Artificial Sequence: Synthetic coding sequence
  source 1..516: mol_type = other DNA
atgatggaggtgttgcccggacgctgcgtgcccatagccaagagagagctactgtgggccggttctgcaggattagcttgttggctggcaggcgtgattttcatcgacagaaagcggacaggagacgccatttcagtgatgagtgaggttgcccaaactctgttaacacaagatgttcgtgtgtgggtgtttccagaggggacccggaaccacaacggttcaatgcttccattcaagaggggggcatttcacctggccgtacaagcacaggtgccaattgtcccaatagtaatgtcctcctaccaggatttctattgcaagaaagagaggcggtttacctccgggcagtgccaggtccgtgtgctgccccctgtgccaactgagggactcacgcccgacgatgtccctgccctggccgacagagtgcggcacagcatgctcacagtctttagggaaatcagcaccgacggccgtggtgggggagactacctgaagaagcccggtggcggaggctag

SEQ ID NO: 212611 - DNA, 852 bp, synthetic construct
  misc_feature 1..852: note = Description of Artificial Sequence: Synthetic coding sequence
  source 1..852: mol_type = other DNA
atggatctctggcccggtgcttggatgcttttgctattgttatttcttctattgcttttcctgttgcccaccctgtggttctgcagcccgtctgctaagtatttcttcaagatggccttctacaacgggtggattctctttttggctgttcttgcaatcccggtgtgcgcggtaaggggccgtaacgttgagaatatgaagatcctgcggttaatgctgcttcatatcaagtatttatacggcatccgcgtagaggttaggggagctcatcacttccctccgtctcagccctacgtggtcgtgagcaaccaccagagcagtctcgatctattgggcatgatggaggtgctgccgggtaggtgtgtgcctatcgctaaacgggaactgctgtgggccggaagtgccggacttgcctgttggttggccggagtgatttttatcgatcgcaagagaacaggcgatgctattagcgtcatgagcgaggtcgcccaaaccctgctaacacaagatgtccgagtgtgggtatttccagaaggtacacggaatcataatggctcaatgctgcctttcaagcggggtgccttccatctggcagtccaggcccaggttcctattgtccctatcgttatgagctcatatcaggacttttactgcaaaaaggaacggcgtttcaccagcggacagtgtcaagtccgcgtgctccctccggtgcctacagagggcctgacccccgatgacgtgcctgccctggcggatagagtgaggcattccatgttaacggtgttcagagaaatttctaccgatggcaggggagggggagattaccttaagaagcccggtggcggtggctag

SEQ ID NO: 212612 - DNA, 852 bp, synthetic construct
  misc_feature 1..852: note = Description of Artificial Sequence: Synthetic coding sequence
  source 1..852: mol_type = other DNA
atggacctatggccgggtgcctggatgctgttgctcctgctctttctattattactgtttctgttgcctactctatggttctgttcgccctctgctaaatacttcttcaaaatggctttctacaatgggtggattctgtttctggcggttctcgctatacccgtgtgtgcagtgcgcggacggaatgtggaaaatatgaaaattcttaggttgatgctcctgcacatcaagtacctttacggaatccgagtggaagtgaggggcgcacaccattttcctccgtctcaaccctatgttgtggtctccaaccaccagtcaagcctagaccttctcggaatgatggaagtgttgcccggtcgctgcgtccctattgctaagagagagctactgtgggccggatcagccggattagcatgttggctagctggcgttatcttcatagacagaaaaagaaccggagacgctatcagtgtgatgtcagaggtggcacagaccctgttaactcaggatgtgcgggtgtgggttttcccggaaggtacaaggaatcacaatggctctatgctccccttcaagagaggagccttccaccttgccgtccaggcccaggttcccatcgttccaatcgtaatgtcatcttatcaggatttttattgcaaaaaagaacgtcgatttacatccgggcagtgtcaggtccgcgtcctccctcccgtgcccactgaaggactaactccagacgatgtccccgctctggcggatcgggtccgccattccatgctcacagtgttcagggaaatcagcaccgacggacggggaggaggcgactacctcaaaaagcccggtgggggtggctag

SEQ ID NO: 212613 - DNA, 852 bp, synthetic construct
  misc_feature 1..852: note = Description of Artificial Sequence: Synthetic coding sequence
  source 1..852: mol_type = other DNA
atggatctgtggcctggagcctggatgcttctcctcctgctgttcctcctcttactctttctgttgcctactttgtggttttgttccccgagcgccaaatactttttcaagatggccttctataacgggtggattctgttccttgccgtacttgcaattcccgtgtgtgcagtgagagggaggaatgtggaaaatatgaagatcctcaggctgatgctccttcatattaagtatctgtacggaatccgggtggaggtaaggggtgcccaccactttcccccaagtcagccttatgtggtggtgagcaatcatcagagctccctggacctcttgggcatgatggaggtgctaccaggacgttgcgtgccaattgcaaaacgagaactgctgtgggcaggaagtgcaggactggcttgctggctggcgggtgttatttttatcgaccgcaagaggactggcgacgctatctctgtgatgtcagaggtagcccagacccttttgacacaagacgttcgcgtgtgggttttccccgaaggaactagaaatcataacggaagcatgctgcccttcaagagaggggcattccacctggctgtgcaagcacaggtgcccatagtgccaatcgtgatgagttcctatcaggatttctactgcaagaaggagagacgatttacatccggccagtgccaggtccgcgtgttaccccctgtgcctaccgaagggttaaccccagacgacgtacccgctctggccgaccgggtgcgccacagtatgctcacggtttttagagagatctctacagatggcagagggggaggtgattatctcaagaaaccagggggaggaggctag

SEQ ID NO: 212614 - DNA, 852 bp, synthetic construct
  misc_feature 1..852: note = Description of Artificial Sequence: Synthetic coding sequence
  source 1..852: mol_type = other DNA
atggatctgtggcctggagcctggatgctgctgctcctgctcttcctgttacttctgtttctcttgcccactctgtggttttgtagtccatccgctaaatatttctttaaaatggcgttttacaacggctggatcctgttcttggctgtgcttgcgatcccagtatgcgctgtgagagggaggaatgtggagaacatgaaaatcttgcggcttatgttactgcatattaaatatctttacggcattagggtggaggtccggggagcccatcacttccctccttcccaaccttacgtcgtggtgagcaaccaccagtccagtttggacctgttggggatgatggaggtcttgcccggacggtgtgtgccaattgccaagcgtgaactcctttgggccggatctgcagggctggcatgttggctggccggagtgatttttatcgatcgcaagcggaccggcgatgcgatttcagtcatgagcgaagttgcacagacactgctgacacaggatgtgcgggtttgggtgttcccagaagggactcgcaatcacaacggctcaatgttgcctttcaagcgcggagctttccacctcgcagtgcaggctcaggtgcctatcgtgcccattgttatgtcgagctaccaggatttctattgtaagaaggagcgccgattcacatccggacaatgtcaagtacgtgtcctgccccctgtgccaactgagggcctgacaccagatgacgtgcctgccctggcagacagagtacgtcactcaatgctgaccgtgttccgtgagatctccaccgatggacgcggtggtggcgactatctgaagaagccaggcggtggtgggtag

SEQ ID NO: 212615 - DNA, 852 bp, synthetic construct
  misc_feature 1..852: note = Description of Artificial Sequence: Synthetic coding sequence
  source 1..852: mol_type = other DNA
atggacttgtggcccggagcttggatgcttcttctcctgttattcctcctgctgctttttctgctgcctacactgtggttctgctcaccctccgccaaatatttcttcaagatggctttctacaatggatggatcctgttcctggccgtgctcgccatacctgtctgcgccgtgcggggacggaatgttgagaacatgaagatcctgcggttaatgctcctgcacattaagtacctgtacggaattcgagtggaagttcgcggtgcccatcatttcccaccaagccaaccatacgtagtcgtctctaatcatcaaagcagccttgacctcttggggatgatggaagttctgccagggagatgcgtgcctatagccaagagggaactcttatgggcagggagcgcagggctggcctgttggctcgcaggggtgatatttatcgatagaaaacgcactggggacgccatctcagtgatgagcgaagttgcgcagacgctgcttactcaggacgtccgggtctgggtctttcctgaaggcacacgaaaccacaatgggtctatgttgccattcaagcgaggtgcttttcacctggcggtgcaagctcaagtgccgatcgtgcctatcgtgatgtctagctatcaggatttttactgcaaaaaggaacgtcgatttacaagcggccagtgccaggtcagagtgcttcccccagtgccaaccgagggactaacacccgacgacgtccctgctctcgcagatcgggtgaggcatagtatgcttaccgtcttcagggagatttccactgacggaagaggcggtggcgattatctcaaaaagcccggaggcggaggctag

SEQ ID NO: 212616 - DNA, 852 bp, synthetic construct
  misc_feature 1..852: note = Description of Artificial Sequence: Synthetic coding sequence
  source 1..852: mol_type = other DNA
atggatctctggcctggcgcatggatgctattgttgcttctctttcttctacttctttttctgctcccgaccttatggttttgctctccttcagcgaagtacttcttcaaaatggctttctacaacgggtggatcttattcctcgctgttctggccatcccagtgtgcgccgtgcgcggtcgtaacgtggaaaatatgaaaattttgaggctgatgttgctgcacataaaatatctgtacggcatccgcgtggaagtgcggggagcacatcactttcccccttcccaaccctacgtggtagtttccaaccatcagagctcactagatcttttgggaatgatggaagtgctcccgggaaggtgtgtgccaatagcaaaaagggaactcctgtgggctggatctgcagggctggcctgttggcttgccggagtgatatttatcgatcgcaagcgcacaggagacgccattagcgtaatgtcagaggttgcacagaccctgctgacccaggatgttcgcgtgtgggtgtttcctgaaggtacacgaaaccacaacggatccatgctccccttcaaaaggggtgcctttcatctcgccgtccaagctcaagtccctatcgttcccatagtgatgtccagttatcaggacttctattgcaagaaagaaaggaggttcacgtcaggacaatgtcaagtccgcgttctgccgccagtcccaacagaaggccttaccccagacgatgtgccagcgctcgcagaccgtgtccggcacagtatgctgacagtgttccgggagatttcaacggatgggaggggtggaggcgactatctgaaaaaacccggaggaggcggatag

SEQ ID NO: 212617 - DNA, 852 bp, synthetic construct
  misc_feature 1..852: note = Description of Artificial Sequence: Synthetic coding sequence
  source 1..852: mol_type = other DNA
atggacctgtggccaggtgcatggatgctgttgctgctgcttttccttttgctcctgtttctgctgcctacactctggttttgtagcccctccgccaaatacttctttaagatggccttctataatggttggattctctttttggcagtgcttgcaatacccgtatgcgccgttaggggacgcaacgtggaaaatatgaagatcctccgtctaatgcttttgcacatcaaatacctctatgggattagggtggaagtgcgaggcgctcatcacttccccccatctcaaccctacgtagtagtatctaaccatcaaagctctttagacctactgggtatgatggaggttcttcccggaagatgtgtgcccatagccaaacgagaacttttgtgggcagggagtgctgggctggcttgttggcttgcgggagtgatatttattgatcggaagaggacgggggatgccatttcagtcatgtccgaggtcgcgcagactcttttaactcaggatgtgagagtatgggtttttccagagggcacaagaaatcataacggaagcatgcttccttttaaacgcggagcttttcaccttgccgtgcaggcccaggttcctattgtgcccatcgtgatgtccagctatcaagacttttactgcaagaaggagagaaggttcacaagtgggcagtgccaggtccgtgtgctccccccagtgcccacggagggattgacccctgacgacgtgccggcactggcggaccgggtgcggcactcaatgctgaccgtatttcgagagatctcgacagacggaaggggcggaggcgattatctgaagaagccagggggaggcggatag

SEQ ID NO: 212618 - DNA, 852 bp, synthetic construct
  misc_feature 1..852: note = Description of Artificial Sequence: Synthetic coding sequence
  source 1..852: mol_type = other DNA
atggacctgtggcctggagcatggatgttgctacttctgttgttcctgcttttactctttctgctgccaacactatggttctgctcaccctctgcgaagtattttttcaaaatggcgttctacaacggctggattctgtttctcgccgtcttagccattccagtgtgtgccgtgcgaggccgaaatgtagaaaatatgaagatccttagattaatgctgctccatatcaagtacctatatggaatccgcgtggaagtgcgcggagcgcaccactttccgccttctcagccctatgtggtggtttcaaaccatcagtctagcctggacctactgggtatgatggaagttctcccagggagatgcgttccaattgctaagcgcgagctcctgtgggcaggatctgcagggctggcctgctggcttgccggagtcatctttattgacaggaagagaacaggggatgccatcagcgtgatgagtgaagtagcccagacactgcttacgcaggatgtccgggtctgggtgtttcctgagggaacacgcaatcacaatggatcaatgctccccttcaagaggggagccttccacctggctgtgcaggctcaggtcccaattgttcccatcgttatgagcagctaccaggacttttactgcaaaaaggagagaagatttaccagtgggcaatgtcaagtacgtgttctcccacctgtaccaaccgaggggcttacccctgacgacgttcccgcacttgccgatcgcgttcggcattccatgcttacggtgttccgcgagatcagcacagacggaagggggggtggagattacctcaagaagcccggaggcggtggttag

SEQ ID NO: 212619 - DNA, 852 bp, synthetic construct
  misc_feature 1..852: note = Description of Artificial Sequence: Synthetic coding sequence
  source 1..852: mol_type = other DNA
atggatctgtggcccggtgcttggatgctgctgttacttctattcctgctgctcctgtttctgttacccactctgtggttctgttctccatccgcgaaatatttctttaagatggccttctataacggatggatcttatttctcgccgtactcgcgattcccgtgtgcgcagtgcgcggtagaaacgtggagaatatgaaaatcctacgccttatgcttctccatatcaaatacctttatggcatcagggttgaagttagaggcgcacatcatttccccccaagtcagccttatgtggtcgtgtcaaaccatcagtcttctctggatctcttgggcatgatggaagtgttacccggaaggtgcgtacctatagcgaagcgggaattactgtgggccggatcagccggtttggcctgttggctcgcaggagtcattttcattgaccgaaagcggacaggagacgctataagcgtgatgagcgaggtggcgcagactttactgactcaggacgtcagggtgtgggtgttcccagagggaactcgcaaccacaatggttctatgctccccttcaagcgcggagctttccaccttgccgtgcaagcccaagtccccattgtgcctattgtcatgagtagctaccaggacttctattgcaaaaaagaacggaggtttacctccggacagtgtcaagtgcgcgtgctccctcccgtccctactgaagggctgacacctgatgacgtcccagctctggcagatcgagtgagacatagcatgctgaccgtgtttagggagataagcaccgatggaagaggtgggggagactatctgaagaaacctggagggggaggctag

SEQ ID NO: 212620 - DNA, 852 bp, synthetic construct
  misc_feature 1..852: note = Description of Artificial Sequence: Synthetic coding sequence
  source 1..852: mol_type = other DNA
atggatctatggcctggagcctggatgctgttgctgctcctgttcctactgttgctattcctccttcctacactgtggttctgctcccccagtgcaaaatacttctttaaaatggcattctacaacggatggatcttgttcttggctgtgctggccattcctgtgtgtgcagtaagaggacggaatgtggagaacatgaaaattctaaggcttatgctgctccatatcaaatacctgtatgggatccgcgtggaggtaagaggcgctcatcacttcccgccttctcagccgtatgtggtcgtgagcaaccatcagtcctccttggatctcttgggaatgatggaggtgcttccaggcaggtgtgtgcctatagccaagcgggagctgctgtgggctggaagcgcgggactggcatgttggcttgctggtgtgatatttattgatagaaaaagaacgggcgatgctattagtgtaatgtcagaagtggcgcagacactactgactcaagatgtcagggtgtgggtgttccccgagggtactagaaaccacaatggctctatgctacccttcaagcggggagcttttcatctggccgtgcaggctcaagtccccatcgtgccaattgtaatgagttcgtatcaggacttctactgcaaaaaagagaggcgcttcaccagtgggcagtgccaggtgcgggtgctcccgccagtgcccaccgagggtctgaccccggatgatgtgccggcactggcagatcgagttaggcacagcatgttgacagtcttccgggaaatctcaaccgatggacgtgggggtggcgactatcttaagaagcctggagggggaggttag

SEQ ID NO: 212621 - DNA, 852 bp, synthetic construct
  misc_feature 1..852: note = Description of Artificial Sequence: Synthetic coding sequence
  source 1..852: mol_type = other DNA
atggacctgtggccaggtgcctggatgctcctcctgctgctatttctactgctgctgttcttattgcccaccctgtggttttgttcaccatccgccaaatacttctttaaaatggcgttctacaatggatggattttatttcttgccgtattagctatccccgtatgtgccgttaggggacgcaacgtcgaaaatatgaaaatcctgaggttgatgctgctgcatatcaagtatctgtacggcatccgagtggaagtgcgtggggcacaccatttccccccaagtcagccctacgtcgtggttagcaaccaccaaagcagcttagatctgttgggcatgatggaggtgctgcccggacggtgcgttccgatagctaaacgggaactgttgtgggccggatctgcaggtctagcttgttggctcgcaggggtgatttttatcgacaggaaaaggactggagacgccatatctgtgatgtctgaagtcgcccagacactgcttacccaggacgtgagggtatgggtatttccggaagggactagaaaccacaacggctccatgctgccctttaaacgaggtgcttttcacctcgcggttcaagcccaagtgccaattgtacctattgtaatgagcagttaccaggatttctattgcaaaaaggagcgcaggttcacaagtgggcagtgccaggttagggtgttaccgcctgttcccaccgaggggctgacccctgacgacgtgcctgccctggcggaccgcgtcagacattccatgcttacagtatttagagaaatctccaccgacggccgtggagggggagattacttgaaaaagccaggaggagggggttag

SEQ ID NO: 212622 - DNA, 852 bp, synthetic construct
  misc_feature 1..852: note = Description of Artificial Sequence: Synthetic coding sequence
  source 1..852: mol_type = other DNA
atggatctgtggcccggagcctggatgttgttgctgctgctctttctgctcctgctgtttctgctgccgactctgtggttctgttcgccttcagccaagtacttttttaaaatggcgttttacaatgggtggatcctctttcttgcagtacttgcaatcccggtttgcgccgtgcgtgggagaaatgttgagaatatgaaaatcctccggctcatgcttctccacatcaaatatttatatggcattcgcgttgaggtgaggggcgctcatcacttccctccttcccagccctatgtggtcgtgagcaaccatcagtctagtctggatctgctcggcatgatggaagtgctgcctggaaggtgtgtgcctattgccaagagggaactgctctgggcagggtctgccggactggcctgctggctggcaggagtaatttttatcgatcggaaaagaactggggacgctatctctgtgatgtctgaggtggcacagaccctgctgacccaagatgtgagagtctgggtcttcccggaggggactagaaaccacaatgggtccatgctaccgtttaagcgcggagccttccatctggcagttcaggcacaggtgcctatcgtaccaattgtcatgagctcttaccaagacttctattgtaagaaggaaaggaggtttacctccggacagtgtcaggtgcgagttctcccccctgtacctacagagggcttgacaccggacgatgttccagcactggctgatcgggtgaggcattcaatgctgacagtctttcgcgaaatatcaactgacgggaggggaggtggagattacctgaagaagcctggaggcggtggatag

SEQ ID NO: 212623 - DNA, 852 bp, synthetic construct
  misc_feature 1..852: note = Description of Artificial Sequence: Synthetic coding sequence
  source 1..852: mol_type = other DNA
atggatctgtggccaggcgcatggatgctcctcctgcttctcttcttgctgctccttttcctccttcctaccctctggttctgcagcccttccgccaagtattttttcaagatggccttctacaacggctggattctattcctggccgtcctcgccattcctgtctgcgcagtgagaggaagaaatgtggagaatatgaaaatcttacgactgatgctgctgcacattaagtatctttatggcattagggtggaggtgaggggcgcacaccatttcccaccttcccagccttatgtcgtagtatcaaatcatcagtctagcctggatctgttggggatgatggaggtgcttcccggtcgctgcgtgccaatcgcaaagagagagctgttgtgggcagggtctgccggtctagcttgttggttagccggagttatctttattgaccggaagcggaccggagatgctatctccgtaatgagtgaggttgcacagacattgctaactcaggatgttagggtgtgggtgtttcctgaaggtaccaggaaccataacggttccatgttgccttttaaacgcggtgcttttcatctcgcggtgcaggcccaggtgccaatcgtgcccatagtgatgtcctcctaccaggacttttactgtaagaaagagcgaagatttacgtccggacagtgtcaagtcagagtattgccccctgttccgaccgagggactcactcccgacgatgtgcctgcattagctgatcgtgtgagacattccatgctcactgtgttcagagaaataagcacagacgggagaggcggaggtgattacctgaagaagccaggcggtgggggttag

SEQ ID NO: 212624 - DNA, 852 bp, synthetic construct
  misc_feature 1..852: note = Description of Artificial Sequence: Synthetic coding sequence
  source 1..852: mol_type = other DNA
atggacctgtggcccggagcctggatgctgttgctcctcctttttcttctgctgctctttctgctgcccacactgtggttctgctccccctcagctaagtatttttttaaaatggctttctacaatgggtggatcctcttccttgcagtcctggccatccccgtgtgcgccgtcaggggcaggaacgtggagaacatgaaaatacttcgtctcatgctcttgcatattaagtacctatacgggatccgtgtcgaagtgagaggtgcacatcactttccgcctagtcagccttatgtggtcgtctccaatcaccagtcttcactggacttactgggtatgatggaagtgctacccggacgatgcgtgcccatcgctaagcgagaattgttgtgggctggctccgccggattggcctgctggctggctggggtaatcttcatcgatcgaaagaggaccggggacgcgatctcagtaatgtctgaagttgcgcagaccttgctgacccaagacgtgagggtctgggtgttccctgaggggactagaaaccacaacggcagtatgcttccatttaagcggggagcattccatttggcggtccaagctcaggtgcccatagtccctatcgttatgagttcataccaggacttttactgtaagaaagagcgcagattcaccagtggacagtgccaagtcagagtactccccccagtgcccaccgaagggcttactccagacgacgtgcctgccctggctgatagggtacggcactctatgctcaccgtctttcgtgaaattagcaccgacggcaggggagggggtgattatctgaaaaagcctggaggaggcggatag

SEQ ID NO: 212625 - DNA, 852 bp, synthetic construct
  misc_feature 1..852: note = Description of Artificial Sequence: Synthetic coding sequence
  source 1..852: mol_type = other DNA
atggatctgtggcccggagcatggatgctcctccttcttttgttcctcctgcttttattcctcctgccaacactatggttctgcagtccaagtgcaaagtactttttcaagatggctttttacaatgggtggattctgtttctggcagtgcttgcaattcccgtatgtgccgtgcggggaagaaatgtggagaatatgaaaatcttgcgtctcatgctgctgcacatcaagtacctgtacggcatcagggtcgaggtacggggagcccaccactttcctccctcacagccatatgtagtggtctcaaatcatcagtcctcattagacctcctggggatgatggaagtgctgcctggcagatgcgttccgattgctaaacgagaactgctttgggctgggagtgccggtctggcctgctggctcgccggagtgatattcatcgacaggaagcgaaccggtgatgccatcagtgttatgtcggaagttgcccagactctccttactcaggacgtccgcgtgtgggtcttccctgaaggtacaaggaatcacaacggcagcatgcttcccttcaaaagaggagcgttccatttagcagtccaggcgcaggttcccattgtaccgatagtgatgagctcatatcaagatttttactgcaaaaaagagcggagatttacatctggccagtgtcaggttcgggttcttccaccagtgccaactgaaggcctgactcctgacgatgtgccagccctggctgatagagtacggcactccatgcttaccgtgttccgtgagatctcgactgatggtagaggcggaggggattacctcaagaagccaggcggtggcggttag

SEQ ID NO: 212626 - DNA, 852 bp, synthetic construct
  misc_feature 1..852: note = Description of Artificial Sequence: Synthetic coding sequence
  source 1..852: mol_type = other DNA
atggacttatggcctggagcatggatgctgctcctattgctgttcttgctgctattgttcttgctccccaccctctggttctgttcacccagtgccaagtatttctttaagatggccttctacaatggatggattctttttctggctgtgctggccatccctgtgtgtgccgtcaggggcaggaacgtggaaaatatgaagatccttcgactcatgttactccacatcaaatatttatatggcattcgtgtagaagtgcggggtgcccaccactttcccccttcccaaccatatgtggtggtgtctaatcaccaaagttccctggatctcctcggaatgatggaggtcctgcctggcaggtgtgtgcctatcgccaaacgcgagctcctgtgggcaggcagtgcgggtcttgcgtgctggctcgcaggcgtgatttttatcgaccggaagagaactggagacgcaataagcgtgatgtctgaggtcgctcagacccttctaacccaggatgtgcgagtgtgggtcttcccagagggaacacgcaatcacaacgggagtatgctcccttttaaacgaggagcgtttcacctggccgtacaggctcaggtccctattgtccccattgtgatgagcagctaccaagatttctactgtaagaaagagcgacgctttactagtggacagtgccaggtgcgagttcttccaccagttccaaccgaggggcttacccctgacgacgtcccagctttggcagaccgtgttaggcatagcatgctaaccgtcttccgggagatttccactgacggccgaggcggaggtgactacttgaagaaaccaggaggcggtggttag

SEQ ID NO: 212627 - DNA, 852 bp, synthetic construct
  misc_feature 1..852: note = Description of Artificial Sequence: Synthetic coding sequence
  source 1..852: mol_type = other DNA
atggacttgtggcccggtgcatggatgctgctgctgctcctgtttttgctcttgctatttctactccccaccctctggttttgctcccctagcgccaaatatttcttcaaaatggccttctacaacggatggatcctctttctggctgtgttagccatacctgtgtgtgcagtgcgcggtagaaacgtagagaacatgaaaatcctaaggcttatgcttttacacataaagtacttgtacgggattcgagtggaggtacggggtgctcatcattttccaccctctcaaccatatgtggtcgtctctaaccaccaaagttctttggacttactcggcatgatggaggtgctaccgggaaggtgtgtgccaattgccaagagagagctcctgtgggctgggagcgccggactcgcttgctggctggcgggagtgatttttatagaccgcaagcgtacaggtgatgctatctcagtcatgagcgaggtggcccagactctgctgacccaggatgtgcgggtgtgggtatttccagagggaacccggaaccataacggcagcatgcttccgttcaagcgaggggcatttcaccttgccgtgcaggctcaggtgcctatcgtgccaatagttatgtcgagttatcaagatttttactgcaagaaagaaaggcgattcacaagcgggcaatgtcaggtacgagttctaccccctgtgcccactgagggcctcacccccgacgacgtaccagcccttgcagacagggtgaggcactccatgctgaccgtgttcagagaaatttctacagacgggaggggtggaggcgactatctgaagaagcctggaggtggcggatag

SEQ ID NO: 212628 - DNA, 852 bp, synthetic construct
  misc_feature 1..852: note = Description of Artificial Sequence: Synthetic coding sequence
  source 1..852: mol_type = other DNA
atggacctgtggccaggcgcatggatgttgctcctattactgttcctcctactgctctttttactacctaccctgtggttctgctcaccttccgcaaagtatttcttcaagatggccttctacaacgggtggattttatttttggccgtcctggccatcccagtatgtgctgtgagaggaagaaacgtcgaaaatatgaagattcttaggttgatgctgctgcatatcaaatacctgtatgggattagggtggaagtaagaggagctcaccacttcccgccttcacagccttacgtggtggtgagcaatcatcagtcaagtctggatctactcggaatgatggaagtgctccccggaagatgcgtacccattgcgaaaagggaattgctgtgggccggatcagcgggattagcatgttggctggcaggggtcattttcatcgacagaaagcgcacaggcgacgccattagtgtgatgagcgaggttgctcagactctgttgacgcaggacgtccgagtttgggtctttcctgagggcaccaggaatcacaacgggtcgatgttgccatttaaacggggagccttccacttggctgtgcaggctcaggtgcctattgtcccaattgtgatgtcgagctaccaagacttttattgcaagaaagaaaggagattcacgagtgggcaatgccaagtacgagtgctgcccccagttccgacagaaggactcacaccagacgatgtgcccgctctggccgacagagttagacacagtatgctcactgtattccgggagataagcaccgatggcaggggtggcggagattacctcaagaaacccggtggcggaggctag

SEQ ID NO: 212629 - DNA, 852 bp, synthetic construct
  misc_feature 1..852: note = Description of Artificial Sequence: Synthetic coding sequence
  source 1..852: mol_type = other DNA
atggatctttggcccggagcctggatgctcctgcttttactttttctactgctgctgttcctcctgccaaccctgtggttctgttctccttctgctaagtattttttcaaaatggcgttctataatggctggatactctttttggccgtgctcgcaattccagtgtgtgccgtcagaggtcgtaatgttgagaatatgaagatcttgagattgatgctattgcatatcaaatatctgtacggaataagagtggaagtgcggggtgctcatcacttccccccatctcagccctatgttgtggtatctaaccatcaatctagtctagacctgctgggcatgatggaagtgctgcccggaagatgtgtgccaatcgccaagagggaattgttatgggcaggatctgccggactcgcatgctggctggccggagtgatattcatcgaccgtaaacgcacgggcgacgcaatatcggttatgtcagaggtcgcacagactctgctgacacaggacgtcagggtgtgggttttcccagagggtactcgtaatcacaacgggtcgatgcttccattcaagcgcggagcattccatctggcagtgcaggcgcaggtgcccatagtcccaattgtgatgagcagctaccaggatttctattgcaaaaaggagagaagattcacgagtgggcagtgtcaggtgcgcgtgttacctccagtccctaccgagggattgactcctgacgatgtgccagccctggcggatcgcgtgcgtcattccatgttaactgtgttccgcgagataagcacggatgggaggggcggaggagactacctgaagaaaccaggcggtggaggatag

SEQ ID NO: 212630 - DNA, 852 bp, synthetic construct
  misc_feature 1..852: note = Description of Artificial Sequence: Synthetic coding sequence
  source 1..852: mol_type = other DNA
atggacctctggcccggagcatggatgttgctgctcctactctttctactactactatttttgctccctacgctgtggttttgctctcccagcgctaaatacttcttcaaaatggcattttataacggctggatactattcctggccgttctggccatacctgtgtgcgcagtgagaggcaggaacgtggaaaacatgaaaattctgagactaatgttgctgcacatcaaatacctttacggcatcagggtggaggtgcgaggcgctcaccatttcccgccaagccagccctacgtggtggttagtaaccaccagtcatccttagacttactgggcatgatggaagtgctcccaggtagatgcgtccccatcgccaaaagggaactcttatgggctggttcggccggactcgcctgctggcttgcaggggtgatctttatcgataggaagcgcactggagatgccatttctgtaatgagcgaggtggcccaaactctgttgacccaggacgtccgcgtgtgggtgttcccagaaggcacccgcaaccataacggatccatgctacctttcaagcgtggagcatttcatctggccgtgcaagcccaagtgcccattgtgccaatcgtgatgtctagctaccaggacttttactgcaagaaggaaagacgtttcactagcggtcagtgccaggtgcgcgtcctgcctccagtgcccaccgaaggacttacgcctgatgatgttccagccctagcggaccgggtgcggcattctatgttgactgtattcagagagatctccacagacggacggggaggtggtgattatctgaagaagccaggcggaggcggatag

SEQ ID NO: 212631 - DNA, 852 bp, synthetic construct
  misc_feature 1..852: note = Description of Artificial Sequence: Synthetic coding sequence
  source 1..852: mol_type = other DNA
atggacctttggccaggcgcatggatgctgttactgctgcttttccttctgcttttgtttctgctgccaaccctctggttctgcagccctagcgccaaatactttttcaagatggccttctacaatggttggatcctctttctcgccgtcttggcaattcctgtgtgtgccgtgcggggtcgtaacgtggagaacatgaaaattctgaggttaatgcttctgcatatcaagtacttatatggcatccgagtcgaggtcagaggcgctcatcatttcccgccatcccagccttatgtggtcgtgagcaatcatcagagcagcctcgaccttttgggaatgatggaggtgctccccggacgctgtgtgccaattgccaagcgcgaactgctatgggccggatccgccggtcttgcttgctggcttgccggagtgattttcattgatcgcaagcgcacaggagacgccatctcagtgatgagtgaggttgctcagaccttactaacacaggatgttagagtttgggtgtttcctgagggaacccgcaaccataatgggagcatgttacctttcaagaggggagcttttcacttggctgtccaggcacaggtacctattgtgcccattgtaatgtccagctatcaagacttctactgtaagaaagagcgtaggtttacatccggccagtgccaggtaagggtgcttccaccagtgccaacagaaggcctaacccctgacgacgtccccgctctcgcagatagggttagacattctatgttaactgtgttcagagaaatcagcacagatggacgcggaggaggcgattacctgaaaaaacctggaggaggaggctag

SEQ ID NO: 212632 - DNA, 852 bp, synthetic construct
  misc_feature 1..852: note = Description of Artificial Sequence: Synthetic coding sequence
  source 1..852: mol_type = other DNA
atggatctgtggcctggcgcatggatgttattgctgctgctttttttgctgcttctcttcctcctacccaccctgtggttttgctctccttctgccaagtattttttcaagatggcattctacaacggatggattctattcctcgccgtcctggccattcctgtctgcgctgtgagaggaaggaatgtcgaaaacatgaaaatcctcagacttatgctgttgcacatcaaatatctgtacggcattcgtgtcgaggtcagaggtgcccaccacttcccaccctctcagccttacgttgttgtctctaatcaccagagttcccttgatctgctcggaatgatggaggtcctccccggtcgctgcgtgcctatcgctaaacgcgagctgctctgggcaggctccgcaggcttagcatgctggcttgccggagtaatattcatcgaccgcaaacggacgggtgacgccatcagtgtcatgtcagaggtagcccagaccctccttacccaggacgtgagggtgtgggtgtttcccgaggggacccgaaaccacaatgggtccatgctcccctttaaaagaggagcatttcacctggcagtccaggcacaggtacccatcgttccaatcgttatgtcctcatatcaggacttttattgtaaaaaagaacggcgattcaccagcggacagtgtcaggtgagagttttaccacctgtcccaactgaaggactgactccggacgatgtgcctgctctagccgatcgggtccgccactctatgttgactgtatttcgggagatttcgactgatgggagggggggaggagattacttaaagaagccagggggaggcggatag

SEQ ID NO: 212633 - DNA, 852 bp, synthetic construct
  misc_feature 1..852: note = Description of Artificial Sequence: Synthetic coding sequence
  source 1..852: mol_type = other DNA
atggatctgtggcctggagcctggatgctgctccttttactgtttctcctgctgttgtttctcttgccaacgctctggttctgctctccaagtgccaagtacttctttaagatggccttctataatggctggatactcttcttagcagttctcgccatccctgtgtgcgccgtcagaggtcgtaatgtcgaaaatatgaagattctcagactcatgctgctccacataaagtacctctatggaataagagtggaagtaaggggcgcacaccacttccccccaagccagccatacgtagttgtgtccaatcaccaaagctcactggatttgctggggatgatggaggtactacccggacggtgtgtcccaatcgccaagcgggaattgctgtgggcgggatccgcagggttggcatgttggctggcaggcgtgattttcatagatagaaaacggactggggatgctataagtgttatgagcgaagtagcgcaaactctgctgacgcaagacgtgagggtgtgggtcttccctgaagggacgcgaaatcacaatggaagcatgctgccattcaagagaggagcctttcacctcgcggtgcaggcccaagtccctatcgtccctatagttatgtcctcatatcaggatttctattgcaagaaagaacgcaggtttacgagcgggcagtgccaggtcagagtgctcccgccagtccccactgaaggcctaacccccgacgacgtgcctgccctcgcggatagagtccgccattcgatgcttacagtgtttagagaaatttccacggacggaaggggcggaggcgattacttgaagaaaccgggtggagggggatag

SEQ ID NO: 212634 - DNA, 852 bp, synthetic construct
  misc_feature 1..852: note = Description of Artificial Sequence: Synthetic coding sequence
  source 1..852: mol_type = other DNA
atggatctgtggccaggggcttggatgctgctcctcctgctttttctactgctcctctttctcctccccaccctttggttctgcagtccttcagctaagtatttttttaagatggccttttataacggatggatattatttctggccgtgctggctatcccagtttgtgcagttaggggaaggaacgtggagaatatgaagattctgcggctgatgctgcttcacatcaaatacctctacggcattcgcgtcgaagtcagaggagcccaccacttccctccaagccagccatatgtggttgtttcaaaccaccaaagctccctggatctcctcggcatgatggaggttctaccaggacggtgcgtgccgatcgccaaaagagagttgctgtgggcgggaagcgccggactcgcctgttggctggccggtgtgattttcatcgatcggaagagaacaggagacgcgattagcgtgatgagtgaagtcgcccaaaccctgttgactcaagatgtcagggtctgggtcttcccggagggcacccgcaaccacaacggatctatgttgccgttcaagcgcggtgccttccaccttgctgtgcaagcacaggtgcctatcgttcccatcgtgatgtctagctatcaggatttttattgtaaaaaagagagaaggttcacctctggacagtgtcaggtgcgggtgttaccccctgttcccacagagggcctcactcctgacgatgtgcccgcactcgcagacagggtgaggcacagtatgctgacagtcttcagagagatcagcacagacggacgtggaggcggagactacctcaagaagccaggcggaggcggatag

SEQ ID NO: 212635 - DNA, 852 bp, synthetic construct
  misc_feature 1..852: note = Description of Artificial Sequence: Synthetic coding sequence
  source 1..852: mol_type = other DNA
atggacctgtggcctggggcatggatgcttttattgctcctctttctactgctcttatttctcttgcccacattatggttttgtagtccctcggctaagtacttttttaaaatggctttctacaatgggtggatcctgttcctggctgtcctcgcaatccctgtgtgtgcggtgagaggtcgcaacgtcgagaacatgaagattttgagattaatgctgctgcacattaaatatctgtacggcatcagagtggaggtccggggtgcgcaccattttcccccttcccagccttatgtcgtcgtgagcaatcatcaatcttctctggatctgctgggcatgatggaagtactacctgggagatgtgtgcctatcgctaaaagagaactgctttgggcaggctccgccggtctcgcctgctggctggccggagtcatcttcatcgaccgcaagcgaacaggagacgcaatcagcgtgatgtcagaggtggcccagaccctgctgactcaagacgtgcgcgtgtgggtgttccctgagggaaccaggaatcacaacgggtccatgctgcctttcaagcgcggtgcgttccacctagcagttcaggcccaggtacccattgttcctattgtgatgtcctcctaccaagatttttattgcaaaaaagaacggaggttcaccagcggacagtgccaggtccgagtgcttccccctgtcccaaccgagggtctgactcctgatgacgtccccgctttggccgatagagttcgtcattccatgctcaccgtgttccgcgaaatcagtaccgatggcagggggggaggcgactatttaaagaaacctggaggaggaggttag

SEQ ID NO: 212636 - DNA, 852 bp, synthetic construct
  misc_feature 1..852: note = Description of Artificial Sequence: Synthetic coding sequence
  source 1..852: mol_type = other DNA
atggatctgtggcctggagcctggatgcttctgctgctcctgttcttactgctcctgttcttactccccactctctggttctgctcaccctctgccaagtacttctttaagatggctttttataacgggtggattctgtttcttgccgtgctggcaatcccggtgtgtgccgtgagaggccgaaatgttgaaaacatgaagattcttcgccttatgctcctgcacattaagtacctgtacggcattagagtggaagtgagaggcgctcaccactttcccccttctcaaccgtatgttgtcgtgagcaaccaccagtcttctttagatttgttaggcatgatggaggtcttgcccggtcgttgcgtgccgatcgcaaaaagggaactcctatgggccggatctgccggtcttgcttgctggctcgctggggttatattcattgaccgaaagcggaccggagatgcgattagcgtcatgtccgaggtggcccagaccctgctaacccaggacgttagagtctgggtttttcctgaagggacaaggaaccataatggctccatgttgccttttaagcgcggtgccttccacctggcagtgcaggcacaggtacctattgtacccattgtgatgagcagctaccaggacttttattgcaagaaggagaggcggttcacatctggccagtgtcaggttagggttctgccaccagtgcccaccgagggcctcactccagacgacgtcccggctctcgccgatagagtgaggcactcaatgctgaccgtgttccgggagatttcaacagacgggaggggcggaggagattacctgaaaaagccgggtggcggaggatag

SEQ ID NO: 212637 - DNA, 852 bp, synthetic construct
  misc_feature 1..852: note = Description of Artificial Sequence: Synthetic coding sequence
  source 1..852: mol_type = other DNA
atggatctctggcccggtgcatggatgttgctgctgttattgttcctgctcctcctttttttgctgcctacattatggttttgctctccaagcgcaaaatattttttcaagatggctttctataacggatggatcctatttctggccgtcctcgcaataccagtctgtgctgtgcgtggtagaaacgtggaaaacatgaaaatcctgagattaatgctcctccacatcaaatatctctatgggattcgtgtggaagttaggggtgcccaccactttcccccaagccagccatacgtggtcgtgagcaaccatcagagctctctggacttactcgggatgatggaagtcctgccgggacgctgcgtgccaatcgctaagcgcgagctgctttgggctggaagcgcgggactcgcatgttggctggccggagtcattttcatcgacagaaaaagaactggcgacgccattagtgtcatgtccgaagtcgcccagaccctgctaacacaggacgtgcgggtgtgggtgttcccagaggggacacgcaaccacaatggctccatgttgcctttcaagcgcggagcgttccacttagcagtgcaggcccaagtgcccattgtccccatcgtgatgagctcttatcaagatttctattgtaaaaaagaacgaagattcacatccggccagtgccaggttcgagtcttgcctcctgtccctactgagggcctcacaccggatgatgttccagccctcgcggaccgagtgcgacacagcatgctgacagtgttccgcgagatcagcaccgacggccgaggcggaggagattatctcaaaaagccaggtggcggaggttag

SEQ ID NO: 212638 - DNA, 852 bp, synthetic construct
  misc_feature 1..852: note = Description of Artificial Sequence: Synthetic coding sequence
  source 1..852: mol_type = other DNA
atggatctatggcccggagcctggatgctgctcctgctgctgttcctgctcctcctatttcttctgcccaccctctggttttgttcccccagtgcaaagtacttcttcaagatggccttttataatggttggatcctgttcctggcggtcctggcaattcctgtgtgcgctgtgcggggacgtaatgtcgagaacatgaagatccttcgcctgatgctactccacatcaaatacctgtatggcattcgagtagaagtacggggtgcccaccactttcccccatctcagccttatgtggtggtgagcaaccatcaatcatctcttgatctcctgggcatgatggaggtgctgcctgggagatgtgtgccgattgcgaaacgtgagttactctgggctggaagcgcgggtctggcctgttggttggccggagtcatcttcatcgataggaagcgtaccggcgatgcaatttcagtcatgtcggaggtggcgcagacattattaacccaggacgtaagggtgtgggtcttcccagagggcacccgcaaccataacgggagcatgctcccattcaaacggggtgcatttcacctggccgttcaagctcaggtcccgatcgtgccaatagtgatgagctcttaccaggacttctactgcaaaaaggagcgccgattcacatcaggacagtgccaggtcagagtactcccacctgttcctaccgaggggctgacccctgacgatgttcctgctctggccgatagagtccgccatagcatgctgaccgtctttagggagattagtaccgatggtcggggaggaggagactatctgaaaaagcctggtgggggtggatag

SEQ ID NO: 212639 - DNA, 852 bp, synthetic construct
  misc_feature 1..852: note = Description of Artificial Sequence: Synthetic coding sequence
  source 1..852: mol_type = other DNA
atggacttgtggcccggagcatggatgttacttctcctgctcttcctcctgctgctctttcttctcccaaccctttggttctgttctccatccgccaaatatttttttaaaatggcgttttataatgggtggatcttattcctcgctgtcctggccatacccgtgtgcgctgtgcgaggcagaaatgtcgagaatatgaagatacttcgcctgatgctgcttcatattaagtatctgtatggcatacgcgtggaggtccgcggtgctcaccatttcccgccttcgcagccatacgtggtggtatccaaccatcagagctctctcgatttgctcggaatgatggaggtcctaccaggcaggtgcgtgcctatcgcgaagcgtgaactgttgtgggctggaagcgcgggactggcttgctggctcgcaggcgtgattttcatcgatcgaaagcgtactggggatgctatttccgtcatgtccgaggtggcccagaccctcctcacgcaggacgtgcgtgtgtgggtattccccgaaggaactcgcaaccacaacggttcaatgctgcctttcaagagaggagcatttcacctggccgtccaggcacaagtgcctattgttcccatagttatgagctcgtaccaggacttttactgtaaaaaagagaggcggttcacctcaggtcaatgccaggttcgggtgctcccccctgtgccaacagaaggcctcaccccggacgacgtgccagcgttagctgatcgtgtgcgccactccatgctgactgttttcagagagattagcaccgatggcagaggagggggagactatctgaaaaagccgggtggcggaggttag

SEQ ID NO: 212640 - DNA, 852 bp, synthetic construct
  misc_feature 1..852: note = Description of Artificial Sequence: Synthetic coding sequence
  source 1..852: mol_type = other DNA
atggatttatggcctggcgcatggatgttactgctccttctattcctattgttgctgttcttgttacccacactttggttttgctctccaagcgccaaatacttttttaaaatggccttttataatggctggatcctgttcctcgcagttctggctattccagtgtgtgcagtgcgaggcaggaatgtcgaaaatatgaagattctgcggcttatgctattacatatcaagtacctgtacggtatacgagttgaggttcgcggtgctcaccactttcccccttctcagccttacgtcgtcgttagcaaccaccagagctcattagatttgttgggaatgatggaagtgctgccaggtaggtgtgtcccaatcgccaaaagagagttgttgtgggctggcagtgccggactcgcctgctggcttgcgggagtcattttcattgaccgaaagcgtacaggcgacgccatcagcgtcatgtccgaggttgcccaaacgctcctgactcaggacgtgcgtgtttgggtattccctgagggaacacgaaaccataacggttctatgttgccatttaagcggggtgccttccacctggcagtgcaggctcaggtgcctatagtacccatagtcatgtcgagttaccaggacttctactgcaagaaggagaggcgcttcacctcaggtcaatgccaggtgcgcgttctgcctcccgtacctaccgagggcctgacacccgatgatgtgcccgctctggccgatagagtgaggcacagtatgctgaccgtattccgggagatatccaccgacggtcggggagggggtgactacctgaaaaagccaggtggaggaggctag

SEQ ID NO: 212641 - DNA, 276 bp, synthetic construct
  misc_feature 1..276: note = Description of Artificial Sequence: Synthetic coding sequence
  source 1..276: mol_type = other DNA
cacagcgcatcaacccccattttaactcacagtcatccggctcagggaatgatggaggtgctgcccggacggtgcgtccctatcgctaaacgagagctgctatgggccggttccgccggtctcgcctgctggctggccggtgtcattttcatagacaggaaaagaactggcgatgcaatctctgtcatgagcgaagtggctcagaccctgctcacgcaagacgttagccatcccggacttctactacaggagggcgcttctctgcacctcgggtag

SEQ ID NO: 212642 - DNA, 276 bp, synthetic construct
  misc_feature 1..276: note = Description of Artificial Sequence: Synthetic coding sequence
  source 1..276: mol_type = other DNA
cattctgcaagcacacctattttgacccactctcaccctgcacagggcatgatggaagtccttccaggtcgatgtgtgcctatcgccaagcgcgagctgctatgggcaggcagcgccggactggcctgctggctcgctggagtgatctttatcgatcggaaacgtactggcgacgcaatttccgtaatgtccgaggtcgctcagaccctgctcacccaagacgtgagccatcctggacttctcctgcaggaaggggcaagcttgcacctgggatag

SEQ ID NO: 212643 - DNA, 276 bp, synthetic construct
  misc_feature 1..276: note = Description of Artificial Sequence: Synthetic coding sequence
  source 1..276: mol_type = other DNA
cacagtgcctccacccccatcctaacccactcgcatccggcacaaggaatgatggaagtacttccaggcaggtgcgttccaattgccaagcgggaattgctctgggcaggttctgctgggctagcctgctggttggcgggtgtgatttttattgaccgaaaacgcaccggagacgccattagcgtgatgtcagaagtggcgcaaactctcctaacgcaggatgtgtcacaccccggtctgctcctgcaagaaggagcaagtttgcatcttggctag

SEQ ID NO: 212644 - DNA, 516 bp, synthetic construct
  misc_feature 1..516: note = Description of Artificial Sequence: Synthetic coding sequence
  source 1..516: mol_type = other DNA
atgatggaggtgttaccaggacgctgtgtgccaatagccaaacgtgaattactgtgggctggcagcgctgggctggcttgttggctggcaggggtgatcttcatcgacaggaagaggaccggagacgccatcagcgtgatgtccgaagtcgctcagacattgctgacccaagacgtgagagtctgggtctttccagaggggacacgcaaccacaacggcagtatgttgccattcaagagaggagcatttcatcttgccgtgcaggcacaagtgccaatcgtgcccattgtgatgagctcctaccaagacttttactgtaagaaggaacggagattcaccagcggccagtgccaagtgcgcgtgctccctccagtccctaccgaggggttaacacctgacgacgtgcccgctctagccgaccgggtgcgccactctatgctcaccgtttttagggaaatctctacagatggacgcggtgggggagattacctgaagaaacctggcggtgggggatag

SEQ ID NO: 212645 - DNA, 516 bp, synthetic construct
  misc_feature 1..516: note = Description of Artificial Sequence: Synthetic coding sequence
  source 1..516: mol_type = other DNA
atgatggaggtcttgcccggtcgctgtgttccaattgcgaagagagagctcctttgggctggctcggccggactggcctgctggctggccggagtgattttcatcgataggaagaggactggcgatgctattagtgtgatgagcgaagtggctcagaccctactaacccaggacgtgcgagtgtgggtattcccagaaggcacccgcaaccacaacggtagcatgctgcctttcaaaaggggcgcattccacctcgcggttcaggcccaggttccgatcgtcccaattgtgatgtccagttatcaagacttttactgcaaaaaagagcggagatttacatccgggcaatgtcaagtgcgcgtgctccccccagtgcccacagaagggctaacacctgatgatgtgcccgctctcgctgatagagtacgtcactctatgttgaccgtgttcagggagatctctaccgatggccgtgggggaggcgactacctgaagaaacccggtggtggtggatag

SEQ ID NO: 212646 - DNA, 276 bp, synthetic construct
  misc_feature 1..276: note = Description of Artificial Sequence: Synthetic coding sequence
  source 1..276: mol_type = other DNA
catagcgcaagcactccaattttaacccactcccatcccgctcagggtatgatggaggtgctgcccggacggtgtgttccaatcgcaaaacgggaactgttgtgggcgggtagcgccggactggcctgctggttagcaggagtcatctttatcgatcgcaagagaacaggggacgcaattagtgtgatgagcgaagttgcccagaccttactgactcaggatgtaagtcaccctggcctgctcctccaggagggagcctccctccacttgggatag

SEQ ID NO: 212647 - DNA, 276 bp, synthetic construct
  misc_feature 1..276: note = Description of Artificial Sequence: Synthetic coding sequence
  source 1..276: mol_type = other DNA
cacagcgcgtccacgcctatattgacccacagccaccctgcgcaaggtatgatggaggtgcttcccggacgatgcgtccctatcgctaagcgcgagcttttatgggcagggtccgccggtctcgcttgttggctggcaggtgtcatcttcattgatcggaagagaaccggcgatgcaatttccgtcatgtcagaggttgcacaaactttacttacccaggacgtaagtcaccctggtctgctcctgcaggaaggagcctccctgcacctgggctag

SEQ ID NO: 212648 - DNA, 276 bp, synthetic construct
  misc_feature 1..276: note = Description of Artificial Sequence: Synthetic coding sequence
  source 1..276: mol_type = other DNA
cacagcgcgtccaccccaattctcacccacagtcatcccgctcaagggatgatggaggtgttaccgggacgctgcgtgccaattgctaagagagagctcctgtgggcaggtagcgcagggctggcatgttggcttgccggagttatctttatcgaccgtaagcgaaccggagacgccatcagcgtaatgtccgaagtagcccagactctgttgacccaggacgtgagtcacccgggactgctgctgcaggaaggcgcttctcttcacctgggttag

SEQ ID NO: 212649 - DNA, 516 bp, synthetic construct
  misc_feature 1..516: note = Description of Artificial Sequence: Synthetic coding sequence
  source 1..516: mol_type = other DNA
atgatggaggtactcccagggaggtgtgtgccgattgcaaagcgagagctgttatgggcagggtctgctggattggcttgctggctggctggggtgattttcatcgatagaaaacgcaccggcgacgcgatatccgtcatgtctgaggtggcccagacgctgttgactcaggacgtgagggtctgggttttccctgaagggacacgaaatcacaacggctctatgctgccatttaagagaggcgctttccacctcgctgtgcaggcgcaggtcccaatcgtgcctatcgttatgagcagttaccaagacttttattgcaaaaaggagcgaagatttaccagcggacagtgccaggtgcgggttcttccccctgtgcccacagagggactgacccccgacgacgtaccagctctggcggacagagtccgccactcaatgcttaccgtcttccgggagataagcaccgacgggaggggagggggagattatttaaagaaaccgggtggaggcggttag

SEQ ID NO: 212650 - DNA, 516 bp, synthetic construct
  misc_feature 1..516: note = Description of Artificial Sequence: Synthetic coding sequence
  source 1..516: mol_type = other DNA
atgatggaggtcttgcccggacgatgcgtgcccatcgccaaacgcgaactgttatgggcagggtccgccggactggcttgctggctagcaggcgttatctttatcgaccgaaagcgcacaggtgacgcaatttctgtgatgtccgaggttgctcagaccctgctgacacaggacgtaagagtgtgggtcttcccggaaggaacgcgaaaccacaatggctcaatgctccccttcaaacggggagctttccacctcgccgttcaggctcaggtcccaattgtgcccatagttatgtcctcctatcaggatttttactgtaaaaaagaacgcaggttcacttccggccagtgtcaggtgagagtgctgcccccagtgcccactgagggccttacccctgatgatgtgcctgccctcgctgatagggtgaggcattccatgttgactgtctttagggagatctcaacagacggccgagggggaggggactatttaaaaaaacccggtggagggggttag

SEQ ID NO: 212651 - DNA, 276 bp, synthetic construct
  misc_feature 1..276: note = Description of Artificial Sequence: Synthetic coding sequence
  source 1..276: mol_type = other DNA
catagtgctagcaccccaattcttactcactcacatccggctcagggaatgatggaagtgctgccaggcagatgtgttccaatcgccaaacgcgaattgctgtgggcgggtagcgctgggctcgcgtgttggctcgccggagttatatttattgatcgcaagagaactggcgacgctatcagtgtcatgagcgaggtggcccagactctacttacccaggatgtatcacatcctggtcttttgctacaagagggagcctctctgcacctggggtag

SEQ ID NO: 212652 - DNA, 516 bp, synthetic construct
  misc_feature 1..516: note = Description of Artificial Sequence: Synthetic coding sequence
  source 1..516: mol_type = other DNA
atgatggaggttctgcctggacgctgtgtgccgattgccaaaagggaactgctctgggctggctcggccggactggcgtgctggttggcgggtgtgattttcatcgacaggaagcggacaggagatgctatatccgtgatgtccgaggtcgcccagactcttttgactcaagacgttcgtgtttgggtgtttcccgaagggacccgaaaccacaacggcagtatgttgccattcaagaggggggcatttcatctggccgtgcaggcacaggtccccatcgtgcccatcgtaatgtctagttatcaggatttctattgtaaaaaagagcgacggttcacttctgggcagtgccaggtgcgagtgctgcctcccgtgccgaccgagggtctgaccccagacgatgtgcctgccctcgctgatcgtgtccggcatagtatgctgacagtgttcagagagatttctacggacggcagggggggtggcgactacctgaaaaagcctggtggcggaggctag

SEQ ID NO: 212653 - DNA, 516 bp, synthetic construct
  misc_feature 1..516: note = Description of Artificial Sequence: Synthetic coding sequence
  source 1..516: mol_type = other DNA
atgatggaggtgctgcccggacgatgtgtgcctatcgccaaaagagagctgctgtgggccggatccgcaggacttgcctgttggctggcgggagtgatcttcattgaccggaagagaacaggcgatgctatttcagtaatgagcgaggtggcccagacactactgacgcaagatgtgagagtttgggtgtttcccgagggaacaaggaaccacaacggcagcatgctccccttcaagcggggtgccttccacctcgctgtccaagcccaagtgcccatagttcccattgtgatgtccagctaccaggacttttattgtaaaaaagaaaggcggtttactagcggccaatgccaggtccgcgtgctgccgcctgtccctacagaagggctcaccccagacgacgttcctgcgcttgcagatcgagtgaggcactctatgctgacagtgtttcgggaaatttcaacagatggcagggggggtggagactaccttaaaaagccaggcggaggtgggtag

SEQ ID NO: 212654 - DNA, 741 bp, synthetic construct
  misc_feature 1..741: note = Description of Artificial Sequence: Synthetic coding sequence
  source 1..741: mol_type = other DNA
atggagctgtggccgtgtctcgccgcagccctgctgttactcttgctcctcgttcagctctcacgtgctgcagaattttatgccaaagttgccctttattgcgcgttatgctttacagtttccgccgtagcatcactggtatgcttgttgaggcacggtggcaggacggttgagaatatgagcatcatcggatggttcgttagatcttttaagtacttctatggtctacgcttcgaagtgcgggacccacgacgactgcaggaagctagaccatgtgttatcgtttctaatcaccaatctatattggacatgatgggcttgatggaggtattgccagaacgctgcgtccagattgccaagcgggaacttctcttcctaggacccgtgggtctcattatgtatttgggcggtgtcttctttatcaataggcagcggtcttcaaccgccatgacagtcatggctgatctaggggaacggatggtgcgtgaaaacgtgccaatcgtgcctgtcgtttatagttcctttagctccttctacaataccaagaaaaagttttttacatccggtaccgtcacagtgcaagtgctggaggcaatacctacttcaggactgaccgctgccgacgtacccgctctggtggatacctgtcatagggccatgcgcacaacgttcctccatatcagtaaaactccccaagaaaatggcgctaccgctggtagcggagtgcagccggctcaatag

SEQ ID NO: 212655 - DNA, 837 bp, synthetic construct
  misc_feature 1..837: note = Description of Artificial Sequence: Synthetic coding sequence
  source 1..837: mol_type = other DNA
atggaattatggccctgtctggcggcagccctgctgttgctgctgctccttgtccagctctctcgtgccgctgaattttacgctaaagttgcgctttattgcgccttgtgttttactgtgagcgctgtcgcctccttggtgtgccttttgcgacatgggggtcggactgtggagaatatgtccataattggatggtttgtccgaagcttcaagtatttttacggcctcagattcgaagtgcgggaccctcgccgacttcaggaagcaaggccatgcgtgatcgtctctaatcatcagtctatcttagatatgatggggctcatggaagtgttaccagaaagatgtgtccaaattgcaaagagggagctgctattcctcgggccagttggactgattatgtatttaggaggagtgtttttcataaatcgacagagatctagcaccgcaatgaccgtgatggctgatttgggcgagagaatggtgagagagaatcttaaggtgtggatatacccagaggggacaagaaatgataacggggacttactacccttcaaaaagggtgccttctaccttgcagtgcaggctcaggtccccattgtacctgtggtttatagctctttctcttcattctacaatactaaaaaaaaatttttcacgagcggaacagttacagttcaggtgttggaagcaatcccaacgtcgggcctgaccgccgcagacgtgccagcattggtcgatacctgtcatagggccatgcgaactacgttcctgcatatctccaaaacccctcaggagaacggggctacagctggatctggagtgcagccagctcagtag

SEQ ID NO: 212656 - DNA, 837 bp, synthetic construct
  misc_feature 1..837: note = Description of Artificial Sequence: Synthetic coding sequence
  source 1..837: mol_type = other DNA
atggaactgtggccttgcctagccgcagccctgctgctgcttctgctgctggtccagctgagccgcgcagctgagttctacgcaaaagtcgccctatattgcgcactatgttttacagtaagtgctgtggcctcattagtatgcctgctgagacacggcggacgcaccgttgagaacatgtcaattatcgggtggtttgtgcgttctttcaaatacttctacgggctgcgttttgaggtcagagacccaagacgactgcaggaagcaaggccatgtgttatagtgtcgaaccatcagtccatactagatatgatggggcttatggaagtgctccctgaaaggtgcgttcagatagcaaaacgagagctgctctttcttgggccagtaggactgatcatgtatttgggcggtgtgttttttatcaaccgtcagagaagctcaacagccatgacagtgatggccgacttaggcgaacggatggttcgggagaatctgaaggtgtggatctaccccgaaggaactagaaatgataacggcgacctcttgcccttcaaaaagggggctttctacctggccgttcaagctcaggtccccatcgtgcccgtggtctactcctctttctcctccttttacaatactaaaaagaagttctttacaagcggtaccgtcactgtgcaggtgctggaggccatcccgacctcaggactgactgccgctgatgtccccgcactggtggatacttgccaccgggctatgaggactactttcctacatattagcaagactccacaggagaacggagccacagcaggctccggtgtccagcctgcacaatag

SEQ ID NO: 212657 - DNA, 1371 bp, synthetic construct
  misc_feature 1..1371: note = Description of Artificial Sequence: Synthetic coding sequence
  source 1..1371: mol_type = other DNA
atgtttctgctgcttccattcgactccctgatcgttaatctgttaggaatcagtctgacggtcctgttcacactactccttgtgttcatcatcgtgcccgcaatctttggggtctcctttggtattcgcaaactgtatatgaagagcctccttaagatcttcgcctgggccaccctgcgcatggagcgaggagcaaaggaaaagaaccatcagctctataagccgtatactaacggcatcattgccaaagacccaacaagtttggaggaggagattaaagagataaggaggtctgggtctagtaaggcattggacaatacacctgaatttgaactttccgacatattctacttctgccgcaagggtatggaaaccatcatggacgatgaagttacaaagaggttcagcgccgaggaactggaatcttggaatctattgtctcgcacaaactacaactttcagtatatcagtcttcgtctaaccgtcctctggggcttgggtgtgctgattcggtactgcttcctcctccctctcaggatcgcgctagctttcacaggcataagtctgctagtcgtgggcaccacagtggttggatatttacctaacggccgtttcaaggagtttatgtcgaaacatgtgcatctgatgtgttacaggatctgtgtgcgggcacttacagctataattacttaccacgatcgagaaaaccgaccccgaaacggtgggatatgcgtcgcaaaccatacgtctccgatcgacgtgatcatcctcgcttccgacggttattacgctatggtgggccaggtgcacgggggattaatgggtgtgattcagcgagctatggttaaggcatgcccgcacgtgtggttcgagcgctccgaagtgaaggacagacacctggttgcaaagaggctgacagagcacgtacaagataaaagtaaattaccgatcctgatctttcctgagggaacatgtatcaacaacacatccgtgatgatgttcaaaaaagggtctttcgagatcggcgcaaccgtctaccctgtcgctattaagtacgacccacaatttggagatgccttctggaatagctccaagtacgggatggtgacctacctactacggatgatgacctcttgggccatcgtctgcagtgtgtggtatcttccgccaatgactagagaggcggacgaggatgctgtccagtttgctaatagggtgaaatctgcgattgcccgacaggggggattggtggacttgttatgggacgggggtctaaaacgtgaaaaggtcaaagacacattcaaggaggagcaacaaaaactttattctaagatgattgtcggtaatcataaagaccgatctagatcgtag

SEQ ID NO: 212658 - DNA, 1305 bp, synthetic construct
  misc_feature 1..1305: note = Description of Artificial Sequence: Synthetic coding sequence
  source 1..1305: mol_type = other DNA
atggagggtgccgaactcgctggcaaaatcctatcaacatggcttacactggtcctgggatttattctcctcccctccgttttcggagtctcattgggcatcagcgaaatctatatgaagatcctggtcaaaaccctggagtgggcaaccattcggatagagaaagggacccctaaagaaagcattctgaagaactctgctagcgttggaataatacagcgcgacgaaagtcctatggagaaagggttgtctggtttgaggggacgagattttgagctcagcgacgtattctactttagcaagaaaggactagaggcaatcgttgaagatgaagtgacccaacgcttttcaagcgaggaattggtatcttggaacctcctcaccagaaccaacgtgaacttccagtacatttcgttacgcctcaccatggtgtgggttctaggtgtgattgttcggtattgcgtgttacttccacttagagttaccctggcattcatcgggatcagccttctggtaattggaaccaccctcgtcggccagcttccagacagctctcttaagaattggcttagcgagctcgtgcacttgacctgttgtcgaatttgcgtgagagctctttcaggaacgatccattaccacaataagcagtacaggcctcagaaagggggaatttgtgtcgcgaatcacacttcaccaatagacgtcctcatcctgacgaccgacgggtgttacgcgatggtgggacaggtccatggcggactgatggggatcatccaacgtgctatggtgaaagcctgtccacatgtgtggtttgaacgttcagagatgaaagaccggcacctggtaaccaaacgactgaaggaacacatcgctgacaagaagaagcttcccatactgatctttccagagggcacgtgcataaacaatacgtccgtaatgatgtttaagaagggctcttttgaaatcgggggtacaattcatcctgtagctatcaagtacaaccctcagtttggcgacgcattttggaactcatccaaatacaacatggtcagctaccttctgcgaatgatgacaagttgggcaatcgtgtgtgacgtctggtacatgccccctatgacacgagaggagggcgaagacgcggttcagttcgccaatagggtcaaaagcgcgatcgccatccagggcggactgacagaactgccatgggacggtggcctgaaaagagctaaggtcaaggacatatttaaagaggagcagcagaagaactatagcaagatgatcgtgggcaatgggtctctaagctag

SEQ ID NO: 212659 - DNA, 1305 bp, synthetic construct
  misc_feature 1..1305: note = Description of Artificial Sequence: Synthetic coding sequence
  source 1..1305: mol_type = other DNA
atggagggggctgagcttgccggaaaaattctgtctacctggcttacccttgtgttaggctttattctgctgccctccgtgttcggtgtgtctcttggtattagtgagatttacatgaaaatactggtgaagacgctggagtgggctactattcgcatcgagaaaggaacccccaaggaaagtattctgaagaatagcgcctcggtgggtataatccagcgtgatgagtccccaatggaaaaggggctgagcggcttgcgtgggagagacttcgagttgagcgatgtgttttatttttcgaagaaagggcttgaagctattgtagaagacgaggttacccaacgcttctcttcagaggaattggtatcttggaacctgctgacgcggacaaatgttaattttcaatacatatcacttcggctcactatggtttgggtactcggcgtgatcgttcgatattgtgtcttgctgcccctgagagtgacgctagctttcatcgggatctctttattagtgattgggactacgctcgtgggacagctgccagactcatctttaaaaaattggctgtctgagcttgtgcatctcacatgctgcagaatttgcgtaagggcattaagcgggaccattcactatcacaacaagcagtacagaccccagaaaggcggtatttgtgtggctaatcacacttcgcccatagacgtgctgattttaactactgatggttgctacgctatggtcggacaagtccatggcggactgatgggcataattcaacgcgctatggtgaaggcctgcccgcacgtgtggttcgaacggtctgagatgaaagatcggcacctggtgactaagcgcctgaaagaacatatagccgataaaaagaagctgccaattctgatttttccagaaggtacctgtatcaataatactagcgtcatgatgtttaagaaagggagcttcgagatcggcggaacaattcacccggtcgcaataaagtacaacccccagtttggcgacgcattctggaattcctccaaatataacatggttagttatctgctccgcatgatgacaagctgggcaatcgtctgcgacgtctggtacatgcccccaatgacccgggaggagggagaggacgccgtgcaatttgcaaatcgggttaagtctgctatcgccatccagggcggactgaccgaactcccttgggatgggggtctcaaaagagctaaagtgaaggatattttcaaggaagaacagcagaagaactacagcaagatgatcgtggggaatgggagcttgagttag

SEQ ID NO: 212660 - DNA, 1506 bp, synthetic construct
  misc_feature 1..1506: note = Description of Artificial Sequence: Synthetic coding sequence
  source 1..1506: mol_type = other DNA
atgttcacactcccacagaaagattttcgggctcccactacttgcctggggcctacctgtatgcaggacttgggaagttcacatggcgaggacctcgagggcgaatgtagtagaaagctagaccagaaactgcccgagctccggggtgtcggtgaccccgcaatgatcagctcagacacgagttatttgtcctctagagggagaatgattaaatggttctgggactctgcggaggagggttaccggacttaccacatggatgagtacgacgaagacaaaaatccgtcaggcatcattaaccttggcacatcagaaaataagctatgcttcgacttattgtcttggcgcctctcccagagagatatgcaacgcgtggaacccagcctcctgcagtatgcagattggagggggcatctgttccttcgggaggaagtggcgaagtttctgtcattctactgcaagtcgccagtccccttacggcctgaaaacgtggtggttctgaatggcggagcctcgctgttcagtgcactggccacagtgctgtgtgaagcaggagaggcattcctgataccgactccctattacggcgctattacacagcatgtatgtttgtacggaaacattagattggcgtatgtctacctggatagcgaagtaacaggtctggatacacgccctttccagctgactgtcgagaagctggagatggcactgcgcgaggcacatagtgaaggcgttaaggtgaagggccttatcctgatttcgccccaaaacccactcggtgacgtgtacagtccagaagagctgcaggaatacttggtgttcgccaagcggcacagattgcacgtgattgtcgacgaggtgtacatgctgagcgtgttcgagaagagcgtggggtatagaagtgtgctctcgttggaaaggttgccagacccccagaggacccacgtcatgtgggcaacctccaaggattttggtatgtctggtctgaggtttggaacactttacactgagaatcaggatgtggccaccgccgtagcctctctgtgccgctatcacggactgagcgggctggtccagtaccagatggctcagctgctgcgggaccgggactggattaatcaggtatatcttcctgagaatcacgccagattaaaagcagcccacacctatgtttccgaggaactccgcgcattaggtattccatttctgtctcgcggagctggcttcttcatctgggtagacctgcgaaaatacctccctaaaggtacgttcgaagaagaaatgctgctgtggagaagatttctcgacaacaaggtactgctgtccttcggcaaagctttcgagtgtaaagagccagggtggttccgcttcgtgttcagcgaccaagtccaccggctgtgcctcggaatgcaacgcgtccagcaggtgcttgctggtaaatctcaggtggccgaggatccccgtcccagtcaaagtcaggagccctctgaccagcgcagatag

SEQ ID NO: 212661 - DNA, 477 bp, synthetic construct
  misc_feature 1..477: note = Description of Artificial Sequence: Synthetic coding sequence
  source 1..477: mol_type = other DNA
atgttcacactccctcagaaggattttcgcgcaccgaccacctgtctgggccctacatgtatgcaggatcttggctcaagccacggcgaggatctggagggcgagtgcagcagaaaactggaccagaagctcccagagctcagaggggtcggcgaccccgcaatgatcagttcagatacctcatacctcagcagcaggggacgaatgatcaaatggttctgggactcagcggaagaaggttaccgcacctatcacatggacgaatacgatgaggacaaaaatcccagtgggataatcaaccttggcacttccgaaaataagctgtgctttgacctgttgtcctggaggcctcccggagggtcaggccaagtgcccgtcttcctccttcaggagccctctacaccgcagacacgcgaatgcgggtgtccagagtggtggtgtctggcacttctgtgctctggacacggtgccgtctag

SEQ ID NO: 212662 - DNA, 420 bp, synthetic construct
  misc_feature 1..420: note = Description of Artificial Sequence: Synthetic coding sequence
  source 1..420: mol_type = other DNA
atgtttacactccctcagaaagattttcgggctccgactacatgtctcggtcctacgtgcatgcaagatttggggtcaagtcacggcgaggaccttgaaggggagtgcagcaggaaactcgatcaaaaactgcctgagttgaggggtgtgggcgaccctgcaatgatctcatcagatacaagttatctgtcaagccggggtaggatgatcaagtggttttgggactctgctgaggagggctataggacctaccacatggacgaatatgatgaggacaagaatccaagcgggatcatcaacctcgggaccagcgaaaacaaactgtgttttgacctcctctcctggcgcctgtcacaaagggatatgcagcgggttgaaccctctctactgcaatatgccgattggagaggacacttgtag

SEQ ID NO: 212663 - DNA, 234 bp, synthetic construct
  misc_feature 1..234: note = Description of Artificial Sequence: Synthetic coding sequence
  source 1..234: mol_type = other DNA
atgtttacgctaccccagaaagatttcagagcccctaccacgtgtctcggtcccacatgtatgcaagacttgggctctagccacggtgaggatctggagggggagtgcagcagaaagctggatcagaaactgccggagctaaggggggttggcgatccagcgatgatctcatccgatacttcctacctgtcttccagaggaaggatgattaagtggttctgggactccgcatag

SEQ ID NO: 212664 - DNA, 780 bp, synthetic construct
  misc_feature 1..780: note = Description of Artificial Sequence: Synthetic coding sequence
  source 1..780: mol_type = other DNA
atgtccaagtataaactcattatgctgaggcacggcgagggagcttggaacaaggaaaacagattctgctcatgggtcgatcagaaactcaatagcgagggtatggaagaagcccgaaattgcgggaagcagctcaaggccttaaacttcgagttcgatcttgtgttcacctcagtgttaaacaggtcaatacatacggcatggctgattttggaggaactgggccaggagtgggtccccgtagagtcttcctggagactcaatgagcgccactacggcgcactcattggactcaaccgcgaacagatggcccttaatcatggcgaggaacaggtgcggctctggcgccgatcatacaatgtgacgccacccccaatagaggagtcacatccatattatcaggaaatctacaatgatcggagatacaaagtgtgcgacgttccccttgaccagctaccaagaagcgaatccctgaaagatgtgctggaacgtctgctgccttactggaacgaacgcatagcacccgaagtgctccggggtaagaccatactgatttctgcacacgggaacagcagtcgtgctcttttaaagcaccttgaggggatatcagacgaagacatcattaatatcacgcttccaactggtgtccctattcttctggaattggacgaaaaccttcgcgctgtgggccctcatcaatttctcggcgatcaggaggcgattcaggccgcaattaagaaggtggaggaccaggggaaagtaaaacaagcaaaaaaatag

SEQ ID NO: 212665 - DNA, 780 bp, synthetic construct
  misc_feature 1..780: note = Description of Artificial Sequence: Synthetic coding sequence
  source 1..780: mol_type = other DNA
atgagtaagtacaaactaatcatgctgaggcacggcgagggcgcttggaataaggagaatcgtttctgcagctgggttgatcagaagctcaacagtgaaggtatggaagaggcccgtaactgcggaaagcaacttaaggcgttaaatttcgaatttgatctggttttcaccagtgtcctcaatcggtccattcacactgcatggttgatcttagaagaacttggacaggagtgggtacccgttgaaagttcgtggagactgaatgagagacactacggcgcacttattggactgaacagagaacaaatggccttgaatcacggggaagagcaagtcaggctgtggcggagaagctataatgtgacgccacctccaatcgaagaaagtcatccatactaccaggaaatctacaacgaccggagatataaggtgtgcgatgtcccccttgatcaactgcccaggagcgagagcctgaaagatgtgttggaacggcttctgccctactggaatgagcggatcgcacccgaggtccttcgaggtaagactatcctgatttcggcgcatggtaattcatccagagctctcttgaagcacctcgaagggatctccgacgaggacatcatcaatataacactccctaccggagtgcctattttgctggagttggatgagaacttgcgagccgttgggcctcatcagtttcttggggaccaagaggcaatacaggcagcaatcaaaaaggtggaggaccaaggaaaagtgaagcaggccaaaaagtag

SEQ ID NO: 212666 - DNA, 780 bp, synthetic construct
  misc_feature 1..780: note = Description of Artificial Sequence: Synthetic coding sequence
  source 1..780: mol_type = other DNA
atgtcgaagtacaagcttattatgttgcgccacggggagggcgcatggaacaaagagaatcgcttctgctcctgggtagaccagaagctgaacagcgagggcatggaggaagcacgcaactgcgggaagcagctcaaagccctgaacttcgaattcgacttagtgttcacgagcgtcctgaacagatctattcatacggcatggttgatactcgaagagctggggcaggagtgggtcccagttgaaagttcttggcgcctgaacgaacggcattatggcgcattgatcggtcttaacagagagcagatggctttgaaccatggtgaggaacaggtcagattatggcggagaagttacaatgtcacccccccaccaatcgaagaatcacacccttattatcaggagatatataatgataggaggtataaagtatgcgacgtgcccctggaccagctgcctcgcagtgagtcactcaaggatgttctggagaggctactgccatactggaatgaaagaatcgcccctgaagtgttgagaggtaaaacaatccttattagcgcccacggtaattccagtagggccctgctgaagcatcttgaaggtatcagcgatgaagacattattaacatcaccctccctacaggggtgcccattttgctagaactggacgaaaatttgagggctgtgggcccacatcaattcctgggggatcaagaagccatccaagcagcaataaaaaaggtcgaagaccagggaaaggtcaagcaggccaagaaatag

SEQ ID NO: 212667 - DNA, 237 bp, synthetic construct
  misc_feature 1..237: note = Description of Artificial Sequence: Synthetic coding sequence
  source 1..237: mol_type = other DNA
atgagcaagtataaactcatcatgctgagacacggggaaggagcctggaacaaagagaaccgcttttgttcctgggttgatcagaagctgaatagcgaaggcatggaggaagctaggaattgcggcaagcagctgaaggctctcaactttgagttcgacctagtattcacctcagtcctgaaccgctcgatccataccgcttggctcatcctagaggagctgggccaggagtggtag

SEQ ID NO: 212668 - DNA, 894 bp, synthetic construct
  misc_feature 1..894: note = Description of Artificial Sequence: Synthetic coding sequence
  source 1..894: mol_type = other DNA
atgaatcgaggattcagcaggaaatctcacacgtttttaccaaaaatttttttcaggaagatgtcctcatccggagccaaagacaagcctgagttgcagttccctttcctgcaggatgaagacaccgttgcaacactgctggaatgcaaaacactgtttattctccgtggactgcccggtagtggaaaaagcaccctggccagggtaattgttgataagtaccgtgatgggaccaagatggtgagcgccgatgcctacaagattacacccggtgccagaggtgccctgaaggaactgcgacaatttgtacccggagatgagccacgggaaaaaatggacttggttacatacttcggcaagcgcccaccgggagtgctgcactgcaccactaaattctgcgactatggaaaagcccctggagcagaggagtacgcccagcaggacgttctcaagaagtcatatagtaaagctttcaccctcacaatttctgccctgttcgtaaccccgaaaacaactggcgctcgggtcgaactttccgaacaacagctccagctgtggcccagcgacgtcgacaagctgagtccaaccgacaatctcccacggggatctcgcgcacacattactctcggatgcgcagctgatgtggaagccgtacagaccggcctggatcttctcgagattttacgtcaggagaagggcggtagccggggagaggaagtgggagagctgagtcggggtaagttgtactcactcggtaacggtagatggatgctgacactggccaagaatatggaagtgcgtgccattttcacaggctactacggcaaaggaaaaccggttccaacccagggatctagaaagggaggcgcactccagagctgtaccatcatttag

SEQ ID NO: 212669 - DNA, 1206 bp, synthetic construct
  misc_feature 1..1206: note = Description of Artificial Sequence: Synthetic coding sequence
  source 1..1206: mol_type = other DNA
atgtccagcagtggggctaaggacaagcctgaactccaatttccatttctgcaggatgaggacacagtggctactctcctcgagtgcaaaaccctttttatcctgagaggcctccctggatccggaaaaagtaccctcgccagggtgatcgtcgacaaatacagagacggaacgaagatggtctctgccgatgcttataaaattacacctggagcaagaggcgcttttagcgaggagtataaaagactcgatgaggacttagcagcctactgtagacggagggacatccgaatactggtgctggatgacacaaatcacgagcgggagcgtctggagcaactctttgaaatggctgaccagtaccagtaccaagtcgtattggtagagcctaagaccgcctggcggctcgactgcgcccaactcaaagaaaaaaatcaatggcagttgtctgcggacgatctgaagaagctgaagcccggactcgaaaaggacttcttgccactttattttggatggttcctgacaaagaaatctagtgaaactctgcggaaggccggtcaggtgttcttggaagagctgggtaatcacaaggcatttaagaaggaactcagacagttcgtccccggagacgaaccgcgagaaaagatggatctggtgacctattttggtaaacgacctcccggagtgttgcactgcacgactaaattctgcgactatgggaaagcacccggagccgaggaatacgctcagcaggatgtactcaagaagtcctactcgaaggcattcacactgacaataagcgctctgttcgtcactccaaagacaaccggtgcaagagtggagttgagcgaacagcagttgcaactgtggccatccgacgtggacaaattgtctccgaccgacaatcttcctcggggttcccgcgctcacataacgctaggttgtgccgctgacgtcgaagcagttcagacaggcttagacttgctggagattttgaggcaggaaaaaggcggatctagaggagaggaagtgggagagctgtctaggggcaagctgtactctctcggtaacggccgatggatgctcacactagcaaaaaacatggaggtgcgagctatctttaccggttattacgggaaagggaagcccgtgccaacacaggggtcaaggaaggggggtgctctgcagagctgtaccataatctag

SEQ ID NO: 212670 - DNA, 1266 bp, synthetic construct
  misc_feature 1..1266: note = Description of Artificial Sequence: Synthetic coding sequence
  source 1..1266: mol_type = other DNA
atgaaccgaggtttttcacggaaatcccatacttttcttcccaaaatcttctttcgcaaaatgtcatcctcgggagcgaaggacaaaccggaactgcaattcccgtttctgcaggacgaagacaccgttgctacactgcttgagtgtaaaaccctctttatacttagaggcctgcccggtagtggtaagtcaacattggccagggtgatcgtagataaatacagagacggcactaagatggtgtccgccgacgcctacaagatcactcctggagcacgaggggcttttagtgaagaatacaagcgccttgatgaggacctagccgcatactgtagaagaagggatattagaatacttgtgcttgatgacacgaaccacgagcgggagcgattagagcagctattcgagatggctgatcagtaccaataccaggtcgtcctggttgagccgaagacagcttggcggctggattgtgctcagttaaaggaaaagaaccagtggcagttaagcgccgacgacttgaaaaagttgaagcccggactggaaaaagacttcctgccgctgtacttcggctggtttctcacaaaaaagtcttccgagactctgcggaaagcgggacaggtgtttttggaagaactgggtaaccacaaagcctttaagaaggagctgcgtcagtttgttcctggtgatgagcctagggaaaagatggacctagtgacgtattttgggaaacggcctcccggagtcctgcattgtaccaccaaattttgtgattatgggaaggcacctggcgcagaggaatatgcccagcaggacgttctgaaaaagtcctactccaaggctttcaccctcacgatctctgctctttttgtaactccaaaaacaaccggggcacgcgttgagctgagcgaacagcagctgcagttgtggcctagcgacgtggataagctgtcccccaccgataatctcccgcgtggctctagggcccatattaccctcggctgtgcagctgacgtggaggcagtgcagactggcctcgacctgctggagatcttaagacaggaaaagggcggaagccgaggtgaggaggtgggagaactcagcaggggcaagttatactcactggggaatggtcgctggatgctcaccctagcaaagaacatggaagttcgggctatctttaccgggtattacggcaagggaaaacccgtgcccacacagggctcccgaaagggaggggctctgcaatcttgcacgattatttag

SEQ ID NO: 212671 - DNA, 174 bp, synthetic construct
  misc_feature 1..174: note = Description of Artificial Sequence: Synthetic coding sequence
  source 1..174: mol_type = other DNA
atgtctagttccggcgcaaaagacaaacccgagctccagttcccctttttgcaggacgaggataccgttgcaacactgcttgaatgcaaaacgctgtttatcttgcgcggacttccagggtctggcaagagcaccctcgcacgcgtgatagtggataagtaccgcgacggctag

SEQ ID NO: 212672 - DNA, 1419 bp, synthetic construct
  misc_feature 1..1419: note = Description of Artificial Sequence: Synthetic coding sequence
  source 1..1419: mol_type = other DNA
atgaagtttctcatctttgcgttctttggcggtgtccatctactcagcctgtgctctggaaaagccatctgcaaaaacggcatatcaaagagaacattcgaagaaattaaagaggaaattgcttcatgtggggacgttgcgaaagcgatcatcaatctcgccgtgtatggaaaagctcagaataggagctacgagcgcctcgccctactggtcgacaccgttgggcctcgtttaagcggctccaaaaacctagagaaggccatccagatcatgtaccagaacctccagcaggatggcttggaaaaagtacaccttgaaccggtcagaataccccattgggaaaggggcgaagagagtgcagttatgctggagcctcgaatacacaaaattgccatccttggcttgggtagctccataggtaccccaccggaaggcataaccgcggaagttctggtagtgaccagctttgatgagcttcagcgtagggcctcagaggcgagaggcaagatcgttgtctataaccagccgtacattaattatagcagaacagtccagtacaggacccaaggtgctgtggaggcagccaaggtgggagcactggcctctttaatcaggtctgtggcctctttcagtatttattcgccacacaccggcatccaggaatatcaggatggtgtgccaaaaattcctaccgcgtgtatcaccgtggaggacgccgagatgatgtcaagaatggcctctcacggaatcaagatcgtaattcaactgaaaatgggcgctaaaacatatcctgacaccgactcttttaacacggtggctgaaataacaggtagcaagtatccggaacaggtggtgctagtgtctggccaccttgactcctgggacgtgggccaaggagcgatggacgacggtgggggagcgttcatctcgtgggaggcgttatcactgattaaggatctgggcctgagaccgaaaagaacgttaaggctcgtcctatggaccgccgaggagcaaggcggagttggggcatttcagtactaccagctgcacaaagtaaatatttctaattactctctggtgatggaatcggatgcgggtacatttttgcctaccggactgcagttcaccggatcggaaaaggcccgagcaatcatggaagaagttatgtcgctattgcaaccactcaatatcacacaagttttgtcccatggagaaggcaccgacataaatttttggatccaggccggtgtcccgggagcctcactgctcgatgacctgtataaatacttctttttccaccattcccatggcgataccatgacagtcatggatcctaaacagatgaatgtggcggctgccgtctgggcagtcgtgtcctacgtcgtagcagacatggaagagatgcttccacggagttag

SEQ ID NO: 212673 - DNA, 981 bp, synthetic construct
  misc_feature 1..981: note = Description of Artificial Sequence: Synthetic coding sequence
  source 1..981: mol_type = other DNA
atgtccgggcttggtaaaaagcacctgctgctcatgggtgagtttttttcatacggcactaaaattctgtatcaaaacactgaggctctccagtctaagtttttcagccccctccagaaagccatgttgcctccgaatagctttcagggaaaggtggcattcattacgggtggcggaacaggactgggaaaagggatgactaccttgctgtcgtccctcggagcacagtgcgtgatcgccagcagaaaaatggatgtgctcaaagccaccgcagaacaaatcagctcacagacgggcaacaaagtgcatgccatccagtgcgacgtaagagatccagatatggtgcagaacacagtctccgagctcatcaaggttgcgggacatcccaacatcgtaatcaacaacgctgcaggcaatttcatttcgcctacagaaagactttccccaaatgcgtggaagaccatcaccgacatagtgctaaatggcaccgcattcgtcacgctcgaaattggcaaacaactgatcaaagcccaaaaaggcgcagcgtttttgtccatcaccacaatttacgctgagactggttcggggttcgttgtcccatccgcttcggcgaaagccggtgtggaagcaatgtctaaaagcctggccgcagagtggggcaagtatggcatgcgtttcaatgtcattcagcccggtccaatcaaaacgaagggcgcttttagtcgactcgacccaacaggaacctttgaaaaggaaatgatcgggcgtatcccctgcggacggctcgggacagtcgaggagctggccaatttagcggcttttctctgtagcgattatgcctcatggattaatggcgctgtgattaagttcgacggcggagaagaagttttgattagtggagagtttaatgacctgaggaaagtgacaaaggagcagtgggatacaattgaagaactcatccggaagacaaagggctcatag

SEQ ID NO: 212674 - DNA, 1551 bp, synthetic construct
  misc_feature 1..1551: note = Description of Artificial Sequence: Synthetic coding sequence
  source 1..1551: mol_type = other DNA
atggagcctgcggtgagcttggctgtttgcgcgctcttgttcctgctttgggtgcgtctcaaaggtctggaattcgttttgattcaccaacgatgggtgttcgtatgcctgtttctgttgcctttgtcgttaatcttcgatatttactactatgtgcgggcatgggtagtctttaaactgagcagtgccccacgactgcacgaacagcgggtccgggatatacagaaacaagttagggagtggaaagaacaggggtcaaaaacatttatgtgtaccggaagacccggatggctgacagtgagtctgcgggttggtaagtataagaagacgcacaaaaacataatgataaacttgatggatatcctggaggtggatactaagaagcaaattgtgagagtggagccacttgtcaccatgggtcaggtcacagctctgctcacgtccatcggatggacactgcccgtgctgcccgaattagacgatctgacggttggcggtctaataatgggaacagggatagaatccagcagccataaatacggtctttttcagcacatttgcactgcgtacgagttagtgctcgctgacgggtccttcgtacggtgcactccaagcgagaattctgatcttttttatgctgtgccttggtcctgcggaacactgggcttcctggtcgctgctgagattagaatcatccctgctaaaaaatacgtgaaactgcgctttgagcccgttcggggactggaggcaatatgtgctaaatttacacatgagtctcagagacaggagaaccactttgtggaggggttgctgtattcactggacgaggcagtgatcatgacaggagtgatgacagatgaagcagagcctagcaaactgaattctatcggcaactactataagccatggttcttcaagcatgtggaaaactacctgaagactaatcgcgaaggactggagtacattcctttgaggcattattatcatcgacatacccggtctattttttgggagctgcaagacataatcccattcggtaacaatccgatcttccggtatctgtttggctggatggtgcccccaaaaatatccctattgaaactcacccagggagagacactgagaaaactgtacgagcaacaccacgttgttcaggatatgctcgtgcccatgaagtgtctccagcaagccctgcataccttccagaatgacattcacgtgtaccctatctggttgtgtccatttatactgccctcacagcccggtctggtgcatcctaaaggtaacgaagctgagttatacattgacattggagcttatggggagcctcgcgtgaaacactttgaagcgcgatcctgcatgagacagctcgagaaatttgtgcgcagtgtacacgggtttcagatgctttacgcagactgttacatgaatagggaagagttctgggagatgttcgacggttccctgtatcacaagctgcgcgagaaactgggttgtcaggatgctttcccagaggtgtatgataaaatttgcaaagcggcaagacactag

SEQ ID NO: 212675 - DNA, 465 bp, synthetic construct
  misc_feature 1..465: note = Description of Artificial Sequence: Synthetic coding sequence
  source 1..465: mol_type = other DNA
tgatccctgctgaaactgacccagggggagaccttacggaagctatatgagcaacatcatgttgtgcaggacatgttggtgcctatgaaatgcttacagcaggccctgcatacgtttcaaaacgacatccatgtctatcccatatggctgtgtccatttatcctgccctcacagcctgggctggtacacccgaaaggcaatgaggctgaattatacatcgatatcggagcctatggggagcctagagttaagcattttgaagccagatcttgcatgcgacagctggaaaagttcgtgcggtctgtgcacggcttccaaatgctgtacgctgactgttacatgaacagagaggagttctgggagatgtttgatgggtcgttgtaccataagctccgggaaaaactgggctgccaggatgcgtttccggaggtgtatgataaaatatgcaaggccgcaagacactag

SEQ ID NO: 212676 - DNA, 1428 bp, synthetic construct
  misc_feature 1..1428: note = Description of Artificial Sequence: Synthetic coding sequence
  source 1..1428: mol_type = other DNA
atgggtgcaggtgaacagaataggcagagcgcacactgcgttcagggcatctgtggctacctggaaggggacgaagaaggggaggaaggtgaagtgcgaagcacacaagtccgggaatggaaggagcaaggatcaaagacgttcatgtgcaccggcagacccggatggctcaccgtctccctgcgggttggcaagtataaaaaaacccacaaaaatattatgatcaacttgatggacatcctggaggtggacacgaaaaagcagatcgttagagtcgagccgttggtgactatgggacaggtgacggctctccttacatctatcggctggacactgcccgtgctgccagagctggatgacctgacagtcggcggtctgatcatgggaacaggtatagagtcgagttcccataagtatggactttttcagcatatctgtaccgcctatgagctggtgctcgccgatggatcatttgttcggtgtacccccagcgaaaacagcgatctgttttatgccgtaccatggtcatgcggaacactcggcttcttggtcgcggcagagatacgcattataccagctaaaaaatatgtgaaactccggtttgagccggtccgcggtctcgaggcaatctgcgcgaagtttacgcatgagtctcagcggcaggaaaatcattttgttgaagggctgctctatagcctcgatgaagctgtcatcatgactggagtaatgactgacgaagcggagccaagtaaacttaattccataggcaattactataaaccttggtttttcaagcatgtggagaattatttaaaaacgaaccgggagggtctggagtacatccccctgcggcattattaccaccgccatacacggagcatattctgggagcttcaagatataattccattcggcaacaatcctatttttcgttatctctttggctggatggttcctcctaagataagtctgctgaaactgacacaaggcgagacactgaggaagctctacgagcaacatcacgtggtccaggatatgctcgtgcccatgaagtgtctccaacaggcgctgcacacattccagaacgacattcacgtctaccccatttggctttgtcccttcatacttccctcacagccgggactcgtgcaccctaaaggcaatgaggccgaactgtacatcgacattggggcttacggcgaaccgagagtcaagcattttgaggctcgttcctgtatgcgacagttagaaaaatttgtgcgcagcgtgcacggttttcagatgctctacgcagactgttacatgaaccgtgaggaattttgggaaatgttcgatggatccttataccacaaactgcgcgaaaagctgggttgtcaagacgcttttcccgaagtgtatgacaagatctgtaaggccgctaggcactag

SEQ ID NO: 212677 - DNA, 903 bp, synthetic construct
  misc_feature 1..903: note = Description of Artificial Sequence: Synthetic coding sequence
  source 1..903: mol_type = other DNA
atgggaactggaatcgaaagcagctcccacaaatacggactctttcaacacatttgcaccgcttacgagctggtgctcgctgacgggagcttcgtgagatgcacgccatctgagaactctgacctcttttatgctgttccatggtcctgcggaactctcggattcttagtagcagctgaaatcagaattattccagcgaagaaatacgtaaagttgagatttgagcccgtcaggggcctggaggccatctgtgctaaattcacccatgagtcccagagacaagaaaatcatttcgtggagggtctgctttattctcttgacgaggccgttattatgaccggagtgatgaccgacgaagccgagccaagcaaagacatcataccattcggcaataacccaatcttccgctacctatttggctggatggtgcctccaaaaatatcgttactgaagctgacacaaggtgagacgctcagaaagctatacgagcaacaccacgtggtccaagatatgcttgtgcccatgaagtgccttcagcaggcactccacacttttcaaaacgacatacacgtatatccaatatggttgtgcccgtttatattgccctcacaaccaggcctggtgcacccaaagggcaatgaggcagagctctacatcgacataggggcttacggagaacctagggtgaaacactttgaggcccgaagctgtatgaggcagctggagaagtttgtacgtagcgttcacggattccagatgctgtatgccgattgctatatgaatcgggaggagttctgggagatgtttgatggctctctgtatcacaagttgcgcgaaaaactgggttgccaggacgcctttcccgaggtgtacgataagatttgtaaggctgcgcgacactag

SEQ ID NO: 212678 - DNA, 729 bp, synthetic construct
  misc_feature 1..729: note = Description of Artificial Sequence: Synthetic coding sequence
  source 1..729: mol_type = other DNA
atggaacccgctgtatccctggcagtctgtgcccttctttttctcctgtgggtgaggctgaagggactcgagttcgtccttatacatcagcggtgggtctttgtttgtttattcctcctccctctgagcctgattttcgacatctactattacgtgagagcctgggtcgtttttaaactgtccagtgctcctagactccacgagcagcgggtgagagacatccagaagcaggttagagagtggaaagagcagggctctaaaaccttcatgtgtacgggtaggcctggctggctcacagtgtctctgagggtcggcaagtataagaaaactcataagaatatcatgattaatctgatggatattctggaggtggatactttccaaaacgacattcacgtatatcccatttggttatgtccttttatcctccctagtcagccagggctagttcaccccaaagggaatgaagcagagctttacattgacataggcgcatatggcgagcccagagtgaagcacttcgaggctaggtcatgtatgcgccagttggaaaagtttgtgcggtccgtccacggctttcagatgctgtacgccgattgctacatgaatagagaggagttctgggagatgttcgatggttccctgtaccataagctgcgagaaaaacttggttgtcaagatgcgtttccagaggtatacgacaaaatctgtaaagcagcccgacactag

SEQ ID NO: 212679 - DNA, 1203 bp, synthetic construct
  misc_feature 1..1203: note = Description of Artificial Sequence: Synthetic coding sequence
  source 1..1203: mol_type = other DNA
atgatggatctccggaatacacctgccaaatcactggataagttcattgaagactacctcctccctgatacgtgcttccgcatgcagatcaaccatgctattgatataatttgtggctttctcaaagagcgttgctttcggggatcctcataccccgtttgtgttagtaaggttgtaaaggggggaagctctggcaaaggcactacactgcgaggccgttcagatgccgacctcgtggtcttcctctcacccttgacgacattccaagatcaactgaacagacggggagagtttatacaggagatccgccgacagcttgaggcctgccaacgagagagagctttctcggtcaaattcgaggtgcaggccccacgctggggcaacccacgagcgctgagcttcgtgctgagtagcctgcaacttggggagggggtggaattcgatgttctcccagccttcgacgcactgggccaattaactggcggatacaaacctaatccccagatctatgttaagctgattgaggagtgcactgatcttcaaaaggaaggcgagttcagcacgtgcttcacagagctgcaaagagacttccttaaacagcgtccaacaaagctgaaaagcctgatccggctcgtcaagcactggtaccagaactgcaagaagaagctgggcaaactccccccacaatacgcgctggagttgctaactgtttacgcctgggaacgtggctcgatgaagacccacttcaacactgcccagggatttaggactgttctcgagctggttataaattaccagcagctctgcatctattggactaagtattacgatttcaaaaaccctattattgagaagtacctccgaaggcagctgacaaagccccgaccggtaattctggatcctgccgaccctacggggaatctgggaggtggtgatcctaagggttggcgccagttagcgcaggaagcggaggcctggctgaattacccttgtttcaaaaattgggacggaagccccgtcagtagctggatcctgctggctgaatcaaactcagccgacgacgagacagatgatccgaggaggtatcagaaatatgggtacatcggcacccacgaatatccccacttcagccaccggccttcgaccttgcaggcggcaagcacgccgcaggccgaagaagactggacctgcactatattatag

SEQ ID NO: 212680 - DNA, 1146 bp, synthetic construct
  misc_feature 1..1146: note = Description of Artificial Sequence: Synthetic coding sequence
  source 1..1146: mol_type = other DNA
atgatggacctgaggaatacacccgctaaatccctcgataaatttatcgaggactacctactcccagacacatgtttcaggatgcagatcaatcacgccatcgacatcatctgtggcttcctgaaagaaagatgtttcaggggttcttcttaccccgtgtgcgtgtcaaaggtagttaagggaggatctagcgggaaaggcacaacactacgcggtcgaagtgatgccgacttagtagtctttctgtcccctctgaccacttttcaggatcagttgaatagacgcggagagtttatccaagagatccgcagacagttagaagcctgccagagagaaagagcatttagcgtgaaattcgaagttcaggcaccgcgttggggaaaccctcgcgcattgtcctttgtgctgtcatcattgcagcttggggagggcgtagaattcgatgtcctgcccgcttttgacgccctgggacagctgaccggcggttataagccaaaccctcaaatttacgtgaaacttatcgaagaatgtactgacttgcaaaaggagggcgagttcagcacctgtttcactgagctccagcgagatttcctcaaacagaggcctaccaagctcaaatcactaatccgcctggtgaagcattggtaccagaattgcaagaagaagcttgggaagctccccccacaatatgcactggagctcctcacagtgtatgcttgggagcggggtagtatgaaaactcactttaacacagctcagggcttcagaacggtcctggaactcgtaataaattaccaacagctctgtatctactggaccaagtactatgatttcaagaatccgattatagaaaagtacctcagacgtcaactaacaaagccgagaccagtgatcctggatcccgctgaccccacagggaacctgggaggaggtgaccccaagggttggcggcagctggctcaggaagcagaagcctggcttaattacccgtgttttaaaaactgggacggatctccggtgtctagttggatccttttagtgaatcttactttggtcgggagacgaaactatataatcagtgagcatgcagtcaacctgcagcaaacaaggggcgcttctctgtcttatagctttcaggtcgcatag

SEQ ID NO: 212681 - DNA, 1245 bp, synthetic construct
  misc_feature 1..1245: note = Description of Artificial Sequence: Synthetic coding sequence
  source 1..1245: mol_type = other DNA
atgatggacctgaggaataccccggcaaagtccttggacaagtttatcgaggattatttgctcccagatacatgttttaggatgcagattaatcatgccatcgacattatttgcgggtttctgaaagaacgctgtttcagaggatcttcctacccagtgtgtgtcagcaaggttgtaaagggtggctccagtggcaaagggactaccctgagaggccgaagcgacgccgatttggtggtgtttctgtccccactcactactttccaggaccaattaaatagaaggggggagttcatacaagagatacgcaggcaattggaagcctgccagcgagagcgcgctttttcagtcaagtttgaggtccaggcacctcgctgggggaaccctagagccctgagcttcgtcctctcttcacttcagctgggagagggggtcgaattcgacgtactgcctgctttcgacgcgctggggcaattaactgggggatataaacctaaccctcagatctatgttaagctgatcgaagagtgcaccgatttgcagaaagaaggggagttcagcacctgttttacagagctccaaagggacttcctaaaacagcgcccaacaaagcttaaatctctcatccggctcgtcaaacactggtatcaaaactgtaaaaaaaaattaggcaagctcccccctcagtacgcactcgagctgctgaccgtttacgcatgggagaggggaagtatgaagacccatttcaataccgcccagggattccgcaccgtgctggagttggttatcaattatcagcagctctgcatttactggaccaaatattacgatttcaagaaccctataattgaaaagtatttgcgccgacagctcactaaacccagaccagtgatactcgacccagcagatcccacggggaacttaggtggtggagatccgaagggctggaggcaactcgctcaggaggctgaagcctggttaaattacccttgttttaagaactgggatgggagcccggtgtctagctggatcctattgacccagcacactccaggtagcatccacccaactggcaggcgtggccttgacctgcaccacccactcaatgctagtgcaagctggggcaaaggactgcagtgctacctggaccagtttctccacttccaggtcggactgctcatccaacgcggtcagtccagtagcgtatcctggtgcattatccaggatagaactcaggtctcttag

SEQ ID NO: 212682 - DNA, 1095 bp, synthetic construct
  misc_feature 1..1095: note = Description of Artificial Sequence: Synthetic coding sequence
  source 1..1095: mol_type = other DNA
atgatggacctcaggaatacccctgccaaatccctcgataagtttatcgaggactaccttctgcctgacacctgcttcaggatgcagattaatcatgccatcgacatcatctgcggttttttgaaagagcgctgcttccgagggtcgtcctaccccgtgtgtgttagcaaagttgtgaagggcggatcatccggaaaaggtacaactcttaggggcagatcagacgctgatctagtggtttttttatcaccactcacaacatttcaagaccagctgaatcgtcggggtgagtttattcaggagattagacggcagctggaagcctgtcaacgcgaaagggcttttagtgtcaagtttgaagtccaggcaccccgttggggcaatcctagggctctgagtttcgtgttatcaagccttcaactgggagaaggtgtcgagtttgatgtgctccctgcctttgacgcactgggtcagttgactggtggctataaaccaaaccctcagatatatgtgaagctgatagaggagtgcacagatctccagaaagagggagaatttagcacctgctttaccgaactacagagagactttctaaagcaaagaccaacaaagttgaaatctctgatccgcctggtcaagcactggtaccagaattgcaaaaagaagctggggaagttgccgcctcagtacgccctcgaattattaacagtctacgcctgggagcgcggtagcatgaaaactcattttaacaccgctcagggatttcggaccgtgctggagttagtcatcaattaccagcagctgtgtatttactggacgaagtattacgatttcaaaaaccctatcattgagaaatatttacgcaggcagctgacaaaaccgcgaccagttatccttgacccagccgatccgacaggaaaccttggtggaggcgatcccaaaggatggcgccagttggcccaggaagccgaggcctggctcaactatccttgctttaaaaattgggacggctcccccgtcagctcgtggattcttttggtgaggccaccagcgtcatcgctgccctttattccagcgccactacatgaggcctag

SEQ ID NO: 212683 - DNA, 2160 bp, synthetic construct
  misc_feature 1..2160: note = Description of Artificial Sequence: Synthetic coding sequence
  source 1..2160: mol_type = other DNA
atgggcaatggcgagtctcagctctcatctgtgcccgctcagaagttgggctggtttattcaggagtaccttaaaccgtacgaagagtgccaaaccctgatcgatgaaatggtgaataccatctgcgatgtgttgcaggaaccagagcagttccctctggtccaaggagtggccattgggggttcatacggcagaaagacagtactgcgcggaaattcagacggcactctcgtgctattcttttctgatctcaagcaatttcaggatcaaaagcgttctcaacgggatatcctcgataaaacaggagataaacttaaattttgcttgtttacgaagtggttgaaaaacaactttgagattcagaagtcactggatggatttacaatccaggtgttcaccaaaaaccagcgaatttccttcgaagtgctggctgcctttaacgctcttagtcttaatgataatcccagcccatggatctatagagaactgaagaggagcctggataagaccaacgcaagcccaggtgaattcgccgtctgtttcactgaactccagcaaaaattctttgacaacagacctgggaagctcaaggatcttatcctgctaatcaagcattggcatcagcagtgccagaaaaagatcaaggatttgccatcactgtccccatatgcactggagctactgacagtgtatgcttgggaacaaggatgtcgtaaagataacttcgacatcgctgaaggtgttcggaccgtcttagagttaataaaatgtcaggaaaaactgtgtatatattggatggtgaactataactttgaggacgagaccatccgcaacatcctcttacatcagctgcagagcgctagaccagttatacttgaccctgtcgatcctaccaacaacgtaagtggcgataaaatctgctggcaatggctcaagaaagaggcccagacctggttgactagcccaaatctcgacaatgaactgcctgcaccttcatggaatgtattacctgcacctctatttactacacccggacacctgcttgacaagtttatcaaggagtttctccaacccaataaatgctttctggagcagatagattctgcggtgaacatcatccgtaccttcctcaaggaaaactgctttaggcagtccaccgccaagatccagattgtgcgcggtggctccaccgcgaaggggacggcacttaaaacaggatccgatgctgacctggtggttttccataatagtctaaagtcgtatactagtcagaagaatgagcgccataagatcgtgaaggagatacatgagcagctgaaggccttttggagggagaaggaagaagagctggaggtcagcttcgagcccccaaagtggaaggcaccacgcgttcttagctttagtctcaaatccaaggttctcaacgaatcagtttcttttgacgtgctgccggcattcaacgcattggggcagctgagttcagggagcaccccctcacccgaagtctacgcaggactgatcgacctctataagtcttccgatctccctggtggggagttcagtacctgtttcacagtcctgcagagaaactttatacggtctcgccctacaaaactgaaagatttaattcgactcgtaaaacactggtataaagagtgtgagcggaagttaaagcctaagggcagcttgccccctaagtacgccctggagctactcaccatctacgcgtgggagcaaggtagcggcgtgccagattttgacactgcagagggcttccgcacagtgctcgaactcgtgacacagtaccagcagttgtgcatcttttggaaagtgaattacaatttcgaagatgaaacagtgcgaaaattcctcctttctcagctccaaaagactcgacccgtgatcctggatccggcagagccaaccggtgatgtcggaggcggagatcgttggtgctggcatctattggctaaggaggctaaagaatggctgagcagtccatgtttcaaagacggcaccgggaatccgattcctccatggaaggtcccaactatgcagacccccggtagttgcggagccaggatccatccaatcgtaaacgaaatgttctctagtagatcccacaggatcctcaacaataactctaaaaggaatttttag

SEQ ID NO: 212684 - DNA, 2064 bp, synthetic construct
  misc_feature 1..2064: note = Description of Artificial Sequence: Synthetic coding sequence
  source 1..2064: mol_type = other DNA
atggggaacggtgagagccagctgagtagcgtgcctgctcaaaaacttggctggtttatccaagagtacctcaaaccttacgaagagtgccagacacttattgatgagatggtgaacactatctgcgacgtccttcaggagccagagcagttccctttggtccagggcgtggctatcggcggaagctacggacgaaagaccgtccttcgcggaaattccgatggaactctcgtcttgttttttagcgacttgaagcagttccaggatcagaagaggtctcagagggatattttggataaaactggggataagctgaaattctgcctgttcacaaaatggctgaagaacaattttgagattcagaagtccctggatggctttacgattcaggtctttaccaagaaccagaggattagcttcgaggtgctggccgcattcaatgccctctctcttaatgataatccttccccatggatctaccgcgagctcaaaagatccctcgataagacaaacgctagtcctggagagttcgccgtgtgctttacagagctgcagcagaagttcttcgacaatcggcctggcaagcttaaagacttaatcttgcttataaagcactggcatcagcagtgtcaaaaaaagattaaggatcttccatccctgagcccttatgctcttgagcttctgaccgtgtatgcttgggagcaaggttgtcggaaggacaatttcgacatagctgagggagtgaggactgttcttgaactaatcaagtgccaggaaaagctctgcatttactggatggtaaactataactttgaggacgaaactatccgaaatatcctcctgcaccagctgcaaagtgccaggcctgtcattctggacccagtggacccgacaaacaatgtgtccggtgataaaatctgctggcagtggttaaagaaagaagctcaaacctggctcacgtctcctaacctggacaatgagctgcctgctcctagttggaacgtgctgcccgcaccccttttcaccaccccaggccacctcctggacaagttcattaaggaatttcttcagcccaacaaatgtttcctggagcagatcgatagcgccgtcaacatcattcgcacttttctaaaggagaattgttttaggcagagcaccgctaaaattcagatcgtgcgtggtggtagcaccgctaaggggaccgctctgaagacgggatcagatgccgacctcgtggttttccataatagtctgaagtcttatacctcacagaaaaacgagagacacaaaatcgtcaaagaaatccatgagcaattgaaggcattctggcgtgaaaaagaggaagaactagaagtctcattcgagccaccaaagtggaaagcccctagagtgttgagcttcagcttaaaatcaaaagtgttgaatgagtccgtctccttcgatgtgctgccggcttttaatgctcttggccagctgagctctggaagtaccccctcacctgaggtttatgccggactcattgatctttataaatctagcgaccttccaggtggagaattttctacatgcttcacagtgctgcagcgcaattttatcagatccagaccgacaaaactgaaagatctaatcaggctcgtgaagcattggtataaagaatgcgaacgtaaattgaagcctaagggatcattgccccctaagtacgccttggaattattaacaatttacgcttgggagcaagggtcgggtgttcccgatttcgatactgctgaaggtttccgtactgttctggaactcgtgacacagtatcagcaactgtgtatcttctggaaggtcaattacaatttcgaggatgagaccgtgaggaaatttttactgtcccaactgcaaaagactcgcccagttattctagatcctgctgagcctactggtgacgtaggtgggggagaccgttggtgctggcacctgttggccaaggaggccaaggaatggctgagcagcccatgtttcaaagacggaacagggaatccaattccgccatggaaggtccctgtaaaggttatttag

SEQ ID NO: 212685 - DNA, 519 bp, synthetic construct
  misc_feature 1..519: note = Description of Artificial Sequence: Synthetic coding sequence
  source 1..519: mol_type = other DNA
atgggcaacggagaatctcagcttagtagcgtgccagcccagaagttgggttggtttatccaggaatatctgaagccttatgaagagtgccagacccttattgatgagatggttaataccatatgtgacgtactccaggagccagagcagttcccactcgtccaaggcgttgccatcggaggctcttacgggaggaagacagtgctccgagggaacagcgacggcaccctagtgctgtttttctctgacctgaaacagttccaggaccaaaaaagatcacaacgggacatactggataagacgggagacaagcttaagttttgcctgtttacgaaatggctgaagaacaacttcgagattcaaaagagcctggatggcttcacaatccaggtctttaccaagaaccagaggatctcctttgaggtgcttgccgcatttaacgcattgtccaaacattgctgggtctcgggcgagaaatcacagcgctcaggatgtcagaccgcgttatgcaatctttag

SEQ ID NO: 212686 - DNA, 1053 bp, synthetic construct
  misc_feature 1..1053: note = Description of Artificial Sequence: Synthetic coding sequence
  source 1..1053: mol_type = other DNA
atggccaccgttggggctcctaggcacttttgcagatgcgcctgtttctgcacggacaatctgtacgtggcccgatatggcctgcatgtgagattcagaggggagcagcaactgagaagagattacggaccaattctgcgatcccggggttgtgtttcagctaaagatttccagcaacttttggcagagctggagcaggaggtcgaaagacggcaacgcttggggcaggagtccgccgctaggaaggctcttattgcttcctcataccaccccgctcggcctgaggtgtacgacagccttcaggatgcagctctggcaccagaattcttggcagtgaccgagtactcggtctctcccgatgccgacctgaaaggcctcttgcaacgcctggaaactgtgagtgaagaaaagagaatctacagagtacctgtgttcacggcccctttctgccaggccctacttgaagagcttgagcatttcgaacagagtgatatgcccaaggggaggcccaacaccatgaacaattacggcgtactgctccatgagctcgggttagacgagcccttaatgacccctctccgtgaacggttcctccaacctctcatggcactgctctacccagactgtggtggtggcagattggactctcatcgagcctttgtcgtaaagtatgctcccggtcaggatttagaactaggttgtcactatgataacgctgagttgacgctcaacgtggctcttggtaaggtgttcactggtggcgcactctatttcgggggtttatttcaggccccaaccgccctcactgagccattggaagttgagcatgtggttgggcaaggtgtcttgcaccggggaggccagctccacggtgccaggccactcggcacaggggagaggtggaatttagttgtgtggctgagagccagcgctgtgcggaacagcctgtgtcctatgtgctgcagagaaccagatctggtggacgacgaaggattcggcgacggctttaccagagaggagcccgcaaccgtcgacgtatgcgctctgacttag

SEQ ID NO: 212687 - DNA, 3261 bp, synthetic construct
  misc_feature 1..3261: note = Description of Artificial Sequence: Synthetic coding sequence
  source 1..3261: mol_type = other DNA
atggatttgtacagtacgcctgcagcagcactcgacaggtttgtggctaggaggctgcagcccagaaaagagttcgtcgagaaagcacgtcgtgccctcggcgctctggccgcagcactgcgtgaacgcggaggcaggttaggcgctgctgcccctcgcgtgctaaaaactgtcaaaggcggatcttccgggagaggtacggcgctcaaggggggatgtgactccgaacttgtaatttttttggattgttttaaaagctacgtagatcagcgcgctcgacgcgcagagatactgtccgagatgcgagccagtctggaatcctggtggcagaatccggtgcctgggctccgccttacatttcccgagcaatctgtccccggtgccctgcagttccgcctgacatccgtggacttggaggattggatggacgtgtccctggtgccggcttttaatgttctgggtcaagctggcagtggtgtaaagccaaagccccaagtatactccactctgcttaattccggatgtcagggcggagaacatgcagcctgcttcactgaactgagacggaattttgtcaatattcgccctgccaagctgaagaatctaatcctattggtgaaacattggtatcaccaggtgtgcctgcagggcctgtggaaggaaacacttcctccggtgtacgccttggagctgcttaccatctttgcctgggagcagggttgcaagaaggacgctttcagcttagccgagggactgcggactgttcttggtctgattcagcagcatcagcatttgtgtgttttctggactgtgaactatggctttgaggaccccgcagtgggccagtttctgcagagacagttaaaacgccctagaccagtgattctggaccccgcagaccctacatgggacctcggcaatggtgccgcttggcattgggacctgctcgcgcaggaggccgcaagctgttacgatcacccatgtttcttgagaggtatgggtgacccggtgcagtcttggaagggacctggcctgccccgtgctggctgttctggccttggtcaccccatacagctggacccaaaccagaagactccagaaaactccaaatctctgaatgccgtgtaccccagagccggtagcaagccaccatcttgcccggcacctgggccaacgggccaacctgcctcgagcagtgttccgggtatggccttagacctgagccagattcccaccaaggagttggatcggttcatacaggatcaccttaagccctctccccaattccaggaacaggtgaagaaggcgatagacatcatcctccggtgtcttcatgaaaattgcgtgcataaagcctcacgggtgtccaaggggggttcctttggccgagggactgacctgcgagacggttgtgacgtggagctcattatatttctgaactgcttcaccgattataaggaccagggtccaagacgagcagaaatcctggacgagatgcgagcccaactcgaatcgtggtggcaggaccaagtgccctctctttccctccagttcccagagcagaacgtgcctgaggccctgcaatttcagctggtgtccactgcccttaaatcatggaccgacgtatctctgctccctgcttttgatgcggtgggacagctgtcaagcggaactaaacccaacccacaggtgtactcccgcctgctgaccagcggttgtcaggagggggagcacaaggcctgtttcgccgaacttagacgaaactttatgaacattaggcccgtgaagctaaaaaatttgatcttactagtcaagcactggtataggcaggtcgcagcccagaataagggaaaaggtccagccccagcgagccttcctccagcctacgccctagagttgctgactatattcgcctgggagcagggctgtcgccaggactgttttaatatggcccagggattccggacagtgttaggcctcgtccagcagcatcagcagttatgtgtgtactggaccgtaaactacagcacggaggatcctgcgatgcgtatgcatttactcggccagctgaggaagcctcgacctcttgtattggatcctgctgaccctacgtggaacgtgggtcacggttcatgggagctgctggctcaagaagccgctgccctcggcatgcaagcctgcttcctgtcacgggacggaactagcgtccagccctgggacgtcatgccagccctgctgtaccagacacctgctggcgatctcgacaagttcatttctgagtttctgcagcctaataggcagttcctggcacaggtgaataaggcggtggacacaatctgcagcttcctgaaagaaaactgttttcgtaattcgcctattaaggtgatcaaggtagttaagggaggcagctccgcaaaaggcactgcgctcagaggacggtcagacgccgatttggttgttttcctgagttgcttttcacagtttacggagcagggtaataagcgcgcagaaattattagcgaaattcgagcccagttagaggcgtgtcagcaggagcgacagtttgaggttaagttcgaagtgtctaagtgggaaaatcctagagtcttatcattcagtctaacctctcagacaatgttggatcaatccgtcgattttgacgtactccccgctttcgacgcgctgggtcagttggtttccggttcaagaccgagctcccaggtttacgtggatttgattcattcctattccaatgcgggagaatactctacttgcttcaccgaacttcagagagattttatcatctcacgaccaacaaagctgaaaagcctgatcaggctggtgaagcactggtaccaacaatgtacaaaaatttctaagggcaggggctcgctacctccacagcatggtctcgagctgcttaccgtttatgcttgggagcaaggaggaaaggactcacagtttaacatggccgaaggcttccggactgttctggagttagttacgcagtatcgacagctctgtatctactggactattaattataacgcaaaagataagaccgtcggggattttctgaagcagcaactgcagaaacctcgtcctatcattctggatcccgctgatccaaccgggaatctgggccataatgcgcgatgggatttgctggctaaggaggctgccgcttgcacatcagctctgtgctgtatgggtcgaaatggaatccccatccagccctggcccgtcaaagccgctgtgtag

SEQ ID NO: 212688 - DNA, 1545 bp, synthetic construct
  misc_feature 1..1545: note = Description of Artificial Sequence: Synthetic coding sequence
  source 1..1545: mol_type = other DNA
atggcattgatgcaggaactctattcaactccagccagccgcctggactcatttgtggcacaatggttacagccccacagggaatggaaagaggaggtgcttgacgccgtccggacagttgaagaattcctacgacaggaacacttccaggggaagaggggcctcgaccaagatgtccgagtgttgaaagttgtgaaggtgggctcgttcggcaatggaactgtactgagaagtactcgggaggtggagctcgtagcattcctaagttgtttccattccttccaagaagccgcaaaacaccacaaagacgtcctccgcctcatctggaagaccatgtggcagtcgcaggatctgttggacttgggcctagaggacctgcgcatggaacaacgggtccccgatgccttggtctttaccatccaaacacgagggaccgcagaaccgatcaccgtaactatcgtgcccgcttacagggcactgggcccttcactgcctaatagtcagcccccacccgaggtgtacgtgtctctgatcaaagcctgcggtggccctgggaatttctgcccttctttctctgagctccagaggaatttcgtgaagcacagaccaaccaagctgaagtcactgttaaggctcgttaaacattggtatcagcagtatgtaaaagcacggagtccgcgagcaaatctgccaccattgtatgcgttggaattgttaacgatctatgcctgggagatgggtacggaggaggatgagaacttcatgctggatgagggctttaccacagtgatggatttgcttctggaatatgaggttatttgcatttactggacaaagtattatactctccacaatgcaataatcgaggattgcgtgagaaaacagcttaagaaagagagacccattattcttgatccagccgacccaactttgaacgttgcggaaggttatagatgggacatcgtggctcagcgggcatcacagtgtttaaagcaggattgttgctacgacaaccgagaaaatcccatcagctcttggaacgtcaagcgagcacgggatattcacctcacagtggagcagagagggtatccagacttcaatctgatcgttaatccgtacgagccgatccggaaggtgaaagagaaaatcagaaggacccgcggatacagcgggctgcaaaggctttcatttcaggtgcccggatccgaaaggcagctcctcagcagcagatgcagtcttgcgaagtatggcattttctcacacactcatatttatctgctggaaacaatccccagcgaaattcaggtgttcgtaaagaatccagatggcggttcctatgcatacgccattaacccaaacagttttatcttaggactgaaacagcagatagaagaccagcaggggctcccaaagaaacagcaacagttagagtttcagggccaggtactgcaggactggctgggcctaggtatttacgggattcaggatagcgacacgctaattctctcaaaaaagaaaggagaggctctttttcccgctagctag

SEQ ID NO: 212689 - DNA, 768 bp, synthetic construct
  misc_feature 1..768: note = Description of Artificial Sequence: Synthetic coding sequence
  source 1..768: mol_type = other DNA
atggctctgatgcaggagctgtactccacccctgcctcccgacttgatagtttcgtggcccaatggttgcaaccgcacagagaatggaaggaagaagttttggatgccgttcggaccgtggaagagttcttgagacaagagcattttcaggggaagcgaggactggaccaggatgtgagggtactgaaggttgtgaaggtagggagttttggaaatggtacagtgcttcgtagtaccagggaggtggagctggtagccttcctatcctgcttccactcctttcaagaggctgccaagcaccataaagacgtccttagactgatttggaagacaatgtggcagtcacaggacctacttgaccttgggctggaagacctgaggatggagcagagagtgcccgacgccctggtttttaccatccagacaagagggacagctgaaccaataaccgtgaccatcgtgcccgcatacagagctcttggccctagcttaccaaattcacagccgcctcctgaagtatatgtctctctgatcaaggcttgtggcggacccggaaacttctgtcccagcttttctgagttgcagcggaactttgtgaagcaccgtcctaccaaacttaaaagcctgctgagactcgtaaaacactggtaccagcaggctcaccatcctggatcgggtcgcccacatcctcagagggggagaagggtccaaatgggacatcgctgttccgaaggactgcccgtgccagagacgggcctgcttctgtag

SEQ ID NO: 212690 - DNA, 1737 bp, synthetic construct
  misc_feature 1..1737: note = Description of Artificial Sequence: Synthetic coding sequence
  source 1..1737: mol_type = other DNA
atgcctgacagcaactttgcggaaagatccgaggaacaggtgtcaggggcaaaggtgattgcacaggcgctgaagacccaggacgtggaatatattttcggaatcgtcggtatcccagttacagagatcgccatagctgcgcagcaacttggcattaaatacatcggcatgcgcaacgagcaggcagcttgttatgcagctagcgccatcggctacctgacttccagacccggagtctgtctggtggtatccggacccggtctgattcacgcactgggcggaatggcgaatgctaatatgaattgttggcctttgctcgtaatcggagggtccagcgagagaaatcaagaaacaatgggagccttccaggagtttccccaagtggaagcttgccgcctgtacactaaattttcagcaaggccctcatcgatcgaggctataccctttgtgatcgaaaaggccgtacgctccagcatttacggtagacccggtgcctgttatgtcgacattcccgcagacttcgttaacttacaagttaatgtcaacagtataaagtatatggagcgctgcatgtcacccccaatctccatggcagagaccagtgctgtatgtacagccgctagcgtcattagaaacgcaaagcagcctcttctgattatcggcaagggggcagcttatgctcatgctgaggaatcgatcaagaaactggtggaacagtataaactgccttttcttcccactcccatgggaaagggcgtggtacccgataatcatccctactgcgtgggtgccgctcgatcaagggcgttgcagttcgcagacgtgatcgtgttgttcggagccaggctcaattggattctgcacttcggactgcctcctaggtatcaacctgacgtgaagtttattcaggtggatatatgtgcagaggagctgggaaataatgtgaagcccgctgttactctcctgggcaacatccatgcagtcactaaacagctcctggaagaactcgacaagactccttggcagtatcctcctgaatcaaaatggtggaagacgctacgggaaaaaatgaaatccaatgaagctgcttcaaaagagcttgccagtaaaaagtcgctgcccatgaactattacaccgtgttctaccacgtccaagagcagctgcctcgcgactgcttcgtcgtttctgagggggctaataccatggatattggccgtacggtgctgcagaattacctccctcggcatcgattagacgccggtacctttgggacaatgggggtgggcctgggttttgccatcgctgcggctgtggtggctaaagacaggtcccctgggcagtggattatctgcgtggagggcgacagtgccttcggcttttcaggcatggaagtcgagaccatctgccgatataatctacctatcatcctgctagttgttaacaataatggtatataccagggcttcgacacggatacttggaaagagatgctgaaatttcaggacgccacggccgtggttcctccgatgtgcctgctgccaaacagccattacgagcaggtgatgactgccttcgggggtaagggatactttgttcagacgcccgaggagctccagaagtctctgcggcagagcttagccgatacaacaaagcccagtttaataaatatcatgattgaacctcaggcaacccggaaagcacaagactttcactggctgacacgttctaacatgtag

SEQ ID NO: 212691 - DNA, 1563 bp, synthetic construct
  misc_feature 1..1563: note = Description of Artificial Sequence: Synthetic coding sequence
  source 1..1563: mol_type = other DNA
atgcctggatctttgccactaaatgctgaagcctgctggcctaaggacgtcggaattgtcgccctagaaatttacttcccctcacagtacgttgatcaggcggagctggaaaagtacgacggtgtagacgccggtaagtacacaatcggactcggccaggcaaagatgggattttgcactgacagagaagacataaattctctgtgtatgacggtggtgcagaatttgatggaaaggaataatttaagttatgattgcatcgggagactggaagtgggaacagagacaatcattgacaaatccaaaagcgtgaaaacaaatttaatgcaactgtttgaagagtcaggaaatacggacatcgaggggatagatacgacaaacgcgtgctacggcggtacagcagccgtgttcaacgccgtgaattggatcgagagtagctcttgggacggccgatacgctttggtggttgctggggatatcgcagtctatgctactggtaatgccagaccaacaggtggcgtgggcgcagtggcactattgatcggacctaatgctccattaattttcgagcgcggtctccggggaactcatatgcagcatgcctacgatttttataagcccgatatgctctcagagtatccgatcgtagacgggaagctgtctattcaatgctacctctctgccttggatcgatgttacagtgtttattgtaaaaagattcacgctcagtggcagaaggaaggcaatgacaaggacttcacacttaatgacttcgggttcatgatcttccactccccttattgcaagctggtacagaagtctttagcaaggatgctgctcaatgatttcttgaatgaccagaacagagataagaactcaatctatagcggtctggaggcgttcggcgatgtcaagcttgaggatacttatttcgacagggacgtcgagaaggcattcatgaaagctagctccgagttgttctcccagaaaacgaaagcttcacttctggtgtctaaccagaacggaaacatgtacacgagctcagtctacggttccttggcttctgtgcttgctcagtacagtccacagcagcttgctggtaagcggataggtgtgttctcgtacggaagcgggcttgcagctaccctctactctttaaaggtcacacaggacgccactcccggtagtgcattagacaaaattactgcctccctttgtgatctgaagtctcggttggatagcagaaccggagtcgcgccagatgtgtttgctgagaacatgaaactgcgggaagacacacatcaccttgtgaattatatcccacaagggtcaatcgatagtctattcgaggggacttggtatttagtaagagttgatgagaaacacaggcgaacatacgccaggcgacctacacctaacgatgacacacttgacgagggcgtcggcctggtgcattcaaatatcgccacagagcacatacccagtcctgctaagaaggtcccgaggctccctgccaccgccgctgagccggaggctgctgtaatttccaatggagaacactag

SEQ ID NO: 212692 - DNA, 1563 bp, synthetic construct
  misc_feature 1..1563: note = Description of Artificial Sequence: Synthetic coding sequence
  source 1..1563: mol_type = other DNA
atgcctggatcactgcctctcaacgccgaggcgtgttggccgaaagatgtgggaattgtggcgctcgaaatttacttcccttcccaatacgtggatcaagccgagttagaaaagtatgatggcgtggatgcaggtaagtacaccattggactcggccaggctaagatgggtttctgtactgatcgcgaagatatcaactcattgtgcatgaccgtggtgcagaatctgatggagcgaaataacctgagctacgattgtattgggaggcttgaagtaggaactgagactatcattgacaaatcaaagagtgtcaaaacaaatttgatgcagttatttgaggaaagcggaaacactgatatcgagggcattgacaccacgaacgcatgttatggcggaactgcagcagtgtttaacgctgtcaactggattgagtcgagtagctgggacggaagatacgcactagtcgtcgccggtgatatcgctgtgtacgccacaggtaacgctcggccaacaggcggagtcggagccgtggcgctgctgattggacctaacgctccgttgattttcgagcggggactcaggggaactcacatgcagcacgcctatgatttctataaacctgacatgctgtccgagtatcccattgtggacggcaaactttccatccaatgttacctgtcggcactggaccgttgttacagcgtttactgtaagaaaattcacgcgcaatggcagaaagaaggtaacgacaaggacttcaccctgaatgactttggatttatgatttttcactcaccgtactgtaaacttgtgcaaaagagtctggccaggatgctgttgaacgattttctcaatgatcagaaccgggacaaaaactcgatctacagtggcctggaagcttttggcgacgttaagctagaggatacctatttcgacagggatgtggagaaagccttcatgaaggcctcatcagagttgttctcccaaaagaccaaggcgtctcttttggtctcaaaccagaatggcaacatgtatacttccagcgtctatgggtcactcgccagtgttctggctcagtactcaccccagcagttggctggcaaaaggatcggcgtgtttagttatggaagcgggctcgcggcaactctgtactctctcaaggttacacaggacgcaacaccgggaagtgctctcgacaagatcaccgcctctctttgtgacctaaagtcgaggcttgattcccgaactggtgtcgctccggacgtgtttgccgaaaatatgaaactgcgagaggacacccaccatttggtgaactacatacctcaaggaagcatcgattctcttttcgagggaacctggtatctggtgcgggtggacgaaaagcacagaagaacgtacgctcggaggccaacccccaacgacgatacacttgatgaaggcgtggggttagtacactctaacattgccaccgaacatattccctcaccagctaagaaagtccctcggctgcccgcaactgctgcagaaccggaggctgcagtcatctctaatggcgagcactag

SEQ ID NO: 212693 - DNA, 291 bp, synthetic construct
  misc_feature 1..291: note = Description of Artificial Sequence: Synthetic coding sequence
  source 1..291: mol_type = other DNA
atgcccggaagcctgcccttaaatgccgaggcatgctggcctaaggacgtcggtattgtcgcgcttgagatttattttcccagtcagtacgtcgatcaggccgaactggagaagtatgacggggttgacgccggaaagtacacgatcggcctgggccaagcgaaaatgggtttctgtactgaccgagaagatataaacagcctgtgcatgacagtggtccaaaatctgatggaacgaaacaaccttagttatgactgtattgggagactggaggtgggtacagagacttag

SEQ ID NO: 212694 - DNA, 1530 bp, synthetic construct
  misc_feature 1..1530: note = Description of Artificial Sequence: Synthetic coding sequence
  source 1..1530: mol_type = other DNA
atgccaggaagcctgccactgaacgcagaagcttgttggccgaaggatgtcggcattgtcgctctggagatctacttcccatcacagtatgtcgatcaggcagagctcgagaagtacgacggcgtggacgccggaaagtataccattgggctgggccaggcaaaaatgggcttctgcactgacagagaagatattaacagtctgtgcatgaccgtcgtccagaacttgatggaacggaataatctgtcgtacgactgcattggcaggctcgaggttggaacagagacaatcatagataagtctaaatctgtcaagactaatcttatgcaactgttcgaggagtcgggcaacacagacatcgaggggattgacactactaacgccgttaactggatcgaaagcagcagctgggatggacgctatgctctcgttgtggcgggtgacatcgccgtgtacgccactggaaatgccaggcccaccggcggtgtgggagccgtggccctactgataggaccaaatgcacctcttatcttcgaaagggggctgcggggtactcacatgcagcacgcttatgacttttataaacccgatatgttgtccgaataccctattgtcgatgggaagttgtcgatccaatgttatctgtccgctctggacagatgctacagtgtgtactgtaagaaaatccatgcccagtggcagaaagaggggaacgataaggactttacactgaatgatttcggattcatgatttttcattcgccttattgtaaactggtgcagaagtccctggctcggatgttattgaacgattttctgaacgatcaaaaccgcgataagaacagtatatacagcggactggaggcttttggggacgtgaagcttgaagacacctacttcgatcgggatgtggagaaggcctttatgaaggcttctagtgaattattcagccagaagaccaaggcatccctgctggtaagcaaccaaaacggtaatatgtacacctccagcgtctacggctcgcttgcctctgtgttggcacagtattctccccaacagctggcagggaagagaattggtgtttttagctacggatccggccttgctgcaactctgtatagtctgaaggtcacgcaggatgctacgccaggaagcgcgctcgacaagattacggcgagcctctgcgatcttaaaagcagactcgactctcgcaccggcgtggcacctgatgtgttcgctgagaacatgaagctccgcgaggacactcaccaccttgttaactacattcctcaggggtctattgatagtctgtttgaggggacctggtacctggttcgcgtggacgagaaacatcgcagaacctatgccaggcggccaaccccgaacgatgacacattagacgaaggagtgggtctggtgcacagcaacattgccacagagcatatcccatctcccgcaaagaaggtaccgaggctaccggctacggcagccgaacccgaagccgcagtaataagcaacggcgaacattag

SEQ ID NO: 212695 - DNA, 1527 bp, synthetic construct
  misc_feature 1..1527: note = Description of Artificial Sequence: Synthetic coding sequence
  source 1..1527: mol_type = other DNA
atgcagcggctgcttacgcccgtgaagcggattttgcagctgaccagagccgtgcaggaaacctcacttacacccgcaaggcttcttcccgtggcgcaccagcgttttagcactgctagcgccgtgcctcttgccaagacagatacctggcccaaggacgtcggtatcctcgctctcgaagtgtacttcccggctcaatacgtggaccagacagacttggagaaatacaacaatgttgaagcaggaaagtatacggtcggcctaggccagacgagaatgggcttttgctctgtgcaggaggatatcaattccttgtgcctgacagtggtccaacgcctcatggaacgtatccagctgccctgggacagcgtcgggagactggaagtcggcaccgagacgattatcgacaaaagcaaggcagtaaaaactgtactcatggaactgtttcaagattccggtaatactgacatcgagggcattgatactactaatgcatgctacggcggaactgcttcactcttcaacgctgctaattggatggagtcgagctcatgggacggacgttacgccatggttgtgtgcggcgacattgctgtttacccctcaggaaatgcccgtcctaccggaggagcaggagccgtggccatgctcatcggaccaaaggctccactggccctggagcggggtttgcgcggtacccatatggagaatgtgtatgatttctacaagcccaacttggcctcggagtaccccattgtcgacgggaagctttcaattcagtgttatttaagggcgctggatcgctgttatacaagctatagaaagaaaattcaaaaccaatggaaacaggcgggttccgataggcccttcacccttgacgatctgcagtacatgatcttccacacacctttctgtaagatggtgcagaagagcctggcccgactcatgttcaacgacttcctgagtgccagctccgatacgcagaccagcttgtataagggtctggaagcattcgggggactaaagcttgaggatacctacaccaacaaggacctggacaaagcattgttaaaggcgtctcaggatatgtttgacaaaaaaactaaggcctccctgtatctctctactcacaacgggaacatgtacacctcttctctctacggttgtctcgcttctctgctttcccaccatagtgcccaggagctagccggatcccgcatcggggctttctcatacgggtctggcttggcggcttcctttttctcctttcgcgtgtctcaagatgcggctccgggtagtcctttggataaattggtgagtagcacctctgacctgcccaagaggctcgctagccggaagtgcgtgagcccggaggagtttacggaaattatgaatcagcgcgaacagttctatcacaaagtgaacttctcacctcccggagatacgaattctctgtttcccggtacgtggtatctagagagagtggatgagcaacataggagaaagtatgcacgcaggcccgtgtag

SEQ ID NO: 212696 - DNA, 1401 bp, synthetic construct
  misc_feature 1..1401: note = Description of Artificial Sequence: Synthetic coding sequence
  source 1..1401: mol_type = other DNA
atgcagcggttattgactcccgtgaagcgcattctgcagctaacccgagctgtgcaggagacgtctctgacgcctgcacggctgctgcccgtggcccaccaaagatttagcacggccagcgcagttcctttggcgaagacagatacctggcccaaggacgtcggcatcctggctcttgaagtgtatttccctgcgcagtacgtggatcaaacggacctggagaaatacaacaatgtggaagctggcaaatatactgtcgggctggggcagactcggatggggttttgtagtgtgcaggaggatattaactccttatgtttaacagtcgtacagaggctcatggagcgtatccagttaccttgggacagcgtaggtcgccttgaagtggggactgagacgatcattgacaagtcaaaggcagtaaaaacggtgcttatggagcttttccaggattccgggaacactgatatagaagggatagacactaccaatgcgtgttatgggggaacagcctccctgtttaacgctgccaattggatggagtcctcctcctgggacgggctgagaggtactcatatggagaacgtctatgacttctataagcctaatctggcctcagagtacccaatagtggatggcaagctctccatccaatgctatctgcgggcactcgatcgctgttacacatcctacagaaaaaaaatacagaatcagtggaagcaggctggcagtgaccgaccttttacactggatgaccttcagtatatgatctttcacactccgttttgtaaaatggtgcagaagtctcttgcacgactaatgttcaatgacttcttatccgcctcttcagacacccagacctcattgtacaagggcttagaggcttttggcggtttaaagctagaggatacatacacaaataaggatcttgacaaagccctgctgaaggctagtcaggacatgttcgataagaaaactaaggcctcactctatctgagcacccataatggcaacatgtacacctccagcttatatggctgtttagcttctcttttgagccaccacagcgctcaggagctggcgggaagcagaatcggcgcttttagttatggatctggtctggccgcaagcttcttcagctttcgggtgagccaagatgctgcacctggctcccccctggataaattagtgtcaagcacctcagatctccccaagagattggctagtaggaaatgtgtctcaccagaggagttcacggagatcatgaatcagcgtgagcaattttaccataaagtgaacttctctcctccaggggacactaatagtttattccctgggacttggtacttggaacgagttgacgagcagcatcgacggaaatacgcgaggcggccagtttag

SEQ ID NO: 212697 - DNA, 1161 bp, synthetic construct
  misc_feature 1..1161: note = Description of Artificial Sequence: Synthetic coding sequence
  source 1..1161: mol_type = other DNA
atggggcagagagagatgtggagactgatgtcaagatttaatgctttcaagagaacaaataccatcctgcaccacctgcggatgagcaaacacaccgacgccgctgaagaggtgttgcttgagaaaaaagggtgtactggagttatcacgctaaacagacccaagttccttaatgctctgaccctgaacatgataaggcagatttatccacaactgaagaagtgggaacaagaccctgaaacctttttgatcattataaagggggcagggggaaaagccttctgcgcaggcggtgatatccgggtaatctctgaggcggaaaaggccaagcagaagattgcccctgtcttttttagagaagagtatatgttaaataatgcagttgggtcatgccagaaaccctatgtggcacttattcatggtatcaccatgggcggtggtgtgggcctcagcgtgcacggccaattccgagtcgcgacggagaagtgcctgttcgccatgcccgaaaccgccatcggtttgtttcccgacgttggcggaggatactttttaccaaggctgcaagggaaactgggctattttttggccctcaccggcttcagactgaaaggtagggatgtgtatagagcaggtatcgccactcactttgtagatagcgaaaaattagccatgcttgaagaggatttgctggcgcttaagagccctagcaaagaaaacatcgctagtgtcctcgagaactatcatacggagagcaagatagatagagacaagagctttatacttgaagagcatatggacaagatcaacagctgtttctctgccaataccgtggaggagatcattgaaaatcttcagcaggacggatcttcatttgctttggagcagctcaaggtgatcaataaaatgtcacctaccagccttaagatcaccctccgccagctgatggaaggttcatctaagactctccaagaggtgctgactatggaatatcgtctgagccaggcatgtatgagaggacatgacttccatgagggtgtgagggccgtcctgatcgacaaagaccaatctccaaaatggaaaccagccgacttgaaagaggtgacggaagaagacttgaacaaccactttaagagcctgggatcgtccgacctgaagttctag

SEQ ID NO: 212698 - DNA, 1017 bp, synthetic construct
  misc_feature 1..1017: note = Description of Artificial Sequence: Synthetic coding sequence
  source 1..1017: mol_type = other DNA
atgggccagcgcgagatgtggcgcttaatgtcaaggtttaacgccttcaagaggaccaacaccatcctgcaccatctgcgcatgagcaagcacactgatgccgctgaggaggtgctactcgaaaaaaaaggctgtacgggggtgattacgctaaatcgtcccaagtttcttaatgctcttaccctgaacatgattcggcagatctatccgcaattgaagaaatgggagcaagacccagagacttttcttattatcataaagggcgctggcggtaaggctttctgcgcaggcggtgatataagagtgatttccgaagcagagaaagctaagcagaaaatcgcccctgtgtttttccgagaggagtatatgttgaacaatgccgtgggctcatgccagaaaccgtatgttgctctcatccacggcattactatgggaggcggagtgggcctgtcagttcacggccagttccgcgtcgcgacagagaagtgtttgttcgccatgccagagaccgcaattggactttttcccgatgtcggcggtggttattttctgccccgtctgcaaggcaagctaggctactttctggcactcaccggtttcaggctgaaagggagagacgtttaccgtgcaggaatcgccactcatttcgtcgacagcgaaaagttggccatgctggaggaggatctgcttgccctgaagagtcctagtaaggaaaacatcgcttccgtcttagaaaactaccacaccgagtcaaagatagacagggataagtccttcatcctggaggagcatatggataaaatcaattcctgcttctccgccaacaccgtggaggaaatcatcgaaaacctgcaacaggacggatcttcatttgccctggaacagctcaaagttatcaataagatgagccctacatccctgaagatcactctacggcaacttatggaaggctcttccaaaactctgcaggaggttttaactatggaatatcgcctgtcacaagcttgcatgttttag

SEQ ID NO: 212699 - DNA, 117 bp, synthetic construct
  misc_feature 1..117: note = Description of Artificial Sequence: Synthetic coding sequence
  source 1..117: mol_type = other DNA
tagctgatcgataaggaccagagccctaagtggaagcccgctgatctgaaagaggtgacagaagaggatctcaataatcactttaagagcctagggagtagcgacctgaagttttag

SEQ ID NO: 212700 - DNA, 903 bp, synthetic construct
  misc_feature 1..903: note = Description of Artificial Sequence: Synthetic coding sequence
  source 1..903: mol_type = other DNA
atgggaactttgcccaaaagggtcaagattgtcgaggttggtccgcgagatggcctacagaacgagaaaaatatagtgtccacccctgtaaaaattaaactgattgacatgctcagcgaggctggcctgagtgttattgagacaactagctttgtaagtccaaagtgggtcccccaaatgggtgaccataccgaggtcctgaaaggaattcaaaagtttcccggaatcaactatccagtgctgacccctaacttgaagggatttgaggccgcagtggctgctggggctaaagaagttgtcatcttcggagctgctagtgagctgtttacaaaaaagaacatcaattgcagcatagaagagtcctttcagaggttcgacgcaatactcaaagcggcacaatcagcaaacataagtgtgagggggtacgtatcttgtgctcttggctgtccgtatgagggcaagatttcccccgctaaagtcgccgaggtgacgaaaaagttttatagcatgggctgctacgagatctctctgggcgacaccatcggcgtgggaacacctggcattatgaaagatatgttaagtgcggtaatgcaggaggtgcctctggccgctttggccgtgcattgtcatgacacctacgggcaggccctggccaacacactcatggctctgcagatgggggtgagtgtggtggatagcagcgtggctggcctcggaggttgcccatacgcccaaggtgcaagtgggaatctggcaacagaggatctggtgtatatgctggagggtctcggcatccataccggcgtgaacttacaaaagttgcttgaagctggtaacttcatttgccaggcactgaacagaaaaacgtcctcgaaggtagcacaggccacctgtaaactatag

SEQ ID NO: 212701 - DNA, 978 bp, synthetic construct
  misc_feature 1..978: note = Description of Artificial Sequence: Synthetic coding sequence
  source 1..978: mol_type = other DNA
atggctgcgatgcgcaaagcgctaccccgtcgcctggtagggctggcatctttacgagcagtttccacttcatctatggggacattgcctaagagagtgaaaattgtggaagttggaccacgggacggcttacagaacgagaagaacatcgtgagcacacccgttaagattaagctcattgatatgctctcggaggccggactgtcagtgatcgagaccacttctttcgtcagtcccaaatgggtgcctcagatgggggaccacaccgaggtgttgaagggcattcaaaaattcccaggcatcaattaccctgtcctgacaccaaatctgaaaggctttgaagccgctgtggcagcaggcgcaaaagaagtagtgatctttggtgccgcaagcgaactcttcacaaaaaaaaatataaattgttctattgaagaatcctttcagagattcgatgccatacttaaagcagcgcaaagtgcgaatatcagcgttcggggatacgtgtcatgcgcattgggctgtccatatgaaggaaagatttcgccggcaaaggtggcagaggtgaccaaaaaattctatagtatgggctgctacgaaatttctctgggggacactatcggggtgggcaccccagggatcatgaaggacatgcttagcgccgtaatgcaggaagtgcccctggcagccttggctgtccactgccatgacacatacggccaggctctagcaaacaccctcatggccctccaaatgggagtgtcagttgttgatagctctgttgctggcctcggtggctgtccatatgcacaaggcgcatccggcaatcttgcaaccgaggacttggtgtacatgctggaaggactgggaatccacaccggggttaacctccaaaagcttctggaggccggtaactttatctgtcaggcactaaaccgcaagacttctagtaaggttgcgcaagccacctgtaaattgtag

SEQ ID NO: 212702 - DNA, 765 bp, synthetic construct
  misc_feature 1..765: note = Description of Artificial Sequence: Synthetic coding sequence
  source 1..765: mol_type = other DNA
atggccgctatgcggaaggcactacctcggaggctagttggtctggcctcactgagggcagtgtcgacttctagcatgggcactttgccaaagcgcgtgaaaatcgtggaggtgggccctcgcgatggactccagaacgaaaaaaacattgtcagcactccggttaaaattaagctgatagacatgctcagcgaggccggactgagcgtcattgagaccacctcattcgtgagccctaaatgggtgccacaaatgggtgatcacaccgaggttctgaagggtattcaaaagtttccgggaattaattatcccgtcctcactcccaaccttaaggggttcgaggctgctgtcaccaagaagttctactccatgggttgttatgaaattagcttaggggataccattggcgtaggaaccccgggaatcatgaaagacatgctgagtgccgtgatgcaagaggtgcccctcgcggctctggccgttcactgccacgacacctatggacaggcattggccaacaccttgatggccctgcagatgggagtgagcgtggtcgactcatcagtagctggcctgggcggttgcccatatgcccagggagcctccggaaatctagccacagaggatctggtgtacatgctggaaggtctgggaatccatacaggggtaaatctccaaaagctgttggaggctggaaatttcatctgtcaagccttaaatcgcaagacctccagcaaagttgctcaggccacctgtaagttatag

SEQ ID NO: 212703 - DNA, 501 bp, synthetic construct
  misc_feature 1..501: note = Description of Artificial Sequence: Synthetic coding sequence
  source 1..501: mol_type = other DNA
atggggacactaccaaaaagggtgaaaatagtggaagtaggtcctcgcgacggacttcagaacgagaaaaatatcgtgagcactcctgttaagatcaagctcattgacatgctgtcggaggcgggtctcagcgtgattgagacaacgagtttcgtctctccgaaatgggttccgcagatgggtgaccacacagaggtgctgaaaggcatccaaaagtttccgggaataaattaccccgttctcactcccaatctgaaggggttcgaggcagccatgggggtctctgtggtagacagttctgtcgccggactgggcggatgcccctatgcacagggagcaagtggcaatttggccactgaggatcttgtctatatgctggaaggtcttggcatccacacaggcgtgaacctgcaaaaactgttggaagccggaaactttatctgccaagccctgaaccgcaaaacttccagcaaggtggcgcaggcaacctgtaaactgtag

SEQ ID NO: 212704 - DNA, 1563 bp, synthetic construct
  misc_feature 1..1563: note = Description of Artificial Sequence: Synthetic coding sequence
  source 1..1563: mol_type = other DNA
atggcagccctgaaactcctttcttcaggcctcagactgtgtgcaagtgcaagaggttctggcgctacctggtataaaggctgcgtctgcagctttagcacatccgctcacagacacactaaattctatactgatcccgttgaagccgtgaaggatatcccagatggtgccacggtgctggtgggagggttcggcttatgcggaattcctgagaatcttatagatgctctgcttaaaaccggcgtcaaaggtctgactgccgtgagtaataacgcaggagtcgataactttggcctggggctcctgctgcgttctaagcaaataaagaggatggttagtagctacgttggcgaaaacgctgaatttgagaggcagtacttgagcggtgagcttgaggtggagttaacaccgcaggggacattagccgagcgcattagagctggcggagcaggggttcctgccttttatacccctaccggttatgggacgttggtccaagagggaggatctcccatcaaatataataaggacggcagcgttgctattgccagcaaaccaagagaagtcagggagtttaacgggcaacattttatactggaggaggccataacaggtgactttgcactggtaaaggcatggaaagccgacagagccggaaatgtcatcttccggaaatctgcaaggaatttcaatcttcctatgtgcaaagctgccgaaactactgtagtcgaggtggaagaaatcgtagacatcggggcttttgctcccgaggacatccatattccacagatttatgttcaccggctgatcaaaggagaaaagtatgaaaagcgaatcgagaggctgagcattcgcaaggaaggcgatggagaggccaagagcgccaagccgggagatgacgtgagagagcggataatcaaaagagcagctcttgagtttgaggatggcatgtacgctaatttagggatcggcattccattgctggcttccaactttatttcccccaacatcacggtgcacctgcagagcgagaacggggtcttgggactgggaccatacccaagacagcacgaagctgatgcagacttgattaacgccggtaaagagacagtgaccatacttcctggcgcaagtttcttcagcagcgacgaatctttcgccatgattcggggaggccatgtggacctgacaatgttgggtgcgatgcaggttagcaagtatggcgaccttgcgaactggatgatccctggtaagatggtaaagggcatgggcggtgccatggatctagtatccagtgccaagacgaaagtggtggtgacaatggaacacagtgctaaaggcaatgctcacaaaatcatggagaagtgtaccctgcccctgaccggcaaacagtgtgttaacaggattattacggagaaggctgtgtttgatgtggacaaaaagaaaggcctcacgctcatcgagctctgggagggtttgactgtcgatgatgtgcagaaatccactggttgcgactttgctgtcagccctaagctcatgcccatgcaacagattgctaactag

SEQ ID NO: 212705 - DNA, 1005 bp, synthetic construct
  misc_feature 1..1005: note = Description of Artificial Sequence: Synthetic coding sequence
  source 1..1005: mol_type = other DNA
atgatggttcgagagttcaacggccaacattttatcctggaggaggctatcaccggcgactttgctctagtgaaggcctggaaggccgatcgggctgggaacgttatattccgtaagtctgccagaaatttcaatctgcctatgtgtaaagctgcagaaacaacagtcgtcgaggttgaagagatagtcgatatcggagcctttgccccagaggacatccacatcccacagatatatgtacaccgattgataaagggcgaaaaatatgagaagcggatcgaaagactgagtatccgtaaagagggggatggggaagccaaatcggccaagcccggtgacgatgttcgggagagaattattaaacgcgctgccctcgaatttgaggatggcatgtatgctaacctggggatcggaataccgctgctcgcatcaaacttcatctcccccaatatcactgtacacttgcagtctgagaacggggtcctagggttgggaccttaccctagacaacacgaggccgacgctgatctgatcaacgccggtaaagaaacggttaccatcctcccaggggctagcttcttctcctcagatgaaagttttgccatgattcgtggcggtcacgtggacttgaccatgttgggagctatgcaagtgtctaagtatggagatctagctaattggatgatacctggaaagatggtcaagggcatgggcggagctatggatctcgtgagctccgcgaagacgaaagtggtagtcacaatggagcatagcgcaaagggcaacgcacacaaaattatggaaaagtgtaccctgcctctcacagggaaacagtgcgtcaaccgcattattacagaaaaagccgtgtttgatgtggacaagaagaaaggcctgactctcatagagctttgggaagggctgacggttgatgatgtccagaagagcacaggatgcgactttgcggtttccccgaaactaatgcctatgcagcagattgcaaattag

SEQ ID NO: 212706 - DNA, 372 bp, synthetic construct
  misc_feature 1..372: note = Description of Artificial Sequence: Synthetic coding sequence
  source 1..372: mol_type = other DNA
atgctgggtgcgatgcaagtgtccaagtacggtgacctggccaactggatgattcctggaaagatggtaaaaggtatgggtggcgctatggacctcgttagcagcgcaaaaacaaaggttgtggtcactatggaacattcagctaaaggcaacgcacacaaaataatggagaagtgtaccctgcccctcacaggaaaacagtgcgttaacaggatcatcacagagaaggctgttttcgatgtagacaagaagaaaggcttgactttaattgagctgtgggagggactcaccgtcgatgacgtccagaaatccactggttgcgacttcgctgtgtctcctaagctcatgcccatgcagcaaatagcaaactag

SEQ ID NO: 212707 - DNA, 372 bp, synthetic construct
  misc_feature 1..372: note = Description of Artificial Sequence: Synthetic coding sequence
  source 1..372: mol_type = other DNA
atgctgggcgcaatgcaagtgtccaagtatggcgatctggcaaactggatgatccccggtaagatggtcaagggaatgggcggtgctatggatttagtgagctccgccaaaactaaggtggtggtgacgatggaacattccgccaaaggtaacgcccacaaaatcatggaaaaatgcaccctccctctgactgggaaacaatgtgtgaacaggataattacggagaaggcggtgtttgacgtcgataagaaaaaagggcttaccctcatcgagctctgggaggggttgacagtcgacgatgtccaaaaaagcacaggctgcgatttcgcagtcagtcctaagctcatgcctatgcagcagattgccaactag

SEQ ID NO: 212708 - DNA, 453 bp, synthetic construct
  misc_feature 1..453: note = Description of Artificial Sequence: Synthetic coding sequence
  source 1..453: mol_type = other DNA
tctaacgcgtacaaagtcgacaactttggcctggggctacttctcaggtccaaacagatcaaaaggatggtctccagttatgtgggagaaaatgcggaatttgaaaggcaatatctgtcaggggaacttgaggttgaattgacccctcagggaactttagcagagcgaatcagagcgggtggtgccggagtacccgcattttacaccccgaccggatacgggacattagtgcaagagggaggctctcccatcaagtataataaggatggttccgtggcgatcgcctctaagcccagagaggtgcgggaattcaacggtcagcactttatcctggaggaggccattacaggtgactttgctttggtcaaagcgtggaaagcagatagggcaggtaacgtcatctttcgcaaatccgcgaggaatttcaacttgccaatgtgtaaagcagcctag

SEQ ID NO: 212709 - DNA, 1131 bp, synthetic construct
  misc_feature 1..1131: note = Description of Artificial Sequence: Synthetic coding sequence
  source 1..1131: mol_type = other DNA
atgtcgaattgtcttcagaacttcttgaaaatcactagcacaagacttttgtgttctcgcctgtgccaacaacttcggtccaagaggaaattctttggtactgtgcccattagccgcctgcaccgtagagtggtaattactggcataggactggtcaccccactgggcgtaggtactcacctagtgtgggacaggttgataggcggagaaagcggaatagtgagtttagtcggagaggaatataaatccatcccatgctccgtggccgcatatgtgcccagaggctccgatgaggggcagtttaacgagcagaacttcgtgtccaaaagtgatattaagtcaatgagctcaccaaccattatggccatcggagcagccgagcttgcgatgaaggattctgggtggcatcctcaaagcgaggctgaccaggtggctactggagtagcaatagggatgggaatgatacccctagaggtggttagcgagaccgctctgaacttccagactaagggatataacaaagtgtccccgttctttgtgccaaaaatactggtgaatatggccgcaggccaggtatcaattcggtataagctgaagggcccaaatcacgcagtctccactgcctgcaccacaggggctcacgcagtcggagactcatttcggtttattgcgcacggagatgcaggccacatcaccgcacccgatccggagggggaaggggctctgagatgcatggccgctgcattgaaagacgccggtgtgcagccggaggagatatcctatataaatgcccacgctacatccaccccccttggggacgccgcagagaacaaggctatcaaacacttgttcaaggatcacgcatacgctctggctgtgagtagtaccaagggggctactgggcacctgctaggtgccgcaggcgcagtggaggcagcttttaccaccttagcttgttattaccaaaaactgccgcctaccctgaatcttgattgcagtgagcctgagttcgatctgaactacgtacctttgaaagcccaagagtggaagaccgaaaaaaggttcataggcctgaccaacagctttggctttgggggtactaacgctaccctgtgtatcgccggtctctag

SEQ ID NO: 212710 - DNA, 1380 bp, synthetic construct
  misc_feature 1..1380: note = Description of Artificial Sequence: Synthetic coding sequence
  source 1..1380: mol_type = other DNA
atgtccaactgcctacagaattttttaaaaattacatccacacggctcctctgttcacgcctgtgtcagcagctgcggagcaagcgcaaatttttcggaacggtgcccatatcccgtctgcatcgcagggtagtgattacgggcatcggcctggtgactcctctgggcgtgggtacccatttagtttgggataggttgatagggggagagagtggtatcgtaagcttagtcggcgaagagtataagtccataccctgttcggtggccgcttatgtgcctagaggcagcgatgaaggtcagtttaacgagcagaactttgtcagtaaatcagacattaagtctatgtccagccccaccataatggctataggcgcagccgagctcgctatgaaggattcagggtggcatccccagtccgaagcagaccaggtggccaccggggtcgccatcggcatggggatgatcccactcgaagtggtgtccgagacggccctgaatttccagaccaagggctacaacaaggtcagtccctttttcgtacctaaaatcctggtaaacatggctgctggccaggtttcaataaggtacaagttgaagggcccaaaccacgcagtgtcaaccgcgtgcaccaccggtgcacacgcagtcggcgacagcttccgctttatcgcccacggagatgcagacgttatggttgcaggtggcaccgacagctgcatcagtcctctaagtctggcgggtttctccagagcacgcgctctatcaaccaactccgaccctaaactggcctgccggcctttccaccccaaaagagatgggttcgtgatgggagagggcgcagccgtcttggtgctcgaagagtatgagcacgctgtgcagagaagagctaggatttacgcagaagtgttgggttatggattaagcggggatgccggtcacattacagccccagatcccgaaggggaaggagcactacggtgcatggccgcagcgctgaaggacgccggagtccagccggaagagatttcttacatcaacgcacatgccacttcaacaccattgggggacgctgccgagaataaagctatcaagcacctctttaaagatcatgcatacgccttggcagtctctagtactaaaggcgctacgggccacctgctcggggcagctggtgccgtcgaggctgcctttacgacactggcctgttactatcagaaattgccacccaccctcaaccttgactgcagtgaacctgaattcgatctgaactatgtgcccctcaaagcgcaggagtggaaaaccgagaagcggttcatcggactgacaaatagcttcggatttggaggcacgaacgctaccctttgcatcgctggtctttag

SEQ ID NO: 212711 - DNA, 696 bp, synthetic construct
  misc_feature 1..696: note = Description of Artificial Sequence: Synthetic coding sequence
  source 1..696: mol_type = other DNA
atgtcgaactgtctccagaactttcttaagattacaagcacccgcctgctctgctcgcgtctttgccagcagcttcggagtaaaagaaagttcttcggaaccgtacctatctctagactgcatagacgcgtggttataacagggatcgggctcgtgaccccattgggcgttggcactcaccttgtttgggataggttaattggaggagaatctgggatagtctctctagtaggggaagagtataaaagcatcccttgctcagtggcagcgtacgtcccaagaggaagcgacgagggccaattcaacgagcagaactttgtgtcaaagtcggatataaagtctatgagtagcccaactataatggctatcggagccgcagaattggccatgaaggacagtggttggcacccacaatctgaggccgaccaggtggctaccggggtcgcgattgggatgggaatgatccctctggaggttgtatctgaaaccgctctcaatttccaaaccaaaggctataataaggtgagtccttttttcgtgccgaaaatcttagtgaacatggcagccggacaggtaagcattcggtataagttaaaaggacccaaccatgcagtgtctacagcatgtacaaccggcgctcacgcggtgggggattcattccgatttatagcccacggtgacgctgacgttatgtag

SEQ ID NO: 212712 - DNA, 663 bp, synthetic construct
  misc_feature 1..663: note = Description of Artificial Sequence: Synthetic coding sequence
  source 1..663: mol_type = other DNA
atgtccaattgtcttcaaaatttcttgaagattacgtcaacaaggctgttatgctcacgcctttgccaacaactgcgatcgaagagaaagttttttggcacggtcccgatctcgcggctgcaccgtagagtagttattacgggcataggtctggtcaccccactcggtgtaggaacccatcttgtttgggacaggctcattgggggtgaatcagggattgtttcgttggtcggagaagagtacaagtccattccctgctccgtggccgcatacgtgccccgtggctcagacgagggccagttcaacgaacaaaacttcgtcagtaaaagtgacatcaaatcgatgagctctcctactataatggcaatcggtgccgctgagctcgcaatgaaagatagcgggtggcacccacagtctgaggcggatcaagtagccacaggggttgcaattggcatggggatgattcccttagaagtagtcagcgagacagcactgaacttccagaccaagggttacaacaaagtgtctccgttctttgttccaaagatcttagtgaacatggcagccggtcaagttagtatccgatataagctgaaggggccaaatcacgccgtatcaactgcctgcaccaccggcgcacacgccgtgggggatagtttttag

SEQ ID NO: 212713 - DNA, 1875 bp, synthetic construct
  misc_feature 1..1875: note = Description of Artificial Sequence: Synthetic coding sequence
  source 1..1875: mol_type = other DNA
atggaaattccgggaagtttgtgtaagaaagtgaaattgagcaacaatgctcagaattggggcatgcagcgcgcaaccaacgtgacataccaggcgcatcacgtttcccggaataaaaggggtcaagttgttgggactcgcggtggttttaggggctgtacggtgtggcttacgggccttagcggagccggaaagactacagtgtcaatggctttggaagaataccttgtctgccacggcatcccctgctacacccttgatggagataacattaggcagggactgaacaagaatctgggcttttcaccagaggatcgggaagaaaacgtcaggaggatcgctgaagtggcaaagttgttcgccgacgctggcctggtttgtattacgagtttcatatccccttacacacaggatagaaataatgccaggcagatccatgagggagcctctctgcccttctttgaggttttcgttgatgcgccactgcacgtgtgtgagcagcgcgacgtgaaaggcctttacaaaaaagccagagcgggagagatcaaaggtttcaccggcatcgattccgagtacgaaaagcctgaggccccagagctagtcttgaaaacagactcttgcgacgttaatgattgcgttcagcaagttgttgagctgctccaggagagggacatcgtccccgtagacgcaagttatgaggtgaaagagctatacgtgcccgaaaataagctgcacttggccaagactgacgctgagaccctcccagctctaaaaatcaacaaagtcgatatgcagtgggtgcaggtactggcagagggctgggccacccccctgaatgggtttatgcgcgaaagagagtacttgcaatgtctgcacttcgactgtctgctggatgggggtgtgatcaatctcagtgtccctatagtcttgaccgccacgcacgaggataaggagaggctagatggatgtactgcttttgccctgatgtatgaaggacgtcgcgtagctatactgcggaatcccgagttcttcgagcatcgtaaggaggagcgctgcgccaggcagtggggcaccacttgtaaaaaccacccatatatcaaaatggtgatggaacagggagattggttaattggaggggaccttcaagtactggatcgggtctactggaacgacggtctcgatcagtatagactgacaccgacagagcttaaacagaagttcaaggacatgaatgctgatgctgtcttcgcgtttcagcttagaaacccagtgcataacgggcatgccctacttatgcaggatactcacaaacagttgttagagaggggctataggaggccagtgctgctcctgcatccgctgggaggatggaccaaagatgatgacgtcccgctgatgtggcggatgaagcagcacgcggctgtactggaagagggtgtgcttaatccagagacaactgtggtggcaatcttcccgtctccaatgatgtatgcaggcccaaccgaggtgcagtggcactgccgagctcggatggtagctggcgcaaatttctacatcgtgggaagagacccggctggcatgccccatccagaaaccggaaaggatctgtacgagccaagtcatggcgcaaaggtcctcaccatggctccagggttaatcaccctcgagatagtgccatttagagtggctgcttataataaaaaaaaaaagagaatggactattatgactcagagcaccacgaagactttgaattcatttcaggtactcgtatgaggaaactcgctagagagggccaaaaaccccctgaaggcttcatggcacctaaagcatggacggtacttacagagtattataaatctttagagaaagcgtag

SEQ ID NO: 212714 - DNA, 1845 bp, synthetic construct
  misc_feature 1..1845: note = Description of Artificial Sequence: Synthetic coding sequence
  source 1..1845: mol_type = other DNA
atgtcaggcatcaaaaagcagaaaaccgaaaaccagcagaaatcaacaaacgttgtctatcaggcccaccatgtgtctcgtaacaaaagagggcaggttgttggaacaagaggcggatttcgtggatgcactgtctggctgaccggcctcagtggagcaggcaagaccactatatcctttgccctggaagaataccttgtctctcacgctatcccgtgctactcattggacggcgacaacgttagacatggcctgaaccgtaatctgggtttcagccctggcgacagagaggaaaacattagacgcatagcagaggttgcaaagctgtttgctgatgccggtctcgtgtgtattacgtcatttatcagccccttcgccaaggatagagagaatgctcgtaaaattcatgaaagcgcagggctgcctttttttgagatttttgtggacgctccactgaacatatgcgaatccagagatgtcaaaggtctgtacaagcgagcccgagccggagaaattaaggggtttacgggaatagactctgactatgaaaaacccgagaccccagaacgggttttaaaaaccaatctctccacggtgagcgactgcgtccatcaggttgtagagctcctgcaggagcaaaatatcgtgccctataccatcatcaaggatatccatgagctgtttgtcccagagaataagctcgatcatgtcagggcagaggccgagaccctgcccagcctgtccatcaccaaactggatctgcaatgggttcaggtcctctcagagggctgggccactccattgaaagggtttatgcgagagaaggagtatctgcaagtcatgcacttcgatacgctgctagatgatggggtgatcaatatgtccatccccatcgttctgcccgttagcgccgaagacaagacaagactcgaaggctgctccaagtttgtgttagcccacgggggaagaagagtggctatcctgagagatgctgaattctatgaacaccgcaaagaggagcgatgctctagggtgtgggggaccacatgcacaaagcacccgcacatcaaaatggtgatggaaagcggagactggcttgtgggaggtgatttacaagtgctcgagaagattaggtggaacgatggactggaccagtatcgccttacacctctggagcttaagcagaagtgcaaggagatgaatgccgacgccgtgtttgcctttcaactgcgaaacccagtccacaacgggcacgccttgctaatgcaagatacccggaggaggcttttagagaggggctacaagcatcctgttctattgctacatcctctgggaggatggaccaaggacgacgatgtcccgttagactggcgaatgaaacagcacgcagccgtgctggaggagggagttttggaccccaaatcgacgatcgtcgccatcttcccaagccccatgctgtacgcaggacccacagaggtgcagtggcactgtagatctaggatgatcgccggtgctaatttctatatcgttgggagggatccagctgggatgccccacccggagacaaaaaaagacctgtatgaaccaacccacggcggaaaggtgctgtctatggcgcctggtctcacttctgtcgaaatcataccctttagggtagcggcatataataaagctaaaaaggccatggacttctacgatccagctagacataatgagtttgacttcatttccggaacccgcatgcgaaaacttgctcgcgagggcgagaatcctcccgatggttttatggcaccgaaagcgtggaaggtcttgaccgattactatagatcactcgaaaagaactag

SEQ ID NO: 212715 - DNA, 1857 bp, synthetic construct
  misc_feature 1..1857: note = Description of Artificial Sequence: Synthetic coding sequence
  source 1..1857: mol_type = other DNA
agcggcaaaaagcaggagaaagaggagaatcagcagaagtccaccaatgtggtgtatcaggctcaccacgtgtcccggaacaaacggggacaggtggtcgggacccgcggagggttccggggttgtacagtctggctgaccggcctcagcggggcaggaaaaactaccatctctttcgctttagaagagtacctggtgagccacgccatcccctgctactctcttgatggggacaacgtgaggcacgggcttaacaggaatctgggattctcccccggagatcgcgaagagaatatcaggcgtattgctgaggttgctaagctctttgccgacgcgggacttgtgtgcatcactagctttatttccccgttcgctaaggacagggaaaacgccaggaagattcacgaatctgctggtctgcctttctttgaaatttttgtcgatgctccacttaacatctgcgaaagtcgagacgttaaaggtctatacaaacgagccagagctggggaaattaagggcttcaccgggattgattccgactacgagaagcctgagacaccagaaagggtccttaagactaacttgtccacggtgtccgattgtgtccaccaggtcgtggagctcctccaggagcagaacattgtcccttacactatcattaaggacattcatgaactgttcgtacccgagaataagttagaccacgtgagagccgaagccgagaccttacctagtctctcaatcacaaagctggacttacagtgggtgcaggtactctctgagggatgggcaactcccctgaaagggtttatgagggaaaaagagtacttacaagtgatgcatttcgacaccctcctggacgggatgtttctgctcgatggtgttatcaatatgagtatccccatcgtgttaccagtttctgcggaggacaaaacccgactggaaggctgctcgaaattcgtcctggcacacggagggcgtcgtgtggcaatcttacgcgacgccgagttttacgagcaccgcaaagaggagcgctgcagccgcgtgtggggcaccacctgcacaaaacatccacacatcaagatggtgatggagagtggtgactggctggtgggcggagatcttcaggtcctcgagaagatacggtggaacgacgggctcgaccagtaccgcctaacccccttggagcttaagcagaaatgcaaagagatgaacgcagatgctgtctttgctttccagctgagaaaccccgtgcataatgggcatgccctgctcatgcaagacactcgcagacgactcctggaacgcggatataagcaccctgtgctcctacttcatcctttagggggatggacaaaggatgacgatgtccctttagactggagaatgaaacagcacgccgcagtcttagaggaaggtgtcctggatccaaagtccacgatcgtggccatatttccctctccaatgctgtatgccggtcccactgaagtgcagtggcattgtcgttcccggatgatcgcaggggctaatttctacattgtgggcagagatccagcaggcatgccgcacccagagactaaaaaggacttgtacgagccgactcacggaggaaaggtcctgtccatggcacccggtcttacgtctgtcgaaatcattccattcagagtggcagcttataacaaggccaagaaggcaatggacttttacgatccagctcgccacaatgagttcgacttcatcagtggcacacggatgaggaagctggctagggaaggggaaaacccccctgatggatttatggcacccaaggcatggaaggtcctgacagactactatcggtcacttgagaagaattag

SEQ ID NO: 212716 - DNA, 1857 bp, synthetic construct
  misc_feature 1..1857: note = Description of Artificial Sequence: Synthetic coding sequence
  source 1..1857: mol_type = other DNA
atgatcgtgctagtgaccgagtgggtggatcttagtcttgagaatcagcagaaatccacaaacgtggtttatcaggcccaccacgtttctagaaataaacggggtcaggtggtcggcacaaggggaggtttccgtgggtgcaccgtgtggctcacaggcttgtcaggcgctggcaaaactaccatatccttcgcactcgaggaatacctggtcagccacgccattccctgttattccctcgacggagataacgtgcggcacgggctaaaccgaaacctggggtttagcccaggtgatcgggaggaaaatataaggcggatcgcagaagtggcaaagctcttcgccgatgccggattggtatgcattaccagctttatctctcccttcgccaaggacagagaaaacgccagaaagatccatgagagtgcaggtctgccattcttcgaaatattcgtagatgcaccgctgaacatttgtgaaagtcgtgatgtaaagggactgtataaaagggccagggccggagagataaaaggcttcactggaatagacagtgattacgaaaagcccgaaaccccagagagggtgcttaaaacgaatctgagtaccgtgagcgactgcgtgcatcaggtcgtcgaactgcttcaggagcagaatattgtgccttataccatcattaaagacattcatgagctctttgtccccgagaacaagctcgaccatgttcgggcagaggctgaaaccttaccctctttatccatcactaaactggacctacaatgggtgcaagtgctgagcgaggggtgggctacaccattgaagggtttcatgagggagaaggagtatctgcaggttatgcacttcgatactctgctcgacgatggggtgattaacatgtctatcccaatcgttcttcccgtgtctgcagaggacaaaacaagactagaaggctgctctaagttcgtgcttgcccatgggggaaggcgggtggctattctgagggacgccgagttttatgaacaccggaaagaggagaggtgtagccgcgtatggggcacaacctgcacgaaacatccacacatcaagatggtgatggaatccggcgattggctggtcggcggagatctgcaggtgctggaaaaaatccggtggaatgacggcttggatcagtataggctgactccacttgagctgaagcagaagtgcaaggagatgaatgctgatgctgtcttcgccttccagttgcggaaccctgtgcacaatggacacgccctcctgatgcaggacaccaggcgaaggcttttggagagggggtataaacaccctgtcctgttgctccaccctttaggaggctggactaaagatgacgatgtcccgctggattggaggatgaaacagcacgccgcagtgctcgaggaaggcgtactagatcctaagtctacgatagtggccatcttcccttctcccatgctgtacgccggacccaccgaggttcaatggcattgtcgaagtcgtatgattgccggtgccaatttctatatagttgggagggaccctgctggtatgcctcaccctgaaactaagaaggacctttacgaaccgacccacggcggaaaagtgctatccatggctcctggcttgacatcagtggaaataataccatttcgggtggcagcatataacaaagctaagaaggcaatggacttctatgaccctgcgagacacaacgagttcgatttcattagtgggaccagaatgagaaaactcgcacgtgagggggagaatcctccagacggatttatggcccctaaggcctggaaagtcctaacagactactacagaagcctcgagaagaattag

SEQ ID NO: 212717 - DNA, 1860 bp, synthetic construct
  misc_feature 1..1860: note = Description of Artificial Sequence: Synthetic coding sequence
  source 1..1860: mol_type = other DNA
atgtcagggattaaaaagcaaaaaactgaaaaccagcaaaagagtaccaatgtggtataccaagcccaccacgtgagccgaaataaaagaggccaggtcgtgggaacccgcggaggctttagaggctgcaccgtctggcttacaggattgtctggtgccggtaaaacaaccattagttttgcactggaggagtatctcgtatctcacgccattccttgctacagcctggatggggacaacgttcggcatgggctcaatcgtaatctgggttttagccctggcgatcgagaagaaaacataagacgaatcgcggaagtcgctaaactgttcgcggatgcgggacttgtttgcattacatctttcattagcccatttgcgaaagacagagagaatgcacgcaaaatacacgaatcggccggactgcccttttttgagatcttcgtggacgcccctctcaatatctgtgagagccgcgatgtgaagggcctgtacaagagggctagggcgggagaaatcaagggcttcactggcatagatagcgattacgagaagcctgagaccccagaacgggtgctgaagaccaatctctcaactgtgtcggattgtgtgcaccaggtcgttgaactcctccaggagcagaacattgtcccctacactatcattaaggatatccacgagctgtttgtccctgaaaataagctcgatcacgtaagggccgaggccgagaccctgcccagtctctccatcacaaagcttgatctccaatgggtgcaggttctcagtgaaggatgggccacacccctgaagggtttcatgcgcgagaaggagtacttgcaagtgatgcactttgatacactgttagatggtatggcgctccccgatggcgtgatcaatatgtctatccctattgtgctccccgtgtccgccgaggacaaaacccgactggaaggctgctcaaagttcgttctggcccacggaggcaggcgtgtagctatactgagggacgccgagttttatgagcaccggaaggaggaaaggtgttcacgcgtgtgggggaccacctgcactaagcacccacacatcaaaatggtgatggagtccggggattggctggtaggaggagatctccaagtgctggaaaagatcagatggaatgacggcctcgaccaatatcgtctgactccacttgagctgaaacagaaatgtaaagaaatgaacgccgacgccgtattcgcattccagttacgcaatccggtgcataatgggcatgcgctgttaatgcaggacaccaggcgaaggctcctggagcgaggatacaaacatcccgtcttactgctgcacccgctcggcggttggaccaaagacgatgacgtacctttagactggaggatgaagcaacatgcagccgtgctggaggaaggggtgctggaccccaagagcacaatcgttgcaatatttcctagcccgatgctatacgctggccctacagaagtgcaatggcactgcaggtcccgaatgattgctggcgctaatttctacatagtggggcgtgacccggcaggcatgccccacccggaaaccaagaaggatctctacgagccgacccatggaggcaaagtgctgtccatggcccctggacttacaagtgtcgagatcatcccatttagagttgccgcttacaataaagccaagaaggctatggacttctacgaccctgcaagacacaacgagttcgactttatttccggcactcgcatgcggaaacttgcacgcgagggcgaaaatccacctgatggattcatggcccctaaggcgtggaaagtactgactgattactacagatctctggagaagaactag

SEQ ID NO: 212718 - DNA, 1503 bp, synthetic construct
  misc_feature 1..1503: note = Description of Artificial Sequence: Synthetic coding sequence
  source 1..1503: mol_type = other DNA
atggctagtatgctgctggcccaaaggctggcctgttcctttcagcactcttaccgcttgctcgttcctggctcccggcatattagccaggcggctgcaaaggtggatgtggagtttgactacgacgggcctctgatgaagaccgaggtgcctgggccaaggagccaggaactgatgaaacagctcaatataatacagaacgccgaggcagtgcattttttctgcaactatgaagagagtcgcggtaattacctggtggacgtggatggcaatcgcatgctcgacctctattcccagatatcgtctgtgcccatcgggtacagccaccctgcattgctgaaacttatccagcaacctcaaaatgcctcaatgtttgtgaatcgacccgcactcggaattctccctccagagaactttgttgagaagctgcgacaatctctcttatctgtggctccaaagggaatgtctcagctcattacaatggcctgcggttcctgtagcaacgagaacgccctcaaaactatctttatgtggtatcgctcaaaagaacggggtcagcgcggattctctcaagaggagctagaaacgtgcatgatcaatcaagcacctgggtgtccagactacagcatcctgtcctttatgggcgcattccacgggcgaacaatgggatgtctggcaaccactcattcaaaggctatacacaagattgatataccctcctttgactggcctatcgctccttttcctcgtcttaaataccccctcgaagaattcgtgaaggagaatcaacaggaagaagctaggtgcctggaagaggttgaagacctcatcgtgaaatacagaaagaagaagaagaccgtggctggcattatagtcgagcctatccagtccgaggggggagacaatcatgcgagcgacgactttttcagaaaattacgggatatcgcccgaaagcacggatgtgcgtttctcgtagacgaggttcaaaccggtgggggttgcacagggaaattctgggcacacgagcattggggcctggatgacccggctgacgtgatgacctttagcaagaaaatgatgacgggagggttctttcacaaggaggaattcaggccaaacgccccttacaggatttttaacacttggctgggggaccctagcaagaacctgctcctggcagaggtgattaatattatcaagcgggaagaccttctcaacaacgcagcccatgcaggcaaagccctgttaaccgggctgcttgatcttcaagctaggtatccacagtttatttctcgggtcagaggtcgaggcacattctgtagtttcgatacacccgacgattcaataagaaacaagttaatccttatcgcgagaaataaaggagtggtcctcggcggttgcggcgataaaagcattcgcttccggcctaccttggtattccgagatcatcacgctcacctgttcctcaatatcttctctgacattctggctgactttaaatag

SEQ ID NO: 212719 - DNA, 1503 bp, synthetic construct
  misc_feature 1..1503: note = Description of Artificial Sequence: Synthetic coding sequence
  source 1..1503: mol_type = other DNA
atggctagtatgcttctggctcagaggctggcatgttcttttcagcacagctatagactcctggtgccaggtagtaggcacatcagccaggcagctgccaaggtggatgtggagttcgactacgatggtccgctcatgaaaactgaggtgcctggtccaagaagccaggagttgatgaagcagctgaacattatacagaacgcagaggccgttcattttttttgtaactatgaggaatctcgcggtaactatctggtggatgttgatggcaatcgaatgctggatctgtatagtcaaattagtagcgtcccaataggatactctcaccccgctctgctcaagctgattcagcagccccagaacgcctcaatgttcgtcaacagacccgcactgggaattctgcctccggagaactttgttgaaaagttaagacagagcctgttaagcgtagccccaaaaggcatgagtcagctcataacgatggcatgcggctcctgctccaacgaaaatgccctcaaaacaatcttcatgtggtacaggtccaaagaaagaggtcagcgcggttttagccaggaagaattggaaacatgtatgatcaaccaggccccaggctgtcccgactatagcatattgagctttatgggcgcatttcatggtaggaccatgggttgcctcgccacaacgcattccaaggccattcataagatcgatatccccagttttgattggccaattgcaccattcccccgtttgaagtaccccctggaagaatttgtcaaagagaatcagcaggaagaggctagatgccttgaggaagttgaggatctgattgtgaaataccgaaaaaagaagaaaacagttgccggtattatcgtcgaacccatccaaagtgaaggaggggataatcacgcttccgatgatttcttccggaagcttagagacatcgcccgtaaacacggatgcgcgttcctggtcgacgaggtgcagacaggaggtggttgtactggcaaattctgggcgcatgaacattggggactcgacgatccagcagatgtgatgacatttagtaagaagatgatgactgggggtttttttcacaaggaggagtttcgtcccaatgcgccatatcgcatttttaacacttggctgggcgatccatccaagaatcttctgctggccgaagtgattaacataattaagcgcgaggacctcctcaacaatgccgcacacgctggaaaagcacttctgacgggcctcttggatctccaggcacgctatccacagtttatttcgcgggtgcgtggtcggggaacattttgctcgtttgatacccctgacgattcgatccggaataagctgatcttgattgctaggaataaaggtgttgttctgggcggatgtggagacaaatccatacggtttcgcccaacgcttgtctttcgtgaccaccatgcccatctgttccttaacatcttttctgacatcttagctgatttcaagtag

SEQ ID NO: 212720 - DNA, 1503 bp, synthetic construct
  misc_feature 1..1503: note = Description of Artificial Sequence: Synthetic coding sequence
  source 1..1503: mol_type = other DNA
atggcctctatgctcttggctcaacgactggcttgtagtttccagcactcttatagacttctggtacctggcagccgtcacatctcccaagctgctgctaaggtggacgtggaattcgattatgacggcccactgatgaagaccgaggtgccgggtcctagatcacaagagcttatgaagcagttgaatattatacagaatgctgaagccgtgcattttttctgcaactatgaagagagcaggggaaattacttagtggatgtggacgggaaccgaatgttggatctgtattcgcagatcagctccgtgcccattgggtactctcaccccgcacttctcaagttaattcagcagcctcagaacgcttccatgttcgtgaacagaccagcacttgggatcttgccccctgaaaacttcgtagaaaagcttcggcagtcactgctgagtgtggctccgaagggaatgtcacagctcataaccatggcttgtggctcatgtagcaacgagaacgctttaaaaactatctttatgtggtatagatcaaaagagaggggacagcggggattttctcaggaggaactcgagacatgcatgataaatcaggcacccggttgccccgattattccatcttgagtttcatgggcgcttttcatggccgaactatgggttgcctggcgactacccattccaaggcaattcacaagatcgacattccttccttcgattggcctatagcgcctttcccaaggctaaagtacccattagaggagtttgtgaaagagaaccagcaggaagaagcaaggtgtctggaagaagtagaagacttgattgttaagtaccggaagaaaaaaaaaactgtcgcagggattattgtggaacctatccagagcgaagggggtgataatcatgcgtcggatgactttttccggaagcttagggatatcgcacgaaagcacgggtgcgcatttctggtggacgaggtgcagacgggcggtggctgcaccggcaaattctgggcccatgaacattggggactcgacgatccagctgatgtcatgactttctcgaagaagatgatgacaggcggatttttccacaaggaggagttcagaccaaacgcaccctatagaatatttaatacatggctgggcgacccatcaaagaacctactgctcgcagaggtgattaatatcataaaaagagaggatttgcttaacaatgccgctcacgctgggaaagccctcctgaccggcctgcttgatctacaggcacggtatccccaattcattagtcgcgtgagggggagagggaccttttgtagtttcgacacaccagatgattctatccgcaacaaactgatacttatcgcccgtaacaagggcgtggttctggggggatgcggcgataagagcattcgattccgtccaactttggtattcagggaccaccacgcacacctgtttcttaatattttctccgacattctggctgacttcaaatag

SEQ ID NO: 212721 - DNA, 462 bp, synthetic construct
  misc_feature 1..462: note = Description of Artificial Sequence: Synthetic coding sequence
  source 1..462: mol_type = other DNA
gttgatatggacggggttctagccgacttcgaagctggcctgctccggggatttaggagacgcttccccgaagaacctcacgtcccactcgaacagcgcaggggcttcttggctagggagcagtatagagctctgaggcccgatttggctgacaaggttgcctctgtatacgaggctccagggttctttctggacctggaacccatccccggtgccctggacgctgtacgggaaatgaacgatctgcctgatacccaggtcttcatttgcaccagccctctacttaagtaccaccattgcgtgggtgagaaagaggagaccccttcctgggagcatatccttttcacttgttgccacaatcggcaccttgttctgcccccaacccgccgtcggctgctttcatggtccgacaattggagagaaatcttggattctaagaggggagccgctcagagggagtag

SEQ ID NO: 212722 - DNA, 606 bp, synthetic construct
  misc_feature 1..606: note = Description of Artificial Sequence: Synthetic coding sequence
  source 1..606: mol_type = other DNA
atggccagaagtgtcagggtgctagtggatatggatggtgtactggccgacttcgaggcaggactgttaagaggttttaggcgcaggtttccagaggagcctcacgtgcctctggaacagaggaggggctttctggcccgagagcagtatagggctttgcgcccagatctggcagacaaggttgcctcagtgtacgaggctccaggtttcttcctggatctggagccaattcccggagcccttgacgcagttcgggagatgaatgaccttcccgatacacaagttttcatctgtacgagtccgctgttgaaatatcaccattgcgttggtgagaagtataggtgggtggagcaacacctgggacctcagttcgtggagcgtatcatcctgactcgcgacaagacagtagtgcttggcgacctcttgattgacgataaggataccgtcaggggtcaggaagaaacacctagttgggagcacattctctttacctgctgtcataatcgccacctcgtgctgcccccaacgaggaggcgactgctgtcctggtcagacaactggcgggagatcctggactccaaaagaggagcggctcagagggagtag

SEQ ID NO: 212723 - DNA, 687 bp, synthetic construct
  misc_feature 1..687: note = Description of Artificial Sequence: Synthetic coding sequence
  source 1..687: mol_type = other DNA
atgatacggctgggagggtggtgcgcaaggcggttatgctccgccgctgtgccagccggacggagaggggctgcgggaggtttaggacttgctggaggtcgagcacttcgggtgctagtcgatatggacggcgtcctcgctgacttcgaaggaggttttctccgcaaattcagagcaagattccccgatcaacctttcatagcactggaggaccggcgtggcttttgggtgtccgagcagtacggcaggctgcggccagggttgtctgagaaagctatcagcatttgggagtcaaaaaattttttctttgaactggaaccactgccaggggctgttgaggcggtaaaggagatggctagcctgcagaatacagacgtgtttatatgcacatcccctataaagatgtttaaatactgtccatatgagaaatatgcctgggtcgagaaatactttggtccagatttcttagaacaaatcgtgctgacgcgtgacaagaccgtcgtgtctgcagacttgctcatagacgaccggcctgacattacaggggcagagccaacaccttcctgggagcacgtgctatttaccgcatgccacaatcagcacctgcagctgcaacccccaaggcggaggctgcacagctgggctgacgactggaaggctatactggatagcaaacgcccttgctag

SEQ ID NO: 212724 - DNA, 720 bp, synthetic construct
  misc_feature 1..720: note = Description of Artificial Sequence: Synthetic coding sequence
  source 1..720: mol_type = other DNA
atgattcgcctcgggggttggtgtgcccgacgtttgtgcagtgctgccgtccctgcaggacgccgaggagccgctggaggattaggattggcagggggtagggccctgcgggtactcgtggatatggatggggtgctggctgactttgagggcggtttcttgagaaagtttcgtgccaggtttccagaccaaccattcattgcactggaggacaggaggggcttttgggtgagcgaacaatacggtagactacgtcctgggctgagtgaaaaggccatcagcatttgggaatccaagaattttttcttcgagcttgagccactgcctggagccgtagaagctgtaaaagaaatggcgagcctgcagaacaccgacgtgttcatttgcaccagccctattaagatgtttaagtactgcccttatgaaaagtatgcttgggtcgagaagtattttgggccagattttctagaacagatagtgctgacacgggataagaccgttgtgtctgctgatttgctgatcgatgatagacctgatataaccggtaaccaaccccctgctggctccatgagtagctctcctccagctaccaccagtacttgtagttgcagcccgccagccgctggctgcaccaggggccgtaccactggtaggccgttttggactgccagcggcccagccgagctggattgtgcaagcggctctagcgtcggtctgtag

SEQ ID NO: 212725 - DNA, 2853 bp, synthetic construct
  misc_feature 1..2853: note = Description of Artificial Sequence: Synthetic coding sequence
  source 1..2853: mol_type = other DNA
atgggcgtcccagcatttttcaggtggcttagcagaaagtacccttcaatcatcgtgaactgcgtggaggaaaaaccgaaggaatgcaatggtgtgaaaatccctgtggacgcctcaaaacccaatcccaacgacgtggagtttgacaatctatacctagatatgaatggaattatccatccatgtacacaccctgaagataagccagctcccaagaacgaagatgaaatgatggtggccatttttgagtatatcgaccgcttgttcagcatcgttcgtccacgcagactgctctatatggcaattgatggcgtggcccctagagccaaaatgaatcagcaacggtctaggcgcttccgtgcttcaaaggaggggatggaggcagccgtggaaaagcagcgcgtgcgggaggagatactcgcgaaagggggttttctgccgcctgaggaaattaaagaacggtttgattccaactgtataacgcccggaacggaatttatggacaacttggccaagtgcctgcgttattatattgcagaccgccttaataatgatcccggatggaagaatcttacagtcatcttatccgacgctagcgctccaggggaaggggaacacaagatcatggactatatccgacgacagcgcgctcaacctaatcatgatcctaacactcaccattgcctttgcggtgcagatgcagacctgatcatgctggggctggccactcacgaacccaactttacgatcattagagaggaattcaaacccaataaacccaagccttgcggactgtgtaaccagttcggccatgaggtgaaggattgcgaggggctgcccagggaaaagaaagggaagcacgatgagctcgccgatagcctaccatgtgctgagggagagttcatcttcctgcggctgaacgtgctgagggaatacctggaacgggaactcactatggcctccctgcctttcacctttgatgtggagagaagtatcgacgactgggttttcatgtgctttttcgtgggaaacgatttcctgccccacctcccaagcttggaaatcagagaaaatgctatcgaccggctggtgaatatctacaagaacgtggtacataaaaccggcggatacctaactgagagcggctatgtcaatctccagcgagtgcaaatgatcatgttagccgtgggcgaagtggaggacagtatattcaaaaaacgtaaagacgatgaggacagtttccggcgaagacagaaggagaagcggaaaagaatgaaacgagatcagcccgcatttaccccatccgggatattaaccccgcacgccctgggctcaagaaactcacctggctctcaagttgccagtaatcctcggcaggctgcctatgagatgagaatgcagaacaattcatccccaagcatttcaccaaacacctccttcacctcggacggttccccctcccccctcggcggtattaagcggaaggctgaggactccgacagtgagccagagcctgaagacaacgtgcggctgtgggaggccggatggaaacaacgctactacaaaaacaaattcgacgtggatgctgctgacgagaaattccggaggaaagtggttcagagttatgtggaggggctctgttgggtcttgcgatactactatcagggctgtgcatcatggaagtggtattacccgtttcactatgctccattcgcttcagacttcgagggcattgccgacatgccctcagattttgaaaagggcacgaaaccatttaaaccactagagcagcttatgggtgtatttcccgctgcaagcggtaattttctgcctccgtcctggcggaagctgatgtcggaccccgacagctcaataattgatttctatccagaggactttgccatagacctgaacggcaaaaagtatgcctggcagggagtcgcattactcccattcgtggatgaaaggcggcttcgcgcagccctcgaggaagtttacccagacctgacccccgaggaaacacggcgtaattccctcgggggagatgtcctctttgtcgggaagcatcatcctctccacgactttattctggaactataccagaccggcagcactgaaccagttgaggtgcctcccgagctgtgccatggcattcagggaaagttcagtctggatgaagaggctattctgccagatcaaattgtctgtagccccgtgcccatgctgagagacctgacacagaacacagtggtgagtatcaatttcaaagatcctcagttcgccgaggactacatcttcaaagctgtcatgctgcctggtgctcggaaaccggctgcagtgctgaagccctctgattgggaaaaatcatcaaatggtagacagtggaagcctcagttgggatttaaccgcgatcgtaggcccgtacatttagaccaggctgcctttcgtacattgggacacgttatgcctaggggttctggaactgggatctacagtaacgctgctccaccacccgtcacctaccagggaaatctttaccggcctctgttacggggacaagctcaaatccctaagttaatgtcaaacatgcgtccgcaagattcttggagaggacctccacccttatttcagcaacagcggtttgaccgcggtgtcggggcagagcccctcctgccatggaaccgaatgctccagacccagaacgctgcttttcaacctaatcaatatcagatgctggctgggcctgggggttacccccctagacgtgatgaccgaggaggaaggcagggctaccccagagagggtaggaaataccccctgccccctcctagcgggaggtataattggaactag

SEQ ID NO: 212726 - DNA, 2625 bp, synthetic construct
  misc_feature 1..2625: note = Description of Artificial Sequence: Synthetic coding sequence
  source 1..2625: mol_type = other DNA
atgatggtggctatcttcgaatatattgatcggctgttttccatagtcagaccaagaagactattgtacatggctatcgacggcgtcgcccctcgggctaagatgaaccaacagcggtctcggagatttagagcttcaaaagaagggatggaagctgccgtggaaaagcagagggtcagggaagagatactcgccaagggtgggtttctccctccagaagaaataaaggagaggttcgacagcaattgtatcaccccgggaacggagttcatggacaacctggccaagtgccttagatattatatcgctgatcggctcaataacgaccccggatggaagaacctcaccgtaattctgagcgacgccagtgctcctggagaaggggagcataagattatggattatatccggagacagagagcccaacctaatcacgatcccaacactcatcattgtctctgtggcgctgacgccgacctgatcatgctgggcctagccacacacgaaccgaacttcactattattcgtgaagagttcaagcctaataagcctaagccctgtggattgtgcaaccagtttgggcatgaggtgaaggactgtgaaggcctgcccagagagaaaaaagggaagcacgacgaattagccgactccttgccttgcgccgaaggtgaattcatattcctgcggctcaatgtcctgcgggaatatttagaaagagagctcaccatggcttctctacccttcacgtttgatgtggaaagaagcatcgacgactgggtgttcatgtgttttttcgtgggcaacgatttcctacctcacttgccatctcttgaaatcagggaaaacgcaatagatcgtctagtcaacatctacaaaaacgtcgttcacaagaccgggggatacctgaccgagtcaggctatgtgaacctccagagagtccagatgataatgctggccgtcggcgaggtcgaagactccatctttaaaaagaggaaagacgatgaagactccttcagaaggaggcagaaggaaaaacgcaagcggatgaaacgcgaccaacctgccttcactcctagcggcattctaaccccgcacgctctgggaagtaggaacagtcccggtagtcaggttgcaagtaatccgaggcaggctgcgtatgaaatgcggatgcagaacaattcctctccgagcatctcacccaacacttctttcacaagcgacggaagcccatcgccgctgggcggtatcaagaggaaggctgaggactccgactcagagcccgaaccagaggataatgtaagactctgggaagcaggatggaagcagcggtactacaaaaacaagttcgacgtggatgcagccgacgaaaagttccgtcgcaaagtggtccagagctatgtcgaaggattgtgctgggttttacgctattactaccaaggctgcgccagctggaagtggtattatcctttccattatgcccctttcgcctcagacttcgagggtatcgccgatatgccatctgattttgaaaaaggtacaaaacctttcaagcccctggaacaattgatgggggtatttccggctgcctccggcaatttcctcccacccagctggcggaagttaatgtctgaccccgatagttctatcattgacttttatcctgaggactttgcaatcgacctcaatggcaagaagtatgcgtggcagggcgtggctctgctgcctttcgttgacgaaagaagactacgcgcagcattagaagaagtgtatccagacttgacgcccgaagagacacgacggaactcactgggaggcgatgtcctgtttgtgggaaaacatcatcccttgcatgactttatcttggaactgtaccaaacaggcagcacagagcccgtcgaggtaccccctgagctctgccacggcatacagggcaaatttagtcttgacgaagaagctatattaccggaccaaattgtgtgctcacctgtgccaatgttgcgtgacctgactcaaaacactgtcgtgtccattaattttaaagatcctcaattcgccgaggattatatcttcaaagcggtgatgctgcctggagcaagaaagcccgctgctgtgcttaagccatctgattgggaaaaatcctccaacggacgccagtggaagccccagcttggcttcaaccgtgaccgtaggccggtgcacctggaccaggccgctttcagaactctcgggcacgttatgccaagaggctccgggacagggatttactcaaatgccgcaccaccacctgtcacttaccagggtaacctgtacagaccgcttctgcggggtcaagcacagatacctaagcttatgtcaaacatgagaccgcaggacagctggagggggccaccccctctgttccaacagcagcggtttgacaggggagtgggtgcagaacccctgcttccctggaatcgaatgctgcagactcaaaacgccgcattccagccaaaccagtaccagatgctcgccggaccaggcggatacccacctaggcgcgatgataggggaggccgacaagggtatcctagggagggacgaaaatatcctctccctcccccttccggccgatacaattggaattag

SEQ ID NO: 212727 - DNA, 2691 bp, synthetic construct
  misc_feature 1..2691: note = Description of Artificial Sequence: Synthetic coding sequence
  source 1..2691: mol_type = other DNA
atgaacgggattatccatccatgcacacacccggaggacaaacccgctccaaagaatgaagacgagatgatggtcgcaatatttgagtatatcgatcgcctgttctctatcgtacgaccgcgacgcctgttgtatatggcaatcgacggggttgccccacgcgctaaaatgaaccagcagcggtcccgccgatttagagcctctaaggaaggcatggaggcagcggtcgagaaacagcgggtacgggaggagatcttagcaaagggcggtttcctgcctccggaagagatcaaagaacgtttcgactcaaattgcatcactccgggaacagaatttatggacaatctggcaaagtgcctgcgatactatatcgccgaccgactgaataatgatccaggctggaagaatctcacagtgatattgtctgacgcctcggcccctggcgagggggaacataagattatggattatatccgtaggcagcgagctcagcccaaccacgatcctaacacacatcactgcttatgcggtgccgacgcggaccttatcatgctggggctcgccacgcatgaaccaaacttcaccatcattagagaggagttcaagcccaataaacctaaaccctgcggcctgtgcaaccaatttggccacgaagtcaaagattgtgagggactaccacgggaaaaaaaagggaagcatgatgaacttgctgacagcctcccctgtgccgaaggggagttcatatttctgcgactgaatgttctgcgagagtacctggaacgggagctgacgatggctagcctccccttcacctttgatgtcgagcgcagcatcgacgactgggtctttatgtgtttttttgtcggcaatgacttcctcccgcatctaccatctctagagatccgagaaaacgctatcgatcgccttgtgaacatctataaaaatgtggttcacaagacaggtggttacctgacagaatctgggtacgttaatctccaaagggtgcagatgatcatgctggctgttggagaagtggaggacagcatcttcaagaagcgcaaggatgatgaggactcgtttaggaggcgtcagaaagaaaaacgcaaacgcatgaagcgcgaccaaccagctttcaccccatcagggatactgactccgcatgcgctgggctccaggaactctcctggatcgcaggttgccagcaacccacgtcaggccgcttatgagatgaggatgcaaaataatagctctccctccatctctccaaacacttcattcacaagcgacggctcgcctagccctttgggcggaatcaagcggaaggcagaggactccgactcggaacccgagccagaagacaatgttcgcctctgggaggccggttggaagcagagatattataaaaacaaatttgacgtggacgccgctgacgaaaagttccgcaggaaggttgtgcagagctatgtggaaggcctctgttgggtattgaggtactactatcagggatgtgcgagctggaagtggtattacccgtttcactatgctcctttcgcaagcgacttcgaaggaattgccgatatgcccagcgacttcgagaaagggaccaagccgtttaaacctctggaacagttgatgggtgtttttcctgcagcatcgggcaactttctcccaccttcttggaggaaacttatgtcagaccccgattcaagcatcatagatttttacccagaggactttgccattgatctaaacgggaagaagtatgcttggcagggcgtggctctcctgcccttcgtcgacgaacggagactccgggctgcactggaagaagtgtacccggatctcactccagaagagacaagacggaacagcctgggtggtgatgtgcttttcgtgggaaaacaccaccccctacatgattttatcctggaactgtatcaaacaggatcaactgagcccgtggaagtaccccctgagctgtgtcatgggatccaagggaagttttctttggacgaggaggccattctgcctgaccaaattgtgtgttcgccagtgccaatgttgagggatcttacacagaacaccgtggtctctatcaatttcaaggatccccagtttgccgaagattatatttttaaagctgtcatgctgcctggcgctcgcaaacccgcagctgttttaaaacccagcgattgggaaaagtcctccaacggaagacagtggaaacctcagttgggtttcaatagggaccgtaggcctgtacatttggatcaggccgcattccgcactcttgggcacgttatgccccgtggttctggcactggcatttacagcaacgcagcaccccctccagtaacctaccaagggaacctgtatagaccacttctaagggggcaagcccagatcccaaagctgatgtcaaacatgaggccgcaggactcctggcggggtcccccacctctgttccagcagcagaggttcgaccgaggagtgggagcagagccactgctgccctggaatcggatgttgcagacgcagaacgccgcttttcaacccaatcagtatcagatgctcgcaggtcctgggggatacccaccacggagagacgatcggggagggagacagggatacccgagggagggtagaaagtaccctctgcctcctccctcggggaggtacaactggaattag

SEQ ID NO: 212728 - DNA, 1779 bp, synthetic construct
  misc_feature 1..1779: note = Description of Artificial Sequence: Synthetic coding sequence
  source 1..1779: mol_type = other DNA
atggcacctgggcagctggctctcttttctgtgagtgacaaaacaggcctcgtggagtttgcaaggaatctcaccgcactgggccttaatttggtcgcaagcggaggtaccgccaaagctttgagagatgccggtctggcagttcgggatgtgagcgagctgaccggtttccctgaaatgctggggggacgcgtgaagaccctgcaccccgctgtgcacgcaggcatattggctcggaatattccagaggacaatgcagatatggcacggctagattttaacttgatcagagtggtggcctgtaatctgtacccattcgtaaagacggtggcgagcccgggtgtgactgtggaggaagcagtggagcagatcgatatcggaggcgtcacgttactacgcgcagcagccaagaatcacgcccgtgtgacggtcgtttgcgaacccgaggattacgtcgtggtcagtactgaaatgcagagttccgagtccaaggacacttcactggagacccggaggcaactcgcgctcaaagcgttcacgcacaccgcccaatacgacgaagcaatttccgattacttccgaaagcagtactcaaagggcgtgtcccagatgcccctcaggtacggtatgaatccccatcagacgcctgcccaactgtatactctgcagcccaagcttcctatcactgtgctgaatggcgctccaggcttcattaatctgtgtgatgccctgaatgcctggcagctcgtgaaagagctcaaggaggctcttggtattcctgcagccgcatccttcaagcacgtctcccccgcaggggcagctgtgggtattccactatctgaggatgaggctaaggtgtgcatggtctacgacctttacaagacacttaccccaataagcgcagcatacgcgagggctaggggagctgaccgtatgtccagtttcggcgatttcgtggctttgtcagatgtgtgcgacgtgcctaccgcgaagataatatcccgggaagtcagcgatggtatcatcgcacccggttacgaggaggaagcactgaccatactgagcaagaagaaaaacggcaattactgtgtgctgcagatggaccagagctacaagccggacgaaaacgaggtccgcactctcttcgggttgcatctgagtcaaaagcggaataatggtgtcgtcgataagtccctgttttcaaacgtggtcaccaaaaacaaagatctccctgagtccgctttaagggacctgattgttgcaacaatagccgtaaagtatacacagtcgaattctgtctgctacgccaaaaatgggcaagtgatcggaattggcgctggccagcaaagtagaatccactgtactcggttggctggggacaaggccaattactggtggttacgccatcatccacaagtcttaagcatgaagtttaagactggtgtgaaacgggctgaaatttccaacgctattgatcagtatgtgaccgggaccatcggtgaagacgaagatctgatcaaatggaaagctctctttgaagaggtgcccgagctgttaactgaggccgaaaaaaaggagtgggtggaaaaacttaccgaggtctccatcagctctgacgcattttttcccttcagagacaacgtggatagagctaaaaggagcggggtagcctacatcgccgctccgtccggcagcgcggcagacaaagtcgtgatcgaggcctgcgacgagcttggcattattctggcacacaccaacctgcggctttttcaccactag

SEQ ID NO: 212729 - DNA, 1602 bp, synthetic construct
  misc_feature 1..1602: note = Description of Artificial Sequence: Synthetic coding sequence
  source 1..1602: mol_type = other DNA
atgctgggcggtcgggtaaagaccctgcaccccgcagtccacgcagggatcctggcgaggaacatccctgaagacaacgccgatatggctagactggattttaaccttatcagggttgttgcatgtaacttgtacccattcgttaagaccgtcgcttctccaggtgtcaccgtcgaggaagcagtcgagcagatcgatattgggggagtaacccttctccgggcagccgcaaaaaatcatgcacgggtgactgtggtctgtgaaccagaggactacgttgtcgtctccactgagatgcagtcttccgaatctaaggacacaagcctcgaaactaggcgtcagttggcgctgaaagccttcacccacacagcccagtacgacgaggccattagcgactactttcgaaaacagtatagcaagggtgtgagccagatgccgctcagatatgggatgaacccacatcagacacctgcccagttgtacacgctgcaacctaagttaccaatcacagtgctgaatggcgcacccggttttattaacctgtgtgacgctctgaatgcttggcagttagttaaagagctgaaggaggctctgggcattcctgccgcagcatcctttaaacacgtgagtcccgctggagcggctgtgggaatacccctgtctgaggacgaggccaaggtgtgtatggtatatgatctgtacaaaactctaacaccaatatctgccgcttacgccagagctcgcggagccgacaggatgagttccttcggagacttcgtggccctgagtgacgtctgtgacgtacctaccgctaagattataagtagagaggttagcgacggaattatagcccctggctacgaggaggaggcgctcactatcctctccaaaaaaaagaacggaaactactgcgtgctccagatggaccaaagttataagccagacgagaatgaggtgcggaccctatttgggctgcacctgtctcagaaacgcaataacggagtagttgacaagagtctgtttagtaatgtagtcacaaaaaataaagacttgcccgaaagcgcgctgagagatctgattgtcgccactattgcagtgaaatatacccagagtaatagtgtgtgctacgctaaaaatggacaggtcatcggtattggggctgggcagcagagtcgtatccactgtacgcgcctggccggagataaggctaattattggtggctacgccatcaccctcaggttctaagcatgaagtttaaaaccggtgtgaaaagggccgagatttccaatgcaattgaccagtacgtaacaggaacaattggagaagacgaggatttgataaagtggaaggccctgtttgaggaagtgccagagctgctgaccgaagccgaaaagaaggaatgggttgagaagctgaccgaggtttccatatcttctgatgcgttttttccttttagagataacgtggacagagctaagcgcagtggcgtggcttatattgccgcaccgagcggatctgccgcagacaaggttgtgatcgaagcttgcgacgagcttggtatcattctcgcgcatacaaacctgcgcctgttccaccactag

SEQ ID NO: 212730 - DNA, 3252 bp, synthetic construct
  misc_feature 1..3252: note = Description of Artificial Sequence: Synthetic coding sequence
  source 1..3252: mol_type = other DNA
atgaaaggcactagggcgattggttcggttcctgaacgctcaccagcaggggttgatttgtccctcacaggcctgccacctcctgtgtctagacgtcctggatctgcagccactacaaagccaattgtccggtccgtctccgtggtgacgggtagcgagcagaaacgcaaagttctcgaagcaaccggaccaggcggaagccaggccattaataacctaagacggtctaactccaccacacaggtatcccagccccgttccggatcccccaggcccacagagcccacagattttctgatgttatttgagggaagtccatccggcaagaagcgacccgcttcactaagcacagccccttccgagaaaggcgcaacttggaacgtgctggacgatcagccaagaggatttacattgccatcaaatgctagatccagctctgcattggacagccccgcaggacccaggaggaaggagtgtactgtcgccctggcgccaaattttacagccaataataggtctaataaaggcgctgtgggcaactgcgtcacgaccatggtacacaacaggtatactccgagcgagagagcacccccactgaagagttcaaaccagaccgcaccatctttaaataacattataaaggcggcaacttgtgagggctccgagagctctggtttcggaaaattgccaaaaaatgtaagctcggcaactcatagcgcaaggaataatactggaggatctaccggcttacctcgtaggaaagaggtgaccgaggaggaggcagagagatttattcaccaagtcaaccaggccacagtgaccatccagagatggtatcgccatcaggtccagaggagaggcgcaggagcagctcgactggagcatctgcttcaggccaagcgggaggaacaacgacaacgctccggagaaggcactctgctggatttgcatcagcagaaagaggctgcacgaaggaaagccagggaggagaaggcacgtcaggccaggcgggctgctatccaggaactgcagcaaaaacgggctctgcgtgcacagaaagcatccactgcagaacgcggaccccctgaaaatcccagggaaacccgagtgcccggtatgcggcaacccgctcaggaactgagtcccacgccaggagggaccgcccatcaggccctaaaagccaataacactggaggaggtctgcccgcagccggaccgggtgatcgttgcctgcctacgtctgactcgtcccccgagccccagcagcccccagaggaccggacgcaggatgtactcgctcaggacgccgctggtgacaatctggaaatgatggccccatctcggggatccgccaagtcgcggggtcccctggaggaattgctgcatacactccagttgctggaaaaggagccagacgtgctcccacggcctaggactcaccaccgcggtcgctatgcgtgggctagcgaagtgactacagaggatgatgcatcctcactcaccgctgacaatctggaaaaatttggcaaactctcagctttccctgaaccacccgaagatggaaccttactgagcgaggctaaattgcaaagcatcatgtcctttctcgatgaaatggagaagtcaggccaggaccagctagactcgcaacaggaagggtgggtgcccgaagccggacctggccctctggagctgggatcggaggtcagcactagtgttatgcggctaaagcttgaggtcgaggagaaaaaacaggccatgctgttgctccagcgcgctttagcgcagcagagggatctcaccgctcggagagtcaaagagaccgagaaggccctgtctagacagctacaacgtcagcgggaacattacgaggcaactatccaaaggcatttggcatttattgatcagcttatagaagacaagaaggtgcttagcgagaagtgtgaggcagttgtagcggagctgaaacaggaagatcaacggtgcactgaaagggtggctcaggcccaggcccagcatgagcttgaaatcaaaaagttaaaagaactcatgagtgccaccgagaaggcacgcagggagaaatggatcagcgagaagaccaaaaagatcaaggaggtaacggtgcggggacttgaaccggaaattcagaagctcatcgccaggcacaagcaggaggtccgtcgcctgaaaagcctccatgaggctgaactgcttcaaagcgatgaaagagcttctcaaagatgtctgaggcaggcagaggagttgagggaacagttagagcgggagaaagaggctctcggacagcaggagcgggaaagggcacggcagcgcttccagcaacacctcgaacaggagcagtgggcgctgcagcagcagcgccaaagactctacagcgaggtggcggaagaacgggagcgtcttggacaacaggcagcgagacaacgagctgagttggaggaactcagacagcaactggaggaaagctcctccgctcttacacgggcattaagagccgaattcgaaaaaggtcgagaggagcaggagcggaggcatcagatggaattgaatactctcaagcagcagctggaactggaaagacaggcgtgggaggcgggaagaacacgtaaggaagaagcttggctgctgaatagggagcaggagcttagagaggagatccggaaaggcagagacaaggagattgaactggtgattcaccgtctagaagctgacatggctctcgccaaggaagagtccgagaaagccgcagagtctaggatcaagcgtcttcgtgacaagtacgaggcagagctgtccgaacttgaacagagcgagcgtaaactacaggagagatgctctgagctgaaaggccagctgggtgaagcagaaggtgagaacttacgactacagggcttggtgcggcaaaaggaacgcgctctcgaggacgcccaggcagttaacgagcagttgtcttccgaacggtcaaacttagcccaagtaattaggcaagaattcgaggatcgcttagctgccagtgaagaagagactcgccaagccaaagcggagcttgctactctgcaagccagacaacagctagagctggaggaagtacaccggcgagtgaagacagctctagccaggaaggaggaggccgtgtcctcactgagaacgcaacatgaagccgctgttaagcgcgctgatcacctggaagaactgctggaacagcaccgcaggcccacaccttcaacaaagtag

SEQ ID NO: 212731 - DNA, 3135 bp, synthetic construct
  misc_feature 1..3135: note = Description of Artificial Sequence: Synthetic coding sequence
  source 1..3135: mol_type = other DNA
atgaaaggtacaagagccatcggatccgttcccgaacggagccctgcaggcgtggacctgagtctgactggtctgccccctcctgttagccgtcgacccggttccgcagcgacaacgaagccaatcgttcgttccgtgagcgtggtgactggttctgagcagaaaagaaaagttctcgaggccaccgggccaggcggtagccaagccataaacaacctgagaaggtccaatagcacgacccaggtttctcaaccacgatcaggatctcctagacccaccgagccgacggattttctcatgttgtttgaagggtctccctcaggcaaaaaacggcctgccagcctttccacagctcccagcgagaaaggcgcaacctggaatgttttagatgaccagccacggggtttcaccctccctagcaacgccaggtcctcctctgcactagattctccagctggtcccagacgcaaggaatgtaccgtggccctggccccaaacttcaccgctaacaataggtcaaacaaaggagcggtcggcaactgcgtcacaacaatggtccacaatagatatacccccagcgagagggcccctcccctcaaatccagcaatcagaccgccccatcccttaataacattattaaagccgctacctgcgagggatccgagtccagcgggttcgggaagctccctaagaacgtcagctcagccacacattcagctcgtaacaatacaggcggttccactggcctacccagacgcaaggaggtgacagaagaagaagcagagcgttttatccaccaggttaaccaggccactgtgacgattcagcgctggtacagacatcaggtgcagaggagaggggcaggagccgctagactggagcacctcctacaggctaagcgggaagagcagagacagcggtccggggagggcactctgctggatctgcaccaacagaaggaagctgctagaaggaaggcccgtgaagagaaggctcgccaggctaggcgggcagcaatacaggaactgcagcaaaagagggccctaagagcccagaaagcctctaccgcagagagaggccctcctgaaaaccctcgggagacgcgggtgcctgggatgcgtcaacccgctcaagaattgagcccgacacccggagggaccgctcaccaggctctgaaggcgaataataccggcggtggtctgcccgctgcaggtcccggagaccgatgcctcccaacaagcgactcttctccagaaccccagcagccaccagaagaccggacccaggatgttttggcccaggacgctgcaggcgataatctcgagatgatggctccctcacggggttctgcaaagtctagaggcccactggaggaattgctccacacccttcaattactcgaaaaggagccagacgtgctaccaagacctcgcactcatcacagaggacggtacgcttgggccagcgaggaagacgatgcctctagccttacagccgacaacctggagaagttcggcaagctcagcgccttcccagagcctcctgaggatggaactctcctgtctgaagcgaaactccaaagcattatgtcatttctggatgagatggagaaatcaggtcaggatcagttagatagccagcaggaaggctgggtgcccgaggcaggacctggccctctggaactgggaagtgaggtcagcacttccgtgatgcgactgaagctggaggtcgaggaaaagaagcaggctatgctactcctgcagcgagctctggcccagcagcgcgacctcacggcgagaagagtgaaggaaacagaaaaagcacttagtcggcagctccagagacagagggagcactatgaggctactattcagagacatttagctttcatcgatcagttaatcgaggataagaaggtgttgtccgagaagtgcgaagcagtggtggcagagctgaagcaggaggaccagaggtgcacggaaagagtcgcacaagcccaggcccaacacgagctggagatcaagaagttaaaagaattaatgtctgcgactgaaaaggctagacgggagaagtggatcagcgagaagacaaagaagataaaggaagtgacagtaagggggctcgagccagaaatccagaaactgatcgcccgacataaacaagaggtgagaaggctgaaatcactgcatgaggccgagctgctgcagagcgatgaaagagccagtcagaggtgtctgagacaggctgaggagctaagggagcagctagagcgcgaaaaagaggctctgggacagcaagaaagagagcgcgctcggcaacgtcagagggcggaactggaagaactgcgtcagcagctcgaagagagcagttctgccctgacccgggctctgcgggctgaattcgagaaggggcgagaggaacaggagcgcaggcaccaaatggaattaaatacccttaagcagcagctggagttggagcgtcaggcttgggaggccggaaggacccgcaaggaagaggcttggctgcttaaccgggagcaggaattgagggaggagataagaaaaggtcgggataaggagatcgagctggtaatccacaggctggaggcagatatggctctagctaaggaagagagcgaaaaagccgctgagtcccggataaaacgattgcgtgacaagtacgaagcggagctctccgagctggagcaatcagagcgcaagctccaagagagatgttcagagctcaagggacaattgggggaggccgaaggtgagaatctacgcctccagggactggttaggcagaaggaacgcgcactggaggatgctcaggccgtgaatgaacagctctcaagcgaaaggagtaatcttgcccaagtgatcagacaagagtttgaagaccgtctcgcagcttctgaggaagagacacgccaggccaaagctgagttggcaacattacaagcccgacaacaactggaattggaggaagtgcatcggcgagtcaaaactgctcttgcaagaaaagaggaagcggtcagctctttaaggactcagcacgaagctgccgttaaacgtgctgaccatctggaagaactgctggaacagcaccgcagacctaccccatcaaccaaatag

SEQ ID NO: 212732 - DNA, 3243 bp, synthetic construct
  misc_feature 1..3243: note = Description of Artificial Sequence: Synthetic coding sequence
  source 1..3243: mol_type = other DNA
atgaaagggacaagggcgattggaagtgtccctgaaaggagtcctgccggagttgatctctccctcactggattaccacctccagtgagtagaagaccaggctcagccgcaaccacaaaacctattgtccgcagcgtctccgttgtcacaggtagcgagcagaagagaaaggtcctggaggctaccggccctggaggatcccaggcaattaacaatctgagacggtctaattcaacaactcaagtctctcaacctcggtccggctcaccgcgacctactgaacctaccgattttcttatgctgtttgagggatcaccatcagggaagaagcggccagccagcctgagcaccgccccatcggagaaaggagccacctggaatgtgttagacgaccaacccaggggctttacattaccctcgaacgccagatcttcctctgccctcgattcaccggctggccctcgcaggaaggaatgtacagtggccctcgccccaaactttaccgcgaataatcgctcgaacaaaggggctgttgggaattgcgtcactactatggtgcataatagatacaccccaagcgaacgtgcaccccctctcaagtcttccaatcagactgctccctccttaaataatattatcaaagctgccacttgcgaggggagcgagagcagtggctttggaaaactgcccaagaatgtatcttcagccacacatagtgcccgtaataatacagggggatcaacaggtctgcccagacggaaggaggtgaccgaagaggaagcggaaaggttcatccatcaagtgaaccaagcgactgtaactattcagagatggtatcgacaccaggtgcagaggcgtggggcaggggctgcaagactggaacacctactgcaagctaagagagaagagcaaaggcagagaagtggggagggaacgctactcgatttgcaccagcagaaggaagctgcgcgtaggaaagcgagggaggagaaagctcgccaggcgcgtcgcgcagcaatacaagaattgcagcagaagcgcgcactccgggctcagaaagccagtacagcggaacgcggtccacctgagaaccccagggagactagggtccctggcatgcgccagcccgcacaggagctctccccaaccccaggaggcacagcgcaccaggcattgaaggccaacaatacgggtgggggtttgccagctgcaggccctggggatagatgcctgccaacctccgacagtagtcccgaaccacaacaaccacctgaagaccgaacccaggatgtcttggcacaagacgctgccggtgataatctggaaatgatggccccttcgaggggatccgccaagtcacggggaccgctggaagaactactccatacactacaactgttggaaaaggaaccggacgtattacccagaccacgcacgcatcaccgcggtcggtacgcctgggcatcagaggaagacgatgcctctagccttaccgccgacaacctcgagaaattcggcaagctttctgccttccctgaaccccctgaggatgggaccctcctttccgaggcgaagctgcaatccattatgtcttttctggacgagatggagaagagcggacaggatcagctagatagccaacaggagggctgggttcctgaagcagggcctggcccacttgagctgggatccgaagtttcaacatccgtcatgcggctgaaactagaagtggaggagaagaaacaggctatgcttctgcttcagagagcattggctcaacaaagggatcttactgccagacgcgtgaaagaaacagaaaaggctctctctcggcagctgcagagacagcgtgaacattacgaggctaccatacaacgacatttggcgttcattgaccagctgattgaagataagaaagtactttccgaaaagtgtgaggccgtcgtggcagaattgaagcaggaggaccagcgctgcacggaacgggtggcccaggctcaggcccagcacgagctggaaattaaaaagcttaaggaactcatgagtgctaccgagaaggctcggagagagaaatggatcagcgaaaagaccaagaaaattaaagaagttactgttagggggctggagcccgagatccagaagctgattgcaagacacaagcaagaagtcagaagactgaagagtctccacgaagccgagcttctgcagagcgacgaaagagccagtcagcgctgcctgcggcaggcggaggagctgagagagcagctcgaaagggagaaggaggcacttggacagcaggagagagaaagagctagacagcggttccagcagcatctggagcaggagcaatgggctctgcaacagcagagacagagactatatagcgaggtcgccgaagagagggaaaggcttggccagcaggctgcgcgacagcgcgctgagctggaagagctgcgccagcaattggaagaatcaagtagcgccctcacccgggcactgcgcgctgagttcgagaaaggcagggaggagcaggagaggcggcaccaaatggaactgaacacgctgaagcagcagctggaactggagcggcaagcctgggaagccggaaggaccaggaaggaagaggcctggctgctgaacagagagcaagaactgagggaagagattagaaaaggcagagataaggagatcgaactggttatccacaggctggaagcagacatggccttggccaaggaagagtcagagaaggctgcagaatctcgcattaagaggctacgggataagtacgaagctgagctgagcgagctcgagcagagtgaaaggaagttgcaagaacggtgttctgagctgaaaggacagctgggggaagcagaaggcgagaatctgcggttgcaaggcctggtcagacagaaagaaagggcgttggaggatgcccaggccgtcaatgaacagcttagcagcgagcgatccaatctggcccaggtcattcgacaggaatttgaagaccgcctcgccgcatctgaggaggaaacacggcaggcaaaggcggagctcgccacattacaggctcgccaacaactcgagctagaggaagttcaccgtcgggtgaagaccgctcttgcacggaaagaggaagcggtgtcatcccttcggacacagcatgaggcagccgtgaagcgggctgaccacttagaagagcttctagagcaacatcggagacctactcctagtacgaagtag

SEQ ID NO: 212733 - DNA, 699 bp, synthetic construct
  misc_feature 1..699: note = Description of Artificial Sequence: Synthetic coding sequence
  source 1..699: mol_type = other DNA
atggatgcattggttgaggacgatatctgcatcctcaatcatgaaaaagcacataagagggacaccgtcacacctgtgagtatttattccggcgacgagtcagtcgcatctcattttgcgctggtgactgcatacgaggacatcaaaaagcgcctgaaggattccgaaaaagagaactcactcctgaaaaagcgcatccggtttctggaagagaagctgatcgcaaggtttgaggaggagactagttccgtgggacgcgaacaggtgaataaggcttatcatgcctatcgggaggtgtgtattgacagagataatctcaagagcaaactggacaagatgaataaggataactccgaaagtttaaaagtcttgaacgaacagcttcaatcaaaggaggtggagttgctgcagctgaggacggaggtcgagacacagcaggttatgagaaacttaaacccaccctcttccaattgggaagtggagaagctgagctgcgacctcaagatccatggactggagcaggagctcgagctcatgcggaaggagtgttccgaccttaaaatagaactccaaaaagcaaagcaaactgatccttaccaagaggacaatctcaaatctagggatttgcagaagctgtctatttcacgcgtaagcgtagcgcagccaggagtgcagtggcggaaccacggtatcgcatag

SEQ ID NO: 212734 - DNA, 648 bp, synthetic construct
  misc_feature 1..648: note = Description of Artificial Sequence: Synthetic coding sequence
  source 1..648: mol_type = other DNA
atggacgcactggtggaggacgacatctgtatcctgaatcacgaaaaggcccataagagagatacagtgacccctgtgtctatttactccggtgacgaatctgtggcctcccacttcgccctcgtgactgcttatgaagatatcaaaaagcgactcaaagatagtgagaaagagaacagcctgctgaaaaagcgtattagattcctggaagagaagctcattgctagatttgaagaggaaacgtctagcgtaggccgagaacaggtgaacaaagcttaccacgcatatagggaggtgtgcatagatagggataatttgaagtctaagttagataaaatgaacaaggacaattcggaatctctgaaggtgcttaatgaacaactgcaaagcaaggaggtcgagcttctgcagctccggacagaggttgagacacaacaggtgatgagaaatttgaacccgccatcctcaaattgggaggtggaaaagttatcatgcgatctgaaaatccacggtttggaacaggagctcgagctgatgagaaaagaatgctctgacttaaaaattgagcttcagaaagctaagcagactgatccttaccaagaagataacttaaagtcgagagatctccagaaactgtccatctcttag

SEQ ID NO: 212735 - DNA, 288 bp, synthetic construct
  misc_feature 1..288: note = Description of Artificial Sequence: Synthetic coding sequence
  source 1..288: mol_type = other DNA
atggatgccctggtcgaggacgacatctgcattcttaatcatgagaaagctcacaaacgggatacagtgacacccgtatctatatacagcggagatgagtctgttgcctcccatttcgcattagttaccgcttacgaggatattaaaaaacgcctcaaagacagcgagaaagagaattcccttttgaagaagcggattagattcctcgaggaaaaactcatcgccagatttgaggaggagacctctagtgtcggtagagagcaggtgaacaaggcttatcatgcttag

SEQ ID NO: 212736 - DNA, 732 bp, synthetic construct
  misc_feature 1..732: note = Description of Artificial Sequence: Synthetic coding sequence
  source 1..732: mol_type = other DNA
atggatgccctggtagaggatgatatttgtattctcaatcacgagaaggcacacaagagggatactgttacacccgtgagcatatatagcggcgacgaatctgtggcctctcacttcgccctggtgaccgcgtatgaggatattaaaaaacgcctcaaggattcagagaaagagaactcgctgctcaaaaagagaatccgattcctggaggagaaactgattgctcggtttgaggaagagacttcaagtgtgggcagggagcaggtcaataaggcataccatgcgtatcgggaagtgtgtatcgaccgggacaacttaaaatcgaaactcgataagatgaacaaggacaatagcgagtctctgaaggtgctgaatgagcagctgcaaagtaaagaggtcgagctgctgcagctgcggaccgaggttgaaacacagcaggttatgcggaatttgaaccctccctcctctaattgggaagtagagaagctatcttgcgacttaaagattcatggcctagaacaggagctggaacttatgcggaaagaatgttccgatctgaagatcgagttacaaaaagcaaagcaaacagatccgtatcaggaggataacttgaagtctagggacctgcaaaagctgtctatctccagacagtcaatctgctccactgcctggtcagccgtcgcccagtcatgggacagcatgaacttcgaagactgttcgctgttcgcctag

SEQ ID NO: 212737 - DNA, 732 bp, synthetic construct
  misc_feature 1..732: note = Description of Artificial Sequence: Synthetic coding sequence
  source 1..732: mol_type = other DNA
atggatgcattggtcgaagacgatatctgtattttgaaccatgagaaggcacacaaacgggacacggtcacaccagtctccatctactccggggatgagtcagtggcctcgcattttgccttggttactgcgtatgaggatattaagaagcgactcaaagacagcgagaaggaaaacagtttacttaaaaaaaggataagattcttggaggagaaactgattgctcggttcgaagaggagacttcgtccgtaggcagggagcaggtgaacaaagcttatcacgcctaccgcgaggtgtgtatagacagggataacctcaagtccaagctcgacaagatgaataaggataactccgagagcctgaaggtcttgaatgaacagctgcagagcaaagaggtcgagctcctccagttgaggactgaggtggagacgcagcaggttatgcgaaaccttaaccccccatcctctaactgggaggtcgagaagttaagttgtgacctcaaaatccatggcttggagcaagagctggagcttatgcggaaagaatgtagcgatttaaaaatcgaactccagaaagccaaacaaacagatccataccaagaagataatttaaaatctagggacctgcagaaactcagtattagtaggcagagtatatgttcaactgcctggtctgccgtggcccaatcctgggacagtatgaacttcgaagactgctccctatttgcatag

SEQ ID NO: 212738 - DNA, 1179 bp, synthetic construct
  misc_feature 1..1179: note = Description of Artificial Sequence: Synthetic coding sequence
  source 1..1179: mol_type = other DNA
atggacgcactagttgaagacgatatctgcatactcaatcacgagaaggcgcacaagcgtgacaccgtgactcccgtgtccatctatagtggtgatgagtccgtggcaagccatttcgcactggtgacagcctatgaggacatcaagaagagattgaaggacagtgaaaaagagaattctttgttaaagaaacggatccggtttctggaggaaaagcttattgcaaggtttgaggaagagaccagtagcgtcggacgggaacaggtgaataaagcatatcatgcctatcgcgaagtctgtatagatcgggacaacctgaaatctaaactcgataagatgaacaaggacaattccgaatccttaaaggtgttaaacgaacagctacagtcaaaagaagtcgagttgctacaattgcgcactgaagtggaaacccaacaggtgatgcgaaatttaaacccaccttcaagcaattgggaagtagaaaaactctcatgcgatctcaaaatacatgggctcgagcaagaactagagttgatgagaaaggaatgctcggatttaaagatcgagctgcagaaagctaagcagactgacccctaccaggaggacaatcttaaaagccgggacttgcagaagttgtctataagctccgacaatatgcagcacgcctactgggaactgaagagagaaatgtcaaacctgcatttggtcacccaggtgcaggccgagttgctccgcaagctaaagacctctacagctatcaagaaggcatgcgcacccgtgggctgttcggaggatttaggacgggactcaacaaagcttcatcttatgaattttacggcaacttatacccgccaccctcctctcctgcccaacgggaaggccctgtgccacactacatcctctccgttgccaggggatgttaaagtgcttagcgaaaaggctattcttcagtcctggaccgataacgaaagaagcatccctaatgatggaacgtgcttccaggaacatagcagttatgggcgtaacagcctcgaggacaactcatgggtgttcccgtcaccgccaaagtccagcgagacggcttttggtgagacaaaaacgaagaccctgcccttacctaacctgcctcctcttcactacctagatcagcacaatcagaactgcctgtacaagaattag

SEQ ID NO: 212739 - DNA, 1269 bp, synthetic construct
  misc_feature 1..1269: note = Description of Artificial Sequence: Synthetic coding sequence
  source 1..1269: mol_type = other DNA
atggatgtgttatccccgggacagggcaacaatacaactagccctccggcacctttcgaaacgggcggtaatacgacaggtatctctgacgtgactgtgagttaccaggttatcactagccttcttctcgggactttgatattctgtgccgtacttggcaacgcatgtgtcgttgcagccattgccctggaacgcagcctgcaaaacgttgccaattacctgattgggtcattggccgtaaccgacctcatggtgtctgttttggttctccctatggccgcattgtaccaggttctgaacaagtggacccttggccaggttacttgtgacctcttcatcgcgctggacgttttgtgttgcacatcatcaatactgcacctatgcgctattgcactggacagatattgggctattacagatcctatagattatgtcaacaagcgtacaccaagaagggccgctgccctgattagtttaacgtggctgattgggtttttgatcagcattccgcctatgttgggctggcgtactcctgaagaccggagcgaccctgacgcttgtaccattagcaaggatcacgggtatacaatctactccacatttggcgcattctacatccccctgctgttgatgttagtattatatggaagaatcttccgcgcagcaagattccgaattcgcaagaccgttaagaaggttgaaaagaccggggctgatacaaggcacggtgcctcccccgctccccagccaaagaaatccgtgaacggcgagtctggaagtagaaactggcgtctgggggtggagtccaaagccggaggtgccttgtgcgctaacggcgcagtgcgccaaggcgatgatggagccgctttagaggtgatagaggtccatagagtgggaaactctaaggaacacctgccactcccttccgaggcgggaccgacgccctgcgccccagcatcctttgagagaaaaaacgaaagaaacgccgaggctaagagaaagatggcacttgcgagggaacgcaaaaccgtgaaaacactgggtatcatcatggggacttttattctctgctggttgccatttttcattgtggcactggtcctgccgttttgcgaaagcagttgccacatgccaacgctgctcggagcgatcattaattggctgggatactcaaattccctcctgaatccagtcatctatgcctatttcaacaaagatttccagaacgcctttaaaaagatcatcaagtgtaagttctgccgccaatag

SEQ ID NO: 212740 - DNA, 129 bp, synthetic construct
  misc_feature 1..129: note = Description of Artificial Sequence: Synthetic coding sequence
  source 1..129: mol_type = other DNA
atggacgttctgtccccaggccaaggcaataatacaacctctccccctgcaccattcgaaacaggcggaaacactaccgggattagtgacgtgactgtgagctaccaggttatcacttccttgctgtag

SEQ ID NO: 212741 - DNA, 1173 bp, synthetic construct
  misc_feature 1..1173: note = Description of Artificial Sequence: Synthetic coding sequence
  source 1..1173: mol_type = other DNA
atggaggagcctggagcccaatgcgcgcctccacctcctgcaggctcagagacctgggtgcctcaggctaatttgtcatccgcacctagtcagaattgcagtgctaaagattacatttaccaggattctatctcactgccatggaaagtccttctggttatgctgctagcactcatcaccttggccacaactctcagtaacgcgttcgttatcgcgacagtgtatagaactcggaaactacacacccccgcaaattatctgatagcctccctggcagtgacagacctcctcgttagcatcctggtgatgccaatcagtaccatgtacactgtgactgggagatggacacttgggcaggtcgtgtgcgatttttggttgtcaagcgatataacctgttgtaccgcaagcattcttcacttgtgcgtaatcgccctcgaccgatactgggctatcactgacgccgtcgaatattcagccaagcgtacacctaagcgcgctgccgtgatgatagccttggtgtgggtgttcagtatttctatatcacttcccccattcttctggagacaagccaaggcagaagaggaagtgtctgagtgtgtggtgaatacagaccatatcctatataccgtttatagcaccgttggtgccttttacttcccaaccttgctgctgatcgccctctacggcagaatttacgtcgaagctcgaagccgtattctgaaacagacgcctaaccggacaggcaagagattaacccgggctcagttgattacggattctccgggttcaacctcaagcgtgacatcaattaactccagggtgcccgacgtaccctctgagtctggctctccggtctacgtcaatcaggtgaaagtgagggtgtcagatgccctgttagagaaaaaaaaattaatggcagcgagggagagaaaggccaccaagactttggggataatcctgggcgcatttattgtttgctggttacccttcttcataatttcactggttatgccgatctgcaaggatgcctgctggttccatctggccattttcgatttctttacttggctcggataccttaacagtcttatcaaccccattatttacacgatgtccaatgaagacttcaagcaggcctttcacaaattgatccggtttaaatgcacctcctag

SEQ ID NO: 212742 - DNA, 1134 bp, synthetic construct
  misc_feature 1..1134: note = Description of Artificial Sequence: Synthetic coding sequence
  source 1..1134: mol_type = other DNA
atgagtccactgaaccaatcagcggagggcctcccccaggaggcaagcaaccggagccttaatgccaccgagaccagcgaggcctgggatccacgtactttacaggccctcaaaatctctctggctgtggtacttagcgtgattacactggccaccgtcctgtcaaatgccttcgtcctgacaaccatcctcctgacaagaaaactccacactcctgccaactacctgatcggctcactggctaccaccgacctgctcgtttcaatcctcgttatgcccatctctattgcctacaccataacccacacttggaattttggccagattctctgcgatatctggctgagcagtgacattacttgttgcactgccagcattctgcacctctgcgtcatcgcactcgatcgatactgggccattactgatgccctggagtattctaaacggagaacagctggacatgcagccaccatgattgctatcgtgtgggccatcagcatctgcatttctatccccccactcttttggagacaagcaaaggcgcaagaagaaatgagtgattgtttagtcaacacttctcagatcagttatactatctacagtacatgcggagctttttatataccatcagtgctcctgattatcctttacggcagaatctaccgtgcggctcgcaatcggattttgaacccgccatctctctatggtaagcgcttcacaacagctcacttaatcacaggaagcgctggaagctcgctttgtagtttaaatagcagcctgcatgaaggacatagtcattctgccggatcccctctctttttcaaccacgtgaagatcaagctcgctgacagtgccctggagagaaagcggatctcagctgcccgagaacgcaaagccacaaaaatcctcggcataatcttgggtgctttcataatatgttggctgcctttttttgttgtctcccttgtgctgccaatctgtagggattcctgttggattcacccagccttgttcgacttttttacctggctagggtacttgaactcgctgattaatcccatcatctacaccgtgtttaacgaagagtttcggcaggcctttcagaagattgtgcctttccggaaggcctcttag

SEQ ID NO: 212743 - DNA, 1134 bp, synthetic construct
  misc_feature 1..1134: note = Description of Artificial Sequence: Synthetic coding sequence
  source 1..1134: mol_type = other DNA
atgagcccactcaaccagtcagctgaggggctgccgcaagaggcctctaataggtctctcaacgcaacagaaacgagtgaagcctgggatcctaggactctgcaggctttgaagatttcgttggccgtcgtgctgagcgtcataaccttggccaccgtgctcagcaacgcctttgtgctgaccacaatcctgcttactcgcaagttgcatactcctgccaactacctgatagggagtctggccacaacagacttgctcgtgtccatactcgtcatgccgattagtatcgcatataccataacacacacctggaacttcggccagatcctgtgcgacatttggctctcttcagatatcacgtgttgtactgcatcaattttgcacttatgtgttattgccttggatcgttattgggccatcacagacgcgcttgaatactctaagagaaggacagccggacatgctgctaccatgattgcaatagtgtgggccatcagcatctgcatttcaatccctccgctgttctggaggcaggcgaaagcacaggaagaaatgagcgactgcctggtgaacacctcacagatctcttacacgatttattccacctgcggtgcattttacattccctccgtactgcttattatcctttacggacggatttatagagctgcgaggaacagaattctcaatccaccttccctgtacggtaaacggtttacaaccgctcatctgattactggtagtgcaggcagcagcctgtgctctttaaatagttctttgcacgaaggccattcacattctgccggttccccactgttcttcaaccacgtaaagattaaactggcagactctgccctggagagaaaaaggatttccgctgccagggagcggaaggctacaaagatcctcgggatcatcctcggagcatttattatctgttggctgcccttttttgtggtatcccttgtgctcccaatctgcagagattcctgttggattcaccccgcactcttcgactttttcacttggctcgggtatctgaactcactaattaatcctattatctacacagtctttaatgaagagttccgccaggcctttcaaaaaatagttccattccggaaggcctcgtag

SEQ ID NO: 212744 - DNA, 1098 bp, synthetic construct
  misc_feature 1..1098: note = Description of Artificial Sequence: Synthetic coding sequence
  source 1..1098: mol_type = other DNA
atgaacattacaaactgcacgacagaggccagcatggctatccggccaaagactatcacagagaaaatgcttatctgtatgacactggtcgtcatcaccaccctgaccacactattgaatcttgccgtgatcatggccatcggcaccacgaaaaagctgcatcagcccgcaaactaccttatttgctccctagctgtgacagacctcttggtggccgtgcttgttatgccactgtcaatcatctatattgtcatggacaggtggaagctggggtactttttatgtgaggtctggctgagtgtcgacatgacatgctgcacgtgctccattctccacctctgcgtgattgcactcgaccgctactgggcaattactaatgcaatcgaatacgccaggaagcgcacagctaaaagagctgctctgatgatactgactgtctggactatttccatttttattagtatgcctccactattctggcgtagtcacaggagactctcaccaccacccagccagtgcaccatccagcatgatcacgtgatctacacaatttactctactctaggggcattttacatcccactgacattaattctcattctgtattaccgcatctatcacgccgctaagagcctgtaccagaaacggggatcctctcggcatctgtccaacaggtcaacagactcgcaaaattcgttcgcaagctgcaagctcacacaaactttttgcgtcagcgatttctctacctccgatcccaccaccgagtttgaaaagtttcacgcctctatccggattcctccattcgacaatgatctcgatcaccccggagaaaggcagcagatctcgagtacgcgtgaaagaaaagcggctaggatcctcggcctgatccttggggcattcattctgtcttggttgcctttttttattaaagaactgatcgttggcctcagtatttatacagtgagtagtgaagtcgccgacttcctgacttggttgggctatgtgaactcactgatcaacccactactgtatactagcttcaatgaggacttcaaactagccttcaaaaagcttatccgctgtagggagcatacttag

SEQ ID NO: 212745 - DNA, 1098 bp, synthetic construct
  misc_feature 1..1098: note = Description of Artificial Sequence: Synthetic coding sequence
  source 1..1098: mol_type = other DNA
atgaatattaccaattgcactacagaggcctccatggctattcgccctaaaactatcaccgagaagatgttgatctgcatgacactagttgtgataacgacactgaccactctgctgaacttggcggtgattatggccatcgggaccaccaagaaacttcaccagcccgcaaattacctgatttgcagcctcgcggtgactgacttgctggtagccgtgcttgtgatgccactgagcatcatttatatcgtgatggatcgttggaaactggggtactttctctgcgaggtatggctttctgtggatatgacatgctgtacctgctcaattctgcacctgtgtgttattgccctggatcggtactgggctattactaatgctattgagtatgcacggaaacgaaccgcaaaaagagctgctctgatgatcttaactgtgtggactatttctatattcatttccatgcctccactgttctggaggtctcatcgtcgactctcgcctcccccttcccagtgcaccatacagcacgaccatgtgatttatacaatctactccactctgggggcattctacatacccctgacgcttatcctgatcctgtactatagaatctatcatgccgctaagagtttgtatcagaaaagagggagctctcggcatcttagcaatcgcagtactgactcgcagaacagctttgcctcatgtaagttgacccagaccttttgtgtctcggactttagcacctccgatcccacaactgagttcgaaaaatttcatgctagtattagaattccccctttcgataacgatctggaccaccctggcgaacgtcagcagatatctagcacccgcgagcgaaaggccgcacgcatcctcggattgatactgggagccttcattctgagctggctcccattctttatcaaggagctgattgtgggtctatccatttacacagtaagctcagaagtggctgacttcctgacgtggctgggttacgtgaacagcctgattaatcctctgttatatacctcgtttaatgaggactttaaacttgcgtttaagaagttgattcgctgtagggagcacacctag

SEQ ID NO: 212746 - DNA, 1101 bp, synthetic construct
  misc_feature 1..1101: note = Description of Artificial Sequence: Synthetic coding sequence
  source 1..1101: mol_type = other DNA
atggattttctgaacagcagcgatcaaaacctcacctccgaggagctgctcaatcgcatgccatccaagatccttgtctccttgactctctccggcctcgcccttatgactacgacaatcaactcactggtgatcgcagcgatcatagtgacccgtaaattgcatcaccctgccaactatctgatttgctctctcgccgtgaccgatttcctcgtggccgtccttgtgatgccgttttccatcgtttatattgtgcgggagtcctggataatggggcaggtagtatgtgatatttggctgagtgtcgacattacatgctgtacgtgctccattctgcatctgagcgctattgctctggaccgataccgtgcaattacagacgcagttgaatatgcccgaaaaaggacacccaagcatgctggcatcatgattaccatcgtatggataattagcgtgttcatcagcatgcccccactcttttggagacaccagggcacctcacgagatgacgagtgcatcatcaagcatgaccacattgtttctactatctacagcacctttggcgctttctatatccctttggccctcatcctgatcctttattataagatctatagggccgctaagacactttaccataagaggcaagccagccggatcgccaaggaggaagtgaacggccaggtgcttttagagtctggtgaaaagtccacaaagagcgtgagcacgtcctatgtgctggaaaaaagtctctcagacccttctactgacttcgacaagatccactctactgtgagatcacttcgatcagaattcaagcacgagaagtcatggaggcggcagaagatctccgggactcgtgagcggaaggcggctaccaccctaggccttattctgggggcttttgtcatttgttggcttcccttcttcgtgaaggagctggtcgttaacgtatgcgacaagtgcaagatttctgaagagatgtctaactttctggcatggttggggtaccttaatagcctgattaaccccctgatctacacaatcttcaacgaagacttcaagaaggcatttcaaaagcttgtgcgctgcagatgttag

SEQ ID NO: 212747 - DNA, 1416 bp, synthetic construct
  misc_feature 1..1416: note = Description of Artificial Sequence: Synthetic coding sequence
  source 1..1416: mol_type = other DNA
atggacattctgtgtgaggaaaatacttctctgagttcaacaacgaattccctgatgcagctgaacgatgatacccgattgtatagcaacgactttaattccggcgaggccaatacctctgatgcctttaactggaccgtcgactctgaaaacagaaccaatctatcatgcgaaggctgtctttctccaagctgtctgagccttctgcacctgcaagagaagaactggtccgcgctgcttaccgctgtggtgatcattttgactatcgctggcaacatactggtaatcatggcagtgagtttggaaaagaagctgcaaaacgccacgaactacttcctgatgagtctagcgatcgccgacatgctgttaggctttctagttatgccggttagcatgctaacaattctttacggctacaggtggccgcttccgtccaaattatgcgcggtttggatttacttagatgttctattctcaacagccagcattatgcacctctgtgccattagccttgataggtacgtcgctattcaaaatccaatacaccacagtcgattcaacagccggactaaagcatttctaaagatcatagcggtgtggaccatttctgttggcatctctatgccaatccctgtgtttggattacaagatgacagtaaggtgtttaaagaaggcagctgcctcctcgctgatgacaactttgtgcttatcggatctttcgtctctttctttatcccattgactatcatggtgattacatatttcctgacaatcaagtccctgcaaaaagaggctacactgtgtgtgagcgaccttggcacccgtgctaagctggcatcctttagcttccttcctcagtctagtctgagctcagaaaagcttttccagagaagtatccatagagagcctgggagctatactggacgcaggacaatgcagagtatctccaatgagcaaaaggcctgcaaagtgctggggattgtgttctttctgtttgtggtaatgtggtgcccgttcttcattacgaacattatggccgtcatttgcaaggagtcttgcaacgaggatgtgatcggagctctgctgaacgtcttcgtatggattggatacttgtcctccgccgttaacccgctggtttataccttatttaacaagacgtaccgttcggcgttctcccgctatatccaatgtcagtataaagagaataaaaagcccctacagctgatactcgttaatacaatccccgctctggcctataagagtagtcagctacaaatgggccaaaaaaagaattccaaacaggatgctaaaacgacggacaacgactgtagcatggtagccctgggaaagcagcatagtgaagaggcctcaaaggataatagcgatggcgtgaacgagaaggtgtcttgcgtgtag

SEQ ID NO: 212748 - DNA, 1416 bp, synthetic construct
  misc_feature 1..1416: note = Description of Artificial Sequence: Synthetic coding sequence
  source 1..1416: mol_type = other DNA
atggatattctgtgcgaggagaatacctcactgtcctccacaacaaacagtctgatgcaactgaacgacgacaccagactatattcaaatgattttaactctggcgaggccaacacctcggacgctttcaactggactgtggattctgaaaaccggacaaacctgtcctgcgaaggttgcttgtccccttcatgcctaagtcttctacaccttcaggagaagaattggtccgcgctgctcaccgctgtggttattattttaaccatcgctgggaatattctggttatcatggccgtcagcctagaaaagaagctccaaaatgccactaattatttcctcatgtcgttagccatagccgatatgctgctaggcttccttgttatgcctgtgtccatgctgactattttgtacggatacaggtggcctttacctagcaaactgtgtgccgtctggatctatttggatgttctttttagcactgcgagcataatgcacctatgcgcgatctcgctcgatcggtacgtcgccatacagaatcctatccaccattctcgttttaatagcaggactaaggcttttctcaaaattatagccgtttggaccatttctgtcggcatttccatgccaatcccggtgtttggtttacaggatgacagtaaggtattcaaggaggggtcatgcctgctcgccgatgacaattttgtgcttattggatcattcgtgtctttctttatccctcttaccatcatggtgattacgtactttctcacaattaagagcctgcagaaagaagccaccctgtgtgtgtcagatctgggaacacgagccaagcttgccagcttttccttcttgccacagtcatccctgtccagcgagaagctgtttcagagatccattcacagggagcctgggtcttatacagggaggcggacgatgcagtccatttctaatgagcagaaagcctgcaaagtcctaggtatcgtgttttttctgttcgtggtgatgtggtgccctttcttcattacaaatatcatggcagtgatttgcaaggaaagctgcaacgaggacgttatcggagcgctgctgaacgttttcgtgtggattggctacctatcctctgccgtgaacccccttgtgtataccctctttaataagacttatagatccgccttctctcgctatattcaatgccagtataaggagaataagaaacccttacagctgattctggtgaacaccattccagcgctcgcctataagtcaagtcagcttcagatgggacagaagaaaaactccaaacaggatgctaaaacaacagataacgattgtagcatggtggctttaggcaaacaacactcagaggaagcgagtaaggataacagcgacggtgttaacgagaaggtgagctgcgtctag

SEQ ID NO: 212749 - DNA, 1164 bp, synthetic construct
  misc_feature 1..1164: note = Description of Artificial Sequence: Synthetic coding sequence
  source 1..1164: mol_type = other DNA
atgcagtttctcaagagtgccaagcagaagccgaactattaccacataatgctggtcgaggaccaagaggagggtacactccatcagtttaattattgcgagaggtgctcagagagccagaacaataagtgtatctcatgcgtggatcccgaggataaatggtaccgctggcctctgccctcgaaattgtgtgcggtgtggatttacctggacgtactgtttagcaccgcgagcatcatgcacctgtgcgcaatctccctggacaggtacgtggcgattcaaaacccgatccaccattcccggtttaactcccggactaaggctttcctgaaaatcatcgcagtatggactatttccgtcggaatatctatgcccatccctgtgtttgggttgcaggatgactcaaaagtgttcaaggagggctcctgtttgctggctgacgacaacttcgtcctcatagggtcctttgtctccttcttcatccctctaaccatcatggttatcacttacttcctcaccattaagagtttgcagaaagaggcgacactgtgcgtctccgatctgggaacacgcgcaaaactcgcgagtttttccttcctgccgcaatcctcgctcagcagcgagaaactgttccagcgttctatacatagagagcccggtagttataccggccgacggactatgcaatccatcagtaatgagcagaaggcctgtaaggtgctgggcatcgtgttctttctgtttgtggtaatgtggtgcccatttttcatcaccaacatcatggcggtgatatgcaaggaaagctgcaatgaggacgtgattggagccctgcttaacgtcttcgtctggattggctatctcagcagcgccgtcaacccactggtgtacactctatttaataagacatatcgcagcgccttttccaggtatatccagtgccagtacaaagaaaataaaaaacccctgcagctaatcttagtgaatactatccccgctttggcttacaagtcctcccaactccagatgggccagaagaagaattctaagcaggatgctaagaccaccgataatgactgttccatggtggcattgggcaaacagcattctgaggaggcctccaaggacaatagcgacggtgtgaatgaaaaagttagctgcgtgtag

SEQ ID NO: 212750 - DNA, 1446 bp, synthetic construct
  misc_feature 1..1446: note = Description of Artificial Sequence: Synthetic coding sequence
  source 1..1446: mol_type = other DNA
atggccctcagttatagagtgtcggaattacagagcacaattcccgaacatattctgcaatccactttcgtccacgtaatcagcagtaattggagcggactacaaacagaaagcatcccagaggagatgaaacagattgtcgaggagcaaggaaacaaactgcactgggccgcactgctgattctgatggtaatcatccccacaatcggcggtaacacattagtgattctagctgtgtccttagagaagaaactccaatacgcaaccaattatttcctaatgtccctcgccgttgcggatttgctggttggactattcgtaatgccaattgctctgctgacaatcatgttcgaggccatgtggcccctgccgctggtgttgtgcccagcatggttgttcttagatgttttattcagcactgccagcataatgcacctttgtgccatcagcgtggaccgctacatcgcgattaagaagccaatccaggccaatcaatataacagccgggctacagcgtttattaagattaccgtggtgtggctcatatctattggaatcgccatccccgtgccaatcaagggcatagagacagatgtcgataatcccaataatatcacctgtgttttgacgaaggaaagattcggcgacttcatgctgttcggatctctggcggctttttttacccctctggcgatcatgatcgtgacctattttctcacaatccacgccctgcagaagaaggcctatcttgtgaagaataagccccctcaacgtcttacatggctgaccgtttccacggtgttccagagggatgagactccatgcagcagcccggaaaaggtggccatgctggacggctccagaaaggacaaagcgctgcccaattctggggacgaaactcttatgagaagaacttctacgataggcaagaaatccgttcagacaatctccaatgagcagcgggcttccaaagttttggggatcgtgttcttcctctttctgctgatgtggtgccctttctttatcaccaacatcacactggtactctgcgattcatgtaaccaaaccacattacagatgctgctggagattttcgtttggattggatacgtgagctcaggcgttaacccgctggtctatactcttttcaataaaacctttcgggacgcatttggcaggtacataacttgcaactatcgggcaactaagagcgttaaaactctcagaaagcgttcttctaaaatctactttcgcaatcccatggcagagaacagcaaattcttcaagaaacatgggatccgcaatggcatcaatccggcaatgtaccagagtcccatgaggctgcgctctagtacgattcagtccagtagcataatcctgctcgatacactgttgctcacggagaacgagggtgataagactgaagaacaagtgtcctatgtgtag

SEQ ID NO: 212751 - DNA, 195 bp, synthetic construct
  misc_feature 1..195: note = Description of Artificial Sequence: Synthetic coding sequence
  source 1..195: mol_type = other DNA
atggtaattattcccacgattgggggaaataccctggtcatcctagctgtcagcctcgaaaagaagcttcagtacgctaccaattacttcctgatgtctctggccgtagctgacctcctcgttgggctcttcgtgatgcctatcgcactgctgaccattatgtttggaattgcaattcccgtgcctataaagtag

SEQ ID NO: 212752 - DNA, 1377 bp, synthetic construct
  misc_feature 1..1377: note = Description of Artificial Sequence: Synthetic coding sequence
  source 1..1377: mol_type = other DNA
atggtgaatcttcgaaatgctgtgcacagcttcttggtgcaccttattggcctgctcgtttggcagtgcgatatctctgtgtcccctgttgccgcaattgtgaccgacattttcaatactagcgacgggggacggtttaaatttccggacggggtgcagaactggccagcactgagcatcgtgattatcatcatcatgactattggtggtaatatactggtgattatggctgtaagtatggagaaaaagttacacaatgcaaccaactactttttgatgtccctcgctattgccgacatgctggtaggcctcctcgtgatgcccctctccctgctagccatactttacgactacgtctggcccctgcccaggtatctgtgcccggtgtggattagtctagatgtgttgttcagcactgcatcaatcatgcatttgtgcgcgattagtctcgaccgctacgttgccatccgaaatcctattgaacactcaaggtttaatagtcggactaaagccattatgaaaatcgcaatagtctgggccatctctatcggggtgtcagtgccaatcccggtgattggccttagggacgaagaaaaggttttcgtcaacaataccacctgcgttcttaatgatcctaatttcgtgctgattggttcgttcgtcgcattctttatccccctgactattatggtgatcacctattgcctgactatctacgtgctaaggagacaggcgcttatgctgcttcacggacatacagaggagccccctgggctatccctggacttcctgaagtgctgcaagcggaataccgccgaagaagagaatagtgccaatccgaaccaggaccaaaacgcacggcgtaggaagaagaaagaacggagacctaggggcacaatgcaggctatcaacaacgaacgcaaggcaagtaaggtgctggggattgtattcttcgtttttctcataatgtggtgcccgttcttcattactaatattctatccgtgctttgcgagaagtcctgtaatcagaagcttatggagaagctgctcaacgtttttgtttggataggatatgtatgctccgggattaaccccctggtctacactctattcaacaaaatctatcgtcgcgctttcagcaactacctgcgttgcaactataaggtcgagaagaagccccctgtaagacagattcctcgcgtcgccgcaaccgccctaagtggccgagagcttaatgtgaacatttacaggcatacgaacgagcctgtgatcgagaaagcttctgataacgagcccggaatagaaatgcaagttgaaaacttagagctccctgtcaatcccagctcggtcgtgagcgaacgcattagcagtgtgtag

SEQ ID NO: 212753 - DNA, 747 bp, synthetic construct
  misc_feature 1..747: note = Description of Artificial Sequence: Synthetic coding sequence
  source 1..747: mol_type = other DNA
atggttaaccttcgcaatgccgtgcattcattcctggtacatctgatagggttgctggtctggcagtgcgacatctccgtctctcccgttgccgcaatagtgactgacattttcaatacaagtgacggcggtcgttttaagtttcctgacggtgtgcaaaactggccagccctgagcattgtcatcattattatcatgaccataggaggtaacattcttgttatcatggcagtttctatggagaaaaaactccacaacgcaactaattacttccttatgtccctcgcgattgccgacatgcttgttggtctgcttgtgatgccactgtccctgttagcaatactgtacgactacgtgtggccactgccaaggtatctctgcccagtttggataagcctggacgtgctcttctccaccgcaagcattatgcatttgtgtgcgatttccctggatcgttgcattagctcgtatccatgtgattggactgagggcaggagaaagggagttagagaacagcacgacgtgagggcccagcgccctaaatttaggtcgtattgggtccttagatccttcctgcatacggcggacgactacggcgattacgtcctccctgaccacctgagaagcgctcctacttcatttgacgtgacagctcgtccccataggggtacagcatggaccaagagcgggttccctgaagtacttcaggaagaatatggaagaggacgagagctctgcaaaccctag

SEQ ID NO: 212754 - DNA, 1377 bp, synthetic construct
  misc_feature 1..1377: note = Description of Artificial Sequence: Synthetic coding sequence
  source 1..1377: mol_type = other DNA
atggttaacctgaggaatgccgtgcattctttcctggtgcacctcatcggcctgttagtgtggcagtgcgatatcagtgtaagcccggtcgcagctattgtgacagacatcttcaacacctccgacgggggaaggtttaagtttcctgatggagtccagaattggcccgcactttcaatcgtgatcatcataatcatgactattggcggaaacatcttggtcataatggcggtgtctatggagaagaagctgcacaacgctactaactatttcctcatgtccctggccattgctgacatgctggtgggcctcctggtcatgcctctctcacttctggccatcctgtacgattacgtgtggcctttgcccaggtatttgtgccccgtgtggatatccctagacgtgcttttctcaacggctagcatcatgcacctttgcgccattagccttgaccgctacgtggcgatacgcaacccgatcgagcattcccgctttaactcacgcacgaaagcaatcatgaaaatcgccattgtatgggccatctccattggagtttctgtgccgataccagtgattggactgcgcgacgaggaaaaggtgttcgtcaacaataccacatgtgtgttgaatgatcccaatttcgtgctcattggaagctttgttgcctttttcattccactgaccattatggtgattacctactgtctgacaatctacgtcttgcggagacaggccctcatgctgttgcacggccacactgaagagccgcctggactgagtctggactttttgaagtgctgcaagagaaacaccgcagaggaagaaaactcagccaatccaaatcaagaccaaaacgccagacggcgtaagaaaaaagagcggaggcctagggggactatgcaggctataaataacgaaaggaaggcttcaaaggttctgggcatcgtcttttttgtgttcctgataatgtggtgcccattctttataaccaacatactgtcagtcctgtgtgaaaaaagttgtaatcagaagctcatggaaaaactgctcaatgtgtttgtttggatcggatacgtctgtagcggaatcaacccactcgtgtatacgctgttcaacaagatctacaggcgtgccttttccaattacctgcgttgcaactataaggtcgaaaaaaagccgcctgtccgacagattcctagggttgcagctaccgccctgagtggaagggaactcaacgttaatatatacagacacacgaatgaaccagtaatcgaaaaggcttccgacaacgaaccaggtatcgagatgcaggtggaaaacttggaactgcccgtcaaccctagctctgtggtttcggaaaggatctcctctgtgtag

SEQ ID NO: 212755 - DNA, 840 bp, synthetic construct
  misc_feature 1..840: note = Description of Artificial Sequence: Synthetic coding sequence
  source 1..840: mol_type = other DNA
atggccagtatgagtattgtgaaagcaacctcgaacacaatctcccaatgcggatggagtgcttctgccaactggacgcccagcatttcaccaagcatggacaggggggaaaggagtccgagcgccctcagcccgacccaagtagcaattcgtcgcaggtgcaggccatccccctacgtggtgaactttctcgtgccaagcggcattcttattgccattgacgcactatccttctaccttcctctggagtccggtaattgtgctccctttaagatgacagtcttactgggatacagtgtgttccttctgatgatgaacgacctgctccctgccacatcgacatcatcccacgcgtctctcgtaagacctcatccctctcgagaccagaagaggggcgtctatttcgctctgtgtttgagcctaatggttgggtccctgctcgagaccattttcatcactcacttgctgcacgtcgccaccactcagcctttaccattacctcggtggctgcacagtctcttgctgcactgtacgggacagggaagatgttgtccaaccgcaccgcagaagggtaataaggggcctggcctgactccaacccacctcccgggtgtcaaagagcctgaagttagtgctggccagatgcccggaccaggcgaagcagagctgacaggtggctctgagtggacgagggctcagcgggaacacgaagcccagaagcagcattcggtggaactgtgggtgcagttcagccatgccatggacgccttgctgttccgcttgtatctcctgtttatggcatcgtccattattacagttatttgcttgtggaatacctag

SEQ ID NO: 212756 - DNA, 1365 bp, synthetic construct
  misc_feature 1..1365: note = Description of Artificial Sequence: Synthetic coding sequence
  source 1..1365: mol_type = other DNA
atgcagaaacatagcccgggaccacccgctctcgctctgcttagtcagtcactcctgaccacaggcaatggggatactctcattatcaactgtcctgggttcggccagcatcgggtagacccggctgcattccaagccgtgtttgataggaaggcaataggcccagttacgaattatagtgtggctactcatgtgaacatctcattcactctgtccgcaatctggaattgttattcccgcatccacactttcaattgccatcatgcacgaccctggcacaaccaatttgtgcagtggaaccctgacgaatgcggtggcattaagaaatcgggaatggctacggagaatctttggctctcagacgtgtttatcgaggaatccgtcgaccagactccagctggcttaatggcttcaatgagcatagtaaaggctacttccaacacaatctcccagtgcggctggtccgctagcgccaattggaccccctctataagtccatccatggatcgggctcgagcctggcggaggatgtccaggtcgtttcagattcaccaccggacaagttttagaacgcgacgtgagtgggttctgctgggaattcaaaagcgtaccatcaaagtcacagtagcaacaaatcagtatgaacaggcgatctttcatgtcgccatacggaggagatgcagacctagcccttatgtggtgaactttctcgtgccttcagggatccttatcgctattgatgccctgagtttttatctgccattggaatctggtaattgcgccccattcaagatgaccgtgttactcggatattcagttttcttacttatgatgaacgacctcttaccagctacatcaacttcttctcacgcgtctttggtggcccctctggctcttatgcaaaccccactgcccgctggcgtgtattttgcactgtgccttagcctgatggtgggatccctcttagagaccatctttattactcatctgttgcacgtggcgactacccagcccctgccactgcccagatggctccacagcttgcttctgcactgcactgggcaggggaggtgctgtcccaccgctccgcagaaaggtaataaaggccctggactgacacccacacacttgcccggagtcaaggaacctgaggtaagtgctgggcagatgcctgggccaggggaggcggaattaaccgggggatcggagtggactcgtgctcagcgagaacatgaagcccaaaaacagcacagcgtcgagctatgggtacagtttagccacgccatggatgctttattgttccgtctttatctgctgttcatggcctcatcaattataacagtgatatgtctgtggaacacctag

SEQ ID NO: 212757 - DNA, 1215 bp, synthetic construct
  misc_feature 1..1215: note = Description of Artificial Sequence: Synthetic coding sequence
  source 1..1215: mol_type = other DNA
atggagagaggctggtttcatggcaaaggctttttgctggggttcatccttcacctgctgcttcaggatagccacttgcagctagtgacaagctttctgtggctaaacatgtggaaccccgacgagtgcggaggcatcaagaaatccggcatggctactgagaatctttggttatccgacgttttcattgaagagagcgtggatcagacccccgctggtctgatggccagtatgtcaattgttaaggccacaagcaataccatatcccagtgcggctggtcggcatcagccaactggacaccctctatctctcctagcatggataggggtgaaagatctccctccgctctcagtccaacacaggttacacgcgcatggcgcaggatgtcgcgctcctttcagatccatcaccggacttcctttagaacccggagggaatgggtccttctgggtatccagaagaggaccatcaaggtcactgtggcaactaatcagtacgaacaggccattttccatgtagcaattcgcaggcgctgcaggcctagcccctatgtagtcaattttttagtcccgagcggaattctgattgcgattgatgccctgtctttttacctgccactggaatcggggaattgcgcacccttcaagatgacagttctcctgggctattctgtcttcctgttgatgatgaatgacctgcttccagcgacttcaacatcttctcacgcgtctctggttcggccacatcctagtcgggatcagaagcgcggagtttacttcgcattgtgcctctcactaatggtgggcagtctgctagaaactattttcatcacccacctgctgcatgttgccacaactcagccgctgcccctaccccgatggctccattcgcttttgttgcattgcacagggcaaggaagatgctgtcccactgctccgcagaagggtaacaagggcccaggactaacacctacccatctccccggagttaaagaacctgaggtttctgctggtcagatgccaggaccaggagaggccgaactcacaggtgggtctgaatggactcgagctcaaagggagcatgaggctcagaagcaacattcagtggagctttgggttcaatttagccacgctatggatgccctcctgttcagactctatctcctatttatggctagttcaataatcacagtcatatgtctctggaacacttag

SEQ ID NO: 212758 - DNA, 702 bp, synthetic construct
  misc_feature 1..702: note = Description of Artificial Sequence: Synthetic coding sequence
  source 1..702: mol_type = other DNA
atggtggcaatccgacgtaggtgcaggccttctccatacgtggtgaactttttggtgccatctgggattctgatcgcaatagatgcactgagcttttatctgcccctcgaaagtggtaattgtgctcctttcaagatgaccgtgctgctgggttacagtgttttcctgctgatgatgaatgacttgctccccgcaacatccacatcctcccacgcctcattggttaggccgcacccgagccgggatcaaaaaagaggcgtgtacttcgccctctgcttatcactgatggtcggttcactgctggagacaatctttataactcacctcctgcacgtagcaaccacccagccacttccactgcctaggtggctgcactccctcctgctccactgcactggccagggaagatgctgtcctacagctccccagaaaggcaacaaaggtcctggattgacacctacgcacctccccggtgtgaaagaacctgaggtgagcgcaggccagatgcctggcccaggggaggctgagctcacaggaggaagcgagtggaccagggcccagcgtgagcatgaggcccaaaaacaacactcagtagagctctgggtgcagttcagtcacgcaatggatgccctactttttcggctgtatctcctttttatggcttcctccattattacagttatttgcctgtggaacacttag

SEQ ID NO: 212759 - DNA, 1344 bp, synthetic construct
  misc_feature 1..1344: note = Description of Artificial Sequence: Synthetic coding sequence
  source 1..1344: mol_type = other DNA
atggaggggggttggcccgctcggcaatccgccctgctgtgcttgaccgtcagccttctcttgcaggggcgaggggacgctttcacgattaattgctcaggcttcgaccaacatggagtcgatcctgctgtctttcaggctgtatttgacagaaaggcttttcggcctttcacaaattactccattccgacccgggtgaacatttcatttacactatcggcaatactgggagtggacgcacaactacagctcttaaccagcttcttatggatggatctggtgtgggacaaccctttcatcaattggaacccaaaagaatgcgtgggcatcaataaactcacagtgctagccgagaatctctggctgccagatatcttcattgtggagagcatggatgtggatcagaccccctcagggctgacagcctatatttcttcggaaggaagaatcaagtatgacaagccaatgcgagttacatcaatctgcaacttagacatcttttattttccctttgaccagcagaattgtaccttcaccttcagcagcttcctctacactgtggactccatgctgttggggatggacaaggaggtgtgggaaattaccgacacttctcgcaaagtgattcagactcagggcgagtgggagttgttaggcattaacaaggcaactcccaaaatgtcaatgggaaacaatctgtatgatcagattatgttctacgtggcgatccggagacgtccatctttgtatataattaatctgcttgttccatcctcatttttggtggctatcgacgccctatctttttatctgcccgctgagtccgaaaatcgggctccgttcaaaatcacgctgttgctgggctacaatgtgtttctcctgatgatgaatgatttgctccccgcttccggaacacccctaattagcgtgtattttgcactctgtttgtcattgatggtggtttcactgttagagactgtgtttataacttacctgctgcacgtcgccaccacccagccaccccctatgccaaggtggttgcacagcttgctgctccattgtacctccccgggtaggtgttgtccaactgctcctcagaaggggaataaagggctgggtctaacgctgactcaccttccaggcccaaaggaacctggagaacttgctggcaagaaacttgggcctagggaaactgagcccgacggagggagcggctggaccaaaacccagctcatggagttatgggtgcagttctcccacgccatggacacgctgctgttccggctttatctcttgtttatggcctccagcatcctgactgtcatcgttctgtggaacacgtag

SEQ ID NO: 212760 - DNA, 1416 bp, synthetic construct
  misc_feature 1..1416: note = Description of Artificial Sequence: Synthetic coding sequence
  source 1..1416: mol_type = other DNA
atgttagccttcatccttagtcgggctacacccaggcccgcactgggccctctgtcctatcgggaacacagagttgcgctcctgcacctgactcacagcatgtctacaactggtaggggtgtcactttcactataaactgcagcgggttcggacagcatggggctgacccaacggccttgaattcagtgttcaatagaaagccatttcgaccggtaacaaacatctccgtcccgacgcaagtgaatatttcttttgcaatgagtgccattctggatgttaatgagcagttgcacctcctcagcagctttctgtggcttgagatggtttgggacaaccccttcatatcatggaacccagaggagtgtgagggcatcacgaagatgagcatggctgcaaagaatctttggttgccggacatctttatcatagagctgatggacgtggataagacacctaagggattgacagcttatgtgtcaaacgagggacgcatccggtacaaaaagccgatgaaagtggactcaatttgcaacctagatatcttctattttccatttgatcagcagaactgcacattaaccttctccagcttcctgtacactgttgattccatgttgctggatatggaaaaggaggtgtgggagataacggatgcaagtagaaatattctgcaaacccatggagaatgggaactactgggtctcagcaaggccacagccaaactgtcccgaggcggtaacctgtacgatcagattgttttctacgtcgcgatcaggaggcgcccttcattgtacgtcatcaacctcctggtaccctcaggattcctggttgccatagatgctctttctttttacctgccggttaagtcagggaacagggtgccattcaagataaccttgttgctgggttataacgtgtttttattgatgatgtccgacctgcttcccacttccggaacccccctgattggagtgtacttcgccctatgcctgtctctcatggtgggatccctgctcgaaaccatcttcatcacccatctcttgcatgtggccactacccagcctccacctctcccaaggtggctgcactcattgttgttacattgcaactcacccggacgctgttgccccactgcacctcagaaagagaacaagggccctggcttaacacccacgcatctccccggagtcaaagagcctgaggttagcgctggtcagatgccagggcctgctgaagccgaactgaccgggggaagtgaatggacccgcgcacagcgcgagcacgaggcccagaagcagcatagtgtggaactgtggcttcagttttcacacgccatggacgcgatgctgttccgcctgtacctgctgttcatggctagcagcatcattaccgtgatatgcctgtggaatacctag

SEQ ID NO: 212761 - DNA, 1371 bp, synthetic construct
  misc_feature 1..1371: note = Description of Artificial Sequence: Synthetic coding sequence
  source 1..1371: mol_type = other DNA
atggagggatcgtggtttcatcggaagcgattcagtttttatctgcttctgggatttttgttgcagggccgtggggtgactttcacaataaattgctccggtttcggccagcatggtgccgaccctactgctctcaattccgtgttcaatagaaagccattcaggcctgtgactaacatttcagttccaacacaggtaaatatatcctttgccatgtcagccatcttagatgtcaacgaacaacttcatctcctgtcatcctttctatggctggaaatggtctgggataacccattcatcagctggaaccccgaggaatgcgaaggcattaccaaaatgtctatggcagcgaagaacttgtggctgcctgacatctttatcatagaacttatggacgtggataagactcccaagggccttaccgcctacgtgagtaacgagggtcggatcaggtacaaaaaacctatgaaggtggattcgatctgtaatctcgatatcttctacttcccatttgaccagcaaaattgtaccctaaccttctcctccttcttatacaccgtcgacagcatgcttctggatatggagaaggaggtttgggaaatcactgacgcgtccaggaacattctgcagacgcatggagaatgggagctgctgggtttatccaaggccacggccaagctgtcccgcggaggcaatctctacgatcaaatcgtcttttatgtggcaattcggagaaggccctccctgtacgttattaatcttctggtgccctctgggtttctggtcgcgattgacgcattgtcattctatctgccagtcaagagcggtaaccgggtgccttttaagatcacattgctccttggatataacgtgtttctgcttatgatgtccgacctgctacctacatctggcacacctctaattggggtgtactttgccctgtgcctgtcgctaatggtaggaagcttgctcgagacgattttcattacccacctgcttcacgtggccactacacagccaccgcctctcccccgttggctgcactcgctgctgctacactgtaattccccaggacgttgttgcccaacggcaccccaaaaggaaaacaagggacctggcttgacgccgactcatctgcctggagtgaaggaacctgaggtgagcgccggacagatgccaggccctgcagaggctgaactgaccggaggttccgaatggaccagagcacagagagagcacgaagcccagaagcagcactccgtcgaactctggctccagttctctcacgccatggatgctatgctcttccgcttgtatttgttattcatggcctcctcaataatcacggttatttgtctgtggaatacttag

SEQ ID NO: 212762 - DNA, 1326 bp, synthetic construct
  misc_feature 1..1326: note = Description of Artificial Sequence: Synthetic coding sequence
  source 1..1326: mol_type = other DNA
atggaggggtcttggtttcataggaagcggttttccttctacttactgctcggctttctgctgcaagggagaggcgtgacattcacgataaactgctcagggtttggccagcacggcgcagatccaacagctttgaactcagtttttaacagaaaaccgttccggccagtgacaaacatatctgtccctactcaagtgaacataagttttgctatgagtgctatactggatgtggtctgggacaatccattcatcagctggaacccagaagagtgcgaagggattacaaaaatgtccatggccgcaaagaacctctggcttcctgatatcttcattatcgaactcatggatgtggataagacccctaaagggttgaccgcctatgtgtccaatgaaggcagaattcggtacaagaagcccatgaaagttgacagcatatgtaacctcgacattttttattttccttttgaccagcagaattgcactttgaccttcagctctttcctctatacagtcgactctatgttgcttgacatggaaaaagaagtctgggaaattacggacgcctctcgcaatattttacaaacacacggcgagtgggaactgcttggcctgagtaaagccactgcaaagctcagtcggggaggaaacctatacgatcagattgttttttatgtcgctatacgccgacgtccctccctgtacgtgataaacttgctggtgccaagcggcttccttgtagcaatcgacgccttatcattctacctgcccgtgaaatccggaaacagagtcccctttaagattaccctcctgctgggctataatgtgtttctcctcatgatgtcagacctcctgcccacatcaggtactccactgattggtgtgtacttcgcactgtgcctgtccctcatggttggctccttactcgaaactatctttataactcatcttctccacgtagccaccacacagccacctcctctccccagatggctccactccctgctcctccactgcaactcacctggcaggtgttgccctacggcccctcaaaaagagaataaggggcctggcctgacccctacccatctgcccggagtcaaagagccggaggtgagtgctggccagatgcccggtccggcagaagcagaacttacaggaggctcagagtggacacgcgctcagagagagcacgaagcacagaagcagcattcagtcgagctctggctccagttttcacatgccatggacgccatgcttttccggctatacctcctctttatggcgtcctcaattataaccgtgatttgtctttggaatacatag

SEQ ID NO: 212763 - DNA, 1371 bp, synthetic construct
  misc_feature 1..1371: note = Description of Artificial Sequence: Synthetic coding sequence
  source 1..1371: mol_type = other DNA
atgctagctttcatcctctctcgagccactcccagaccggctttggggcctctcagctaccgggagcatcgggtggcactccttcacctaacgcactctatgagtacaacaggaagaggcgtgaccttcacaataaattgttcaggcttcgggcagcacggcgcagacccgaccgccctgaactccgtctttaataggaagccttttcggcctgtgacaaacatctcggtcccaacgcaggtaaacattagtttcgctatgtccgctatattggacgttgtttgggacaacccattcataagctggaacccagaagagtgtgagggtatcacaaagatgtctatggcagcaaagaatttatggcttccagacattttcattatcgaattgatggatgtcgataagacgcccaaaggccttaccgcatacgtttcaaatgagggccgaataaggtataaaaaacctatgaaagttgattctatctgcaatttggacattttttactttcctttcgatcagcagaactgtaccctgactttctcgtcattcctttacacagtggatagcatgctgctggacatggagaaggaggtctgggaaattactgatgccagcaggaacatactgcagacacatggggaatgggaattgctggggctgtcgaaagccaccgccaagttgagtcgaggcggaaatctctacgaccagatagtgttctatgtggcgatccgacggcgtccctccctgtatgtgattaaccttctggtcccaagcggttttctggtcgccatagacgcacttagcttttacttacctgtcaagtccggtaaccgagttcctttcaagataaccctgctcctcggttacaacgtcttccttctcatgatgtcagatttgttgcccaccagcggtactcccttgattggcgtgtattttgccctttgccttagtttgatggtggggagccttctggaaacaatttttataactcacctccttcacgtggccaccacccagcccccaccactccctagatggctccacagccttcttttgcattgcaactctcccggacggtgctgcccgaccgctccccagaaggagaataaggggccagggctgactccaacgcatttaccaggagtgaaagagcctgaagtgtccgctgggcaaatgcctgggcctgctgaggcagaacttactggtggttctgagtggaccagagcccagcgggagcacgaggcccagaagcagcactcggtggagctttggctgcagttctcacatgctatggacgcaatgctgttccggctttatctgttgtttatggcctcttctatcatcaccgttatttgcctgtggaatacatag

SEQ ID NO: 212764 - DNA, 1326 bp, synthetic construct
  misc_feature 1..1326: note = Description of Artificial Sequence: Synthetic coding sequence
  source 1..1326: mol_type = other DNA
atgctttcatctgtgatggccccactgtgggcctgcatcctggtagccgcaggcatcctggctacagacacgcatcatccacaggattcagccttatatcatttgagcaagcaactgttgcaaaagtatcacaaggaggtgagaccagtttacaattggacgaaggcaacaacggtgtatctcgatctgtttgtccacgccattctcgatgttgatgccgagaaccagattttaaagacttccgtttggtaccaggaggtgtggaacgacgaatttctgagctggaactcctccatgttcgatgaaatccgtgagatctcactccccttgagcgctatttgggctcctgatatcatcattaatgaattcgtagatattgaaagataccctgacttaccatatgtctatgttaacagttctggaacaatcgagaattacaagcctattcaggtcgtgtccgcatgctcactggaaacatacgccttccctttcgatgttcaaaattgcagcttgaccttcaaatctatcctgcatactgtcgaagacgtagacttggcctttctgcgtagtcctgaggatatccaacatgacaaaaaggccttcctcaatgactccgagtgggagttactgagcgttagcagcacgtactcaatcctgcagtcaagtgcaggcggatttgctcagattcagtttaatgtagtgatgcgaagacatccacttgtttacgttgttagcctgttgattcctagcatctttctcatgctggttgacctggggtccttttacctgcctccaaattgtcgtgctcgtattgtctttaagaccagcgtcctggtcggttataccgtgttccgggttaatatgtccaaccaggtccctcggtcagtgggttctactcccttgatcggtcactttttcacaatttgcatggctttccttgtgctttcgcttgcgaagtcaatcgttcttgtgaaattccttcacgatgaacaaaggggaggccaagagcaaccttttttatgtcttagaggagacacagacgcagaccgaccaagagttgaaccacgagcccagcgcgctgtggtgaccgagtctagcctttacggcgaacacttggcccagcccggaacattaaaagaggtctggtcccagctgcagagtatttccaactacctgcagactcaggaccagaccgaccagcaggaagcggagtggctggttctcctgagccgttttgacagattgctgttccagagctacctgttcatgcttggtatatacaccatcacactatgctcactttgggccctctgggggggtgtttag

SEQ ID NO: 212765 - DNA, 1293 bp, synthetic construct
  misc_feature 1..1293: note = Description of Artificial Sequence: Synthetic coding sequence
  source 1..1293: mol_type = other DNA
atgatcgtgtactttcctggcatactcgcaaccgacactcaccaccctcaggactccgcactgtaccacctttccaagcagctgctgcaaaagtatcataaagaagttcgcccagtctataattggacgaaggccaccaccgtctacctggacctgttcgtgcacgcaatcctggatgtcgacgccgagaaccaaatcctgaagacgtccgtttggtaccaagaagtatggaatgatgaatttctcagttggaattcctcgatgttcgacgagattcgggaaatcagcctaccactgtcagctatctgggccccagatatcattattaacgagttcgtggatatcgagcggtatccagacctgccttatgtgtacgtgaatagctccgggacaatcgaaaactacaaacctatccaggtggtttccgcttgctccctcgagacatacgccttcccatttgatgtgcagaactgcagcctgacgttcaagtccattttgcataccgtcgaggatgtggatttggccttcctacggtctccagaggacatccagcacgataagaaagcctttctcaatgattctgaatgggaactgctttctgttagctcaacatatagcatcctccagagcagcgcgggtggcttcgcacaaattcagtttaatgtcgtcatgagacgccatcctcttgtctatgtcgttagtctgctcataccgtctatattcctgatgctcgtggaccttggctctttctatctcccgcctaattgccgggctcgcattgtgttcaagacctccgtgctggtaggctacaccgtatttagagtgaatatgagtaatcaggtgcctcgaagcgttggctctacgccattgattggacactttttcacaatctgcatggcattccttgtcctgtccttggcgaaaagcatcgtgcttgtcaagttcctgcatgatgaacagcggggtggtcaagagcagccgttcctgtgtctaaggggggataccgacgctgatcgccctagggtggagcctagggctcagagggctgttgtcacggaatcctccttatatggcgagcacctggcacaacctgggacactcaaggaggtgtggtcccagttacagtcgatctcaaactacctgcagacccaggatcagaccgatcagcaggaggccgagtggctcgtcttattatcacggttcgatagactcctcttccagagctatctctttatgctcggcatttatactattaccttgtgcagcctttgggctctgtggggcggagtttag

SEQ ID NO: 212766 - DNA, 528 bp, synthetic construct
  misc_feature 1..528: note = Description of Artificial Sequence: Synthetic coding sequence
  source 1..528: mol_type = other DNA
tgagccgagaaccagatcttgaagactagcgtctggtatcaggaagtatggaacgacgaattcctgagttggaattcttctatgttcgacgaaataagggaaatctcactcccgctgagtgccatctgggccccagacattatcatcaacgagttcgtcgatattgagcggtaccccgatttaccctatgtgtatgtgaatagttcagggacaattgagaattacaagccaatccaggtcgtctccgcctgtagcctggagacctacgcattcccatttgacgtgcagaattgtagtctgacattcaagagcattctccacaccgtcgaagatgttgacctggcctttcttaggagccctgaggacatacagcacgacaaaaaagcttttctgaacgattctgagtgggagctgctcagcgtaagttcaacatatagtatcttacagtccagtgcagggggatttgctcagattcagttcaatggcactagtagtccttccgcctggccgtcttggttcagtgcttag

SEQ ID NO: 212767 - DNA, 1449 bp, synthetic construct
  misc_feature 1..1449: note = Description of Artificial Sequence: Synthetic coding sequence
  source 1..1449: mol_type = other DNA
atgctggcatttatattatctagggccaccccacgccctgcgctcggcccactttcctatagggaacatcgtgtggctctactgcatctgacgcattccatgtctactaccggccgtggcgttacctttactattaattgtagtggctttgggcagcacggcgcagatcccactgctctgaacagtgtgtttaataggaagccatttcgccctgttactaacataagcgtgccaactcaggtgaacatatcgttcgccatgagcgccatcctggacgttgtctgggacaatccattcattagttggaaccccgaggaatgcgagggcataactaagatgtctatggcggcaaaaaacttatggctccccgatatctttatcatcgaactatgtgtgtctcgcgcaggccaacgggaagtgccgagtccagggagccatagggatcactccctgccactgggtcccttgatggacgtggacaaaacacccaaagggctcactgcttacgtcagcaatgaagggcgtatccgctataaaaaacccatgaaagtggattctatatgcaacctcgacatattttattttcccttcgatcagcaaaattgcacgctaacattctcgagttttttatataccgtcgattcaatgcttctcgatatggagaaagaggtttgggaaattactgatgcctcccggaatatcctgcaaacgcacggtgaatgggagctgctcggactgagtaaggctactgcaaaactgagtcggggaggtaacctctacgatcagattgtgttctatgtcgcaatccgacgacgccctagcctgtatgtaatcaatctgctggtgccaagtggtttccttgttgccattgacgcactcagcttttatcttcccgtcaaatccgggaaccgcgtcccattcaagataaccctgctccttggctacaacgtcttcctgctcatgatgtccgacctgcttcctacctcaggaacccctctgataggtgtgtatttcgcactttgcctgtccctgatggttggaagcctgctggagaccatcttcattacgcatctgctccacgtggcgactacccagcctcctcctctgccgcgttggcttcattcacttctccttcactgcaattcacctggtagatgttgccctactgccccacagaaggagaacaagggacctggtttgacgcccactcatctccctggcgtgaaggaacccgaagtttccgccggacaaatgcctgggccagctgaagctgagctgacaggcggatcggaatggacgcgcgctcagagggagcacgaggcacaaaaacaacatagtgtagagctgtggcttcaatttagtcatgccatggatgcaatgctcttccggctctacctgcttttcatggcttcctcaatcatcacggtcatctgcttgtggaacacctag

SEQ ID NO: 212768 - DNA, 1137 bp, synthetic construct
  misc_feature 1..1137: note = Description of Artificial Sequence: Synthetic coding sequence
  source 1..1137: mol_type = other DNA
atggataagctcgacgccaacgtgtctagcgaagagggcttcggtagtgttgagaaagtggtactcctgactttcttatccacagtgattctaatggcaatcctgggaaacctcctcgtcatggtggcagtgtgctgggatcgccaacttaggaagataaaaaccaattatttcatcgtgtctctggcctttgcagacctcctggtatcggtgctcgtcatgcctttcggcgcaatcgaactggtccaggacatctggatctacggagaagtgttctgtcttgttagaacgagcctcgatgtcctgctgaccaccgcatccattttccacctctgctgcatctcccttgacaggtactacgctatttgctgccagccactggtgtataggaacaagatgacccctctgcgcatagcactgatgcttgggggatgctgggttatccccactttcatctcctttttaccaatcatgcaggggtggaataacatcggaataatcgacctcatagagaaacggaagttcaaccagaatagcaattctacctattgtgtgtttatggtgaataaaccgtatgctattacttgcagtgttgtcgcattttatatcccatttctgttgatggtgttagcctactacaggatttacgttacagcaaaggaacatgcacaccagatccagatgttgcaacgcgctggcgcttcctccgagtctcggcctcagagtgctgaccagcattcgactcatcggatgcgcaccgagaccaaggccgctaagacgctgtgcatcattatgggctgcttttgcctatgttgggcaccgtttttcgtgaccaacatagttgaccctttcattgattacacagttcccggtcaagtctggaccgcgttcctttggcttggctacatcaactctggcctcaatcctttcctgtacgcctttctcaacaagtcctttaggagggcgttcctcataatcctgtgttgcgacgatgagaggtatcgcaggccctccattctaggacagaccgtcccatgctccaccaccacaattaacggctcaactcatgtgctttccggatgcagccccgtctcatcatttcttctgttgttctgcaataggcccgtgcccgtgtag

SEQ ID NO: 212769 - DNA, 1164 bp, synthetic construct
  misc_feature 1..1164: note = Description of Artificial Sequence: Synthetic coding sequence
  source 1..1164: mol_type = other DNA
atggacaagcttgatgcaaatgtctcctccgaggaagggttcggttccgttgagaaagtggtcctgttaacttttctcagcactgttattctgatggccattctgggaaacctgttggtaatggttgcggtgtgttgggaccgtcagcttcgaaagataaaaactaactactttatcgtgagtctggccttcgccgatctgttggtttccgtcctggtgatgccattcggggcaattgagctagttcaggatatttggatatacggcgaagtgttttgtcttgtgaggaccagcttagatgtgctacttacaaccgctagtatttttcatctctgctgtatttcccttgacagatattatgccatttgttgtcagcctttggtgtacagaaataagatgacccccctcagaatcgctctcatgcttggtgggtgttgggtgatacccaccttcatcagctttcttcccatcatgcagggttggaacaacataggcattatcgacttgattgagaagcgcaaatttaaccagaactctaacagcacctattgtgtgttcatggtaaataagccatacgcaattacatgtagcgtcgtggctttttacatcccatttttactcatggtactggcctactacaggatttacgtgacagccaaggagcacgcccaccaaatccagatgctgcaacgggctggcgcaagcagcgaatctcgaccgcagagcgctgaccagcatagcacccaccggatgcgcaccgagactaaggctgctaaaactctttgcattattatgggctgcttctgtctttgttgggcccctttctttgtaactaacatcgtggatcctttcatcgactatactgtcccaggacaagtgtggactgcattcttgtggttgggttatattaattcaggactcaatccatttttgtatgcgtttcttaacaaaagttttagaagagccttcctgatcatcttgtgctgcgatgacgagcgctatagacgtcccagcatcctcgggcagaccgtcccttgctccaccaccactatcaatgggtccactcacgtgctaagatacactgtgctacaccgcggacaccatcaggagctggagaagctacccatccacaatgatccagaatccctggaaagctgtttctag

SEQ ID NO: 212770 - DNA, 1287 bp, synthetic construct
  misc_feature 1..1287: note = Description of Artificial Sequence: Synthetic coding sequence
  source 1..1287: mol_type = other DNA
atggataagttggatgcgaatgtttcgtccgaggagggattcgggagcgttgagaaggtcgtgttgctgacattcttaagcacggttatcctgatggcaattctggggaatcttctcgttatggtcgctgtctgctgggatagacagttgaggaagatcaagaccaattatttcattgtgtcgcttgctttcgcagatctcctcgtctccgtcctggtgatgccattcggagctattgaactcgtccaagacatctggatatacggggaagtcttttgcctcgtgaggaccagcctggatgtgcttttgacaaccgcctcaatcttccatctgtgctgtattagcctggaccgctattacgccatctgctgccagcctttagtttaccgcaataagatgacaccccttcgaatcgctcttatgctgggtggatgttgggtgatacctacattcatttccttcttgcccatcatgcagggatggaacaatatcggtattattgacctgatagaaaaacggaagtttaatcagaattccaatagtacgtattgcgtctttatggtgaataaaccgtacgcgattacttgtagcgtagtcgcgttctacattcccttcctgctaatggtcctggcttactatcgcatctatgtaacggcgaaggagcatgcccatcaaatccagatgctgcagcgtgcaggtgcttctagtgagtcgagacctcagtctgccgatcaacactctacccatcgaatgagaacggaaacaaaggccgctaaaacactgtgcatcattatggggtgtttctgtctgtgctgggccccatttttcgtgacaaatatcgtcgacccattcatcgattataccgtgccaggccaagtgtggacagccttcctctggctaggctacattaattccggccttaaccctttcctgtacgcgtttctgaacaagagctttcgcagggcttttctgatcatcctttgttgcgatgatgaaaggtaccgcaggccatcaattttgggccagaccgttccatgttcgactaccacaattaatggaagcacccacgtcctgcggactgattttctttttgacagggacatactagccagatactggacgaagcccgcacgtgccggaccattctccggcaccctgagcatcagatgcctcactgcgcgtaagcctgtcctcggcgatgccgtcgagtgtgggggacagtgggagagtcagtgccaccccccagctacttctccgctcgttgccgctcagccgtccgatacctag

SEQ ID NO: 212771 - DNA, 1209 bp, synthetic construct
  misc_feature 1..1209: note = Description of Artificial Sequence: Synthetic coding sequence
  source 1..1209: mol_type = other DNA
atggacaagcttgacgccaacgtgagctcagaggaaggctttggaagtgtagaaaaagtagtgctcctcacgttcctgagtacagtgattctgatggcaatcctaggtaatctgctggtgatggtggccgtatgttgggacaggcagctcagaaaaatcaagacaaactatttcatcgtcagtcttgcctttgcagacctgcttgtgtccgtactggtcatgccctttggagccatcgagctagtacaagatatctggatctacggcgaagtgttctgtctggtgcgaacctcattggacgtcctcttgaccaccgcaagcattttccatctgtgttgtatcagcctcgaccggtactatgctatatgctgccagcctctcgtgtataggaataagatgactccgctgaggattgctctcatgctgggcggatgctgggtcattcccacttttatttcctttctccccattatgcaaggatggaataatattgggataatcgacctagagaggtctcttaaccagggtctggggcaagacttccacgccattgaaaaacgaaagttcaatcagaactccaatagtacctattgtgtgtttatggtaaataaaccctacgcgatcacctgttccgtcgttgctttctacatacccttcctgctgatggtgcttgcctattatcggatttatgtgactgcaaaggaacacgcccaccagatacagatgctgcaacgggctggcgcaagctccgagtctcgtccccagtccgccgaccaacattcaacgcatcggatgcggactgaaactaaagccgcaaagaccctgtgcattattatggggtgtttctgcctatgttgggcgccattcttcgttaccaatattgtggatccctttatcgattacaccgtacccggacaggtctggaccgcatttctctggctcgggtacatcaactcagggctgaatccatttctttacgcatttctgaacaagtcattcagacgagcttttctgataatcctgtgctgcgatgatgaacggtataggaggccttctatcctaggacagacagtaccttgttcaactacgaccatcaatggctcaacccacgtgctgagggacgctgttgaatgtggaggccagtgggaatcgcagtgccacccccctgccacgagccccctggtggctgcccagccttccgacacctag

SEQ ID NO: 212772 - DNA, 1167 bp, synthetic construct
  misc_feature 1..1167: note = Description of Artificial Sequence: Synthetic coding sequence
  source 1..1167: mol_type = other DNA
atggacaagttggatgccaatgtgagctccgaggagggattcggctccgtggagaaggtggttctgctgactttcctcagtacagtcatcctgatggccatattgggtaatctcctggtgatggtagccgtttgttgggacaggcagctgagaaagatcaaaacgaattacttcattgtgtctctggcgttcgcggacttgctggtcagcgtgctggtgatgccatttggcgctatagagctcgttcaggacatttggatatacggtgaggtcttttgcttggttaggactagtctggatgtgctgttaaccacggcttcaattttccatttgtgctgcatctcactggatagatattacgcaatatgctgtcaacccctggtgtaccgcaacaaaatgacccccttgcggatagcgctgatgctcggaggttgttgggtgattccaacgttcatttcctttctgcctattatgcaaggctggaacaatattggaataatcgatctgatcgagaaaagaaagttcaatcaaaatagcaactcaacttattgtgtgtttatggttaacaaaccctacgccatcacgtgtagcgtcgtcgcattctacatcccctttttgctcatggtgctggcatactaccgaatctacgtaaccgctaaggaacacgcccaccagatccagatgctacaaagggcaggtgcttctagcgaatcacgccctcagagcgccgaccaacactctactcaccggatgcggaccgaaactaaagccgcaaaaacgttgtgtataattatgggttgtttttgtttgtgttgggccccattctttgtaaccaacattgtggatcctttcatagactacaccgtgcccggacaggtatggactgccttcttatggctggggtatatcaactctgggctaaacccctttctgtacgccttcctgaacaagtcctttcgacgagcatttctgatcatactgtgctgtgatgatgaaaggtaccgaaggccctctatccttgggcagaccgttccctgctctactactaccattaatggatccactcacgttctaagagatgctgtggagtgcgggggacagtgggagtcccaatgccatcccccagcgacttcaccactggtggccgcacagccctcagatacatag

SEQ ID NO: 212773 - DNA, 1083 bp, synthetic construct
  misc_feature 1..1083: note = Description of Artificial Sequence: Synthetic coding sequence
  source 1..1083: mol_type = other DNA
atggacaagctggacgccaatgtgtcttccgaggagggctttggatctgtggagaaggttgtcctgctcaccttcctgagcaccgtcatcctgatggcaattttgggcaacctcctggtgatggtcgctgtgtgttgggataggcagctgcggaaaatcaaaacaaactacttcatcgtgagcctggcatttgccgacttgctggtgtcggtgttggtcatgcctttcggcgcaatcgagctcgttcaggacatttggatttacggagaagtattttgcctagtacgcacttcactcgacgtgttactgaccactgcctctatcttccatctgtgttgtattagcttagatagatattacgcaatttgttgtcagccgctggtgtacaggaataagatgaccccactgcggattgctctgatgttaggtggttgctgggtgatccctacttttatctcgttcctcccaatcatgcagggatggaataacatcggaatcattgatctgatagagaagaggaagtttaaccagaacagtaactccacctattgcgtttttatggtcaacaagccatatgctatcacttgctcagttgtggccttctacatcccattcctgctgatggtgctcgcttactatagaatctacgtgacagcgaaagaacacgcccatcagatccagatgctgcagcgggctggcgcatcaagcgaaagtcggccacaaagcgccgaccagcacagcacacacagaatgaggacagagactaaagctgcaaaaactctgtgcatcatcatggggtgcttctgcctatgctgggcccctttcttcgtgactaacattgtggatcctttcatcgattacaccgtgcccggtcaggtgtggacagcctttctctggctgggttatattaacagcggcctaaaccctttcctgtatgcattcctaaacaagagcttccgtcgcgctttcctgataattctatgctgtgacgacgagagataccgcagaccatctattctggggcagacagtgccatgctccactacaacaatcaacggctctacccacgtgctgcgcttctag

SEQ ID NO: 212774 - DNA, 1236 bp, synthetic construct
  misc_feature 1..1236: note = Description of Artificial Sequence: Synthetic coding sequence
  source 1..1236: mol_type = other DNA
atggataagttggatgctaacgtgtcatcagaagaagggtttggctctgtggagaaggttgtgctgttaactttcttgagcaccgtgatcctgatggccatactgggtaacttactggtaatggtggccgtttgctgggaccggcagctgcgcaagattaaaacgaactatttcatagtgagcttagctttcgcggacttgttggtcagcgttctggtcatgccattcggcgctatcgagctggtgcaggatatttggatatatggggaggtattctgcctcgttcggacttccctggatgtgctgctaactaccgcctctattttccatctctgttgcatcagtttggacagatattatgccatctgctgtcagccactcgtttacagaaacaagatgaccccactcagaattgctctcatgttaggaggctgctgggtaatccccacctttatctcctttctgcctatcatgcagggctggaataatatcgggattattgacctcattgagaaaaggaagttcaatcaaaactcaaattcaacatattgcgtctttatggtgaataagccgtacgctattacgtgctcggttgtcgcattttacatcccatttctcctcatggtgctcgcatattaccgtatctatgtaaccgccaaagagcatgctcatcagatccagatgctacagagagccggagccagctccgagagccgcccacagtcagccgatcaacatagcacccatcgaatgcgcacagagaccaaagctgccaagaccctgtgcataattatggggtgcttctgcttgtgctgggctccctttttcgtaactaatattgttgatccttttatcgactatacggtgccaggtcaggtctggacggcttttctgtggctgggatacatcaattccgggctcaacccattcttgtatgctttccttaacaagagctttcggagggctttcctcattattctgtgttgcgatgatgaaaggtacaggcgcccatcaatcctgggccagactgtgccctgtagtacaactaccatcaacgggagcacccatgtactgagctcgggcaccgagactgacaggaaaaagttgtggaacaaagaggaaaagattgaccagaccattcagatgccaaagcgcaagaggaaaaaaaaagcctcccttagctatgaagacttaattctgctgggaaggaaatcctgctttcgagagggcaagtag

SEQ ID NO: 212775 - DNA, 1164 bp, synthetic construct
  misc_feature 1..1164: note = Description of Artificial Sequence: Synthetic coding sequence
  source 1..1164: mol_type = other DNA
atggacaagttggatgccaacgtgtccagcgaagagggctttggttctgtagagaaagtggtgcttctgacctttctgagcacagtgattctcatggccatcctgggcaatttacttgtgatggtcgccgtgtgctgggacagacagctgagaaagatcaaaacaaactactttatagtgagtctggcctttgctgacttacttgtgagtgtgctagtgatgccctttggggctatcgagttggtccaggacatttggatctacggcgaagtattctgcctcgttaggacaagcctcgacgttctcctcaccaccgcctccatatttcacctgtgctgcatcagcctcgaccgatactacgcaatctgctgtcagccgttggtgtatcggaataagatgactccactgagaatcgccctgatgctcggcggttgttgggtcattcctactttcatttccttcctgcccatcatgcaggggtggaataacattgggataattgacctgatcgagaaaaggaaattcaatcagaattcgaacagtacatactgtgtttttatggtaaacaagccatatgccatcacttgttccgtagtagcgttttatattcctttcctcctgatggtgctcgcatactaccgcatctatgtgaccgcgaaggaacacgcgcaccagatccaaatgctccagcgagccggagcctcctctgagtcccggcctcagagtgccgaccagcatagcactcatcggatgagaacagagacaaaggccgcaaagacgctttgcattatcatgggatgtttctgtctgtgctgggcccctttctttgtgacaaacatcgtggatccatttattgattacacagtgcctggtcaagtgtggacagcattcttgtggctggggtacatcaacagcggtttgaatccattcctctatgccttcctgaataagtccttcagaagagcctttctgattattctttgctgtgacgatgagcggtatagaagacccagtattctgggacagacggtcccctgctccaccaccactatcaatgggtctactcacgtgcttcgttacactgtgctccataggggtcaccaccaagagctggagaagctcccgatccataacgatcccgagtcactggagtcttgtttctag

SEQ ID NO: 212776 - DNA, 1137 bp, synthetic construct
  misc_feature 1..1137: note = Description of Artificial Sequence: Synthetic coding sequence
  source 1..1137: mol_type = other DNA
atggataaattggacgccaacgtgtcttcagaggaggggtttgggtccgtcgaaaaagtcgtcttattgacatttctctcaacggtaattctgatggccatcctcggtaatctcctggtgatggtcgccgtctgctgggatcgtcagctccggaaaattaagacgaattacttcatcgtttcactggcattcgctgacttactagtgtcagtgctagtaatgccattcggtgcaattgaattagtgcaagacatttggatttacggcgaagttttctgcttggtacgtacgtctctggacgtgcttctcactactgcctccatattccatctgtgctgcatctctctcgaccggtattacgccatctgttgccagcccctggtgtaccgtaataaaatgacccctctcagaatagctctgatgttgggagggtgctgggtgatccccacgttcattagtttcctgccaataatgcaggggtggaacaacataggtattatcgatctgatagagaagaggaaattcaaccagaattctaatagtacctactgcgttttcatggtgaacaaaccttatgcaataacatgctctgtcgtagccttttatatcccttttctcttgatggtcctggcttattaccggatttacgttacagctaaggaacatgcccaccagattcagatgcttcagcgagcaggggcttcttcagaatcaaggccccaaagcgccgaccagcatagcacccatcgtatgcgcacagagacaaaggcggcaaaaacactttgcatcattatgggctgcttttgcttgtgctgggctccattctttgtgaccaacattgtggatccatttattgactatactgttcctggtcaagtctggacggcttttctttggctcggctatattaacagcggtctgaacccatttttgtacgcttttctgaacaagagcttcaggcgtgccttcttgatcatcctgtgctgcgacgatgaacggtaccgccgtcctagtatcctgggccaaacagtaccttgctcaactactactatcaacggcagtacgcacgttctaagtggatgctctccagtcagctctttcttgctgctgttttgcaatcgccctgttcccgtctag

SEQ ID NO: 212777 - DNA, 1137 bp, synthetic construct
  misc_feature 1..1137: note = Description of Artificial Sequence: Synthetic coding sequence
  source 1..1137: mol_type = other DNA
atggacaaactggacgctaacgtaagctctgaggaaggctttggctccgtggaaaaagtggtgcttctgacctttctcagcaccgtgatcctgatggcaatcctcggcaacctcctggtgatggtggcggtttgctgggaccgccagctccggaagatcaagaccaactatttcatcgtcagcctggctttcgccgatttgttggtgagcgtgctggtcatgcccttcggcgctatcgaactcgtgcaggatatctggatatatggggaggtcttctgtctggtgcgcacgtccctggatgtcctgctaaccactgcgagtattttccatctgtgttgcatcagtctcgatagatactacgcaatctgttgtcaacctctggtttataggaataaaatgaccccactgcggattgcactcatgttaggaggttgctgggtaatacctactttcatttcctttctgcctattatgcagggatggaacaatattgggataatcgatctcattgaaaagagaaagtttaatcagaatagtaacagtacttattgtgtcttcatggtgaacaaaccgtacgccattacctgttctgtggtggccttctatatcccatttcttctaatggtgctcgcgtactacaggatctatgtcacagcaaaagagcacgcccaccagattcaaatgttacagagagccggtgcatcatccgagtcgaggcctcagagtgccgatcagcattccacccacaggatgaggacggagactaaggctgctaaaaccctctgtatcatcatgggctgcttctgtctttgctgggcaccattttttgtaacaaatattgtagacccattcatcgattacacagtacctggccaggtgtggactgcattcctctggctggggtacattaactcgggcctgaacccattcctgtatgcttttctgaacaagtccttccgtcgggcatttctcatcatcttgtgttgtgacgatgagcgctatagacggccttctattctcggtcagactgtgccttgcagtaccactaccatcaacgggtccacacacgtactgtccggttgcagccccgtgagcagttttctgctgctcttctgcaacaggccagtacctgtctag

SEQ ID NO: 212778 - DNA, 1074 bp, synthetic construct
  misc_feature 1..1074: note = Description of Artificial Sequence: Synthetic coding sequence
  source 1..1074: mol_type = other DNA
atggacctgccggtgaaccttacatcatttagcctctccacaccctcaccgcttgagactaaccatagccttgggaaggacgacctgcggccatcgagcccactgctatccgtctttggagtgcttatattgaccctgttagggttcctggttgccgctaccttcgcatggaaccttctggttctcgccacaatactcagagtacggacattccatcgggtgccacataatctcgtcgcctcgatggccgtatcagacgtcctggtcgcagcactcgtgatgcccctcagcctcgtccatgagctaagtggcaggagatggcagctcggcagacggctgtgtcaactgtggatcgcttgcgacgttctgtgctgtaccgcgtcaatttggaatgtgacagcaatagccctggaccgatactggtcaatcaccaggcacatggagtacaccttgcggacacgcaagtgcgtctctaacgtgatgattgcacttacatgggccctctccgctgtgatctctctcgcccctctgctgttcggttggggtgagacttactctgaagggagcgaagagtgtcaagtgtctcgggagccctcgtacgccgtgttcagcacagtgggcgcattttacctgcccctgtgtgtggtcctgtttgtgtattggaagatttacaaagcagccaaattccgagtgggcagccggaagacaaattcagtgtcacccatcagcgaagcagttgaggtgaaagactctgccaagcaaccgcagatggttttcacagttagacacgcgaccgttacctttcagcccgagggggacacctggcgcgaacagaaggaacaaagagcagccctcatggtggggattctcatcggagtctttgtactatgttggataccgttctttctaacagaactcatctcaccactgtgttcgtgcgacatcccagccatttggaagtccatcttcctgtggctgggctatagcaacagcttctttaatcctctgatctatactgcgttcaataagaactataacagtgcctttaagaactttttctccaggcagcactag

SEQ ID NO: 212779 - DNA, 1323 bp, synthetic construct
  misc_feature 1..1323: note = Description of Artificial Sequence: Synthetic coding sequence
  source 1..1323: mol_type = other DNA
atggtcccggagcctggacctaccgccaatagcacaccggcttggggcgcagggcctccttccgccccaggaggtagcggatgggtggccgctgcactttgtgtcgtcatcgccctgactgccgcagcgaattctctactaatagcccttatctgtacccaacctgctctgaggaacacatctaatttttttctggtatcactgttcacctctgacctcatggtgggactcgttgttatgcctcccgctatgttgaacgctctgtatggaagatgggtcttagccagagggctgtgcctgctatggaccgcatttgacgtgatgtgctgctccgctagcatcctcaatttgtgtttgattagcttggaccgctacctccttatcctaagtcccctgcgttacaagctccgaatgacccctctgagagctctggcactcgtgctgggtgcctggtccctcgcggcactggcatccttcctgcctctgctgctaggatggcatgagctgggccacgccaggcccccagttcccggacagtgccgactgctagcctccctcccattcgtgctggtggcaagcggcctcacattctttctcccaagcggagccatctgcttcacctattgccgcatcctgctcgcagcccgtaagcaagcagttcaagtggctagtcttacgacagggatggccagtcaagctagcgagaccctccaggtgcctcgtacgcccagaccaggggtggaaagcgcagatagccgaagactcgctacgaaacattcaaggaaagcactcaaggcgtcactgaccctggggattttgttaggaatgttttttgtgacctggttaccattttttgtggccaacatcgtacaggctgtctgcgactgcatatcacctggcctattcgatgtgctcacttggctcggatattgtaacagcacaatgaatccaatcatataccccctgttcatgagggacttcaaacgggctttgggcaggttcttgccttgcccacgctgtcctagggagcggcaggcaagcttggccagccctagccttcgtacgagccacagcggtccacgtccagggctgtcattgcaacaggttctgcctttgcctctgcccccagacagtgatagcgatagtgacgctggctcggggggttcttcaggcttgcgcctgactgctcagctcctcctgcctggggaggccacccaggaccccccactgccaacacgggctgcagccgcagtgaacttttttaacatcgaccctgccgaacccgagcttaggccccatcccctgggaattcctactaactag

SEQ ID NO: 212780 - DNA, 1338 bp, synthetic construct
  misc_feature 1..1338: note = Description of Artificial Sequence: Synthetic coding sequence
  source 1..1338: mol_type = other DNA
atgatggacgtgaattctagcggccgtccagatctgtacggacacctgcgctcctttttgttgcccgaagtcggtcggggactccctgaccttagtcccgacggaggcgctgaccctgtggctggatcctgggcaccccacctgctgagcgaggtcacggcgtcccccgctccaacgtgggatgctccaccagataacgcttccgggtgtggagaacagattaactatggtagagtcgaaaaggtggtgatagggtcaattcttacccttattactcttctgaccatagccggtaattgtttagtggtgatatcagtgtgctttgtgaagaaactgcgccaaccctccaattaccttattgtttccctggctctggcggatctgtccgtggcggtggcggttatgccgtttgtgtcagtgacagacctgatcgggggtaagtggatcttcggacattttttctgcaacgttttcatcgccatggacgtgatgtgttgcacagcttctatcatgactctgtgcgtaatttctatcgacagataccttggaattacacggcctctgacctatcctgtacggcagaacggaaaatgcatggctaaaatgatattgagtgtttggctgctgtcggcttcaatcacactgccccctctgtttggatgggcacagaatgtgaatgatgataaggtgtgcctgattagccaggactttgggtacaccatttatagcactgccgttgcattttatatccccatgtctgtcatgcttttcatgtactatcagatctataaagctgctagaaagtcggcggctaagcataaattccctgggttccccagggtcgagccggattcagtcattgcgctgaacggcatcgtcaaattgcagaaagaggttgaagagtgtgccaacctctctcgccttcttaaacatgaaagaaagaacatttctatctttaagagagagcagaaggccgcaaccacgctgggaatcattgtgggcgcatttactgtttgctggctgccttttttcctcttgtctaccgctcgaccatttatttgcggcacctcttgttcctgcatcccgttgtgggtcgaacgcacttttttatggttggggtacgcaaattctctgattaacccattcatatacgccttctttaaccgggacctgagaactacctatcgttccctcttgcaatgtcaatacaggaatattaaccggaagctttcagcagcagggatgcacgaggccctaaaactcgctgagcgcccagagaggcccgagttcgtgttacagaacgctgattactgtcgcaagaaagggcatgatagctag

SEQ ID NO: 212781 - DNA, 1440 bp, synthetic construct
  misc_feature 1..1440: note = Description of Artificial Sequence: Synthetic coding sequence
  source 1..1440: mol_type = other DNA
atgatggacgtgaattccagcggtcgacctgatttgtacggccaccttaggagtttcttactccctgaggtaggcagagggctccctgacctgagtcctgacggaggcgctgatccagtggctgggtcatgggctcctcatttgctgtcggaagtgacagcaagtccagcgcctacatgggacgccccaccggataacgccagcggatgcggggaacagatcaattatggacgcgtcgagaaagtggtgatagggtcaatactgacactcattactctgctgaccattgctgggaattgtctggtggttatttcagtttgttttgtgaagaaattgaggcagccttctaactatctaatcgtaagccttgctctggccgacctttctgttgctgtggcagtcatgccctttgtgagcgtgaccgacctgatcggcggtaagtggatctttggtcactttttctgtaacgtgttcattgctatggacgttatgtgctgtactgcctccattatgaccctctgcgtgatatcaatcgatagatacctcggcatcactagaccactcacataccccgtgcgacagaacggtaagtgcatggctaagatgatattaagtgtctggcttctgtccgcgtctataacgttgccacccctgtttgggtgggcacagaacgtaaacgatgacaaggtatgcctgatcagccaggacttcggttataccatttatagcaccgccgttgccttctatatcccgatgagcgtgatgctcttcatgtattatcaaatttacaaagccgctcgaaaatccgcggcaaagcataaatttccgggtttcccccgagtagaaccggactccgtaattgccctgaacggcatcgtgaagctgcaaaaggaagtggaggaatgcgcaaatctatcaaggcttctcaaacacgagagaaaaaatatctccatcttcaagagagaacagaaggcagcgacgacactgggcattatcgtgggcgctttcaccgtgtgctggctcccgttctttctgttatctactgcacgacctttcatctgcggtacaagctgcagctgcatacctctgtgggttgagcggacttttttgtggttaggttatgctaatagtttgatcaatccttttatctacgcattcttcaatagagacctcagaactacatacagaagcctgctccagtgccagtatcgaaatattaacagaaaactgtctgcggcaggtatgcatgaggccctgaaactggctgaacggcctgaacggcctgaattcgtgcttcgcgcatgcacgcggagagtgcttctgcgaccggaaaaaagaccacccgtgtctgtttgggtgttgcagagccctgaccaccacaactggctggccgataagatgctgacaacagttgaaaagaaggtcatgattcatgattag

SEQ ID NO: 212782 - DNA, 1299 bp, synthetic construct
  misc_feature 1..1299: note = Description of Artificial Sequence: Synthetic coding sequence
  source 1..1299: mol_type = other DNA
atgatggatgtgaattccagtgggagacctgatttatatggacacctgcgcagctttctacttcctgaagttggtcgtgggcttccagacttaagccctgatgggggagcagatcctgtcgcgggttcatgggccccacacctgttgtcggaggtgacagcaagtcctgctcccacttgggatgctcctcctgataatgccagcggatgcggggagcagatcaactatgggagagtagagaaggtggtcattggctccattcttacattaatcaccctcctgacaattgctggaaactgtttggtcgtcatctctgtctgtttcgtgaagaagttaagacaaccctccaattacctaattgtgagcctcgccctcgcggacctcagtgtcgctgttgccgtgatgccattcgtgtccgtgactgacttaataggtggtaagtggatcttcgggcattttttttgcaatgtgtttatcgcaatggatgtgatgtgctgtaccgcctccatcatgacactgtgtgtgattagcattgaccgctacttaggcattacacggccactgacgtaccctgtccgccagaatggcaaatgcatggccaaaatgatcctgtcagtctggctgctttccgcctccatcaccttacccccactgttcggttgggcacaaaatgttaatgacgacaaggtctgtctcatttcccaggattttggttatacgatctattcgacagcagttgccttctatattccaatgagtgttatgctgttcatgtattaccagatttataaggccgcaaggaagtccgctgctaaacacaagttccccggatttcctagggtcgaacccgattctgtgattgctcttaatggcatcgttaaactgcagaaagaggtggaggaatgtgccaacctatcgcgtcttctgaaacacgagcggaagaacatttccatctttaagcgtgagcaaaaagctgccactacactgggaatcatcgtgggcgctttcaccgtctgttggctgccattctttttgctgagcactgcacggcctttcatctgcggtacctcttgttcctgtataccactgtgggtagagaggacctttctgtggttggggtatgcaaactccctgatcaatcccttcatctacgctttcttcaatcgcgaccttaggacaacctacagatccctcctgcagtgccagtacagaaacatcaaccgaaagttgtcagccgcagggatgcatgaagcactgaaacttgccgaaagacccgagcgccctgagttcgtcctgtag

SEQ ID NO: 212783 - DNA, 1440 bp, synthetic construct
  misc_feature 1..1440: note = Description of Artificial Sequence: Synthetic coding sequence
  source 1..1440: mol_type = other DNA
atgatggacgttaatagcagcggaaggcctgatctgtacggccacctgagaagtttccttctgccagaagtcggacggggactgcccgacctctcccccgatggaggtgccgatccagtggccggatcatgggcacctcaccttctgtctgaagtgaccgcctcaccagcaccgacttgggacgctcctcctgataatgcctccggctgtggagaacagattaattacgggcgagtggaaaaggtcgtgatcggatctatactaacactgatcactctgctgaccattgcaggtaattgcctagtggtgattagtgtgtgttttgtgaaaaaactccggcagccaagtaactatctgatagtgtctcttgctctggccgacctttctgtggccgtggccgtgatgcctttcgtcagcgtgacggatttgataggcggaaaatggatcttcgggcacttcttttgcaacgtgttcatcgctatggatgttatgtgctgcacagcctccattatgacgctgtgcgtgatatccattgacagatacctggggataactcggcctctgacctaccccgtgcggcagaacggtaagtgcatggcgaagatgatcctgagcgtgtggctgctcagcgcatccatcaccttgccacccctgttcggttgggctcaaaacgtaaacgatgataaagtgtgtctgatttcacaggacttcggctacacaatttacagtacagccgtggctttttacattccgatgagcgtcatgctgtttatgtattatcagatctataaggccgctcgcaagtcagccgcaaagcacaagttccctggcttcccaagagtcgagcccgactctgtcatagccctcaacggcatagtgaagttgcagaaggaggttgaggagtgcgccaatctgtcgaggttgcttaagcatgagagaaagaacattagcatctttaagagagaacagaaggctgcgaccactctcggtatcattgtgggggcttttaccgtctgctggctcccattcttcctcttgagtacagctaggccctttatctgtggaaccagttgttcctgtatcccactgtgggtcgaacggaccttcctgtggttgggatatgcaaacagtctcataaatccatttatatatgcttttttcaatagggatcttcggaccacctaccgcagcctcctgcagtgccaatacaggaatattaaccggaaactcagtgcagcgggtatgcatgaagcgctaaagctcgctgaacgaccagagcggccagagttcgtactgatcacccgcacatcaggtgtccatcaggcgctggagaacttcccttgggggaacgaagttaatcgttggcggaagtcttgtgagtatttctgtaccgataaaatgctgaccaccgtggaaaagaaggtcatgatacacgactag

SEQ ID NO: 212784 - DNA, 2460 bp, synthetic construct
  misc_feature 1..2460: note = Description of Artificial Sequence: Synthetic coding sequence
  source 1..2460: mol_type = other DNA
gggatgctggatgggccaagcgccatgacccggttttgcaatttaattgcaagcgagcccgatatcgctaaggtcccactgtgcattgattcgtccaacttcgctgtgatagaggctgggctcaagtgctgccagggcaagtgcatcgtcaactctattagtcttaaggagggagaagctaccgagactgacaccaagattagagtctgcacacgcgcttatcaccttttagtgaaaaaactgggattcaaccccaacgatattatatttgatccaaacatactgacaatcgggactgggatggaggagcataatttatatgctataaattttatacatgcgacaaaagtgatcaaggagactctccccggtgctcgcatttcgggcggtctgtccaatttgtccttcagcttcagggggatggaggccatcagagaagccatgcacggcgtctttctctaccatgccattaaatctggcatggatatgggcatcgttaacgccggtaacctgccagtttatgacgatatccacaaagagctgctgcaactgtgcgaagatctgatctggaataaggatccggaggccacggagaagctcctccgatatgcccagactcagggaacagggggaaagaaggtgatccagacagatgaatggaggaacgggccagtagaggaacggctcgaatatgccctggtgaagggcattgagaagcatatcatcgaggacactgaggaagcacggctgaaccagaaaaaatatcctagacctctgaatatcatagagggacccctgatgaacggcatgaaaatcgtgggagacctgttcggcgctggcaagatgttcctcccccaggtcattaagtccgccagggtaatgaagaaagcagtaggtcacctgattccgttcatggagaaggagagagaagagaccagagtactcaatggcacggttgaagaggaagatccgtaccagggaacgattgtgctggctaccgttaaaggggatgttcatgatatcggtaaaaatattgtgggtgtcgtgctgggctgtaacaacttccgggtcattgacctgggagtgatgaccccttgtgacaagattctgaaagcagctctggaccacaaagctgatattataggtttgagtggcctgattacgccctccttggacgagatgattttcgtggctaaagaaatggagcgtttggccatccgcatccctttactgatagggggagcaactacctccaagacccacaccgccgtaaaaattgcgccacgatacagcgcgccagtgatccatgtgttggatgcatccaagagcgtggtggtttgttctcaactgctcgatgagaacttaaaagatgagtacttcgaggaaataatggaggagtatgaagatattcggcaagaccactatgagagtctgaaagaaaggcgatacctgccattgtctcaagcacgcaagtcaggcttccaaatggactggctctccgagccccaccccgtgaagcccacgtttatcggcacccaggtgtttgaagactatgacttgcaaaagctcgtagactatatcgactggaagcctttttttgacgtgtggcaactgagaggaaagtaccccaaccggggattcccgaagatttttaatgacaaaacagttggcggtgaggcccgaaaggtctatgacgacgcccacaatatgttgaacacactgatcagccagaaaaaacttagagcgaggggagttgtcggcttttggcctgcccagtcaatccaagatgacatacatctttacgccgaagccgctgttccgcaggccgcagagcctattgccactttctatggccttagacagcaagctgagaaagacagcgcaagtactgaaccttactattgccttagcgacttcatcgcccctctgcatagtggcattcgggattatctcgggctcttcgctgtggcttgcttcggggttgaggagctgtccaaggcttacgaagatgacggagatgactatagtagtatcatggtgaaagcactgggcgaccgactggcggaggctttcgccgaagagttgcatgaacgggtgcggcgtgaactgtgggcatactgcgggtccgaacagcttgacgttgcggatttgcgacgcctgcgctataaaggcataagaccagcgccagggtacccaagccaacctgaccataccgaaaagctgacaatgtggagacttgccgatatagagcagtcgaccggtatacggctgaccgagtccctagccatggcccctgcatctgccgtttccggtctatacttctccaacctgaagagtaaatattttgccgtaggcaagatcagcaaagatcaggtcgaggactacgcactgaggaaaaatatctccgttgccgaagtggagaagtggctggggcctattctaggctacgatacggattag

SEQ ID NO: 212785 - DNA, 3798 bp, synthetic construct
  misc_feature 1..3798: note = Description of Artificial Sequence: Synthetic coding sequence
  source 1..3798: mol_type = other DNA
atgtctcctgctctgcaagacctgtcccagcccgaagggttgaagaaaacccttcgcgatgagataaacgccatcctccagaagcgaataatggtgctagatggaggcatgggaactatgatacagagagagaaacttaatgaggagcattttcgcggtcaggagtttaaggaccacgctagaccactgaaaggcaacaatgatatcctgtcgatcacacagccagacgtgatttaccagattcataaagagtaccttttggccggagccgacatcatagagactaataccttctcaagcaccagcatcgcccaagctgattatggactggaacacctcgcctatcgcatgaatatgtgctccgcgggtgtcgcccgaaaagcggctgaggaggtcacgttacagactggcattaaaaggttcgttgcaggagcactcgggcctaccaacaaaactctgtctgtgtctccttccgtggagcggccagactataggaacatcacctttgatgagctggtagaggcttaccaggaacaggccaaaggattactggatggaggcgttgacatcctgctgatcgagaccattttcgatacagccaatgccaaagcagccctgtttgcactgcagaacctgttcgaggaaaagtatgctcctcggccaatcttcatcagcgggacgattgtcgataaatccggccgtaccctgagcggccagacaggagagggctttgtgatcagcgtctctcatggcgagcctctatgtattgggctgaattgtgcgctaggcgcagctgagatgaggccttttattgagattatcgggaaatgtacaaccgcctacgtgctctgctaccctaatgccggattgcccaacaccttcggtgactatgacgagaccccaagcatgatggccaagcatctaaaggatttcgcaatggacggactggtcaatattgtcgggggatgctgcggcagcacgcctgaccacattcgggaaattgcggaggccgtgaaaaactgcaaacccagggttccccctgcaaccgccttcgaaggacacatgttgcttagcggtctggaaccctttaggattggtccctacaccaattttgtgaatatcggggagcgctgtaacgtggcagggagtagaaaatttgcaaaactgatcatggcgggaaactatgaagaagcactgtgcgtggccaaagtgcaggtggaaatgggcgcacaggtgcttgacgtcaacatggacgacgggatgctcgacgggccttccgcaatgactcgcttctgcaacctgatagcctccgagccagacatagcgaaagtgcccctctgtattgactccagtaatttcgccgtcatcgaagcagggcttaaatgttgccagggaaaatgtattgttaattccattagtttgaaagagggggaggacgacttcctcgaaaaagccaggaagatcaagaaatatggcgcagcgatggtagtaatggcatttgacgaagaaggccaggcaactgaaaccgacactaaaattcgcgtgtgcactagggcttatcatctgctggtcaagaaattagggttcaatccaaatgatattattttcgacccaaacatcctgactatcggcaccgggatggaagaacacaacctttatgcgatcaatttcatccatgcaacaaaagttatcaaggaaacgctgccgggagctaggatcagtggtggcctctccaaccttagcttttccttccggggaatggaggccataagagaggctatgcatggcgtcttcctttaccatgccatcaaaagcgggatggacatgggcatcgtcaacgcaggcaaccttcccgtgtatgacgacatccacaaggagctgctgcagctctgtgaggacctgatctggaacaaagatcccgaggctacagagaaactccttagatatgcgcaaacccaggggaccgggggtaagaaggtcatccagactgacgaatggcgcaacggccctgtggaggagcgattggagtacgctctcgtaaagggcatcgaaaaacacatcatagaggatactgaagaagctcgcctgaatcagaagaagtaccctcgaccactgaacattatcgaaggtccattgatgaatggcatgaagattgtaggtgatttgtttggggctggcaaaatgtttctcccccaggtcatcaagagcgcgagggtgatgaagaaggctgtgggccatctgatccctttcatggaaaaagagcgggaggagacccgcgtacttaacgggactgtcgaggaggaggacccgtatcaaggcaccatcgtgctggctacagtcaaaggagatgtgcatgatatcggaaaaaatatcgtcggtgtcgtgctaggatgtaataactttagggtcatcgatcttggagtgatgacaccgtgcgataaaatactcaaagcagcactagatcacaaggcagacattattggtctgtctggcctgattacgccttcactcgacgaaatgattttcgttgccaaagagatggagaggctggcaattcgcatcccactcttaataggcggtgctaccactagcaaaactcataccgccgttaaaattgctccacgttactccgcacccgtcatccatgtcctggatgccagcaagagcgtggtagtctgtagccagctcctggacgaaaaccttaaggacgagtatttcgaagaaataatggaggagtacgaggacattagacaggatcattacgagtccttgaaagaacgtagatatctaccgctcagccaggcccgtaagagcggcttccagatggattggctgtccgaacctcatcctgtcaagcctactttcattggaacccaagtcttcgaggattatgatcttcagaagctggtggactatatcgattggaagcctttctttgatgtgtggcagctcaggggaaagtaccctaaccgtgggtttccaaaaatcttcaatgacaagaccgttggcggagaagcccgtaaagtgtacgatgacgcacataatatgctgaatactctgatctcccagaagaaattgagggccagaggagttgtaggtttctggccagctcaatctatccaggacgacatccacctatacgccgaggccgctgtgcctcaagcagcagaacccattgctacgttttatggtctgcgccagcaggccgaaaaagactcagcttccactgagccctattactgcttgtctgacttcatcgctcccctccacagcggaataagagactaccttgggctgttcgctgtggcttgtttcggggttgaagaactctctaaagcatacgaggacgatggggatgattattcctccatcatggtgaaggcactgggagaccgcttagcggaagctttcgcagaggaactccacgagcgagtgaggcgagagctctgggcatattgtggctccgaacagctcgacgtagcggaccttcggagacttcgttacaaagggataagacccgctccgggatatcccagccagcccgatcatacagaaaagctaacaatgtggagactcgcagatatcgaacaatccacaggcatccgacttacagaatccctggccatggcccctgcttctgcggtgtccggcctctatttcagcaatttgaagtccaagtactttgccgtaggcaaaattagcaaggatcaggtggaggattacgccctgaggaagaatatcagcgtcgcagaggtagagaagtggttggggcctatactgggttacgacactgactag

SEQ ID NO: 212786 - DNA, 3357 bp, synthetic construct
  misc_feature 1..3357: note = Description of Artificial Sequence: Synthetic coding sequence
  source 1..3357: mol_type = other DNA
atgtcaccagctctgcaggatctgtcacaacccgagggcctgaaaaagacactgagagatgagattaatgctatacttcagaagaggatcatggtgctcgacgggggaatggggacgatgattcagcgagagaagctaaatgaagaacacttccggggacaggagtttaaggaccacgcaagacctttaaagggaaataacgacatcttgtcaatcacacaacctgacgtcatctaccagatccacaaagagtatttgctagctggggcagatattattgagaccaacactttttcttcaactagcatagcccaggccgattacggacttgagcatttggcctacagaatgaatatgtgctctgcaggagtggccagaaaggccgcagaagaggtaacactgcagacaggaatcaaacgattcgtggccggagcccttggccctacaaataaaacgttgtctgtcagcccatcagtagagcggccagattaccggaacattactttcgatgagctagtcgaggcttatcaggagcaggccaaggggctgctagacggtggggtcgatatactacttatagaaactatttttgatacagcaaacgcaaaggccgcactcttcgcgctgcaaaacctctttgaagagaagtatgcacccagacctatcttcatcagcggcaccatcgtggacaaatcaggacggacactgagtggacagacaggagaaggctttgtgatttcagtgagtcacggcgaaccactttgtataggcctgaattgtgctctcggtgcagccgagatgcgccctttcatcgagattatcgggaagtgcacaaccgcatatgtcctatgctaccccaatgcgggattgcccaacacattcggcgactatgatgagacccctagcatgatggccaagcatttgaaagatttcgctatggatggtttggtgaacattgtcggtgggtgctgcggcagcacgcccgaccacatcagagagattgccgaggctgtaaaaaattgcaagccgcgagtaccacctgctaccgcctttgaaggacacatgttgctcagcggattagaaccgtttcgtatcggtccttacactaacttcgtgaatataggagagcggtgtaacgtcgccggatctcggaagtttgcaaagctcattatggctggcaactacgaggaggccctctgcgttgctaaggttcaggtggagatgggggcacaggttctagatgtcaacatggacgacggcatgttagatggcccatctgccatgactaggttttgcaatcttatcgcttctgagccggacatcgcaaaggtaccactatgcatcgactccagtaacttcgcagtgattgaagcagggctcaagtgttgtcaagggaagtgtatcgtcaactctatttccctcaaagaaggtgaggacgactttctggaaaaggctagaaagatcaaaaaatacggtgctgcaatggtggttatggcgttcgatgaggaaggacagacacagggtacaggagggaagaaggtgattcaaactgacgaatggcgaaatggacccgttgaggagcggttagagtacgccttggtgaagggcattgagaaacacattatcgaggacaccgaagaagccaggttgaatcagaagaaatatccgagaccactgaatattatcgaaggccctctaatgaacggaatgaaaattgtgggtgatctcttcggagctggtaaaatgtttctgccccaggtgattaagtccgcgagagtgatgaagaaagcagttgggcacctaatcccattcatggagaaggagagggaagagacaagggtgctcaatgggacagtcgaggaggaagatccctatcaggggaccatagtactcgccacagtaaaaggggatgtgcacgatattggaaagaacatcgttggcgtggtgctggggtgcaacaattttcgcgtgatagacctgggcgtgatgacaccttgtgataagatcctgaaggccgcattggatcataaggccgacataattggcctctctgggcttatcactccatccctggatgaaatgatctttgtggctaaggagatggaacggctggctatccgaatccccctactaattgggggagccacgacctctaagactcatacagccgtgaagattgcaccaagatattcagcccctgttatccatgttcttgacgccagcaagtctgtcgtggtgtgttctcagctacttgacgagaacctgaaagatgagtattttgaggagatcatggaggaatacgaggatattagacaggatcactacgagtcgctgaaggaaagaaggtatttaccactaagccaggccaggaaatcagggttccaaatggactggctgtctgaacctcatcctgtaaagccgacttttattggcacccaagtcttcgaggattacgatctacaaaagcttgttgactacatcgactggaagcctttctttgatgtctggcaactgagaggcaagtatccaaaccgcggttttcctaagatcttcaatgacaagacggtcggcggagaagctaggaaagtttacgatgatgcgcacaacatgctaaataccctaatctcccaaaagaagcttagggcacggggtgtcgtgggattttggcccgctcagagcatccaggacgatattcacctctacgccgaggccgctgtgccgcaggccgcagagcctatcgctacattctacggcctgagacagcaggccgaaaaggacagtgcaagcacagagccatactactgtctttcagatttcattgcgccactccacagcggaatccgcgattatctgggtctttttgctgtcgcctgtttcggagtggaggagctgagtaaagcctatgaagacgatggggatgattactcatcaatcatggtaaaggcactgggggatagactcgcggaagccttcgctgaggaactgcacgaacgagtgcggcgagagctctgggcgtactgcggctcagaacagctggatgtagccgatcttcgccgtctccgatataagggaattaggccagcaccaggttatcccagccagccggaccataccgagaaactgaccatgtggagattagccgatattgagcagtctactgggatcaggctcacggaatcactggccatggcccctgcctcggctgtgagcggcctgtactttagtaatcttaaatctaagtacttcgctgtgggtaaaatctctaaggatcaggtggaggattatgctctgcgtaagaatatctccgtggccgaggtcgagaaatgcatgagcgtgtaccgtaaaataggggagtag

SEQ ID NO: 212787 - DNA, 690 bp, synthetic construct
  misc_feature 1..690: note = Description of Artificial Sequence: Synthetic coding sequence
  source 1..690: mol_type = other DNA
atgtcagccggtttgcgagctgggtgtcacgtggttctgttatgccgcttctccctcggctcattctcggttccaagtcgcgatagtgcttccggacgtgcttgtcttgcggcacgccctacccccagaactggaagggtacccggaaaaaaggccagggcccctgctgtggcggctccctcccccgagcggggtccacgcgcactgagagcattcggggtgcgctcccccccagcaacccgagctaacggcagaaggcagaaaaccagggccctgtgcggcaggttggcctggcgctggttggcctggcctttggcggtggtaacctgtggtgaacatgtgttcagcgcggctccttcagcccagggcggagactcgacaacatgtcatcctagaagtaaaacttgtagaaatccagagtatcttcttgcaggcgcagacatcatcgagaccaacaccttcagctccaccagcatagcccaagccgactacgggctggagcacctggcttacaggatgaacatgtgttccgctggggtagccagaaaagcagccgaggaggttacccttcaaacaggcatcaaacggtttgttgcaggcgctcttggcccaactaataagactttgtctgtgtccccatccgtggagagaccagattacaggaatatcaatctacccgtcggtagctag

SEQ ID NO: 212788 - DNA, 3645 bp, synthetic construct
  misc_feature 1..3645: note = Description of Artificial Sequence: Synthetic coding sequence
  source 1..3645: mol_type = other DNA
atgtctcctgccctgcaggatcttagccagccggaaggtttgaaaaagaccctgcgtgatgaaatcaatgcaatccttcagaagcgcattatggttctggacggcggtatgggcacgatgatccagagggagaagttaaatgaagaacattttcgcggtcaggaattcaaagaccatgcccgacccctgaaaggcaacaacgatatcttgagcattacccagccagatgtcatatatcagattcacaaagaatacttgctagctggcgctgatattattgagacgaataccttttcaagcactagcattgcccaggccgattacggacttgagcaccttgcgtaccggatgaatatgtgctcggccggtgtggctaggaaagctgctgaagaggtgactctgcagactgggatcaagagattcgtggctggagctttagggccaactaataagactctgagcgtctctccctccgtggagcggccagactaccgcaatatcacctttgacgagcttgtcgaagcatatcaggagcaggccaaaggtctgcttgacggtggagtggacatactactgatcgaaacgatctttgacaccgccaatgccaaggctgccctcttcgccctacagaacctgttcgaggagaaatatgcgcctcgcccaattttcatctctggcacgattgtggataaatccggacggacactgtccgggcagaccggcgaggggtttgtcataagcgtgagccatggcgagcccctatgtattggccttaattgcgcgttgggcgcagcagaaatgcgcccttttattgaaatcataggaaagtgtacaacggcatacgtgctgtgttatcctaacgctgggctaccaaatactttcggcgattatgatgaaacaccctccatgatggcaaagcacctgaaagatttcgccatggatggacttgtcaatatcgtcggaggctgttgtggatcaacgccagaccatattcgagagatcgcagaggccgtgaaaaattgtaagcccagagtccccccagccaccgcctttgaaggacatatgcttttgtctggcttggagccctttcgtattggtccatacactaattttgtcaacattggcgagagatgtaatgtggcaggttcccggaaatttgccaaactgattatggccggaaactatgaggaagctttgtgcgtagccaaggtgcaagtggagatgggagcccaggtgttggacgttaatatggacgatggaatgctggatggaccctctgccatgacacgattttgtaacttgatagctagtgaacctgacatagctaaagtacctttatgcattgattccagcaatttcgcagtcatcgaggcagggttgaaatgctgtcagggaaaatgcatagtcaatagcatctccctgaaggagggggaggatgacttcctggaaaaggccaggaagatcaaaaaatacggcgctgcgatggtggtaatggccttcgatgaggagggccaggccaccgaaaccgatactaaaatacgagtgtgcacacgtgcttatcatctcctggtaaaaaagctcggattcaaccccaatgacatcatttttgaccccaacattttgaccatcggcaccgggatggaagagcacaatctttatgctattaatttcatccacgcgaccaaagttatcaaggaaactctgccaggggcaaggatcagcggcggactcagcaatttaagctttagtttccgcggaatggaggccattagggaggcaatgcacggggtatttttgtaccatgccattaagagcggaatggatatgggtattgtgaacgctggcaacttgcctgtgtacgacgatattcataaagagctcctgcaattatgcgaagatcttatttggaataaagacccagaggcaacagaaaaactcctcaggtacgcccagacccagggcaccgggggaaagaaagtgatacagactgacgagtggaggaacggtcctgtggaagaacgcctggaatacgccttggtaaaggtcataaagtctgcccgagtcatgaagaaagcagttgggcacctcatcccgtttatggagaaggaaagggaagaaacgcgcgtacttaatggaacagtggaagaagaagatccctaccagggcactattgtgctggccaccgttaaaggtgatgttcatgacattggaaagaatatcgttggtgtggtgctgggttgcaataacttcagagtaatcgatctaggagtcatgaccccctgcgataagattcttaaagctgccctggaccataaagccgacatcattgggttgtcaggcctcataactccatcgctggacgagatgatattcgtggcaaaggagatggaacgcctggctatccgtattcctctattgatcggtggggctacgactagcaagacgcacaccgcagtgaaaatcgcacctagatactccgcgcctgttatccatgtcctcgacgcttcgaagtccgtggtggtgtgtagccaactgctggacgagaatttaaaagatgaatacttcgaagagattatggaagaatatgaggacatacgacaggaccactacgagagtctgaaagagcgcaggtacctgccgctcagtcaggccaggaaatctggctttcagatggattggctcagtgaacctcatcctgtgaagcccacctttattggcacacaggtctttgaggattacgatcttcagaagttggtcgactacatcgattggaaacctttcttcgacgtgtggcagctgagaggaaagtatcccaacagaggcttccccaagatttttaatgataagactgtgggcggtgaagctcgcaaggtgtacgatgatgcacataacatgctgaacactctcatatctcagaagaaattacgggctcgcggagtggtgggtttctggcctgcgcagagcatacaggatgacatccatctttacgccgaagccgctgtccctcaggccgcagagcccatcgccaccttttatggactgcgccaacaggccgagaaggattcagcctccacagagccgtattactgcctttctgattttatcgcaccacttcactctggcatccgggactatttgggcctgttcgcagtggcctgctttggtgtcgaagaattgagtaaagcctacgaagatgacggggatgactatagttcaatcatggtgaaggctcttggagaccggctggccgaggctttcgcagaggagctccacgaacgcgtccgtcgggaactctgggcgtactgtgggagcgaacagctggacgtggctgaccttaggcgccttaggtataagggcattcgcccagctcctggctacccctcacagcctgaccacaccgaaaagctaacaatgtggcgcctcgcagacatcgagcagtctactgggatccgcttgacagaaagccttgctatggccccagcctccgcggtctcaggcctatattttagcaacctgaagagcaagtactttgccgtgggtaagatcagtaaggaccaggtggaagactacgccctcagaaagaacatctctgtggcagaagtagaaaagtggctgggtcccattctggggtacgacacagattag

SEQ ID NO: 212789 - DNA, 2178 bp, synthetic construct
  misc_feature 1..2178: note = Description of Artificial Sequence: Synthetic coding sequence
  source 1..2178: mol_type = other DNA
atgggcgcagcatcagtccgggcaggagcgaggttagtcgaagtggcgttatgcagttttaccgtgacctgcctcgaggttatgagaaggtttctgctgctgtacgccacgcaacaaggccaggctaaagctatcgctgaggagatctgtgagcaggcagtcgtgcacgggttcagcgctgatctgcactgcattagtgagagtgacaagtatgatttaaaaacagaaaccgcaccacttgtggtggttgtctccacaaccggcactggcgatcccccagacactgctagaaaattcgtcaaggagattcagaaccaaactctgccagtcgatttcttcgcccacctccggtacgggctgttggggctgggcgattctgagtatacatacttctgtaacggtggcaaaattatcgacaagcggctccaggagctgggggcaaggcacttttatgatacgggccacgcagacgattgcgttggtctggagctggtggtagagccctggatcgcagggctttggcccgcactgagaaaacactttagatcatctcgcggacaggaggagattagcggggcacttcccgtcgcatccccagcctccagccgcaccgatctggtgaaatccgaacttctccatatagagtcccaggtggagctactcagattcgatgattctggtcgcaaggactcggaggtcctcaaacaaaacgcagttaactctaaccagtcaaatgtggttatcgaggatttcgagagctcgctgacacgtagcgttccccctctgtctcaggcatcactgaacatcccaggccttcctcccgagtatctccaggttcatctccaggaaagcctggggcaggaggagagtcaggtgtccgtaacttccgcagacccagtgttccaggtgcccattagcaaggctgtgcagctgactactaacgatgcaattaaaaccactttgctcgtggagcttgacataagcaacaccgactttagctaccagccaggggacgccttcagtgtgatttgcccaaactctgactcagaagtgcagagcttgctgcagaggcttcaactggaggataagcgagagcattgcgtgctgctgaagattaaggcagatacaaaaaaaaaaggagctactctgccccagcacatccccgctggctgtagcttacaatttatttttacctggtgtctcgaaatccgcgcaatcccgaaaaaggcgttcctccgggcactggtggactacacaagtgatagcgctgagaagcggaggctgcaggaattgtgttccaagcagggggcagccgattacagcaggttcgtccgcgatgcttgcgcgtgcttattagaccttttgctagccttcccgtcttgccagcctcccctatcgctcttattagagcacctacccaagctgcaacccagaccatacagctgcgcaagcagctccctgtttcatcctgggaagctccactttgtgtttaacattgtagagtttctatctactgcaacaaccgaggtgctccgcaaaggcgtttgtacaggttggctagcgctgcttgtggcctcggtccttcaacctaatattcatgcctcgcatgaagatagtgggaaagcgttggcaccaaagatctcgatctcacccaggacaactaacagtttccatctgcccgatgatcccagcattccaattatcatggtgggaccgggaactggtattgcacccttcattggctttttgcagcaccgggagaaattgcaggaacagcatcctgatggtaatttcggtgctatgtggctgttcttcggatgtcggcacaaagaccgggactacctgttccggaaggagctgaggcacttccttaagcacggaattttgacacacctcaaggtttccttctcccgagacgcccctgtgggagaagaggaggcacccgctaagtacgtgcaagataacatacagttgcacggccagcaagtggcacggatcttgctacaggagaacggacatatctatgtgtgcggtgatgccaagaacatggcaaaagacgttcacgatgctctggttcagatcatttccaaggaggtgggcgtggaaaaattggaagcaatgaaaaccctcgccactctgaaagaggagaaaagatacctgcaagatatttggtcttag

SEQ ID NO: 212790 - DNA, 177 bp, synthetic construct
  misc_feature 1..177: note = Description of Artificial Sequence: Synthetic coding sequence
  source 1..177: mol_type = other DNA
atgaggcggttcctactgttgtatgccactcagcagggccaggctaaggccatcgctgaagaaatctgtgaacaggctgtagtccatggcttttccgccgatcttcactgcatctctgaaagcgataaggttagcgtgattcagaatacacctacattcgccatggggggaagatag

SEQ ID NO: 212791 - DNA, 2097 bp, synthetic construct
  misc_feature 1..2097: note = Description of Artificial Sequence: Synthetic coding sequence
  source 1..2097: mol_type = other DNA
atgcgacgattcctgctgctgtacgcgacccagcagggacaggccaaagctatcgccgaggaaatatgtgagcaagctgtcgtccatgggttttcagcggacctgcactgcatctcagaatctgacaagtacgacctgaagaccgagaccgctcccctcgtggtggttgtatccactactgggacgggcgaccccccagacaccgctcgaaagtttgtgaaggagatccagaatcagacgctacccgtggatttctttgctcacctgcgatacggcctcctgggcttgggcgacagtgaatatacttatttctgtaacggagggaagatcatcgacaaacgtttgcaggagctgggggcaagacacttctacgacactggacatgccgacgactgcgtgggtctcgaactggtggtggagccatggattgccggattatggcccgcactcaggaaacacttccgttcgtcgcgtgggcaggaagagattagcggggctttacccgtcgcttccccggctagttcccgtacagatttagtgaagtcagagctcttgcatatcgaaagtcaagttgagctactgagatttgacgatagtggtcgaaaggactccgaagttctaaaacagaacgcagtgaactccaaccaaagtaatgtcgtgatcgaagacttcgagtcctcgcttactcgtagcgtgccacctctatcccaggcctccctgaatataccagggctgccacccgaatacctgcaggtccacttacaggaatctctgggacaagaagaatcccaagtatcggtgaccagcgcagaccctgtgtttcaggtgcccatttctaaggcagttcagctgacaaccaatgatgcgataaagaccacccttctcgtggaactcgacatctcgaatactgacttctcctatcagccaggtgacgctttctccgtgatctgccccaacagcgattcagaggtgcagagcctcctccagcgactgcagcttgaagataagcgcgagcactgcgtcctgctcaagattaaagccgataccaagaaaaaaggcgctacactgcctcagcatatccccgctggctgcagcctgcagtttatcttcacatggtgcttggaaatcagagccatccctaaaaaggcgtttctccgcgctttggtagattacacaagcgattctgcagagaaaaggaggctgcaggagctttgtagtaagcagggagctgccgactatagccgttttgtgcgggatgcttgcgcctgcctgctcgatctgctgcttgccttccccagttgtcagccaccgctgtctctgctcctcgagcatttgcctaagctccagcctcggccttacagctgcgcttcatccagtcttttccaccctgggaaactgcacttcgtcttcaacatcgtcgaatttctgtcaacagccaccactgaagtgctgcgtaagggagtgtgtaccgggtggctggcgttgctggttgcctcagtgctgcaacccaatatccatgcttcccatgaggacagcgggaaagctctcgctcctaagataagcattagccctagaaccacaaacagcttccacctacccgatgacccctccatcccaatcattatggttgggcctggaacagggattgctccctttattggctttctacagcacagagagaagcttcaggagcagcatcccgatggcaactttggtgccatgtggctgttcttcggctgtcgacataaagacagagattacctgtttaggaaggaactgaggcactttttgaaacacggaatactgactcaccttaaagttagcttttccagagatgctcctgtgggtgaggaagaggcgcctgcaaaatacgtgcaagataacatacagcttcacgggcagcaggtggccaggatcctgcttcaggaaaatggacatatctacgtgtgcggagatgcaaaaaatatggccaaagacgtgcatgacgccctggtccagattattagcaaagaagtcggcgtagagaaattagaagccatgaaaacccttgccacactgaaagaggaaaagcgctacttgcaggatatctggagctag

SEQ ID NO: 212792 - DNA, 471 bp, synthetic construct
  misc_feature 1..471: note = Description of Artificial Sequence: Synthetic coding sequence
  source 1..471: mol_type = other DNA
atgaggaggtttttgcttctctatgccacccaacaggggcaggctaaagcgattgcagaggagatatgcgaacaggcagttgtgcacggcttctcagccgacctccactgtatttcagaatcggataagtacgatctgaagaccgaaaccgccccactggtggtcgtggtcagtacaaccggcacaggggaccctccggatacggctaggaagtttgtcaaagagattcagaatcagacactacccgtggacttttttgcgcacttgcgttacggtcttctggggttaggggattctgaatatacctacttctgcaatgggggaaagataattgacaagcggctgcaggaactgggagcccgacacttttatgacaccgggcacgcagacgattgcgtggggcttgagttggtggtggaaccatggatagccggtctgtggcctgcgctgcgaaaacactttcgatcttag

SEQ ID NO: 212793 - DNA, 126 bp, synthetic construct
  misc_feature 1..126: note = Description of Artificial Sequence: Synthetic coding sequence
  source 1..126: mol_type = other DNA
atgcgcagattcctcttgctgtacgcgacgcagcaaggccaggcaaaggccattgcggaagaaatttgcgagcaagcggtggtccatggattctcagctgatctccattgcatcagcgagagctag

SEQ ID NO: 212794 - DNA, 339 bp, synthetic construct
  misc_feature 1..339: note = Description of Artificial Sequence: Synthetic coding sequence
  source 1..339: mol_type = other DNA
atgcggaggttcctcctcctctacgccacacaacaggggcaggccaaggcgatcgccgaagaaatctgtgaacaggcagtcgtgcatggcttttcagcagaccttcactgcatctccgaatctgacaaatatgaccttaaaaccgagaccgcgcctctggtggtggtcgtcagtactacaggcacaggcgacccgcctgatacggcacgcaaattcgtcaaggagattcaaaaccagacactgcccgttgacttcttcgctcacctccggtatggtctccttggcctgggcgactccgaatatacgtacttctgcaatggtggcaagatcattgactag

SEQ ID NO: 212795 - DNA, 249 bp, synthetic construct
  misc_feature 1..249: note = Description of Artificial Sequence: Synthetic coding sequence
  source 1..249: mol_type = other DNA
atgctttgggatcctgcgctcccgcgtctggcagtctacgctagctgcttgttctttagctgtctcgatgctcacgaggggcctgtccatggtcccaggggcagaggcgagggcggtcgcggtagtgaacgacagcgtgttagaccaggcggagggggtggcgctggatccgtgcacattcatctggaagaggaggacggtgccgaggatcaagaccaccgcgatgaagactggataactaaaaagtag

SEQ ID NO: 212796 - DNA, 1647 bp, synthetic construct
  misc_feature 1..1647: note = Description of Artificial Sequence: Synthetic coding sequence
  source 1..1647: mol_type = other DNA
atgactatggccgctgccgcagtcgtagcgcgtggggcaggggctagggccgctactgctgcagcactcagagggggatgtggtacggcagcacggggtcgcccttgtgcagggccagccaggcctttgtgcactgccccagggacggcaccggacatgaagcgatacctctgggaaaggtatcgggaagcaaaaagaagtacggaagaattagtgccttcaatcatgtccaatttgctgaacccggatgctatatttagcaataatgagatgtcactttctgatatagaaatttacggattcgactatgactataccttagttttttactccaagcatttgcataccctgatctttaatgcggcacgagacctcctcatcaatgaacatagatacccagcggagatccgcaagtacgagtatgatcccaattttgccattcgaggcttgcactatgacgtgcagcgggctgtgctcatgaaaatcgacgcattccactacatacagctcggcaccgtgtacagggggctgtctgtcgttcccgacgaggaggtgatcgaaatgtacgaaggctcccacgtgcctctggaacaaatgagcgacttttatggaaagtcctcccacgggaataccatgaaacagttcatggacatattttcactgccagagatgaccctgttgagctgtgtaaacgagtacttcctgaaaaataatattgactacgaacctgtgcacttgtacaaggatgtgaaggactcaattcgcgatgtgcatattaaggggattatgtacagggcaatcgaagctgatatcgagaagtatatttgttatgcagagcagacccgggcagttttggccaaactcgccgatcacggcaagaaaatgtttctgatcaccaacagtcccagcagtttcgtggataaaggcatgtcatatatagttggtaaggattggagggacctctttgatgttgtgatcgtgcaggcagagaagcctaacttcttcaacgacaagcgacgaccatttcgcaagatgaacgagaagggagtgctgctgtgggacaaaatacataagctccagaaaggacaaatctataagcaggggaacctttacgagtttctgaagttaaccggctggaggggctctagggttctctattttggtgaccacatctactcggacctagctgatctgaccctgaaacacggctggaggactggcgcaataattcccgaactgcgctccgagcttaagattatgaacaccgagcagtatatccagactatgacttggctccagacgctgactggcttgttggagcagatgcaggtccacagagacgccgaatctcagctggtcctgcaggagtggaaaaaggaacgcaaggaaatgagggagatgacaaagtccttcttcaacgcacagttcggctccctgtttagaaccgatcaaaacccgacttacttcctccgtaggttgtctagattcgcagatatctacatggcctcgctgtcttgtctgctcaattatgacgtctcacatacgttctatccgagaaggacccccctccaacacgaactgccagcatggtctgagagaccacctacgtttggaaccccgctgctgcaagaagcccaggccaagtag

SEQ ID NO: 212797 - DNA, 1686 bp, synthetic construct
  misc_feature 1..1686: note = Description of Artificial Sequence: Synthetic coding sequence
  source 1..1686: mol_type = other DNA
atgagcactagctggagcgaccggctgcagaacgctgctgatatgccagccaatatggacaagcacgcgcttaagaagtacagaagagaggcctatcatagggtgttcgtgaaccgctctcttgctatggaaaaaataaaatgcttcggcttcgatatggactacaccctggccgtgtacaagagccctgagtacgagtctctcggattcgagttgacagtagagagactcgtgtctataggttatcctcaagagttgctgtcattcgcctacgactccacctttccgactagaggactggtcttcgataccctgtatggaaatctgctcaaggtcgacgcctatggcaacctgctagtgtgcgcccacggatttaatttcatccgcggacctgagacccgtgagcagtacccaaacaagttcattcagcgagacgacacagagcgcttctatattctgaatactctgtttaacctcccagagacatacttattagcctgtttggtggactttttcacaaactgtccgagatacacaagctgtgaaaccgggttcaaggacggagatttgttcatgtcatacaggagcatgttccaggacgtaagggatgccgtagactgggtgcattataagggaagcctgaaagagaagaccgttgagaatctggaaaaatatgtcgtgaaggatggtaaattgcccctgctgctttccaggatgaaggaagtgggcaaagtgtttcttgcaaccaacagtgactacaaatacacagataagatcatgacctatctttttgactttccgcacggtcctaagccaggttcttcgcacagaccatggcagagctacttcgatcttatcctggtcgacgccagaaagcctctcttcttcggagagggaactgtgctaagacaggtggacacaaagacaggtaagctgaaaattggaacgtacaccggcccactgcagcacggcatcgtatattcggggggttcatccgacactatttgcgacctgctcggggctaagggcaaggacatcttgtacattggggatcacatcttcggagacatccttaagtccaaaaagaggcaggggtggagaacttttttagttattcctgaattggctcaagagcttcatgtgtggaccgataagtcctcattattcgaagaattacagtctttggacatattcctggccgaactctataaacatctggattcctctagcaacgagcgcccagatatctcatccatccaacgccgtatcaagaaggtgacgcatgacatggatatgtgttatggaatgatgggcagcctgttccgcagcggatcccggcagactttgtttgccagtcaggtgatgcgatacgcagacctgtatgccgcttcctttatcaacctcctctactaccctttcagttatcttttcagggccgctcatgtgcttatgccacacgagtccaccgtggaacacacacacgtggacatcaatgagatggaatccccactcgctaccagaaaccgcacatcagttgactttaaggatacagattacaagcgccatcagctcactagaagtatctctgagatcaagccccctaatctgttcccactggcaccccaggaaatcacgcactgccacgacgaagacgatgatgaagaagaggaagaggaggaggagtag

SEQ ID NO: 212798 - DNA, 600 bp, synthetic construct
  misc_feature 1..600: note = Description of Artificial Sequence: Synthetic coding sequence
  source 1..600: mol_type = other DNA
atggattatactctggccgtgtacaaatcaccagagtacgaatctctggggttcgagctgacagtcgagcgtctggtttcaatcggttatccccaggagctactgtctttcgcctacgacagtacctttcccacccgaggcctagtgttcgatacgctgtacggcaatctcttgaaggtggatgcttatggcaatcttctggtctgtgcgcatggcttcaactttatccgcggttctcaggtggccgtgcagaaaagaccagaaactcgcgaacaatacccaaacaagtttatccaacgcgatgacacagagcgattttatatcctgaacacccttttcaatctcccagaaacgtatctgctggcctgcttagtggatttttttaccaactgcccccgttatacttcctgcgaaaccggattcaaggatggagatctgtttatgagctatcgaagcatgtttcaggatgtcagggacgctgttgactgggtgcactataaaggtagcctgaaagagaaaactgttgagaatctggagaagtacgtagttaaggattccaagtccagccggattcagtacttcctcaaagtgctctggtag

SEQ ID NO: 212799 - DNA, 1686 bp, synthetic construct
  misc_feature 1..1686: note = Description of Artificial Sequence: Synthetic coding sequence
  source 1..1686: mol_type = other DNA
atgagcacatcttggagcgatcgcctgcagaacgcagccgacatgccggcaaatatggacaaacacgcattgaagaaatatcggagggaagcgtatcaccgggtctttgtaaacagaagcctggcaatggagaaaattaaatgtttcggcttcgacatggattatacactggccgtgtacaaaagtccagagtatgaatccctgggcttcgagcttactgtcgagcggttggtgtcaatcggttatcctcaggagctgctgagctttgcatatgattctaccttcccaactcgagggctggtttttgataccttgtacggcaacctgctcaaagtcgacgcctacggaaacttgctggtgtgcgcccacgggttcaattttatacggggacctgaaacgagggagcagtaccctaacaaatttattcagagggacgacacagaaaggttctacattttgaacacactctttaaccttcctgaaacctacctgctcgcctgcctggttgactttttcaccaattgccccagatatacctcatgcgagacgggctttaaggatggggacctgtttatgagctacaggagtatgttccaggacgtgagagacgccgtggactgggtccactacaaggggtcccttaaagagaaaacagtggaaaatctggagaagtatgtcgttaaggatggcaaactgcctctcctgctgtcccggatgaaagaggtggggaaggtctttctggccacgaatagcgactacaagtatacggataagatcatgacctatctcttcgacttcccacatggccctaagcctgggagctctcataggccctggcagagctactttgacctgatcttagtcgacgcgcgaaagccacttttttttggggaggggactgtgctccgacaagtagatactaagactggcaagcttaagataggtacatataccggccctctacaacatggaattgtgtactccggtggctcctccgacaccatctgcgacttgcttggagctaaaggaaaggatatattatatattggcgatcacatttttggtgatatcctaaagagtaaaaagagacaaggctggcggacctttctggtgatccctgagcttgctcaagaactgcatgtgtggaccgacaaatctagcttgttcgaggagcttcagtccctggacatcttcctagctgaactttataaacacctcgatagttcttctaatgaacgcccagatatctcttcaattcagcggaggatcaagaaagtgactcacgacatggacatgtgttacggcatgatgggcagcctgtttcggagtggcagccgacagacgcttttcgcaagccaggtgatgcgatatgccgacctttatgcagcgagcttcatcaatttgctgtactatccattctcatacttgttccgtgcggctcacgtgttgatgcctcacgaatctactgtggagcacacacacgtggacatcaatgaaatggaatcccctctggctacaaggaaccggacctctgtggactttaaggatacggattataagagacatcaactcacacgttccatctctgagatcaagccacctaacttgttcccactggccccacaggagattactcactgccacgatgaagatgatgatgaagaagaggaggaagaagaagagtag

SEQ ID NO: 212800 - DNA, 444 bp, synthetic construct
  misc_feature 1..444: note = Description of Artificial Sequence: Synthetic coding sequence
  source 1..444: mol_type = other DNA
gtgctcaggcaggtcgatacaaagaccggaaagctcaaaatcggtacctacacaggtccactacagcacggaatcgtttacagcgggggttcttcagataccatatgtgacctgctgggcgcaaaaggaaaagatatactgtatatcggtgatcacatctttggtgatattctcaagtccaaaaagaggcaagggtggagaacttttttggtgatccctgaattggcacaggagctgcacgtctggaccgacaaatcatccctattcgaggaattgcagtcgttagatatttttttagctgaactttacaaacacctggatagttcttcaaacgaacggccagatatctcatccattcagaggcgcatcaaaatgccacatgagtctaccgttgaacatacacatgtcgacatcaatgaaatggagtcacctttggcgacatag

SEQ ID NO: 212801 - DNA, 1599 bp, synthetic construct
  misc_feature 1..1599: note = Description of Artificial Sequence: Synthetic coding sequence
  source 1..1599: mol_type = other DNA
atgtccaaagagggagtcttcgtgaatagaagcctggccatggagaagattaagtgcttcggatttgatatggactacactctcgcagtttataaatcgcccgaatacgagtcactgggattcgaactaaccgtggagaggctggtgtccattggctatcctcaggagctgctgtcctttgcctatgatagcacatttcctacccgcggtctcgtatttgacacactctacgggaatctgcttaaagtcgacgcctatggcaaccttctggtgtgtgcccacgggtttaacttcatacggggacccgaaactcgagagcaataccctaacaaattcatccaacgcgacgatactgagcgcttctacatactcaacacgctgtttaatctgcctgaaacgtatctcctggcatgcctggtcgactttttcaccaactgccccagatatacatcgtgcgagactggcttcaaggatggtgatctgttcatgtcttacagatcaatgttccaggacgtacgggatgccgtcgactgggttcactataagggtagtcttaaggagaagaccgtggagaatctggagaaatacgtggtaaaggatgggaaattacctctgttacttagcagaatgaaagaggtcgggaaggtattcctcgctaccaactcagattacaaatacaccgataagatcatgacatatctattcgacttcccccatggcccaaagcccggatcatcccaccggccttggcagtcttattttgacctcatacttgtagacgcaaggaaacccctgtttttcggcgagggaacggtcctgcgccaggtcgacaccaagacagggaagctcaagatcggtacgtacaccgggccactgcagcacggaatcgtgtattcaggcggatctagcgacacaatctgcgacctcttgggtgcaaagggcaaagatattctctatattggagaccatatctttggtgatatcttaaagagcaaaaaacggcagggctggcgtactttcttggtgatccccgaattagctcaggagcttcacgtgtggactgacaagagttcgctttttgaagagctccagagcctggatatttttcttgcagaactttataaacatctggattcatcgagcaatgaaaggccagatatcagtagcatccaaaggcgcattaagaaggtgacacacgatatggacatgtgctacgggatgatggggtctctgtttaggtcaggatcccgccagaccttgtttgcctctcaggtgatgcgttacgccgatttatacgccgcatcttttatcaacttgctgtattatccgttcagctacctctttagggctgcccacgtgctgatgcctcacgagtcaaccgtggagcatacacacgtggatatcaacgaaatggaatctccgttggctacccgaaatcgcacttctgtggatttcaaggacacagattataagcgacaccaattaacaaggtccatttccgaaattaagcctcctaacctgttccctttggctccccaggaaattacacactgccatgatgaggatgatgatgaggaagaggaagaggaagaagagtag

SEQ ID NO: 212802 - DNA, 798 bp, synthetic construct
  misc_feature 1..798: note = Description of Artificial Sequence: Synthetic coding sequence
  source 1..798: mol_type = other DNA
atgagtactagttggagcgaccggctacagaatgcggcagatatgccggctaacatggataaacatgccttgaaaaaatatagaagggaggcataccaccgcgtattcgttaatcggtctttagctatggagaagatcaagtgttttggattcgatatggattacaccctcgccgtttacaaatcgccagaatatgagagcctaggcttcgagttaacagtcgaaagactcgtgagtatcggctatccgcaagagttgctctcttttgcctatgactcaactttccctaccaggggcctcgtgtttgatacactttacgggaacttactgaaagttgacgcatacgggaatctgctagtatgtgcacatggcttcaactttataaggggcagccaggtggccgtacagaagcggcctgagactcgcgagcagtatcctaacaaatttattcaacgggacgacaccgaacggttttacatattgaacaccctgtttaacctgccggaaacttatcttctggcttgcctggttgatttcttcaccaactgcccccgatatacatcatgcgagaccggatttaaagatggggacctgttcatgtcatatcgatcaatgtttcaggacgtgcgggacgccgttgactgggtgcattacaaaggttccctgaaggagaaaaccgtggagaatctggagaagtacgtggtgaaggatggaaagctgcccctgttgttaagtagaatgaaagaggtgggaaaggtctttcttgcaacaaactccgactacaaatacacggactag

SEQ ID NO: 212803 - DNA, 525 bp, synthetic construct
  misc_feature 1..525: note = Description of Artificial Sequence: Synthetic coding sequence
  source 1..525: mol_type = other DNA
gtgtcaataggctatccccaggagctgttgagttttgcctatgatagtacattccccactaggggcttggtctttgacaccctatacggaaacctcctgaaagtggatgcttatgggaatttgctcgtgtgtgctcatggatttaacttcatcagaggttcccaagttgctgtccaaaaacggcctgagacccgggagcaatatccgaacaaatttatccagcgagacgacactgaacggttctacatcctgaacactttatttaatctcccagaaacatacctgctcgcctgcctggttgattttttcaccaactgcccccgatatacttcctgtgaaacagggttcaaggacggtgatctattcatgtcttatcgatcgatgtttcaagacgtcagagacgcagtggattgggtgcattataagggctcactcaaggagaagactgtggaaaaccttgagaaatatgtggtcaaggattctaaaagttctcgtatccaatactttctgaaggttctgtggtag

SEQ ID NO: 212804 - DNA, 1011 bp, synthetic construct
  misc_feature 1..1011: note = Description of Artificial Sequence: Synthetic coding sequence
  source 1..1011: mol_type = other DNA
atgagggctccatcaatggaccgcgctgctgttgccagggtgggcgctgtggcgtccgcctccgtatgtgcccttgtggctggagtcgtccttgctcagtacatcttcacactcaaacgtaagactgggagaaagacaaagatcattgagatgatgcccgaatttcagaaaagttccgtaaggattaaaaatccaacccgtgtggaagaaattatttgcggtctcatcaaaggaggggcagccaagctccaaatcattacggacttcgacatgactctgtcccggtttagctacaaggggaagaggtgccctacgtgtcataacattatcgataactgtaagctggttacagacgaatgcagaaaaaaacttctccaattaaaggaaaaatattatgctatagaagtcgacccagtgttgacagtggaagagaagtatccttacatggttgagtggtacacaaaatctcacggactgctggtgcagcaagcactgccaaaagccaaacttaaggagatagtagccgaatcagatgtgatgctgaaagaggggtacgagaacttcttcgacaagttacagcagcatagcattcctgtattcatcttttccgccggaattggagacgtgttggaggaagttatacgccaggctggcgtgtaccatcctaacgtgaaggttgtgagcaatttcatggacttcgatgagaccggcgtcctcaagggctttaagggagaactgatacatgtgttcaataaacacgacggagcactgaggaatacggaatacttcaaccagctcaaggacaactccaatataatcttgctcggcgacagccagggcgatctgcgtatggccgacggcgtggccaatgtagagcatattctcaagataggatatctgaacgaccgagttgatgagctactggaaaagtacatggatagctatgacattgtcctggttcaggacgagagcctagaagttgcaaattctattctgcaaaagatcttgtag

SEQ ID NO: 212805 - DNA, 858 bp, synthetic construct
  misc_feature 1..858: note = Description of Artificial Sequence: Synthetic coding sequence
  source 1..858: mol_type = other DNA
atgccggagttccagaaatcctccgtacgcatcaaaaaccccaccagagttgaggaaattatatgcggcctcatcaaagggggagccgcaaagctccagatcattacagatttcgatatgacgctgtccagattttcttacaagggaaaacggtgtccaacatgccacaatattattgacaactgcaagttggtgactgatgaatgccggaaaaagctgctgcaactaaaggagaaatattacgcaatcgaggtagatcctgtcctgaccgttgaggagaagtatccttatatggtcgagtggtacacaaagtcccatgggctcctggtgcagcaggccttaccgaaagccaaactgaaagagattgttgcagagtcggacgtgatgctaaaggagggatatgagaatttttttgacaagcttcagcagcattccatcccagtcttcattttcagtgcaggtatcggtgatgtgctcgaggaggttattcggcaggccggagtctaccatcccaatgtgaaagtggtttccaacttcatggatttcgatgaaaccggcgttctcaaaggattcaaaggtgagctgatacacgttttcaacaagcacgatggtgcacttaggaatactgagtatttcaatcagttgaaagataatagcaacataatcctgctaggtgattctcagggcgatctgagaatggctgatggtgtggccaatgtggaacacatcctgaagatcggttatctgaacgaccgagtcgacgagcttcttgagaagtacatggactcctatgacatcgtcttagttcaggacgagtcgctggaggtggccaattcgattcttcaaaagatattgtag

SEQ ID NO: 212806 - DNA, 894 bp, synthetic construct
  misc_feature 1..894: note = Description of Artificial Sequence: Synthetic coding sequence
  source 1..894: mol_type = other DNA
atgacaaaccaggagtctgccgtgcacgttaagatgatgccagagttccagaagagctctgtacgaatcaagaatcccaccagggtggaggagattatttgcgggctcatcaagggtggagccgctaagctccagataatcacggatttcgatatgactctgagtaggttcagctataagggaaaacggtgccccacttgccacaacattatcgacaactgcaaactagtgacagacgagtgcagaaagaagttactccagctaaaggagaagtactacgccatcgaggttgatccggtgctgaccgtggaagaaaagtacccctatatggtcgagtggtataccaagtctcacggcctgttggttcaacaagccctaccgaaggcaaagcttaaagagatcgtggcagagtcggacgttatgttgaaagaagggtatgaaaatttcttcgataaacttcaacagcatagcatacccgttttcattttcagcgccggaataggcgacgtgctggaggaggtcattcgacaggctggtgtgtaccatcctaacgttaaggtcgtgagcaattttatggactttgacgagacaggcgtactgaagggctttaaaggcgagcttattcatgtcttcaataaacatgatggcgctctgcgaaatacggaatactttaaccaattgaaagataatagcaatatcattctcctgggcgatagtcagggagatttgaggatggctgatggggtggccaatgtggagcacattctgaagattgggtatctgaatgaccgggttgacgagctcctagaaaagtatatggatagctacgacatcgtccttgtgcaagacgaatccctcgaggtggctaactcgatactccagaaaatcctttag

SEQ ID NO: 212807 - DNA, 894 bp, synthetic construct
  misc_feature 1..894: note = Description of Artificial Sequence: Synthetic coding sequence
  source 1..894: mol_type = other DNA
atgacaaaccaggagagcgccgtccatgtcaagatgatgcccgaattccagaaatccagcgtgcgcatcaagaatccaacaagagtggaggagataatatgtggccttattaagggcggtgccgctaagctgcagatcataaccgattttgatatgacactgtcccgcttcagctacaagggaaaacggtgtccaacatgccataatatcattgacaattgtaaattggtgactgatgaatgccgcaagaaactcctgcagctcaaggagaagtattatgcaatcgaagtcgacccagtgctcacagtcgaagagaaatatccttacatggtcgagtggtacactaaatcccacgggttgcttgtacaacaggccttgcctaaagccaagcttaaggaaattgtggctgaaagtgatgttatgctaaaagagggttacgaaaatttctttgataagctacagcagcattccattccagtgtttatcttctcggctgggatcggggacgtgcttgaagaagtgataagacaagccggagtctaccacccaaacgtgaaggtagtgagtaactttatggacttcgatgagactggcgttctgaaaggctttaaaggggagctgattcacgtgttcaataagcatgatggggctctgcggaataccgagtacttcaatcaactgaaggataacagcaatatcatattactcggagatagtcagggtgacctgcgtatggccgacggtgtcgctaacgtcgagcatatactgaaaatcggatacctgaacgaccgagtagacgagttactcgaaaaatacatggactcctatgacatagtgttagtacaagacgagtccctggaagtggccaatagcattttgcagaaaatcttatag

SEQ ID NO: 212808 - DNA, 858 bp, synthetic construct
  misc_feature 1..858: note = Description of Artificial Sequence: Synthetic coding sequence
  source 1..858: mol_type = other DNA
atgccagagttccagaaatcgagcgtcaggattaaaaatcccacacgcgtggaagaaataatctgcggacttatcaagggcggagctgcgaagctccaaatcatcaccgactttgacatgactcttagcaggttcagctacaagggcaagcgctgtcccacttgccacaacatcattgacaattgcaagctggtcacagacgaatgtaggaaaaagctccttcagttaaaggaaaaatactacgctattgaagttgatccagtgctcactgtggaggagaaatatccgtacatggtcgaatggtacacaaaatctcacggcctgcttgttcaacaggcgctgcctaaggccaaactaaaggaaatcgtggccgagtcagatgtgatgcttaaggaaggctacgagaacttctttgacaagcttcaacagcattccatccctgtctttattttctctgccggtatcggggacgtgctggaggaagttataagacaggcaggcgtgtatcatccaaatgtgaaggtcgtctctaatttcatggactttgacgagactggcgtactgaaaggctttaaaggggaacttatccacgtgttcaacaaacacgatggcgctctgaggaacaccgagtatttcaatcaactcaaggacaacagcaatatcatactgctcggagatagccagggcgacttaagaatggctgatggcgtggctaatgtggaacacatccttaagattggatacttgaacgatagggtggatgaactgctcgagaagtacatggattcctacgatattgtgctcgtccaggacgagtctcttgaagttgccaactcaatcctacagaaaattctgtag

SEQ ID NO: 212809 - DNA, 129 bp, synthetic construct
  misc_feature 1..129: note = Description of Artificial Sequence: Synthetic coding sequence
  source 1..129: mol_type = other DNA
atgccagaatttcagaagtcctccgtgcgtatcaaaaaccccaccagagtggaggaaatcatttgtggtctgatcaaggggggagcagccaaacttcagatcataacagatttcgatatgactttgtag

SEQ ID NO: 212810 - DNA, 1725 bp, synthetic construct
  misc_feature 1..1725: note = Description of Artificial Sequence: Synthetic coding sequence
  source 1..1725: mol_type = other DNA
atgtgcccacgggcagcccgtgcgccagctaccttgctgctcgccctcggcgctgtgctatggcccgctgccggagcttgggaattgacaatcctccacaccaacgatgtccattcccggcttgaacaaacctctgaggatagctctaagtgcgtgaacgccagtcgatgtatgggtggggtcgctcgcttgttcactaaggtccagcaaatcagaagggctgagcccaacgtgctgcttctcgacgctggagatcaatatcagggtaccatctggtttacagtttacaaaggggctgaagtagcgcatttcatgaatgcactgcgctacgatgctatggccctcgggaatcatgaatttgataacggcgttgagggccttatcgagccgctcctgaaagaagctaagtttccgattctctcagccaacattaaagccaagggacctttagcttcgcagatcagtggactctacctgccttacaaagtcctgccagtgggcgacgaggtggtggggatagtgggttacacaagtaaagagaccccctttttatcaaacccaggtacgaacctggtcttcgaggatgagatcactgctctccagcctgaagtagacaagctgaagaccttgaatgttaataaaataattgctttgggtcatagcgggtttgagatggacaaactgatcgcccagaaagttagaggagtggatgtggtggtgggagggcacagtaatacttttctctatactggaaacccaccctcaaaggaggtccccgctggcaagtatccattcattgttacgagcgacgacggtcgaaaagtacccgtggtgcaggcttacgcttttggaaagtatctcgggtacctgaagattgaattcgatgaacggggtaacgtaatctcaagtcacgggaatccaatcctgctgaactcctcaatacccgaagatcctagtataaaagccgatatcaataaatggagaatcaaactggataactatagtactcaggagctgggtaaaaccatcgtataccttgacggatccagtcaaagctgtagattcagggaatgtaacatgggaaatcttatttgcgatgcaatgattaataacaacttgcgacatacagacgagatgttctggaatcacgtgtccatgtgtatcttgaacggcggaggtattcgatcccctatcgatgagcgcaacaatggtactatcacatgggagaatttggctgcagtgctgcctttcggcggaacatttgatctggtccagctgaagggatccaccctaaagaaagcctttgaacattccgtgcaccggtatggccaatccactggcgaatttttacaggtcggcggaatccacgtggtatatgacctcagtaggaaaccaggcgaccgggtggtcaagctggatgtgctctgtacaaaatgccgcgtgccttcctacgacccattgaaaatggacgaggtctacaaggtgatcctgccaaatttcctggccaacggaggagacgggttccagatgatcaaggatgaactgctgcgacacgatagtggtgaccaggatatcaatgtggtgtccacgtacatatccaagatgaaagtaatatatcctgccgtggagggccgtatcaagttttctacagggtctcattgccacgggagtttttccctgattttcctatcgctgtgggcagttatattcgtgctctaccaatag

SEQ ID NO: 212811 - DNA, 795 bp, synthetic construct
  misc_feature 1..795: note = Description of Artificial Sequence: Synthetic coding sequence
  source 1..795: mol_type = other DNA
atgtgtccacgggcagcaagagcgcctgccaccttgctactcgcattaggcgcagtgctgtggcccgcagccggagcttgggagctgaccattttacacacaaacgacgtacattccagattggaacagacatctgaggattccagcaagtgtgtcaatgcatctaggtgtatgggcggagtcgctaggctgtttaccaaggtgcagcagattaggcgcgcagaacccaacgtcctgctactggacgccggagaccagtatcagggcaccatctggttcacagtgtacaaaggggctgaggtggcacactttatgaatgcgctgcgctacgatgccatggctctgggtaatcatgagttcgacaacggcgtggaaggcctaatcgagcccctccttaaagaagcaaaatttcccattctgagtgctaatataaaggcgaaaggccctctggcttcccagatttcgggcctatacttaccgtacaaagtcctccctgtcggtgatgaggtcgtggggatagtcggctatactagcaaggagacaccgtttctgtccaaccccggaactaacctagtctttgaagacgaaatcaccgcactgcagcccgaggtcgataagttgaagactctgaacgtgaacaaaatcatagccctgggtcacagcggattcgaaatggacaaacttatagcgcagaaagtgcggggtgtcgacgtcgtggtcggtggccattcaaatacattcctttacaccggaaactgttttaagagaattgcttgggcacggatgtcccgctag

SEQ ID NO: 212812 - DNA, 780 bp, synthetic construct
  misc_feature 1..780: note = Description of Artificial Sequence: Synthetic coding sequence
  source 1..780: mol_type = other DNA
atggacaaacttattgctcagaaagtgagaggagtcgatgtagtagtggggggacatagtaacacctttctctatacaggaaatccgccttcaaaagaggtccccgctgggaaatatccgtttatcgtcacaagcgatgacggaagaaaggttccggtcgtgcaggcttatgccttcggtaaatacctgggatatctaaagattgagtttgacgaacggggtaacgttatatcctcccatggcaatcccattttgctgaattcgtctattccagaggatccaagcatcaaggccgacatcaataaatggcggatcaaactcgacaactactcaactcaagagcttggcaaaaccatcgtttacctggatgggagctcacaatcctgccgttttcgcgagtgcaatatgggcaacctgatctgcgacgctatgataaataacaatctgagacacacggatgaaatgttttggaaccacgtcagtatgtgcattctgaacggcggtgggattcgttctccgatagatgaacgcaataatggaacgattacatgggagaacctggccgcagtcctgccattcgggggaacttttgatctggttcagctgaaggggagcacccttaaaaaggcgtttgagcactccgtgcaccggtacggtcaaagtaccggtgagttcttacaggtcggggatctgaaggagtgctgcccaatatgtatcaaccaagacgactcatggaaagagcagcctacagctcagacatacctaaacacgtggttctag

SEQ ID NO: 212813 - DNA, 1575 bp, synthetic construct
  misc_feature 1..1575: note = Description of Artificial Sequence: Synthetic coding sequence
  source 1..1575: mol_type = other DNA
atgtgtcctcgtgcggctagagccccagctaccctgttgctggctctgggagcagtactttggccagctgcgggagcgtgggaactgacaattctccacaccaatgacgtgcactccagactggaacagacgtcagaagatagtagcaaatgcgttaacgcttccaggtgcatgggcggtgtagccagattattcaccaaggttcaacagatccggcgtgctgagcctaatgtgctcttattagacgctggcgaccagtatcagggaacaatctggttcaccgtctacaaaggagccgaggtggcccactttatgaatgcactgcggtatgacgccatggctctgggaaatcatgagttcgacaacggggtggagggcttaattgagcctctactgaaggaggctaagttcccaatcctctcggcaaatataaaggctaaaggacctctggcatcccagatcagtgggttgtacctgccatacaaggtgctcccagtcggcgacgaagtggtcggcatcgttgggtatactagtaaagaaactccgttcttatcaaatcctggtaccaatctggtctttgaggacgaaatcaccgctctgcagccggaagtggataaactgaagacattgaatgtgaataagattattgccctgggtcatagcggattcgaaatggataaattaatcgctcaaaaggtgaggggtgtcgacgttgtggtgggtggacattcaaacacgttcctgtatacagggaacccaccttccaaggaggtcccagcaggaaagtacccttttatcgtgacgagtgacgacgggaggaaggttcccgtagtgcaggcatatgcgtttggaaagtacctcggatatctcaaaatagaatttgacgagcggggtaatgtcatctcctctcacggaaaccctatcttgctgaacagctccatccctgaagacccctcaatcaaggccgacattaataaatggagaatcaaactcgacaattacagcactcaggagctgggaaaaaccattgtgtacttagatggcagtagccaaagctgccggtttcgagagtgcaatatgggaaatctcatctgcgatgctatgatcaataacaacctgcggcacacagatgagatgttctggaaccatgtctccatgtgcatcctgaacggtggtggcatccggtccccaattgacgagaggaacaacggtattcacgtggtatatgatctgtccagaaaaccgggagatagggtggtgaagttggatgtactatgcaccaaatgcagggttccctcttatgacccattgaagatggatgaagtgtataaggtgatcctgcccaactttctggctaacggcggtgacggattccagatgatcaaagacgaactgttacggcacgatagcggagatcaggacatcaacgtagtctccacatacatcagtaagatgaaggtgatctaccctgcagtggaaggccgtatcaaatttagtacaggatcacactgccacgggtcattctctttaatttttctgagtctgtgggctgtcatatttgtgctttaccagtag

SEQ ID NO: 212814 - DNA, 693 bp, synthetic construct
  misc_feature 1..693: note = Description of Artificial Sequence: Synthetic coding sequence
  source 1..693: mol_type = other DNA
tgagacgtggttgtgggtgggcatagtaatacattcctttatacaggtaatcctccatccaaggaggtacccgctggcaagtacccatttatagtcacaagtgacgacggacgcaaggtgccagtcgtgcaggcatacgccttcggcaagtatctggggtaccttaaaatcgagtttgacgagcgcggtaacgtaatcagtagccatggaaatccaatcctgttaaactcaagcattcccgaagatccctccattaaagctgacatcaataagtggcgaatcaaactagataattacagtacacaggagctcggcaaaacaatagtttatctcgatgggagctcacagtcatgtcgattcagagagtgcaacatgggaaaccttatatgcgatgcaatgattaacaataacctgcggcatactgacgagatgttctggaatcatgtgagtatgtgtatcctgaacggagggggtatccgaagcccgatcgatgagaggaataatgggatacatgttgtgtacgacttgagccgcaaacctggtgaccgcgtggtgaaattggacgtgctttgtacaaagtgccgcgtgcccagttatgaccccttgaagatggacgaggtctacaaggtgatcctgcccaattttctggcaaacggcggagacggctttcaaatgatcaaagatgaattgtag

SEQ ID NO: 212815 - DNA, 540 bp, synthetic construct
  misc_feature 1..540: note = Description of Artificial Sequence: Synthetic coding sequence
  source 1..540: mol_type = other DNA
tgaaaccccatccttctgaattcaagcatccctgaagaccccagcataaaggctgacataaataagtggcgcattaagctggataattacagtacgcaagaattaggtaaaaccatcgtgtacctggacggctcgagtcagtcctgccggttcagggagtgcaatatgggaaacttgatctgcgatgccatgataaacaacaatctgcgacataccgatgagatgttctggaaccacgtgagtatgtgcatactgaacggcggtggcattaggagcccaatcgatgaacgcaacaacggcactattacctgggaaaatctggcagctgtgctgcccttcggtgggacattcgacctagtccagctgaagggcagcacccttaagaaggcgttcgaacattcggtgcatcgatacgggcagagtacgggagagtttctgcaggtgggcgacctgaaggaatgctgcccaatttgcatcaaccaggatgatagctggaaggaacagcccactgcccagacttatctgaatacctggttctag

SEQ ID NO: 212816 - DNA, 687 bp, synthetic construct
  misc_feature 1..687: note = Description of Artificial Sequence: Synthetic coding sequence
  source 1..687: mol_type = other DNA
atggtacgctatagtctggaccctgagaatcctactaagagttgtaaatcccggggttcgaatttgagggtgcactttaaaaacacccgtgagacagcccaggctatcaaaggaatgcatattagaaaggcgaccaaatatttgaaggacgtgaccctccagaaacagtgtgttccatttagaaggtacaatggtggcgtcggacgctgcgcccaagccaaacagtgggggtggactcagggcagatggccaaaaaagtccgccgaatttctgctgcacatgctgaaaaatgccgaatctaacgcagaacttaagggcctcgacgtggactctttggttattgagcacattcaggtcaacaaggccccaaaaatgagacgccgaacatacagggcacacgggagaattaacccctacatgtcctcaccctgtcatatcgagatgattttgacagagaaagagcagatagtgccaaagcccgaagaagaagtggctcaaaagaagaagcttcgcagttcctctcttgggaagtggtgtgcgttcctggtgtctagctttcagttttgttccggctccacaaaaaattcatggtcgcatatctataccctgtggtttccgccatccttggtggtgtatggcttacgcaaacagtacaagaaccccatgatccaaactaaggccaaatag

SEQ ID NO: 212817 - DNA, 816 bp, synthetic construct
  misc_feature 1..816: note = Description of Artificial Sequence: Synthetic coding sequence
  source 1..816: mol_type = other DNA
atgtcaccagaaatgggggagctcacccagaccagactgcagaaaatttggatcccccattcctcaggaagtagcaggcttcagcgtagacgtggatcctcaataccccagtttacaaacagtccaactatggtgattatggtcggcttgcctgccagagggaagacttacatatcaaccaagttgacacggtatttaaattggattgggactcctaccaaagataatatggaggctctacaaatacggaaacagtgtgccctcgccgctcttaaggacgtgcataattatctctcacatgaagaaggtcacgtcgccgttttcgacgcaacaaacacaacacgggagcgacgttcattaatactgcagtttgccaaggaacacgggtataaaggggtgtgcgaagaaatgacctacgaagagattcaggaacattaccccgaggagtttgccctccgcgatcaggataagtaccgttacagatatccaaaaggggagtcctatgaggatttagtacagagattggaacccgtcatcatggagttagagagacaggagaatgtgctagtgatttgccaccaggcagtgatgcggtgtttgctggcttattttctggataaaagtagcgacgaactaccttatctgaagtgccccctacacacagtgttgaagttaacccccgtggcttacgggtgtaaggtcgagtcgatttacctcaacgttgaggccgtcaatacccatagagaaaagccagaaaacgtggacatcacgcgggagcccgaagaggcattagacactgtccccgctcattattag

SEQ ID NO: 212818 - DNA, 1416 bp, synthetic construct
  misc_feature 1..1416: note = Description of Artificial Sequence: Synthetic coding sequence
  source 1..1416: mol_type = other DNA
atgtctccggagatgggagaactgactcagacccgtctacagaaaatctggatcccccacagtagcggcagctcacgcttacaaaggaggcgcggttccagtatcccgcagtttacaaactctccaactatggtaattatggtgggtctcccagccagaggtaaaacttatatttccacaaaacttactcggtatttgaactggattggaacacctacaaaagtttttaacctgggtcaatacaggagggaggccgtcagctacaagaattatgaattctttttgccagacaatatggaagccctgcaaataagaaagcagtgcgcgctggccgcattgaaggacgtgcacaattatttgagccatgaggaggggcatgtcgccgtattcgacgcaacaaacacgacgcgtgaaaggcgcagcttgattctgcaatttgccaaggaacatggctataaagtctttttcatcgagagcatttgcaatgaccctggcatcatcgctgagaatatccggcaggtgaaactgggatccccagattatattgactgtgaccgagaaaaagttctggaggatttcctgaaaagaattgaatgttacgaggtgaattaccagccactggacgaggagctcgatagtcacctctcctatatcaagatcttcgacgtaggtaccaggtacatggttaatcgcgtgcaagatcatatccagtccagaaccgtgtattaccttatgaacattcacgtgaccccccgttccatctacttgtgtaggcatggtgagtcagaactgaatatccgaggtagaatcggcggagatagcggtctgtcggtacgcggaaagcagtacgcctatgccctggcaaatttcattcagagtcaggggatatcgtcgctgaaagtatggacgtcccacatgaaaaggactatccagaccgcagaagcattaggcgttccctatgaacagtggaaggccctgaatgagattgacgccggagtttgtgaggagatgacatacgaggagattcaagaacattatcccgaagagttcgctctgcgcgaccaggataagtaccgctaccgttatccgaagggcgaatcctatgaagacctggtgcagcgtctggagccagtcatcatggagcttgaacgccaagagaatgtcctggtaatctgccatcaggctgtgatgaggtgcctgctcgcatactttctggataagtctagcgatgaactgccctatctgaagtgtcctttgcacacggtactcaagctgactcctgtcgcatatggctgcaaagtagaatcaatttatctgaatgtggaggcagtgaatactcacagagagaagcctgagaatgtagacatcacaagagaaccggaagaagctttagataccgtgcccgcacattactag

SEQ ID NO: 212819 - DNA, 1221 bp, synthetic construct
  misc_feature 1..1221: note = Description of Artificial Sequence: Synthetic coding sequence
  source 1..1221: mol_type = other DNA
atggaggagaaaacgtcccggatcaaggtgttcaatcttgggcagtaccggcgtgaggccgtatcttacaaaaattatgagtttttcctgccagacaatatggaggcattgcaaatcaggaagcaatgcgccttagcagctctcaaagacgtgcacaactacctctcccacgaggaaggacacgtggccgtgttcgatgccactaacactaccagagaacgcaggagtctcatattgcagtttgcaaaggaacacggctacaaggtcttttttatagaaagcatctgcaatgatcccggaattattgccgagaatattagacaagtgaagttgggaagccccgactacatcgattgcgaccgcgagaaggttctggaagacttcttgaagcgtatcgagtgctatgaggttaactatcagcctctggacgaagaacttgactcgcacctcagctacattaagatctttgacgtcggcaccagatatatggttaaccgcgtgcaggatcacatccagtccagaaccgtgtactaccttatgaatattcacgtgactccacgatcgatctacctctgccgccatggagagtctgaactgaacatcaggggcaggattgggggagactctgggctctctgtgcgcggtaaacagtacgcttacgctttggctaatttcatccaaagtcagggcatatcatcactgaaggtttggacgtctcatatgaagcggaccatccagacagctgaggccctgggggtgccatatgagcagtggaaggccctcaacgagattgatgctggcgtatgcgaggagatgacatatgaggagatccaagagcactatcccgaagagttcgccctgagagatcaagacaaatatcggtaccgctacccaaagggtgagtcgtatgaggatctcgtgcagaggcttgagccagtcataatggagctggagaggcaggaaaacgtcttagtgatttgccatcaggccgtcatgagatgcttgctcgcatacttcctggacaagtcttccgacgagctgccctacttgaaatgcccacttcacaccgtgctgaagctcactcccgtggcttatggctgtaaggtcgaatctatctacctaaatgtggaggctgtaaacacacacagggaaaaacctgaaaatgtggacattactagagaaccagaggaagccctggatacagtgcccgcacactattag

SEQ ID NO: 212820 - DNA, 1416 bp, synthetic construct
  misc_feature 1..1416: note = Description of Artificial Sequence: Synthetic coding sequence
  source 1..1416: mol_type = other DNA
atgagcggagcaagctcgagcgagcagaacaataacagctatgagacaaaaacccctaatctcaggatgtccgagaagaagtgctcctgggctagttatatgactaattccccaaccttgatcgtaatgattggcctcccagctagggggaagacttacgtgagcaaaaaactgacccgataccttaattggatcggtgtcccgacaaaggtgttcaacttgggagtataccggagggaggccgttaaatcctacaaatcctatgacttcttcagacacgataacgaggaggctatgaagatccgcaaacagtgcgcccttgtggcccttgaggacgtcaaggcatatctcacagaagagaatggacaaatcgccgtctttgacgcaaccaacactaccagggagcgcagagacatgattcttaacttcgcagaacagaatagtttcaaggtgttcttcgtcgagagcgtgtgcgacgacccagacgtgatcgcagcgaacatcctggaggtgaaggtgtcgagccctgactacccagaacggaatagggagaatgtgatggaggattttcttaaacgcatcgaatgctacaaggtgacttataggccactggacccggacaactatgacaaggacttatcttttattaaggtcatcaacgtaggtcagagattcctggtcaaccgtgtccaagactatatccagtccaagattgtgtactacctaatgaacattcatgtacagcccagaacaatttacctatgccggcacggggagagcgagttcaatctgctgggcaagataggcggagattccggcctaagcgtgaggggaaagcagttcgcacaagctctccggaagttccttgaggagcaggaaatcactgatctgaaagtttggactagccagctgaaaaggacgatccagacggccgaatccctcggtgttccctatgagcaatggaagatcctaaacgagatcgatgcaggagtgtgcgaagagatgacctatgcagagatcgaaaaaaggtaccccgaggagtttgcgcttagggaccaggaaaagtacctttacaggtaccccggtggcgagtcttaccaggatctggtccaaagactggagccggtaatcatggagctggagcgccaaggaaacgtgctcgttattagccaccaagcagtgatgcgctgtttacttgcctattttctggataagggcgctgatgagctgccttatctccgctgcccgctccacaccatttttaagcttacacctgtggcgtacgggtgtaaggttgagaccatcaagctgaatgttgaagccgttaacacccacagagacaagcctaccgccgctgagaccacactcgcggtgagacgaagaccaagcgcagcttccttaatgctgccttgctag

SEQ ID NO: 212821 - DNA, 1518 bp, synthetic construct
  misc_feature 1..1518: note = Description of Artificial Sequence: Synthetic coding sequence
  source 1..1518: mol_type = other DNA
atgagcggcgctagttcatccgagcagaataataacagctatgaaacaaagacccccaacttgcggatgtcagagaagaagtgcagctgggcatcgtacatgacaaacagtccaaccctgattgtgatgatagggctcccagcaaggggcaaaacttatgtctccaaaaaactgactcgttatctgaactggattggcgtcccaacaaaagtatttaatctgggggtgtacagacgcgaagcggtcaagtcttacaagtcctacgacttttttaggcacgataatgaggaggcaatgaagatccggaaacagtgcgcgctggtggccttggaggacgtcaaagcgtatctcactgaagagaacggccagattgctgtctttgatgctaccaacactactcgggaacgccgtgacatgattttgaacttcgccgagcagaattcgttcaaagtgttcttcgttgaatcggtttgcgatgatcctgatgttatcgccgctaatatcctcgaagtaaaggtatcgtcaccggactatcctgagcggaacagggagaatgtcatggaagactttctaaaaaggatcgagtgttacaaagtcacgtaccggccactggaccccgataactatgacaaagacctctcattcattaaagtgataaacgtgggccaaagattcctcgtgaatcgagtgcaagactatatccagagcaaaatcgtgtactatctgatgaacatccatgtccaaccaagaacgatctatctatgccgtcatggcgaatcagagttcaatctgctgggaaagatcgggggagattcgggattatcagtgaggggtaagcaatttgcccaggccctgcggaaatttcttgaggaacaggagatcaccgatctcaaggtgtggacttcgcaacttaagaggacaatccaaactgccgaatccttgggagtcccatacgagcaatggaagatccttaacgagattgatgcaggagtgtgtgaggagatgacgtatgcagaaatcgagaagaggtaccccgaagaattcgctctgagagatcaagagaagtacctgtaccgctatcctggcggtgagtcttaccaggatctcgtccaacgattggagccagtgattatggagttggaacggcaggggaacgtgttggtcatttcccaccaagccgttatgaggtgtttgttggcctattttctggacaagggcgctgacgagctaccatacttgcgttgcccactgcatacgatcttcaagctcacgcctgtggcatatggatgcaaggttgagacaatcaaactgaacgtggaggcggtcaacacccacagagacaagcctaccaacaacttcccaaaaaaccagacccctgtgcgcatgagaagaaactcctttactcctctatcctcctcaaatacaattaggagacccaggaactacagtgtgggatctcggccactaaagcccttgtccccactgcgggcacaagatatgcaagagggtgccgactag

SEQ ID NO: 212822 - DNA, 1122 bp, synthetic construct
  misc_feature 1..1122: note = Description of Artificial Sequence: Synthetic coding sequence
  source 1..1122: mol_type = other DNA
atgaagatacgcaaacagtgtgctctcgtggccctggaggacgtgaaagcttacctgaccgaggaaaacgggcagatcgccgtcttcgacgcgactaacactacacgggaaaggagagacatgatactaaattttgctgagcagaatagtttcaaggtgttctttgtggagagtgtttgcgatgatcccgacgtcatcgcggctaacatcctggaggttaaggtatcaagccccgactacccggagaggaaccgggaaaacgtcatggaagacttcctcaaacggattgaatgctataaggtgacctaccggcctctcgacccagataattacgacaaagacctgtctttcatcaaggtcattaacgtggggcagcgatttctagtgaatagagtccaggactacatccaaagtaagattgtttactatctgatgaacatccacgtacagccacgaaccatctacctgtgtcgccacggggagtcggaatttaacctgttgggaaagatcgggggagactctggactgtctgtgcgaggaaagcagtttgctcaggccctgcgcaaatttctggaggaacaagaaatcaccgacctgaaagtgtggacatctcagctgaagagaaccattcagacagccgagtcccttggggtgccctacgagcagtggaagattctgaacgagatcgatgctggggtgtgcgaggagatgacatatgccgaaattgagaaaagatatcccgaggaattcgcactgagagaccaggagaaatatttgtatcgctaccccggaggggagtcctaccaggaccttgtgcagagactggaacctgtgatcatggaattagagcgtcagggcaatgtacttgtgatttcccaccaggcggtgatgagatgcctactggcttactttctggacaagggagcagacgagttgccgtacctaaggtgtcctttgcataccatctttaaactgacccctgtcgcatacgggtgtaaggtggagacaattaaactgaacgtggaagccgtgaacacccacagagacaagccgacagccgcagagacgactctcgctgtcaggaggaggccctctgccgctagcctgatgttaccctgctag

SEQ ID NO: 212823 - DNA, 795 bp, synthetic construct
  misc_feature 1..795: note = Description of Artificial Sequence: Synthetic coding sequence
  source 1..795: mol_type = other DNA
atggaggacttcttaaaacgcattgagtgctacaaggtgacctacaggcccttggatcccgacaactacgacaaagacctaagcttcataaaggttataaatgtcggccagagatttctcgtgaaccgcgtacaagactatatccagtcgaagatcgtgtactacctgatgaatatccatgttcaaccacggacaatttatctttgcagacacggggaaagcgagttcaacttgctcggcaagatcggtggagactccggactttccgtacgcggtaaacagttcgcgcaggccctgcggaagtttttagaggagcaagagattaccgacctgaaagtgtggacatcgcagttgaagagaactatacagactgcagagtccctgggtgttccgtatgagcagtggaaaatcctcaatgaaatcgatgcaggagtctgcgaagaaatgacgtacgcggaaatagaaaaacggtatcccgaggagtttgctttgcgagaccaggaaaaatatctttaccggtaccccggtggggagtcttaccaagatctggtgcagcgtttggaacccgtcatcatggaactggagcgccaggggaatgtactcgtgatctcacaccaggccgtgatgcgctgtctcctggcttacttcctggacaagggtgcaggctgtaaggtggagaccattaagctaaatgtcgaagctgtgaatacccatcgcgacaagccaaccgccgctgagaccacgctcgccgtgcgacggcgtccttctgccgcttcattaatgctgccatgttag

SEQ ID NO: 212824 - DNA, 1419 bp, synthetic construct
  misc_feature 1..1419: note = Description of Artificial Sequence: Synthetic coding sequence
  source 1..1419: mol_type = other DNA
atgacaaattcccccaccttgatagttatgatcggcctgccagcacgagggaagacctacgtcagcaagaagttgacccgctacctcaactggattggcgtgcctacgaaagtcttcaaccttggggtatacaggagggaagcagttaagtcttataaatcgtatgacttctttaggcatgataatgaggaagccatgaagatcaggaagcagtgcgctcttgtcgctctggaggatgtcaaagcatacctcacagaggaaaacggccaaatcgccgtgtttgatgctacaaatactacccgagaacggagagacatgatcctaaacttcgccgagcagaacagctttaaggtttttttcgtggaaagtgtgtgtgacgatccagatgtgattgctgccaacattctggaagtcaaggtctccagtcctgattatcctgagaggaaccgggaaaacgtgatggaagacttcttgaagcggatcgagtgttataaggtgacctacaggcccttggaccccgacaattatgataaggacctcagttttatcaaagtcataaatgtcggtcagcggtttctcgtgaacagggtgcaggattacatccaaagcaaaatcgtgtactatctcatgaacatccacgtgcaacctaggacaatctacctgtgtagacacggcgagtcggagttcaacctcttaggtaagattggcggtgattccggactctctgttaggggaaaacagttcgctcaggcccttagaaagttcctggaggaacaggagattacagatctgaaggtgtggacaagtcagctaaaacgcaccattcagaccgccgaatccctgggggtgccatacgagcagtggaaaattctgaacgaaattgacgccggagtatgcgaagagatgacttatgctgagatcgagaagcgctatccggaagaatttgcattgcgagaccaggaaaaatacctgtaccgataccctggcggagagtcctatcaggatctcgtgcagaggctagaaccggtaatcatggaacttgagcgtcaggggaacgtgctggttatctcacaccaggccgttatgcgctgcttattggcttacttcttggacaagggcgctgacgaactgccttacctgagatgcccactccatacgatttttaaactgaccccggttgcgtacgggtgtaaggtggaaacaataaagctgaacgtcgaggccgtgaatacacaccgcgataagccaaccaataatttccctaaaaatcagacgcccgtcagaatgcgccgtaacagcttcactcctctctccagttcaaacaccattaggcggccacgtaactacagtgtggggtcccgccctcttaagcctttgagcccgttacgcgcacaggatatgcaagaaggcgctgactag

SEQ ID NO: 212825 - DNA, 1542 bp, synthetic construct
  misc_feature 1..1542: note = Description of Artificial Sequence: Synthetic coding sequence
  source 1..1542: mol_type = other DNA
atgcctctggagttaacacagtcacgagttcagaagatttgggttcccgtggaccaccgccctagtctgcctcgctcctgcgggcctaaactgactaacagccctacggttatcgtcatggtgggactgccagctagaggaaaaacatacatctcgaaaaaactcacgcgttacctcaattggatcggcgtacccacaaaagtcttcaacgtaggggagtaccggcgtgaggctgtcaagcagtattcttcatacaacttttttagacccgataatgaagaagccatgaaagttcggaagcagtgtgccctcgcggctctcagggacgtgaaatcatacttggcaaaggaagggggtcaaattgccgtgttcgatgcgacaaacacaacacgcgagagaagacacatgatcctgcattttgcgaaagagaacgacttcaaagccttttttatcgagtctgtgtgcgatgaccccactgtcgttgctagcaatatcatggaggtcaaaatttccagtcccgactacaaggactgcaatagcgctgaggcgatggacgattttatgaagagaatctcctgctacgaagcttcttaccaacctcttgacccagataaatgtgacagggacctatccctaatcaaggtgatcgatgtgggtcgcaggtttctcgtcaacagggtgcaggaccacattcagagccggattgtgtactatcttatgaatatccatgttcagcctagaacaatatacctgtgtagacacggggaaaacgagcataatcttcagggtcggattggcggagattctggcctgtccagtcggggtaagaaattcgcctctgctctgtccaagtttgtcgaagaacagaacttgaaagacctgcgggtctggactagccagctcaagtccactatccagaccgccgaggccttgcgcctgccctacgaacagtggaaagccctgaacgaaatcgatgcaggcgtttgcgaggagctgacgtatgaggagattcgagacacctatcctgaggagtacgccctgcgggaacaggataaatattattacagataccctacgggggagtcttatcaggacctggtgcaacggttggagcctgtgatcatggaactagagagacaagagaacgtgctggtgatctgtcaccaggccgtccttaggtgtctcctggcttacttcctagataagtctgccgaggagatgccgtatctcaaatgtcccctgcacacggtgctgaaacttacccctgtggcctacgggtgtagagtagagagtatttacctcaacgtggaaagcgtttgcacacatagagagagaagtgaagacgccaaaaagggacccaatcccctgatgcgacggaactcagttacaccgctggcttcacccgagccaacaaaaaaacccagaatcaattctttcgaagaacatgttgcctccactagtgcagcgctgccgtcttgcctgccaccagaggttcctacccagttgcctggacagccactcctgggccaggcctgtctgtag

SEQ ID NO: 212826 - DNA, 1545 bp, synthetic construct
  misc_feature 1..1545: note = Description of Artificial Sequence: Synthetic coding sequence
  source 1..1545: mol_type = other DNA
atgcctcttgagctgacacagagccgcgttcagaaaatctgggttcctgttgatcaccgtcccagtctccctagaagttgcggacccaagctgactaacagtcctaccgtcattgtcatggtgggtcttcctgctaggggaaagacgtacatctccaaaaagctgactcggtacttaaactggatcggagtgccgactaaggtcttcaacgttggggaataccggagggaagctgtcaaacagtactctagctataacttctttagaccagacaatgaggaggccatgaaggtccgcaagcagtgtgctctggccgcattgcgcgacgtcaaaagctatctcgccaaggaaggcggacagattgctgtgttcgatgccacgaacaccacgagagaacggagacatatgatcctgcacttcgcaaaggaaaatgattttaaggctttctttatagagtccgtgtgcgacgatcccactgtggtcgccagcaacattatggaagtcaagatttcgtcacccgactacaaggactgtaatagtgccgaagctatggatgacttcatgaagaggatcagctgttatgaagccagctatcagccattggaccctgacaagtgcgatcgcgatctgtccctgataaaggtgattgacgttgggaggcggtttcttgttaatcgggtgcaggaccatattcaaagccgtatcgtgtactacctgatgaacatccacgtgcagccaaggacaatatacttgtgtcggcacggggagaatgaacacaacctgcaagggcgaatcggcggagactctggcctctcttcccgaggtaagaagttcgcttccgccttaagcaaattcgtggaggaacaaaatctaaaggacctgagagtgtggacctcccaactgaagagtactatccagactgccgaagccctccgtttgccctacgagcagtggaaagccctcaacgaaattgacgcgggagtttgcgaggagctgacatacgaagagattcgcgatacttatcccgaagaatatgcattacgcgagcaggataaatactactaccgctacccaaccggcgaatcctaccaggacctggttcagaggctggaaccagtgataatggaattggagagacaggagaatgtgctggttatctgtcaccaggcagttctgcggtgtctgctggcatattttcttgataagtccgccgaggagatgccctatcttaaatgcccgctccacacagtcttgaagctgactccagtggcatatgggtgcagagttgaaagcatttatcttaatgtggaatccgtttgtactcacagagaacggtcggaggatgctaaaaaaggccctaatcccctgatgaggcggaacagcgtgaccccactcgccagcccagagcctaccaagaaacccaggataaatagcttcgaagagcacgttgcctcaacttccgctgcactgccctcgtgcctgcctccagaggtgccaacccagctccccggacagcctttgctcgggcaggcctgcctgacatag

SEQ ID NO: 212827 - DNA, 1545 bp, synthetic construct
  misc_feature 1..1545: note = Description of Artificial Sequence: Synthetic coding sequence
  source 1..1545: mol_type = other DNA
atgccgctagaactcactcagtctcgcgtacagaagatctgggtccctgttgatcatcgaccctccctgccacgtagctgcggccctaagttgaccaacagccctacagtgatagttatggtcggcctgcctgctcggggaaagacatacatttcaaaaaagctcacaaggtacttgaactggattggcgtgcctacgaaggtcttcaacgtgggagagtacaggcgcgaagcggttaagcagtattcctcttataatttctttcggccagataatgaggaagcgatgaaagttaggaagcaatgcgcactagcggctttgagggatgtcaagtcatacttggcaaaagaaggcggacagatagcggtgttcgacgcaactaataccacccgcgagcgaagacacatgatccttcactttgcgaaggagaacgattttaaggcctttttcattgagtctgtctgcgatgatccaacagttgttgcttctaacattatggaggtgaaaatctcgagtccagactataaagattgtaactctgctgaagctatggatgatttcatgaagcggatctcctgttatgaagcttcctaccaacccctcgatcccgacaaatgcgacagggatctgtccctcatcaaagtgatcgatgttggtaggcggtttttagtcaacagagtgcaggatcacatccagtctaggatagtctattatcttatgaatatacacgtccagccacgaacgatctacttgtgccgccatggtgaaaatgagcataacctgcaaggtcgcattgggggagatagtggactttcttctaggggaaagaaattcgcctcagccctgagcaagttcgtcgaggagcagaatcttaaggatctgcgagtttggaccagtcaactgaaaagcactatccagacagccgaggcactgcgcctgccttacgaacagtggaaagccctgaacgaaatcgacgccggagtatgtgaggaattaacatacgaagaaatccgagacacctatccggaagaatatgcccttcgggaacaagataaatactattacaggtacccaacaggcgagtcataccaagatctggtgcaacggttagagcctgtgatcatggagttggaacggcaagaaaatgtgctggttatctgccaccaggccgtattgcgatgtctgctcgcctatttcctggataaatcggcagaagagatgccatacttaaaatgccctctgcacaccgtactgaagctgacacccgttgcgtacgggtgccgcgtggagagcatttaccttaatgtggagagtgtctgtacccaccgagagaggtctgaggacgctaaaaaagggccaaaccctttaatgaggagaaattccgtgactcctttagcctccccagagcctaccaaaaaacctaggatcaacagtttcgaagagcacgttgctagtacctcagcagccctcccttcttgcttaccacccgaagttccgacgcagctgcctgggcagccactgcttgggcaagcatgtttgacctag

SEQ ID NO: 212828 - DNA, 1563 bp, synthetic construct
  misc_feature 1..1563: note = Description of Artificial Sequence: Synthetic coding sequence
  source 1..1563: mol_type = other DNA
atgcccctcgagctgacccagtcccgggtacagaaaatctgggtgcccgtggatcatagaccctccctccctcgctcttgtgggcctaaattaacaaatagccctacggtgattgtcatggtgggcttacccgctagaggtaaaacttacatcagtaagaagctgacgagatatctcaactggatcggcgtgcccaccaaggtttttaatgtcggcgagtacaggcgggaagctgttaaacagtatagctcatacaatttctttcggcctgataatgaagaagcgatgaaagtccggaagcagtgtgccctcgccgcactgagagacgttaaatcgtacctggcaaaggagggcggacagattgccgtgttcgacgcaaccaacaccacgagagaacgtcggcacatgatcctccatttcgctaaggagaacgatttcaaggctttttttattgagtcagtgtgcgatgaccctactgtagtggctagtaatattatggaagtgaagattagctctccggattacaaagattgcaatagtgctgaggcaatggacgattttatgaagaggataagttgctacgaagcgtcctaccagcctctggaccctgacaaatgtgacagagacctgtctttaatcaaggttatcgatgtagggaggaggttccttgtaaatagagtgcaggatcacattcaatctcggattgtctactacctaatgaatatccatgtgcaacccaggaccatttatctgtgtcgtcatggggaaaatgaacataacctgcagggacgtattgggggtgatagcgggctttcctcacggggaaagaagttcgcatcagccctgtctaaatttgtggaggagcagaacctgaaggatttgagggtgtggacgtcgcaacttaaatctaccatccagactgcggaagcgttgcggcttccttacgaacagtggaaagcactgaatgagatcgacgcaggcgtgtgcgaggagctcacgtacgaagagatcagggacacctaccctgaggaatacgctctgcgggagcaggataaatactactacagatatcccacgggcgagagctatcaggacttagtgcagagactagagcctgtgatcatggagcttgagaggcaggagaacgtactggtcatctgtcaccaggccgtcctgcggtgcctacttgcttatttcttggacaagtccgccgaggaaatgccttatctaaagtgtcctctccatacggtgctcaagctgacccccgtggcctatggttgccgagttgagtccatctacctcaatgtggaatccgtctgtactcaccgagagcgaagcgaagatgctaagaaaggacccaacccactaatgcggaggaattccgtgacgccgctcgcctcccccgaaccaacaaagaagcctcgcataaacagctttgaggagcatgtggccagcactagcgccgcactcccgtcatgtttacctccagaggtgcccacacagcttccaggccagaacatgaaaggaagcagaagctccgccgactcatcacggaaacactag

SEQ ID NO: 212829 - DNA, 354 bp, synthetic construct
  misc_feature 1..354: note = Description of Artificial Sequence: Synthetic coding sequence
  source 1..354: mol_type = other DNA
atgccatacctcaaatgcccactgcatacggtcttaaagctgacacctgtcgcatatggttgcagggtggaatcaatctatctcaacgtagaaagcgtctgcactcacagggagaggagtgaagatgctaagaaggggcctaaccccttgatgagaaggaactcagtgaccccattggcatcccctgagccgacaaaaaaaccaaggataaattcattcgaagagcacgttgcctctacaagcgcagctttgccaagttgcctccctccggaagttcctacccaactccctgggcagcctcttttgggtcaggcctgccttaattggaaaggagtaatgcggaacgcggcatag

SEQ ID NO: 212830 - DNA, 1581 bp, synthetic construct
  misc_feature 1..1581: note = Description of Artificial Sequence: Synthetic coding sequence
  source 1..1581: mol_type = other DNA
atgccattggagttaacacaaagcagggttcagaaaatctgggtgcctgtggaccatcgccctagcttaccaagaagttgtggtcccaagctaacaaactctcctacagtgatcgtgatggttggactgcctgccagaggcaagacttatatcagtaagaagttgactagatatctcaattggatcggggtacctaccaaggtgttcaacgtgggagagtaccggagggaggccgtgaagcaatacagctcgtacaactttttcaggccagacaatgaggaggcaatgaaagtgcggaagcagtgcgccttagccgctttaagggacgtgaagtcttatctggccaaagaagggggtcagattgccgtattcgatgccactaataccacacgtgaacgccgtcatatgatacttcactttgccaaagaaaacgactttaaggccttcttcatcgaaagcgtgtgcgacgacccgacagtggtcgcgagtaacattatggaggtaaagatatcttcccccgactacaaagactgtaacagcgccgaagcaatggatgactttatgaagcggatttcttgctatgaagctagctaccaaccactggacccagataaatgcgaccgggacctgtcgctgattaaagtcatcgacgtaggtcgcaggtttctggtgaatcgggtccaggaccacatccagagtagaattgtgtactacctcatgaacatccatgttcaacctagaactatctacctttgtcgccacggtgagaatgaacacaatctccaggggagaatcggcggtgatagcgggctgtcctccagaggcaaaaagttcgcctctgcgctgagtaagttcgtcgaggaacagaatctcaaagacctaagggtttggacttctcaattgaaatctacaatccagactgctgaggccctgagattgccctacgagcagtggaaagcactcaacgaaatcgacgctggagtttgtgaggagctgacctacgaggagattcgcgacacttacccagaggagtacgcacttcgggagcaggacaaatattactataggtatcccaccggtgagtcctaccaggatttagtgcagcgcttggaacccgtcattatggagctggaaaggcaggaaaatgtgctagtgatctgccatcaggccgttctgcgctgccttctcgcttacttcctagacaaaagtgcagaagagatgccgtacctgaagtgccctctgcacaccgtcctgaagctgactccggttgcgtacgggtgccgcgtggagtctatctacctgaatgtagaatcagtctgcacgcaccgggagcgctccgaggacgctaagaaggggcctaaccccctgatgaggagaaactctgtaacgcctctggcgtctcccgaacccaccaaaaaacccagaatcaacagtttcgaggagcatgtggcctctacctctgctgcattgcctagttgtctacctcccgaagtcccaacacagctgcccggtcagccactgctcggacaggcatgcctccgcaccgtctgtcacatttttagcaagttttcaccctattag

SEQ ID NO: 212831 - DNA, 567 bp, synthetic construct
  misc_feature 1..567: note = Description of Artificial Sequence: Synthetic coding sequence
  source 1..567: mol_type = other DNA
atgaatattcacgtccagcccaggactatttacctgtgtagacatggcgagaatgaacacaacctgcagggacgcattggtggagactccggtctgtctagccgcggaaagaagttcgcctcagctctaagcaagttcgtggaagaacagaacctgaaggatctgcgtgtgtggacctcacagctcaagtctacgatacagactgccgaggcactgagactcccatacgaacagtggaaggccctgaacgagattgacgcaagttatcaagatttggtgcagagactcgagcctgttatcatggagctggagaggcaggagaacgtgcttgttatctgtcaccaggccgtgctgagatgcctgttagcttattttctcgacaagagcgctgaggaaatgccatatctaaagtgtcccctccacacggtcctgaaattgacacctgtcgcgtatgggtgccgggtcgagtctatctacctgaacgtagagagcgtctgcactcaccgcgaaaggtcagagaatatgaagggatctagaagctcagccgacagcagtcgaaaacattag

SEQ ID NO: 212832 - DNA, 1581 bp, synthetic construct
  misc_feature 1..1581: note = Description of Artificial Sequence: Synthetic coding sequence
  source 1..1581: mol_type = other DNA
atgccacttgagctgactcagtcccgcgtgcaaaagatttgggtccctgtcgatcatcgacctagcttacctagaagttgtggcccaaagctgaccaatagccccacggtgattgtgatggttggactacccgctcgtgggaaaacttacatatctaaaaaactgaccagatacctgaactggattggtgtgcccacgaaagtgttcaacgtgggggaataccgcagggaggccgtcaaacagtatagttcctacaatttttttaggccagataacgaggaagctatgaaggttagaaagcaatgcgctctcgcagcactgagagatgtgaagagttatctggccaaagagggagggcagatcgctgttttcgacgccacaaacacaacgcgggaacggagacacatgatcctgcacttcgccaaagaaaacgactttaaagcattctttatagagtccgtctgcgacgatcccacagttgtggcctcaaatataatggaggtgaaaatttcaagtccagactacaaggattgtaactccgcagaagcaatggacgattttatgaaacgtattagctgctacgaagctagttaccaaccattggatccagacaagtgtgacagggacctgtccctgatcaaagtgatagacgtcgggagacgctttctcgtgaaccgggtacaagatcacatccagagcagaatagtttattatcttatgaatatccatgttcagcccaggacgatttacctgtgcaggcacggtgagaacgaacataatctccagggccgtatcggaggggactccggcctgagttctcgaggcaagaaattcgcatcagccctcagtaaattcgtggaggagcagaatctgaaagacctaagggtctggacatctcaactcaagagcaccatacaaaccgctgaggcattaagactaccttacgagcaatggaaggcactgaacgaaatcgatgcaggggtgtgcgaggagcttacttatgaggaaatccgtgacacatacccagaggagtatgcactgagagaacaggataaatactactatcgatatcctaccggagagagctatcaggatttggtgcagaggctcgagcccgtaataatggaattggaaagacaagagaacgtcctagtgatttgtcaccaggcggtacttcgatgtttgctagcatatttcctggataagagcgctgaagaaatgccatacctgaagtgtcccctgcacacagtgctcaaacttacacccgtggcctatggttgtcgcgtggagtctatttacctaaatgtggagtccgtctgtactcaccgggagaggagtgaagatgcgaaaaagggccctaaccccttgatgcggcgaaactcagtcacaccattggcgtctcccgaacccaccaagaagccacgcattaactcttttgaagagcacgtggcatcaacaagcgcggcactaccaagttgcctgccccctgaagtgcctacccagttgccaggacagcccctgctgggccaagcgtgtctccgaaccgtgtgccatatattctctaagttttccccatactag

SEQ ID NO: 212833 - DNA, 1503 bp, synthetic construct
  misc_feature 1..1503: note = Description of Artificial Sequence: Synthetic coding sequence
  source 1..1503: mol_type = other DNA
atgcctttccgtaaagcctgcggcccaaaactgacgaattcccctacggtgatcgtaatggtaggtttacctgctcgcggaaaaacctacatttcaaaaaagctgacacgctacctcaattggatcggagttcccaccaaagtgttcaacgtaggggaataccgccgtgaggccgtcaagcagtacagcagttataacttcttcaggcccgataatgaagaagccatgaaggtgaggaagcagtgtgccttggccgcactgcgcgacgtcaagtcatatctggccaaggaggggggacagatagccgtgttcgacgccactaatactactcgcgaacgacgccacatgatcctgcatttcgcaaaagaaaacgattttaaagccttcttcatagagtcggtgtgcgatgaccccactgtggtggcctccaacatcatggaggtgaagatctcgtcgcctgactacaaggattgcaattccgccgaggctatggacgactttatgaaaagaattagttgctatgaggcctcctaccaaccactcgatcctgacaaatgtgatcgggacctctcgttgatcaaggtgattgatgtgggaaggcggtttctggtcaatcgcgtgcaggaccatattcaatcacgcattgtatactacctaatgaatatccacgtgcagcctagaactatctatctgtgcagacacggagagaacgaacacaatcttcagggccgtatcggaggggatagcgggctgtcaagtcgcggaaagaagtttgcaagtgccctgagtaaatttgtggaagagcagaatttgaaagatctgcgggtttggacctctcaattgaaaagcaccatccaaacagccgaagcgctccggctaccatatgagcagtggaaagccctgaacgaaatcgacgccggtgtgtgcgaagagctaacatatgaagagatcagagatacataccccgaagaatacgccctgcgcgaacaggacaaatattattaccgctaccccaccggtgaatcctatcaggacctggtccagcggctggagcccgtgatcatggagttggaaaggcaggagaatgtgctggtgatttgccaccaggccgtgttacgctgtcttctggcttatttcttagacaagtcagctgaagaaatgccttacctcaagtgcccgctgcacacagtgctgaagctgacccccgtggcctacgggtgtcgcgtggaatcaatctatttgaacgtagaatctgtgtgcacacaccgagaaagatccgaggatgctaagaaagggcctaacccgctgatgcgtaggaatagtgtaacgcctttagccagccctgagcctactaagaaacccaggatcaactcctttgaagagcacgtggcctcaacctcggctgccctgccatcctgcctacctccggaggtgcccactcagctgcccggacagaatatgaaaggttcccgttcctcagcggactcttctcgcaagcactag

SEQ ID NO: 212834 - DNA, 279 bp, synthetic construct
  misc_feature 1..279: note = Description of Artificial Sequence: Synthetic coding sequence
  source 1..279: mol_type = other DNA
atatacctgaatgtggagagtgtttgcacccacagagagcggtcagaagatgccaagaagggaccaaatcccctgatgcgtcggaattccgtaactcccctcgccagccctgaacctacaaaaaaaccacggattaacagcttcgaagaacatgttgcctccacctctgccgctctgccctcctgcctcccaccagaggtacccactcagctgcctggacagcccctactcgggcaggcttgtcttaattggaagggtgtgatgagaaacgcggcttag

SEQ ID NO: 212835 - DNA, 96 bp, synthetic construct
  misc_feature 1..96: note = Description of Artificial Sequence: Synthetic coding sequence
  source 1..96: mol_type = other DNA
atttatctcaacgtggaaagtgtgtgcactcatcgggaacgttccgagaacatgaagggcagtaggagttctgctgactcttctcggaagcattag

SEQ ID NO: 212836 - DNA, 261 bp, synthetic construct
  misc_feature 1..261: note = Description of Artificial Sequence: Synthetic coding sequence
  source 1..261: mol_type = other DNA
atgccctacctcaaatgccccctccacacagtgctgaaattgactcccgtcgcgtatgggtgccgagtggagtctatttacctgaatgtagagagcgtctgcacccaccgcgagcgcagtgaaggacttagtctctttcctcggctggaatgtggcggagcagtgaccgcgcattgttcgctgaacttattaggttcgagcgatccccctgcctcagcctcacgtgtggccgaaacgactggatgtaaagagggcacgtag

SEQ ID NO: 212837 - DNA, 432 bp, synthetic construct
  misc_feature 1..432: note = Description of Artificial Sequence: Synthetic coding sequence
  source 1..432: mol_type = other DNA
tgagtcgaggagcagaacttaaaggaccttagggtgtggacctcccagttaaagtccaccatccaaaccgcagaggctcttagactgccttacgagcagtggaaggccctcaacgaaattgacgccagttatcaggacctggttcagcgcctggaacctgtgattatggagctggaacggcaagagaacgtgctggtcatctgtcatcaggcggtgctccgctgccttcttgcctattttttagacaagagcgccgaggaaatgccttatctcaagtgccccctgcatactgtgctgaaactcacacctgttgcttatgggtgtagggtggagagtatctatctgaatgttgagtccgtgtgtacgcatcgggagaggtctgagaacatgaaaggatccagatcttcagctgatagttctcggaaacattag

SEQ ID NO: 212838 - DNA, 555 bp, synthetic construct
  misc_feature 1..555: note = Description of Artificial Sequence: Synthetic coding sequence
  source 1..555: mol_type = other DNA
atgcccttccggaaggcgtgcgggccaaagctcacaaattctcccacagtcatcgtgatggtaggactgcccgctagaggtaaaacctacatttccaagaagctaacgcggtaccttaactggattggggtgcctacaaaggtctttaacgtgggcgagtatagaagggaggccgtgaaacagtactcatcctataacttcttccgccctgataacgaagaagccatgaaggtgcggaaacagtgcgcgctggcagccctcagggacgtgaagagctatctggccaaagaaggcggacagatcgctgtgtttgacgctactaacacaactagagaacgccgacatatgattcttcacttcgctaaggaaaatgattttaaagcattttttatagagagcgtctgtgacgacccgactgtggttgcatccaatataatgcagaaggcattccagcgcgatctgtcggcaactcccctttggtgctgtcggaaactgaagagtcctgcccgtatcaccaagacagctaccaggcagaagccctggactacaagttag

SEQ ID NO: 212839 - DNA, 1605 bp, synthetic construct
  misc_feature 1..1605: note = Description of Artificial Sequence: Synthetic coding sequence
  source 1..1605: mol_type = other DNA
atgggcgaggggggtcaaaaagaaggggattcccagcaggccggtgctttgcccctgttgtgccaattggacacgtttagtcccaaagctaccgttttcggcgtttccattaacccggcatgcggtcccaaactgactaatagtccgacagtgattgtcatggtggggctgccggctcgcggaaagacgtacattagtaagaaactcacccgctacctaaactggataggggtgcccacaaaggtgtttaatgtcggcgaataccgcagagaggcagtgaaacagtactcctcatacaatttctttagaccggataatgaggaggccatgaaggtgagaaaacagtgtgcgttggcagccctccgtgatgtaaaatcttatctggctaaggaggggggacagatcgcagtgttcgacgctacgaatacaacacgcgaaaggcgacacatgattctgcacttcgccaaggagaacgactttaaagcctttttcatcgagtcagtgtgcgatgatccaaccgtcgtggcgtctaacatcatggaagtcaaaatctcgagtccagattataaagactgcaacagtgctgaagcaatggatgacttcatgaagcgaatctcctgttacgaggcctcttatcagcctctcgaccctgacaagtgcgaccgtgatctgagtctgatcaaggtcattgatgtcggtcgaaggttccttgtcaaccgggtccaggaccatatacagtcgagaatagtttattacctcatgaatatccacgttcagccccgtacaatctatttatgtcggcacggcgaaaatgaacacaaccttcagggacgcataggcggtgatagtggactctcctcacgtgggaaaaagtttgcatcagctctttccaagttcgtagaagaacagaaccttaaggacctgagggtgtggacgtcacagctgaagagcaccatccagactgctgaggctctgcgcctgccctacgagcagtggaaggcactcaatgagatcgatgccggtgtatgcgaagagctcacatacgaagagattcgggatacatatcctgaggagtatgcacttcgcgagcaggataaatactattaccgctaccctaccggtgaaagctaccaggaccttgtacagcgcctggagcctgtgattatggaactggaaaggcaagaaaatgtgctcgtcatctgccaccaggctgttctgaggtgtctcctggcatactttctggataagtccgctgaagagatgccttatctcaagtgccccctacatacagtgcttaagctgacgcctgtagcgtatggttgcagggtggaaagcatctacctgaatgtcgaatcggtgtgcacacacagagaacggagcgaagacgctaaaaaagggcctaatcctttaatgcgtcggaactctgtgacacccttggcctctccagaacctaccaagaagcccagaatcaactccttcgaggaacacgtggcctccacatctgccgcactcccatcctgtctgcctcctgaggtgcctacccaactcccgggtcaaaacatgaaaggaagtcgttcatccgctgactcttctcgtaagcactag

SEQ ID NO: 212840 - DNA, 594 bp, synthetic construct
  misc_feature 1..594: note = Description of Artificial Sequence: Synthetic coding sequence
  source 1..594: mol_type = other DNA
atggaccctccagccggatttgtgcgagctggcaaccctgccgttgcggctccccagtcccctttatcccctgaaggcgctcacttccgtgccgctcaccaccctcggtccacgggttcacggtgtccgggaagcctgcagcccagccgcccattagtggctaactggctgcagtcccttcccgaaatgcccgttgattttaccggatattggaagatgctagtgaacgagaatttcgaggaatatctccgggcactggatgttaatgtggctttgagaaaaatagccaatttgctgaaacctgataaagaaatagtgcaagacggcgaccatatgatcatcagaactctttccacctttcgcaattacatcatggattttcaggttggaaaggaattcgaggaagacttaacaggcatagacgacaggaagtgtatgacaaccgtgagctgggatggtgacaagctgcaatgcgtacagaaaggtgaaaaagaaggccgagggtggacccagtggatagagggcgacgaactccacttggagatgagagtagaaggagtcgtctgtaagcaagtatttaaaaaagtgcagtag

SEQ ID NO: 212841 - DNA, 528 bp, synthetic construct
  misc_feature 1..528: note = Description of Artificial Sequence: Synthetic coding sequence
  source 1..528: mol_type = other DNA
atgacaaactgccccacccttattgtcatggtgggcctgccagcacggggaaaaacctacatctcgaaaaaactgacccggtatctgaattggataggagttccgactagggagttcaacgtggggcagtaccggagggacgtagtgaaaacatacaagtccttcgaattcttcttgcccgacaacgaagaggggctaaagatccgcaagcagtgcgctctggccgcattgagagacgttcggcgattcctatctgaagaagggggtcacgtcgccgtgtttgatgccaccaacacaactagggagagaagggcaaccatctttaactttggagagcagaacggatataaaacgtttttcgtggaatctatttgcgttgaccctgaagttattgccgcaaacatcgtccaggtcaagctgggctctccggactatgttaaccgggattccgatgaggccactgaagacttcatgagaaggattgagtgctacgaaaactcttatgagtcactcgatgaagatttgtag

SEQ ID NO: 212842 - DNA, 1377 bp, synthetic construct
  misc_feature 1..1377: note = Description of Artificial Sequence: Synthetic coding sequence
  source 1..1377: mol_type = other DNA
atggacaggggcagcctgggaggatccagcttgacagacctaggccctggatcttcaaggcgagtgtgtatgacaaactgtcccacattgatagttatggtgggtttacctgccagggggaagacttacatcagtaaaaagctcacgaggtatctgaattggattggcgtccccaccagagaattcaatgtgggccagtaccggagagatgtcgtgaaaacgtacaaatcattcgaattcttcctgccggataatgaggagggcctcaagattcgcaagcagtgtgcactagccgctttaagggacgtccgcagattcctaagtgaagagggaggacacgttgccgtttttgacgccacaaatacaacgcgagagaggagagctactatctttaactttggagagcagaatggttacaaaactttcttcgtggagtccatttgcgtggaccctgaagtaattgccgctaatatcgttcaggtgaagcttggctcccctgactacgtcaatcgggactctgacgaggccaccgaagacttcatgcgacgcatagaatgttatgaaaacagctacgaaagtttggacgaggatcttgacagggacttgtcatacattaaaataatggatgtcgggcagtcctacgttgtaaaccgggtggctgatcacatccaaagtcgcattgtctactacctcatgaatatacatgttaccccaaggtccatttatctgtgtagacatggcgaatcggagctcaatctcaagggtcgcatcggcggtgaccccggactttcacccagagggcgagaatttgccaaatcccttgctcagttcatcagcgaccagaatattaaagacctcaaagtgtggacctcacagatgaagaggaccattcagactgccgaagcgctgggggtcccctacgagcagtggaaggtactgaacgaaatcgatgctggggtgtgtgaagagatgacttacgaggaaatccaagacaattatcctctggagttcgcactcagagaccaggacaaataccgctatcggtatccgaagggagagagttatgaggacttggtgcagcggctggaacctgtcattatggaactggaaaggcaggagaacgtgttagtaatctgtcaccaggctgtaatgaggtgcctcctggcatattttctagacaaagcagcggagcagcttccctatctgaagtgtccgcttcacaccgtcttgaagctgacaccagtcgcctatggctgcaaagttgaaagcatattccttaatgtagccgcagtgaatacccatcgggacagaccacagaacgtggacatcagcagaccccctgaggaggccttggtgaccgtgcccgctcatcagtag

SEQ ID NO: 212843 - DNA, 1308 bp, synthetic construct
  misc_feature 1..1308: note = Description of Artificial Sequence: Synthetic coding sequence
  source 1..1308: mol_type = other DNA
atgactaactgtcctacccttattgtcatggttggcttgcccgctcggggaaaaacttacatctccaaaaaattgacaaggtacctcaattggataggagtcccaactcgggaattcaatgtggggcagtatcggcgagatgttgtgaagacatacaaatccttcgagttttttctgcctgataacgaggaaggtctcaagatccgcaaacagtgcgccctagctgccctgcgggatgtaagacggttcctctcggaggaggggggtcatgtagcggtcttcgatgccactaacacaacccgagagcgcagggctacaatcttcaactttggagaacagaatggctataaaaccttttttgtagaaagcatctgcgtagacccagaggtgatcgcagctaatattgtgcaagtgaagctgggttctcccgattacgtaaaccgcgattctgacgaagccactgaagatttcatgaggcgtatcgaatgttacgaaaacagttacgagtctctggatgaagaccttgaccgagacctaagctacatcaagattatggacgtgggacagagctatgtggtgaacagagtcgcagaccatatccagtcaaggatcgtgtattatctcatgaatatccatgtgaccccacgctccatctatctctgtcgccacggggagtctgagctgaacctaaaggggcgtatcggcggtgaccccggtctctcaccgagaggccgagagttcgctaaatcacttgcacagtttataagcgaccagaatattaaagatctcaaagtgtggacgagccaaatgaagcggacgatccaaaccgctgaagcactgggcgttccctatgagcagtggaaggtcctcaacgagatcgatgccggagtctgcgaagagatgacttatgaagagatccaggacaactacccactagagttcgcattacgggatcaggataaataccgttatcggtaccccaagggcgaaagctatgaagacttagtgcagcgacttgagcccgttatcatggaattagagcggcaggagaacgtgctggtgatctgccatcaggcagtcatgagatgcctcttggcatacttcctggacaaagcagccgaacagttgccatacttaaagtgtcccttgcacactgtcctgaagctgaccccggtggcatatggctgcaaggtggaaagtatttttctgaacgtggctgctgttaacactcatcgggaccggccacagaacgtggatatcagtcgcccaccagaggaggcactggtgacggtgccagcccaccagtag

SEQ ID NO: 212844 - DNA, 429 bp, synthetic construct
  misc_feature 1..429: note = Description of Artificial Sequence: Synthetic coding sequence
  source 1..429: mol_type = other DNA
atggcgagtcccagggaactaacccagaaccctctgaaaaagatctggatgccctactcaaatgggaggccagcactgcacgcatgccaacgaggggtttgtatgacgaactgtccaaccctcatcgtgatggttggtctcccagccaggggtaagacttatatttccaagaaactgacccgctatctgaactggatcggcgttccaacccgggaattcaatgtggggcaataccgacgtgacgtggttaagacctataagtcctttgaattcttcttaccagacaacgaagaaggcttgaaaattcggaagttcctgatgccccagaccccaccagaaaacggtgagcgcccttcgctaatccttgaaaataggatggccactcggccattccttagctcgccctctgtgtggatccttagatcttag

SEQ ID NO: 212845 - DNA, 777 bp, synthetic construct
  misc_feature 1..777: note = Description of Artificial Sequence: Synthetic coding sequence
  source 1..777: mol_type = other DNA
atggccgctcccgctcctgggctgatcagcgtattcagttcgtctcaggagcttggtgcagcattggcccagctggttgcccagcgcgcagcttgctgcctggccggtgctcgggctagattcgcgttagggttatccggcggaagcctggtatccatgctagctcgcgaattgccagccgcagttgcccctgctggacccgctagcctggccagatggactcttggcttctgcgatgagaggctggtgccttttgatcacgcagaatccacctatggcctgtaccgaacccacctactaagccgcttgcccattcctgaaagtcaggtcattacgatcaaccctgaactgcctgtggaggaggcggcagaagattacgccaagaagctgaggcaagccttccaaggggacagtatccccgtgttcgatcttttaatattgggagttggccctgatgggcacacgtgcagcttgtttcccgaccacccactgttgcaggagcgggagaaaatcgtcgccccaattagcgatagccctaagccaccccctcagagggtaaccttaacccttcccgtcctgaacgcagcgagaactgtgatattcgttgcgactggggaaggtaaggctgccgtgcttaagaggatccttgaggaccaagaagaaaatcccctgccagccgcactcgtgcaaccgcatacgggaaaattgtgttggttccttgatgaggcagccgctaggctactgactgtgcccttcgagaaacactccactctctag

SEQ ID NO: 212846 - DNA, 1428 bp, synthetic construct
  misc_feature 1..1428: note = Description of Artificial Sequence: Synthetic coding sequence
  source 1..1428: mol_type = other DNA
atggcagccaagtcccagccgaatatcccaaaggccaagagcttagatggggtcacaaacgaccggacagcctcacaggggcaatggggccgagcttgggaagtggattggttcagtttggctagcgtgattttcttgctgctgttcgcaccatttatcgtctactatttcatcatggcctgtgatcaatactcatgcgccctcactgggcctgtcgtggacattgttactgggcacgcccgtctgtccgatatatgggccaagactcctcccatcacgcgcaaggcggctcagctctatacgctctgggtcacctttcaggtcctgctctatactagtctgccggacttctgccacaaatttttacctggctatgtaggcggaatacaagaaggcgcagtaacacccgcaggggttgtgaataagtaccagatcaacggcctccaggcatggctcctcacacatctgctttggttcgctaatgcacacctcttatcgtggttctctcctactattattttcgataattggattcctttgctctggtgtgccaacatactgggatatgctgtgtccacattcgccatggtgaagggctatttcttccctaccagtgccagagattgtaagttcactggaaattttttctacaattacatgatggggatcgaatttaatcccaggatagggaaatggttcgattttaagctcttctttaatgggaggcctggcattgtggcatggacactgatcaatctgtcttttgcggctaagcagcgggaactgcactctcacgtcacaaacgcgatggtgctggtaaatgttttacaggccatttacgtgatagactttttttggaatgagacttggtatctgaagacaattgacatctgtcacgatcatttcgggtggtatctgggatggggcgattgcgtgtggctgccctacctgtatactcttcagggcctctatctcgtctaccaccctgtccagctgagcacccctcatgccgtgggcgtattactactgggcttggtgggctattacatttttagagtcgcgaatcatcaaaaggacctgtttagacgcacagatggaaggtgtctcatctggggcaggaaacccaaggtgatagagtgctcttacacctccgccgacggacagcggcaccatagtaagctactcgtgtctgggttctggggggttgccagacactttaactatgtgggagatctgatgggcagtctagcctattgtctggcctgcggcggaggacatcttttgccatacttttacatcatctacatggctattctgctcacgcaccgctgcctgcgggatgagcatcgctgtgcctccaagtatggaagagattgggagcgatacacggccgcagtcccgtataggctgctgccagggatattttag

SEQ ID NO: 212847 - DNA, 1428 bp, synthetic construct
  misc_feature 1..1428: note = Description of Artificial Sequence: Synthetic coding sequence
  source 1..1428: mol_type = other DNA
atggcagctaaatcccaaccgaacatcccaaaggccaagtctctcgatggtgtcaccaatgatcgtaccgcgagccaggggcagtgggggcgtgcctgggaagtcgactggttttcattggcttctgttatctttctactgctgtttgccccatttatagtgtattacttcatcatggcgtgtgatcagtactcgtgcgccctaacaggcccagttgtggatattgtcaccgggcacgccagactcagcgatatatgggcaaagacgccgcctataacccgaaaggccgctcagctctatacactctgggtcacattccaggtccttctgtacacgtccctgcccgacttctgccacaaattcctaccaggctatgtgggcggtattcaggagggagcggtgaccccagccggagtggtcaacaagtaccagatcaatgggttgcaggcttggctcctcactcatctgctctggtttgccaacgctcacttactttcctggttttctcccacaatcatcttcgataactggattccgctactgtggtgtgccaatatactggggtacgctgtttccactttcgccatggtaaagggctactttttcccaacgagtgccagggactgcaagttcaccggcaattttttctataactacatgatgggtatcgaattcaatcctagaatcggcaagtggttcgatttcaagctattttttaacgggagaccaggaattgtcgcttggacgctgatcaatctttcgttcgccgcaaagcagagagaattgcatagtcacgtgacaaacgccatggtgctggtcaacgtgttgcaggccatctacgtcattgattttttttggaacgaaacgtggtacctgaaaacaatcgacatctgtcatgatcattttggatggtatcttgggtggggggactgcgtgtggttaccctacctgtatacgcttcaaggactttacttggtgtatcaccccgtgcaactgagcacgccacatgcagtaggcgtactcctcctgggacttgtaggctactacattttccgcgtcgcaaatcaccagaaagatctgttccgcaggaccgacggccgttgcctgatatggggtcgtaagcctaaagttattgaatgtagctacacatccgcggatgggcagcgtcaccacagcaaacttttagtctctggtttctggggcgttgccaggcattttaattatgtgggtgacttaatgggaagcttggcctattgcctcgcctgtggtggaggacatctgttaccatatttctatataatatatatggccatccttctgactcacagatgccttcgcgacgagcatcggtgtgcttccaaatacgggcgagattgggaaaggtatacggcggctgtaccttatcgcctccttcccggaatcttctag

SEQ ID NO: 212848 - DNA, 327 bp, synthetic construct
  misc_feature 1..327: note = Description of Artificial Sequence: Synthetic coding sequence
  source 1..327: mol_type = other DNA
atggcagccaaaagtcagcccaacatccccaaagctaagtcattggatggcgtcactaacgacagaaccgcctctcaaggacagtggggaagagcctgggaggtcgactggttctcgctagctagtgtcattttcttgctcctctttgccccatttatcgtatactattttataatggcctgcgaccagtatagttgtgcccttaccgggccagtggtggatattgttacaggacacgctcggctcagtgatatatgggctaaaacccccccaatcacccgcaaggccgcacaactctatactctctgggtgactttccaggtctag

SEQ ID NO: 212849 - DNA, 495 bp, synthetic construct
  misc_feature 1..495: note = Description of Artificial Sequence: Synthetic coding sequence
  source 1..495: mol_type = other DNA
atggctgcaaagagtcaaccaaacatcccaaaggctaagagcctcgatggagtgaccaacgaccggacagcttcccagggccagtggggtcgggcttgggaggtggattggttttccctggccagtgtaatcttcctgttgctgttcgcacccttcatcgtttattatttcatcatggcctgcgaccagtacagttgcgccttgactggccctgtggtggacatagtgaccggccatgctcggctgagcgatatttgggccaagacacctccaatcactcgcaaagccgctcagctgtatacattgtgggtgacttttcaggttctcttgtacacgtccctaccagacttctgtcataaattcctgcccggttatgtaggcggaatccaggaaggggcagtcactcctgctggagtagtcaataagtaccagattaacggactacaggcctggttgctaacacatctgctctggttcgcaaatgctcatttgtag

SEQ ID NO: 212850 - DNA, 276 bp, synthetic construct
  misc_feature 1..276: note = Description of Artificial Sequence: Synthetic coding sequence
  source 1..276: mol_type = other DNA
atggcagccaaaagccagcccaatatcccaaaagcgaaaagtctggatggcgtaaccaatgaccggactgcatcccagggccagtgggggagagcctgggaagtggactggttttctctcgcttctgtaatatttctgttactgttcgcgccattcatcgtctactactttattatggcctgtgaccagtactcctgcgcgctgaccgggcctgttgtggacatcgtgacaggccacgccaggctctccgatatatgggccaaaacccctccttag

SEQ ID NO: 212851 - DNA, 318 bp, synthetic construct
  misc_feature 1..318: note = Description of Artificial Sequence: Synthetic coding sequence
  source 1..318: mol_type = other DNA
atggccgcaaagagccaacccaacatcccgaaggcaaagtcactggacggggtaacgaacgacagaacagcctcccaaggtcagtgggggagggcttgggaggttgattggtttagcctggctagcgtaatttttctgctgctgttcgctccgttcattgtttactattttatcatggcatgcgaccagtactcatgtgccctcacaggacctgtcgtggacatcgtgaccggccacgctcggctatccgatatatgggccaagacccccccaatcacccggaaggccgcacaactttataccttgtgggtgacttag

SEQ ID NO: 212852 - DNA, 846 bp, synthetic construct
  misc_feature 1..846: note = Description of Artificial Sequence: Synthetic coding sequence
  source 1..846: mol_type = other DNA
atggactcgtacagcacgtatctggccaccgtgaaggtaagcggaagctggctggaggagcaggacgaagatatctacgaagtagagtcccgcgttcccctgcctcacccctttcccctgtgcgaacacctggacgaaaacaacagcgtgatcgtaaatacctcaatattccacttcattcacaaacgaaatggtcatatcttaaagcttatctccaagatttcgctcccaacacccccatatagcttggagcacgccaaagtgacccaaaccgagctcatgagagagagctttagacagaagcaggaagctacggaatccctgaaatgtcaggaggagctgagggaaaggcttcatgaggagtcaagggctagggagcagctggctgttgaactgtctaaagctgaaggtgtaatcgacggatatgccgacgaaaaaaccctgttcgagcgtcaaatacaggagaaaacggacattatcgaccggctagaacaggaacttctttgcgccagtaacagattacaagagctggaagcagagcagcaacaaatccaggaggaacgagaacttcttagcagacagaaagaagctatgaaagccgaagccggacctgtggagcaacaactcctccaggagacggaaaaactgatgaaggagaaattggaggtccagtgccaggcagaaaaggttcgtgacgatctgcagaaacaagtaaaagcgttggaaatcgacgttgaggagcaagtgagtcggttcatcgaattagagcaggaaaaaaataccgaactgatggatctccggcagcagaatcaagcattggagaaacagctggagaagatgcgctag

SEQ ID NO: 212853 - DNA, 11724 bp, synthetic construct
  misc_feature 1..11724: note = Description of Artificial Sequence: Synthetic coding sequence
  source 1..11724: mol_type = other DNA
atggaggacgaggaaagacaaaaaaagctggaggccggaaaagctaaactggcccagtttcggcaacgcaaggcacagtctgacggacagtctccctcaaagaaacaaaagaaaaagaggaagacatcatcatcaaaacacgatgtaagcgcacaccacgacctgaacatcgaccagtcacaatgcaacgagatgtacataaattctagccagagggtcgaaagcaccgttatcccggagtccacgatcatgcgtacactgcattcgggtgagattacaagccatgaacagggcttttccgtcgaactcgaatccgaaatcagcacaactgccgatgattgcagtagtgaagtcaacgggtgctcatttgtgatgagaaccgggaaacctactaatctcctgagagaggaggaatttggagtggatgactcgtattcggaacagggagcccaggacagccccacccatctggaaatgatggagtctgagcttgctggtaagcagcacgagattgaagaacttaatcgagaactggaggagatgcgtgtgacctacggtacagagggtctgcagcaactccaggaattcgaggcagcaattaagcagagagacggaataattactcaattgacagccaacctgcagcaggcacggcgagagaaggacgaaaccatgagggagttcttggagttgaccgagcaatcccagaaactgcagattcaatttcagcaactgcaggcatccgaaacgctgcgcaacagtacacactcttccaccgctgcggatttgctccaggccaaacagcagatactgacccaccagcaacaactggaggaacaggaccatcttttggaagactatcagaaaaagaaggaggacttcaccatgcagatctctttcctccaggaaaaaataaaggtgtacgagatggagcaagataagaaagtggagaacagcaataaggaggaaattcaggagaaggagacaatcattgaggagcttaatactaaaatcattgaggaagagaagaagacattggaactcaaggacaaactcactactgcagataagctcctcggcgagctccaggagcagatcgtgcaaaaaaatcaggagataaagaacatgaaactggaactgactaattccaaacagaaggaaagacagagcagtgaagagattaagcagctcatggggacggtcgaggaattgcaaaagcgcaaccacaaggactcacagttcgagacagacattgtacaaaggatggagcaggagacacagcgaaaactggagcagctcagggcagaactagacgaaatgtacggacaacagatagtccaaatgaagcaggagctgattcgacaacatatggcgcaaatggaggagatgaaaacccgccataagggtgaaatggagaatgcactgcgctcctactctaacataaccgtcaatgaggatcagatcaaactcatgaacgtcgcaattaatgaacttaatatcaaactccaggatactaattcacagaaagagaagctgaaagaggagcttggcctgatcctcgaggagaagtgtgcactccagagacagctagaagatctagtggaggagctgagcttctcccgcgagcagatccaacgcgctcgacagacaatagccgagcaagaaagtaaactgaatgaagctcacaaatctctcagcacagtagaggatttgaaggcagagattgtgagcgcctcggagagcagaaaagagctggagctgaaacacgaagccgaagtgacgaactataagataaaattggagatgctggaaaaagaaaaaaatgctgtgctggaccggatggctgagtcgcaggaggccgaactggagagactgcgtacacagctgctgtttagtcatgaggaagaactctcaaagctgaaagaggacctcgaaattgaacacaggattaacattgagaaattaaaggacaatttgggaatccattataaacaacagattgatggactgcaaaacgaaatgtcccagaagatcgaaaccatgcagtttgaaaaggacaacctcattactaagcaaaaccagctcattcttgagataagtaagcttaaagacctacagcagtctctggtgaactccaaaagcgaggagatgacactgcagatcaacgagctgcagaaggagattgagatcttgagacaagaagagaaggagaaaggcaccctcgaacaggaagtgcaggagcttcaactcaagaccgaactgctcgagaaacaaatgaaagagaaagagaacgatttgcaagaaaagttcgctcagcttgaagctgagaattcaattctgaaggatgaaaaaaaaacactcgaagatatgctcaagattcacacgccagtctcccaagaggagcgacttatttttctggattcgatcaagtctaagtccaaggattctgtctgggaaaaggagatcgagatcctgattgaagagaacgaagacctgaagcagcaatgcatccagttgaacgaggaaatcgaaaagcaaagaaatactttcagcttcgctgaaaagaatttcgaagtgaattaccaggaactccaggaggaatacgcttgtctcctgaaagttaaagacgatcttgaggactcaaagaataagcaggagctggaatataaatcaaaattgaaggctctgaatgaggaattgcacttacagagaattaacccaaccaccgtgaaaatgaaatcgtccgtgttcgacgaggacaagaccttcgtggccgagaccttggaaatgggggaagtcgtggagaaggataccacagagctcatggagaagttggaagtaactaagcgcgaaaagctggagcttagtcagaggcttagtgacttgagcgaacagctgaagcagaaacatggagaaatttcatttctgaatgaagaagtaaagtctctgaagcaagaaaaggagcaggtcagcctccgatgccgagagctcgaaatcattattaaccataacagagccgagaacgtgcaaagttgcgatactcaggtgtcatctcttctcgatggtgtagtgacaatgacttccaggggcgcagaaggttccgtgagcaaggtgaacaaaagcttcggcgaagaatccaagattatggtggaggataaagtatcctttgaaaatatgacagtcggtgaagagtcaaaacaagagcagctcatcctggaccacctgcccagcgtaacaaaagaatcgtctttgcgggcaactcagccttctgagaatgacaaactgcagaaagagctcaatgtcctgaaatctgaacagaatgatctacgtctccagatggaagcccaaaggatctgcctgagcttagtctactccacgcacgttgaccaggtgcgggagtacatggaaaatgaaaaagataaagccctttgttccctgaaagaagaactcatatttgcccaagaggagaaaataaaggaactccaaaagattcaccagctcgagcttcaaaccatgaagacccaggaaaccggggacgaaggaaagcctcttcatttgttaatcggtaagctccagaaagccgtgagtgaagagtgtagctactttctacaaacactatgcagcgtgctgggcgaatactacacgcctgccctgaaatgtgaggtcaacgcggaggacaaagagaatagtggagactacatcagtgaaaacgaagacccagagttacaagactataggtacgaagtgcaagattttcaggaaaatatgcacaccctcctaaataaagtcactgaagaatataataagctactagttttacagacaagactttccaaaatttggggccagcaaaccgatggtatgaaactagagtttggcgaggaaaacctgcccaaagaggaaaccgagtttttgtctatccattcccagatgacaaacttagaagatatcgatgtcaaccataagagcaaactatccagcctccaggacctggagaaaaccaaattagaggaacaggtgcaggagctggaaagtctcattagttcccttcagcagcagcttaaggaaactgagcagaattatgaggcagagatccactgtctgcagaaaagactacaggctgttagtgaatcaacagtgcccccttctcttcctgtggattctgtcgtgatcaccgaaagcgatgcacaacggaccatgtaccctgggtcttgtgtgaaaaaaaacatagatggaacgatcgaattttcaggcgaatttggcgtcaaggaggagaccaacattgtgaagcttctggagaaacaataccaggagcaactggaggaagaagttgcaaaggtgattgttagtatgtcgatcgctttcgctcagcagaccgagctatcccgcatctcaggtggcaaggagaacactgctagctccaagcaggcccacgccgtgtgtcaacaggagcaacactattttaacgagatgaagttaagtcaggaccagattggcttccagacatttgaaacagtggatgtgaaattcaaagaggaattcaaaccattgagcaaggagcttggcgagcacggtaaggaaattcttttatctaacagtgacccccacgacatcccggaaagcaaggattgtgtgctcaccatctccgaagaaatgttcagtaaggataagacttttattgtgaggcagtctatacacgacgagatatctgtgagcagcatggacgcctcccggcagttaatgctgaatgaggagcagctggaagacatgcggcaggagctcgtgcgccagtatcaagaacaccaacaggcaaccgagctgctgcggcaggcccacatgcggcagatggagcgccagcgggaagatcaggaacagcttcaggaagagattaaaagactcaatcgccagctcgcccagcgctctagcatcgataatgaaaacttggtgtcagaaagagagagggtcctgctggaggaacttgaggctctcaaacaactgtccctggcagggagggaaaagctgtgctgcgagctcagaaattcctccacccagactcagaacggcaacgaaaatcaaggtgaggtcgaggaacaaacatttaaggaaaaggaactcgatcgcaagccagaggacgttccccctgaaattctgtctaacgaacgctatgctttgcagaaggccaacaacagactgctgaaaatccttctcgaggtggtgaaaactaccgctgccgtcgaggaaaccatcgggaggcatgtcctgggtattttggacagatcttcaaagtcacagtccagtgcatcgctgatttggcggagcgaagcagaagcgtccgtcaagagctgcgtgcatgaagaacacacacgcgtcactgatgagtccatcccaagttactctgggtccgatatgcctcgtaatgacattaatatgtggagtaaggtcacggaagaaggtaccgagctgagccagaggttggtgaggtccggattcgccggtaccgagatcgaccccgagaatgaggaactgatgctcaatatatcttcacggctccaggccgctgtcgagaaactgctggaagccatctctgagacctcttcccagttagagcatgccaaggttacccaaactgaactgatgcgtgagtctttccgtcagaagcaggaagcaactgagagcctgaagtgccaagaggagctaagggaacggttgcacgaggagtcccgtgccagggagcagcttgctgttgagctctcaaaagccgagggtgttatcgatggctatgctgacgagaagactctgtttgagcggcaaatacaggagaaaactgacatcattgatcgcttagaacaggagctactttgcgcctctaatcgactgcaggaactcgaggctgagcagcagcagatacaagaagaacgcgagctcctgagtagacagaaggaagcgatgaaagcagaggcaggaccggttgagcagcagctgctgcaggagaccgaaaagctgatgaaagagaagttggaggtccagtgtcaggctgaaaaggtgagagacgatcttcagaagcaggttaaagctttggagatcgacgtggaggaacaggtaagtcgcttcattgaattagaacaggagaaaaacactgagctgatggaccttaggcagcagaatcaggcactcgagaaacagctggagaaaatgcgcaagttcctggacgaacaggctatcgatcgagagcacgaacgcgacgtgtttcagcaggagattcagaagctagaacagcaacttaaggtggtgccaagatttcagcccatctctgaacaccaaaccagagaggttgagcagttagcgaaccacctcaaagaaaagacggataagtgttccgagctcctgcttagtaaggagcagctgcaacgggatatacaagagcggaacgaagagatcgagaagttagagttccgggtgagagagctagagcaggcattgctggtttctgccgacaccttccaaaaagtggaggatagaaagcatttcggagccgtcgaggcgaaacctgagctttctcttgaggtgcagttacaagccgaacgggacgccatcgataggaaagaaaaggaaatcacgaacctcgaggagcagttggaacaatttagagaggaattggaaaacaaaaatgaagaggtgcagcagctgcacatgcagctcgaaattcagaagaaggagtctactactcggctgcaagaactcgaacaggaaaacaaactcttcaaggacgacatggagaaactgggattggccatcaaggagtcagacgctatgagcactcaggaccagcatgtgctgtttggcaagttcgcccagataatccaggaaaaggaggtcgagatcgatcaacttaacgaacaagtcaccaagctgcagcagcagttaaaaatcaccaccgacaacaaagtgatcgaagagaaaaacgagctgattagggatttggaaacacaaatcgaatgcctgatgtccgaccaagagtgtgtcaaacgcaatcgagaggaggaaatcgagcaattaaatgaagtcattgaaaaactgcagcaagaactcgcaaacattggtcagaaaacgtccatgaacgctcacagtctgagcgaagaggccgacagcctcaagcaccaattggatgtggtaattgccgagaagctcgcattggaacagcaagtcgaaacagcaaacgaagaaatgaccttcatgaagaacgtgctaaaagagaccaacttcaagatgaaccaactgactcaggagctattctcacttaaacgggaacgggagtcagtggaaaagatacagtccatccctgaaaactcagttaatgttgccatcgatcatctgtcgaaagataagcccgagctggaggtggtgctgaccgaggacgccctgaaaagtttggagaaccagacctatttcaagagctttgaggagaacggaaagggatcaatcatcaaccttgaaactcggctgctacagttggaatccactgtcagcgcaaaagatctggagcttacccagtgctataaacaaattaaggatatgcaagaacagggccagttcgagaccgaaatgcttcaaaaaaagatcgtgaatctgcagaagatcgtggaggagaaggtggcagccgctcttgtatcccagatccagctcgaagcagttcaggaatacgccaagttttgccaggacaatcaaacaattagttccgaaccagagcggaccaatatacagaatctgaatcagttgcgggaagacgaactaggaagtgacatttccgctctcacgttacgcatcagcgagctggaaagccaagtggtcgagatgcacactagcttaatcctcgagaaggagcaggttgagatcgccgaaaagaatgtgctggagaaagaaaaaaaactgttggagctgcagaagctgctcgagggcaatgaaaaaaaacagcgcgagaaggaaaagaaacggtctccccaggacgtggaggtgctgaagaccactacagagctgtttcacagtaatgaggagagcggcttttttaacgagcttgaggccttgagagcagagtcggtcgccactaaagccgagctggccagctacaaagagaaagcggagaaactgcaagaggaactcctggtgaaggaaactaacatgacctccctccagaaagacctgagccaggtgcgcgaccacctcgccgaggcgaaggaaaaactgtccatccttgagaaagaggatgagaccgaggttcaggaatcaaagaaagcttgcatgtttgaaccactgcctataaaactgtctaagtctatagcgagccagacggacggcactctcaagatctcatcttcgaatcagacgcctcagatcctggtaaagaatgcaggtattcagataaatctgcagagcgaatgttcatccgaggaggtaactgaaattattagccagtttacagagaagatcgagaagatgcaggaactgcacgcggctgagatcctcgatatggaatcgcgacatatttctgaaaccgaaactctaaaacgcgagcactacgtggccgtgcaactcctcaaggaagaatgtgggactctgaaggccgttatacagtgtctgaggtccaaggagggatcgagcatccccgaattggctcattcggacgcttaccagacaagggaaatatgctcatcagactcgggctcggattggggacagggaatctacttgacacatagccagggcttcgatattgcatctgaagggaggggcgaggagtccgagtccgccacagactcctttcctaagaagatcaagggactgttgcgagcagtgcataacgaggggatgcaggtgctttccctcacagaaagtccctattcagatggtgaggaccattccattcagcaggtgtcagaaccatggctcgaggaaaggaaggcttatataaacaccatatcaagcctgaaggacctgataacaaagatgcagctgcagcgagaggcagaggtttatgatagttcacagtctcacgagtctttctcggactggcgtggggagctgctactcgccttacagcaagtgttccttgaagaaagatccgtccttctggccgcattccgcacggagctgacagccctagggaccactgatgccgttgggcttctcaattgtctggaacaacggatccaagaacagggagtagagtaccaggctgccatggagtgtcttcagaaggccgatagaagatcactcctgagcgagattcaggccctccacgcccaaatgaacgggagaaaaatcaccttaaagcgggagcaggagtctgaaaagccaagtcaggagctactggaatataatatccagcagaagcagagtcagatgttggagatgcaggtggagttatcaagcatgaaggacagagcaactgagcttcaggaacaactctccagtgaaaaaatggttgttgcagaattaaagagcgagctggctcagacaaagttagagcttgaaacaactctaaaagctcagcacaagcatttaaaagaattagaagctttccgcctggaggtaaaggataagacggatgaggtgcaccttctcaacgacacactcgcttccgagcagaagaagtcccgcgagcttcagtgggccctcgagaaagagaaagctaaactgggcaggtcggaggaaagagataaagaagaattagaggacctgaaattttccctcgaatcacagaaacaacggaatcttcagcttaatcttcttcttgaacagcagaagcagctcctgaatgagtcccagcagaaaattgagtcccagcgcatgttatacgatgctcagctgtctgaagagcaaggcaggaacctggagctgcaggtcttgctcgaatctgaaaaggtgcgaattagggagatgagctccacactggacagagaaagggaactgcacgcccagcttcagtccagcgatgggaccggacaaagtcgacctccattgccctcggaggacctgctgaaggaacttcagaaacagctggaggaaaaacattcaaggatcgtggaactcctgaatgagaccgagaagtacaagctggacagcctgcaaacccgccaacaaatggagaaggaccgccaggtacaccgaaaaacccttcagacggagcaagaagctaatacggaaggccagaaaaagatgcacgagctgcagagtaaggtggaggacctccagcggcagctcgaagaaaagcggcagcaggtgtacaagctggatctggagggtcaaaggttacaggggattatgcaggaatttcagaaacaggagcttgaaagggaggaaaaaagagaaagtcggcgtattctgtatcagaacctgaatgagcccacgacctggtcattgacaagcgatagaacccggaactgggtcctgcagcagaaaatcgaaggtgaaaccaaagaaagtaactatgcaaaactgatcgagatgaacggtggcggtacaggttgcaaccacgaactggaaatgattcggcaaaaactgcaatgcgtggcctccaagctgcaggttctgccccagaaagcttctgaacgcctgcagtttgaaaccgcggacgatgaggatttcatatgggtccaagaaaatatcgacgaaattattcttcagttgcagaaactgactggacagcaaggcgaagaaccatccctcgtcagcccttccacctcctgcggatccctaaccgaaaggctgctgcgacaaaacgccgaactgaccggccacataagccagttgacggaagagaagaatgacttacgcaatatggtcatgaaactggaggaacagatcagatggtaccggcaaacaggagcgggtagagataacagctcaagatttagtctcaatggaggtgctaatatagaggccattatcgcctccgagaaagaggtgtggaaccgagagaaacttaccttgcagaaatcactgaaacgggctgaggcggaagtttacaagctgaaagcggagctcagaaacgacagtctgttgcagacactcagtccagactccgagcatgtcactttaaagaggatctatgggaaatatctccgtgccgaatcattcagaaaggccctcatttaccagaagaagtatctcctcctgctcctcgggggatttcaggagtgtgaggacgctacactcgcactgttagctcgcatgggtggccagccggcatttaccgacttggaagttataactaaccgtcctaaaggttttacaagattcagatcagctgtgcgtgtaagcatagcaattagccggatgaagtttctcgtgcggagatggcatagagtcactgggagcgttagcattaacattaatagagacggtttcggactgaatcaaggcgctgaaaaaacagactccttctaccacagttctggcggacttgagctttatggagagcccagacacactacctaccgatcaaggagcgacctggattatataagaagtccgctgccgtttcaaaatagatatcccggaacccctgctgacttcaatccagggtcactcgcttgcagccagctccagaattacgaccccgacagagcgctgactgactatatcacgaggttggaggctttgcagaggcgactcgggaccatccagagcgggtccactactcagtttcacgccggaatgcgcaggtac

SEQ ID NO: 212854 - DNA, 11574 bp, synthetic construct
  misc_feature 1..11574: note = Description of Artificial Sequence: Synthetic coding sequence
  source 1..11574: mol_type = other DNA
atggaagatgaggagcggcaaaagaaactagaggccggtaaagcaaagattgaggaactgtcactcgccttcctggtcaggcagttggctcagttcaggcagaggaaagcgcagtctgatggacagtcaccttctaagaaacaaaagaaaaaacgtaagacatcttccagcaagcacgacgtttctgctcaccatgatttgaacatcgaccagtcccagtgcaacgagatgtacattaacagctcccagcgggtagaaagtactgttattcccgaatctactatcatgagaaccctgcactctggggaaattactagccacgagcagggcttctctgtggaattggaaagtgaaatttcgacaacggctgacgattgtagctctgaggtcaatgggtgcagctttgtgatgagaaccggcaagcccactaacttgctgcgggaagaagagttcggtgtggatgactcctactctgaacaaggcgcacaggactccccaacccacctggaaatgatggagtccgagctcgcgggaaagcagcatgagattgaggagcttaaccgggagttagaggagatgagggtgacctatggaactgaaggattacagcagctgcaggaattcgaggcggcaataaagcaacgcgatggcatcattactcaactcacagccaatctccagcaggctagaagagaaaaagacgaaaccatgcgcgagttcttggaactcaccgaacagtctcagaaactccaaatacagttccagcagctgcaggcgagcgaaaccctgagaaactcaactcacagtagtactgcggctgacttactgcaagccaagcagcagatattaacacaccagcagcagctggaggagcaggaccacctgttggaagactaccagaagaaaaaagaggactttaccatgcaaatttcgtttctgcaggaaaagatcaaggtctacgagatggagcaggataagaaagtggagaacagcaacaaagaagagatccaagagaaggagaccatcattgaagagctgaacactaagattatagaagaggagaaaaagaccctggagcttaaagacaagctgacaaccgccgataaactgctgggcgagctccaagagcagatcgtgcagaagaaccaggagattaagaatatgaagttggaattgactaactctaagcaaaaggagagacaatcctcggaggagatcaagcagctcatgggtacagtagaggaacttcaaaagaggaaccacaaagattcccaatttgagactgacatcgtgcagcgcatggaacaggaaacgcagaggaagctagagcagctgagagccgaattggacgaaatgtatgggcagcagatagtgcagatgaagcaggaactcatccggcagcacatggcacagatggaggagatgaagactagacataagggagagatggaaaacgccttgaggtcctacagcaatataaccgttaatgaggaccagattaagcttatgaatgtggcgatcaatgagttaaacatcaaactgcaggatacaaattctcagaaggaaaagctgaaggaagagctggggctgatcctcgaggagaaatgcgccctacagcgtcagctggaggaccttgttgaggagctgagtttcagcagggagcaaatacaacgggctaggcagaccattgcggagcaggagagcaagctcaacgaggctcacaagtcactaagtactgtagaggatctcaaagctgaaattgtatctgcatccgaatcacgaaaggagctagaattgaagcacgaagccgaagtgaccaattataagataaaattagaaatgcttgagaaggaaaagaacgccgtcttggatcgtatggccgagagtcaggaagccgaactcgagcgccttagaacccagcttctgttttcccatgaggaggagttgtctaaactgaaagaggacctagagattgagcataggattaacatcgaaaagctcaaggataatctggggattcattataaacagcagatcgatggcctgcagaacgaaatgagtcaaaagatcgagacaatgcagttcgagaaagacaacctgataaccaaacaaaaccagctgatcctcgaaatctcaaagctgaaggacctccagcagtcactagtgaactctaagagcgaagagatgaccctacaaattaatgagttacagaaggaaatagagatcttgcgccaggaggaaaaagagaaaggcacactcgagcaggaagttcaggagttacagctgaagactgagctcctcgagaaacaaatgaaggaaaaggagaatgatctgcaggagaaatttgcgcagctggaagctgagaattctatattaaaagacgagaagaaaaccttagaagatatgttaaagattcacaccccagtaagccaggaggagcggttgatctttctggacagcataaagtcgaagtctaaggacagtgtatgggagaaggaaatagagattcttattgaggaaaacgaagatctgaagcaacaatgcatccagctaaacgaagaaatagaaaaacaaaggaacaccttttcatttgctgaaaaaaatttcgaggttaactatcaagagctgcaggaagaatacgcatgtcttctaaaggtgaaagacgatctcgaggacagcaagaacaagcaggaactggagtacaaatcaaaactgaaggcactgaacgaggaactccacctgcaacgaattaatcctacgaccgtcaagatgaagagcagcgtgttcgacgaggacaagacgtttgtggccgaaactcttgagatgggcgaggtggtcgagaaggacacaaccgagttaatggagaagctggaggtcactaagcgagaaaaactggagctgtcgcagagactcagcgatttgtccgagcagttgaaacagaagcatggggaaatttcgttcctgaacgaagaggtgaagtccttaaagcaggaaaaggaacaggtgtctcttaggtgcagagagctcgagatcatcattaaccataatcgtgctgaaaatgtgcagtcctgtgacacccaagtgtccagcctcttggacggcgtggtgacaatgacaagccggggagcagagggttcagtgagcaaggtcaataaatcattcggcgaggagagtaaaataatggtagaagacaaggtgagctttgagaacatgacagtcggagaagaatccaaacaggaacagcttatcttagatcatctgcccagcgttaccaaagaatcatctcttcgggctacgcagccatccgaaaacgacaagctgcagaaggagttgaacgtcttgaagtcagaacagaatgacctgcgtttgcagatggaggcacaacgcatttgcctttccctggtttactcgactcacgtggatcaggtgcgtgagtacatggaaaatgagaaggataaagcgttatgtagtctgaaagaagagctgatcttcgcccaggaggaaaagatcaaggaactgcaaaagattcaccagttagaactacaaacgatgaaaactcaggagaccggtgacgaaggcaaacctctgcatttgctgatcggaaaacttcagaaggccgtctctgaggagtgctcctattttcttcagacattgtgcagtgttctgggtgaatactacacccccgcattaaaatgcgaggtgaatgcggaagataaggaaaactcaggagattacatcagcgagaacgaggaccccgaactgcaagattacaggtacgaggtacaggattttcaagaaaatatgcataccttgcttaataaagtcaccgaagaatataataagttactggtactgcaaaccaggctctccaaaatctgggggcagcagacagatgggatgaagctcgagttcggagaggagaatctgcccaaagaagaaactgaattcctctctatccattcccagatgacaaatctagaggacatcgacgtgaaccacaagtcgaagctgagtagcctgcaagatctggagaagacaaaactggaggagcaggtgcaagagttagaatccttaatctcctcactgcagcagcaattgaaggagacagaacaaaattatgaagcagaaatacactgcctgcaaaagcgactccaggctgtttctgaatccacggtaccaccgtcactacccgtggacagcgtagtcattacggagtctgatgcgcagcggacgatgtatcccggaagttgcgtgaagaagaacattgacgggaccatagagttttctggtgagttcggggttaaggaagagacaaatatcgtaaagctgctggagaaacagtatcaggaacaactggaggaggaggtggcaaaggttatcgtgtcaatgagcatagcttttgcacagcagacagagctttccaggatctctggtgggaaggagaataccgcgagtagcaaacaggcccatgccgtctgccagcaagaacagcattactttaatgaaatgaagcttagtcaggaccaaatcgggttccagaccttcgagactgtggatgttaagtttaaggaggagtttaaaccgctgtccaaggagctgggggagcacggtaaggagattctgctgagcaatagcgacccccatgacatacctgaatcaaaagattgcgtcctcacgatatctgaagagatgttttcgaaggacaaaacttttatagtgcggcagtcaattcacgatgagatcagcgtatcctcgatggatgctagccggcagttgatgttaaacgaagagcagctggaggacatgagacaggaattggtgagacagtaccaagagcatcagcaggccactgaactccttagacaagcccacatgcgacagatggaacgacaacgggaagatcaagagcagctgcaggaagagattaagcgacttaaccgccaactggcccagcgctcaagcatagataacgaaaatctggtctcagagagagaaagggtgctgctggaagaactggaagcattgaagcagctgtcgctcgccggtagagaaaagctgtgctgtgagctgcggaatagttccacacagacgcagaacggtaatgaaaaccagggggaggtggaggagcaaactttcaaggaaaaagaactcgaccgcaagccagaggacgttccgccagagattctgtcaaatgagagatacgcactgcagaaagcaaataaccgcctgctaaagatccttctggaggttgtgaagaccacggccgctgtggaagagacaattggccgtcacgtgctggggatactggacagatcttcaaaatcacagagctccgcctcgctcatctggcgttctgaggctgaagcttccgtaaagtcttgcgtccatgaggaacacaccagagtcacagacgaatccatcccctcctacagcggttccgatatgccaaggaatgatatcaacatgtggagcaaagtaactgaggagggaaccgagcttagtcagcgactcgttagatccggtttcgccggtaccgagattgatccggagaacgaagagctaatgctgaacatctccagccggctgcaggcggctgtcgagaagttgctggaagcaatctctgaaactagctctcagttagaacatgccaaagtaacccagaccgagctcatgagggagagtttccgccagaagcaggaagcaacagagtccctgaagtgccaggaggagctgagggagcgcttacatgaggaaagcagggccagggagcagttggcagtcgagctctccaaggccgagggcgtgatcgacggatacgctgatgagaagactctctttgaaaggcagattcaggagaaaaccgatatcatcgatagactcgagcaggagctcctatgtgcttccaatcggctgcaggagttggaggctgaacagcagcagatccaggaagagagggagctcctctcacgccagaaagaagcaatgaaggcggaggcgggtcctgtcgaacagcagttactgcaagaaaccgagaaactaatgaaagagaagttagaggttcaatgtcaggcagaaaaagtgcgggacgatttgcagaaacaggtgaaggccctggagattgacgtcgaagaacaggtgtcgaggtttattgagctagagcaggaaaagaataccgaattgatggacctccgtcagcagaatcaggcactcgaaaagcagttagagaagatgcggaagttcctggatgagcaagccatcgaccgggaacacgaaagagacgtttttcagcaggagatccagaaactcgaacagcagctgaaagtggtccccaggttccagccaatcagcgagcatcaaacccgggaagtggaacaactggccaaccatctgaaagagaagacagataaatgcagtgagttgctgttgagtaaagagcaactccagcgtgacatacaggaacggaacgaggagatcgagaaactggagttcagagtacgcgagttggagcaagccctcctcgtttctgcagatacgtttcagaaggtagaagatagaaagcatttcggagccgtggaggcaaagcccgaactctcactagaggtgcaactgcaggccgagcgtgatgccattgacagaaaagagaaagaaatcactaatttagaagagcagctagagcagttcagggaagagctggaaaacaaaaacgaggaagtgcagcagctgcatatgcagctcgaaattcagaaaaaggagtctaccacccggcttcaggagctagagcaggagaacaagctgttcaaggacgatatggaaaagctaggcctggccattaaagagtcagacgccatgtcaacccaggatcagcatgttctgttcggaaaattcgctcagattatccaggagaaagaggtggagatcgaccagttgaacgaacaagtcactaagttgcagcagcagctgaaaatcaccacggataacaaagtgatcgaagagaagaacgagttaattagagaccttgagactcagatcgagtgtctgatgtctgatcaggagtgcgtcaagcgcaaccgcgaggaggaaatcgagcagctcaacgaagtcattgaaaaattgcagcaggaactcgcaaatatcggccagaagacctctatgaacgcccatagtctgagtgaggaggctgatagtctgaagcatcaactagatgtggtgatagctgagaaactggccctagaacaacaggttgaaacagcgaatgaggaaatgacctttatgaagaacgtcctcaaggagacgaatttcaaaatgaatcagctcactcaagagctcttcagtcttaaaagggagagagagagcgtcgagaaaatccagtctatccccgaaaattcagtaaatgtcgcaatcgaccatttgagcaaggacaagccagagcttgaagtagtcctgacagaggacgctctcaagagtcttgaaaatcagacatactttaagtcattcgaggaaaacgggaaagggagcatcattaatctggaaactcgcctgctgcaactggaaagcactgtctccgccaaggacctcgaactcactcaatgttacaaacaaatcaaggacatgcaggagcagggccagtttgagaccgagatgctgcagaaaaagatagtgaatcttcaaaagatcgtggaagagaaggtggcggcagcgcttgtgtctcagattcagctagaagccgtacaagaatatgccaaattttgccaggataatcagaccatctcttctgaacctgaaagaaccaatatccagaatctcaaccaactaagggaggatgagctaggctctgatattagcgcgctaacgctccggattagtgagctcgagtctcaggtcgtcgagatgcacactagtttaatccttgaaaaagagcaggtggagatcgctgaaaaaaacgtgctggagaaggaaaaaaaactgctggaactacagaagctgctggagggcaacgagaaaaaacagcgagagaaagaaaaaaagcgaagtccacaggacgtggaggtcctaaagacaaccactgaactgttccatagcaatgaggaaagcggattctttaatgagctcgaagcccttcgagctgagagcgtggcaacgaaagctgagctagcgtcatataaggaaaaggctgagaagctccaggaagaacttcttgtgaaggaaactaatatgaccagtttgcagaaggatcttagccaggtgagggatcacttggccgaagccaaggagaagctgagtattctagaaaaggaggacgagacagaagtccaggagagtaagaaggcctgtatgtttgagccactgccaatcaaattgagtaagtctattgcgagtcagacagacggtaccctgaaaatctcgtcttctaatcagacacctcagattttagtgaaaaacgccggaatacagattaatttacaatccgaatgttctagtgaagaagttactgaaatcatttcccagtttacagaaaaaattgaaaaaatgcaggagctccacgccgcagagatccttgatatggaatcgagacatatatcagagactgaaacgttaaaacgcgaacactatgtggcagtgcagctgcttaaagaagaatgcgggacattaaaagcagtaatacagtgcctccgttccaaggagggtctgcttcgagctgtccataacgaagggatgcaggtgctcagccttactgaatcaccttattcggacggcgaggaccactccattcagcaagtatctgaaccttggcttgaagaacgcaaggcttacataaacaccatctccagtctgaaggacttgataactaaaatgcagctgcagagggaagccgaagtgtacgattcaagccagagtcacgaaagtttttctgactggagaggagaactgctcctcgcactgcagcaggtgtttttggaagagagatcagttctgctcgctgcctttagaaccgaactgactgctctcggaacaacagacgccgttggactgttgaattgtctcgagcagcgaattcaggaacaaggcgtggagtaccaggctgccatggaatgcttacagaaggccgacaggagatccctgctatcagagattcaggccctacacgctcagatgaacgggaggaagatcaccttgaagcgagagcaggaatcagaaaagccctcacaggaactcctggagtacaatattcagcagaagcaaagtcagatgttagaaatgcaagtggaactcagcagtatgaaagatcgcgcaacggagctccaggagcaactgtcaagcgagaaaatggtcgtagccgagctcaagagcgagctggcgcagactaagctggagctcgagacaacgctgaaagcacaacacaagcatctcaaggaattggaagcattcaggctggaggtaaaggacaaaacagatgaagtgcacctcctcaacgacactctcgcctccgaacagaagaagtcacgcgagctccagtgggctcttgaaaaggaaaaggcaaaacttggcagatccgaggagcgcgacaaggaggaactggaagacttgaagttttccctagagagccaaaagcagaggaacctacaattaaaccttctcttagagcagcagaagcagctgttgaatgagtctcaacagaagatcgagtctcagagaatgctttacgatgctcagctgagcgaagaacagggtcggaatctggagttacaggtgctgctcgagagtgagaaggtgaggataagagagatgtctagtaccctcgatcgagaacgcgagctccacgcccaactgcagtcctccgacgggactggtcagtcacgacctcctctgccgtcagaggacttgctgaaagagttgcaaaagcagctggaagaaaaacattctcgaatcgttgaacttcttaacgagactgaaaagtataaactggacagcctccagacccggcagcagatggaaaaagacaggcaggtccataggaaaaccctgcagacagaacaggaggccaacaccgaaggtcagaagaagatgcacgaactgcagtccaaggtggaagacttgcagcggcagcttgaagagaagcgccaacaggtgtataagttggacctggaaggacagcgactgcagggaattatgcaagaatttcaaaaacaggagctggaaagagaggagaaacgagagagtcggagaatcttgtaccaaaaccttaacgagcccaccacgtggtctctgacctccgacagaacaaggaattgggtactgcagcagaaaatagagggggaaacaaaagagtctaattatgcaaaacttattgagatgaacgggggaggcaccggctgtaaccacgagctcgaaatgatccgacagaagctgcagtgtgtggcttccaaactgcaggtgctgcctcagaaagcaagtgagcgcttgcaatttgagacagctgatgacgaggattttatctgggtgcaagagaacattgacgaaatcattttgcaactgcagaagctgacaggccagcagggcgaagagccaagcctagtgtcacctagcacatcctgtggcagccttacagagaggcttttgcggcagaacgccgaactaaccggacacatttcccagctgacagaagaaaagaacgatctgcgtaatatggtaatgaagctcgaagagcagattaggtggtatcggcagactggggcaggaagggataatagttcgagattttcactgaacggaggagcaaatatagaggctatcatagcctccgagaaggaggtgtggaaccgggaaaaactgacccttcagaagtcgcttaaacgagcggaagctgaggtgtacaaacttaaagccgagctgcgaaatgactccttgctgcagacattaagtcctgattcggaacacgtaactttaaagcgtatttatggaaagtatctgcgcgctgaaagctttagaaaggccctcatttaccagaagaaatacctgctcctgttactcggcggttttcaggaatgcgaagatgcaacactggccctactcgccaggatgggcggacaacccgcttttacagacctggaagtcatcactaatcgtccgaaagggttcaccagatttcggagcgccgttcgagtttccattgccattagcagaatgaagtttctggtccggagatggcatagggtgacaggtagcgtgagcatcaacattaatagggatggttttgggctcaatcagggagccgagaaaactgactcgttttaccactcctccgggggtctggagctctacggggagccccgacacactacgtatcggagccggagtgacctcgactacatccgatctcctctgcctttccagaaccggtacccgggaacccccgctgattttaacccagggtctctggcatgctctcagctgcagaattatgatccagatagagccctcactgattacattacccgattggaagccctccagcgccgtctgggtaccatacaatcaggaagcaccacacaattccacgcaggtatgaggagatac

SEQ ID NO: 212855 - DNA, 11736 bp, synthetic construct
  misc_feature 1..11736: note = Description of Artificial Sequence: Synthetic coding sequence
  source 1..11736: mol_type = other DNA
atggaggatgaggagcgccagaaaaaactcgaagctggaaaagcaaagatcgaagagctaagcctcgcgtttctggtccggcagttggcccaatttcgacagaggaaagcacagtcagacggccagagcccctccaaaaagcagaagaaaaagcgcaaaacctcatcttctaaacacgatgtatccgcgcatcacgacctgaacatagaccaatcacagtgcaatgaaatgtacatcaatagctcacagcgcgtggagtctaccgtgatccctgagtctacgataatgcgcacactccactcaggcgaaatcacttcccatgaacaaggtttttccgtcgagctcgaaagcgagatatctactactgccgacgattgctcgtccgaggtcaacgggtgttcattcgtaatgcggaccgggaagccaaccaatttgcttagagaggaagaatttggagtggacgacagttactccgaacagggcgctcaggacagccccacccatctagaaatgatggaaagcgaactcgccggtaagcagcatgaaatcgaagaacttaatcgagaattggaggaaatgagagtgacttacggcactgaggggttgcaacagctccaggaattcgaggcagctatcaaacagcgagatggtatcattacccaattaactgctaacctgcagcaggcccgacgggagaaggacgagactatgcgcgagtttcttgagctcacggaacaatcccagaagctacagatacagtttcaacagttgcaagctagcgagactctgcggaacagtactcatagttcaaccgccgctgatctgttgcaggcaaaacagcagattctgacacaccaacaacagctcgaggaacaggatcacctactcgaagattaccagaaaaagaaggaggattttacaatgcagatcagcttcctgcaagaaaagatcaaggtgtatgagatggaacaggataaaaaggtggagaatagcaacaaggaggagatccaggaaaaggagaccattatagaagaactgaacaccaaaatcattgaggaagaaaaaaaaacgctggagctcaaagacaagctgactacagctgataagctcctaggggagcttcaggagcagatcgttcagaagaaccaagagatcaagaacatgaagttggaactaacgaactctaagcaaaaggaaaggcagagttcagaggagatcaaacagctaatgggaaccgtggaggagttacagaagagaaatcacaaagacagccagtttgaaaccgatatcgtccagagaatggagcaggagacccagcgcaaactcgagcagttgcgggcagagctagacgaaatgtacggacagcagatagtgcagatgaagcaggagctgattcgccaacacatggcgcagatggaggagatgaagacgcggcacaaaggcgagatggagaacgccctgagaagctatagtaacattaccgtcaacgaagaccagatcaagcttatgaacgtcgcaattaatgaattgaacatcaaactgcaggatacaaactctcagaaagagaagctgaaagaagaactgggcctcatcctggaagaaaaatgcgccctgcaacgacagctggaggatttagtcgaggaattgagcttttcgcgcgagcagatacagcgcgcacggcagacaatcgctgagcaggagagtaagcttaatgaagcacataagtcactgtccaccgtcgaagatctgaaggcggaaatcgtctcagcgtctgaatcccgaaaggaattagaattgaaacatgaagctgaggtaacaaattacaaaattaagctggagatgctcgaaaaagagaaaaacgcagtgctagatagaatggcagaatcccaggaggccgagttggaaagattgaggactcagttgctatttagccacgaagaggagctctctaagctgaaagaagacctggagatcgagcaccgcataaatattgagaagctgaaggacaacctcggtatacactacaaacagcaaatagacggtctccagaatgagatgtcacagaagattgagaccatgcaattcgaaaaagataaccttatcactaagcaaaatcaattaatcttggaaatttccaagctgaaggacctgcagcagagcctcgtgaattctaagtctgaagagatgacactgcagatcaacgagctgcagaaggagatagagatactcaggcaggaggagaaggagaaggggaccctggagcaggaggttcaagagctgcaacttaagactgagctgctcgagaagcagatgaaggagaaggagaacgacctgcaggagaagttcgctcaacttgaagccgagaactctattctgaaagacgaaaaaaagaccctagaggatatgttgaagatccacaccccagtcagccaggaagaaaggctcatctttcttgactcaatcaaatctaagagcaaagattccgtgtgggagaaggaaatcgaaatactgatagaggagaacgaagatttgaagcagcagtgcattcagttaaacgaagaaattgagaagcagagaaatacgttttccttcgccgagaagaactttgaagtgaactaccaggaattacaggaggaatacgcctgtctgttgaaagtgaaagacgatttggaggattcaaaaaacaagcaggaattggaatacaaatccaagttgaaagccctgaacgaggaactccacctgcagagaattaatccgactacagtgaagatgaaaagctcagtctttgacgaggacaagacattcgtggccgagacccttgagatgggcgaagttgtggaaaaagataccaccgagttgatggaaaaactcgaggtgaccaagagggaaaaacttgagctgtcgcagcgactgagcgatctgagcgaacagctgaaacagaagcatggcgaaatatctttccttaatgaggaagtgaagtctcttaaacaggagaaagagcaagtgtctctgaggtgccgtgaactggagattatcatcaatcacaacagggcggaaaacgtacaatcttgtgacacgcaggtttcttctttgctggatggtgttgtaacgatgacatcgcggggagcagagggaagtgtgagcaaggttaacaagagtttcggcgaggagagtaagatcatggtggaagacaaagtctctttcgagaacatgaccgtgggagaagagtcgaagcaggagcagttgatccttgatcatctgcccagcgtgactaaagaatcttcgttacgcgcaacccagccctcagagaacgataaactgcagaaagaattaaacgtgctgaagagcgaacagaacgacctcaggctgcagatggaagctcaaagaatctgtttatcactcgtgtacagtacccacgtagaccaagttcgggaatatatggagaatgagaaagacaaagctttatgctccctgaaggaagaactgatcttcgcccaagaggagaaaatcaaagagctgcagaaaatccaccagctggagcttcagactatgaagacccaggaaaccggcgacgagggaaaacctttacatctacttataggcaagctgcagaaggccgtgagcgaggaatgttcttatttcctgcagacactgtgtagtgtgctgggcgagtattacacaccggctttaaaatgcgaggtgaatgccgaggacaaggagaacagcggggattacatctccgagaatgaggatcccgaactgcaggactatagatacgaagttcaggactttcaagaaaatatgcacactttgctgaacaaagtcactgaagagtataataagttgctggtgttacagactaggctgtccaaaatttggggtcagcagacggatggtatgaaacttgaatttggcgaagagaatttgcctaaagaggagaccgagtttttgtcgatccacagccaaatgactaatctggaggatatagatgtgaaccacaaatcaaaattgtcgagtctgcaagacctggagaagaccaaactagaggaacaggtgcaggagttagagagtctgatctcatcactgcagcagcagctgaaagaaacagaacagaactacgaggcggaaatacattgtctgcagaagcgactgcaagccgtctcagaatcgaccgtgcctccgtccctccctgtcgacagtgttgtgatcacagagtctgacgcccagcgcaccatgtaccctggttcttgcgtgaagaagaatattgatggaaccattgagttcagcggtgaattcggtgtgaaagaggagacaaacatcgtcaaactcctcgaaaaacaatatcaagaacagttggaggaggaggtagccaaagtgatcgtgagcatgagtattgcctttgctcagcagaccgagctttccaggataagcggcggtaaagagaacaccgcctcctcgaagcaggcccatgcagtgtgccagcaagagcagcattatttcaacgaaatgaagctatctcaggatcagattggattccagaccttcgagaccgtcgacgttaagtttaaagaagaatttaagcctctcagcaaggagctgggagaacatggaaaggagatcttactgtccaactcagatcctcacgacatccctgaatctaaggattgtgtgcttacgatcagcgaagagatgttttccaaggacaagacgtttatcgttaggcaatccatccacgacgagatctcggtgtcctcaatggatgctagccgtcagctcatgctgaatgaggagcagctcgaagacatgcggcaagagctagtgaggcaataccaggagcaccaacaggccactgaactgctgcggcaggcacacatgaggcagatggagcgtcaacgcgaagatcaggagcagctgcaggaagaaattaaaagactgaatcgacagctcgcccagagatcttcaatagataatgaaaatctggtcagcgaacgggagcgtgtgctgctcgaggaactggaggcgctcaagcaattgagcctggctggaagagagaaactctgctgcgagcttcggaactctagcactcaaacccaaaacggcaacgaaaaccagggcgaagtcgaggagcagacctttaaggaaaaggaactggaccgtaagcctgaggacgtcccgccagaaattctgtccaacgaacggtatgcattgcagaaagccaacaatagacttctgaaaatcctgctggaagtggtcaagactactgctgcagtggaggagacaataggccgacatgtgttagggatccttgaccggagtagtaagtcccagtcttccgcgagcttaatctggcgcagtgaggcggaggcatcagttaagtcatgtgtacatgaggaacacacccgcgtgacagatgaatccattccctcctactccggctccgacatgccacggaatgatattaacatgtggagcaaggtcaccgaggaggggaccgagctatcgcagcgccttgttagaagcggattcgccggaaccgagatcgacccagaaaacgaggagctcatgcttaacattagcagcaggctgcaggccgcagtggagaaattgctcgaagctatttccgaaaccagctcccagttggagcatgctaaggtgacccaaaccgagttgatgcgagagtctttcagacaaaagcaggaagccaccgagtccctgaaatgtcaggaagaattgagagagaggctgcacgaggaaagtcgggcaagggagcagctcgcagtggaactctccaaggctgagggcgtcattgacggctacgctgacgagaagaccctcttcgaaagacaaatccaggagaaaaccgatatcatcgaccgcctagagcaggagctgctgtgcgctagcaacagattgcaagaactggaagccgaacagcagcagatacaagaggagagagagctgcttagccgacagaaggaggccatgaaggctgaagcgggtcccgtcgagcagcagttactgcaggaaaccgagaaattgatgaaggaaaaacttgaagtccagtgccaggccgaaaaagtgcgggatgatctgcagaagcaggtcaaagccttggaaatagatgtagaagaacaggtttccaggtttatcgagctggagcaggaaaagaatacagagctgatggacctgaggcagcagaatcaagctctggagaaacaacttgagaagatgcggaagtttctggacgaacaagctattgaccgcgagcacgagcgggacgtatttcagcaggaaattcagaagcttgagcagcagttgaaggttgttccccgatttcagccaatcagcgagcatcagacgagggaggtagagcagctggcaaaccatctcaaggagaagaccgacaaatgctcagagttactgctgtccaaggaacagttgcagagagacatccaggaacgaaacgaggaaattgaaaagcttgagttccgggtgcgagagctggaacaggcgctgctggtatccgcagataccttccagaaagtggaagataggaaacattttggtgccgtagaggccaagcctgagctcagtcttgaagtgcagttacaggctgaacgagatgccattgaccgtaaagagaaggaaatcacaaacctcgaagaacagctggagcagttcagggaggaacttgagaataagaacgaagaagtccagcaactccacatgcagcttgagattcagaagaaggaatctaccacccgtttgcaggagctggaacaggaaaacaagctgttcaaggacgatatggagaagctaggcctggccattaaggaaagcgacgccatgtccactcaggaccagcacgttttattcggaaaattcgctcagatcatccaggagaaggaggtggagatagatcaactcaacgaacaggtcaccaagctgcagcagcagctgaagattacaaccgataacaaagtgatcgaagaaaaaaatgaactcattagggatttagagacgcagatcgaatgcttaatgagtgaccaagaatgcgtgaaaaggaacagggaagaggaaatagaacagctgaatgaggtcattgaaaaactgcagcaggagcttgcaaatatcggccagaagacaagcatgaatgcccacagcctcagcgaggaagcggacagcctgaaacaccagcttgacgtcgttatcgccgagaagctggcacttgaacaacaagtggagaccgctaacgaggaaatgacgttcatgaagaacgtactgaaggagactaatttcaaaatgaatcagttaactcaggaattgttctcgcttaaaagagaaagggagtctgttgagaagattcaaagcataccggagaattcagtgaacgtcgcaatagatcacctgagcaaggataagcccgagctcgaggtcgttctgacagaagatgcattgaagtccctggaaaatcagacctatttcaagtcatttgaagagaacgggaaaggcagcatcattaatctggagaccagactgctgcagttggagtccaccgtctcagccaaggacttagagcttacacaatgttacaagcagattaaggatatgcaggagcagggacagttcgagaccgaaatgctgcagaaaaagatagtgaacctgcagaagattgtggaagaaaaggtggccgcagcacttgtgtctcagattcagttagaggccgtgcaggagtacgccaagttttgtcaagacaaccagactatcagctcagaaccggagagaacaaacattcaaaatctcaaccagcttagggaggacgagcttggctcagatattagtgctctcacgctgcggatcagtgagctggaatcccaggtcgttgagatgcatactagtctcatcctagagaaggagcaggtggaaattgctgagaaaaatgtgctggagaaggaaaaaaaactgctcgaactgcagaaacttctggagggcaatgagaaaaagcaaagggaaaaagagaagaaaaggtctcctcaagacgtggaggtcctgaaaaccaccacggaactcttccactccaacgaggaatccggatttttcaatgaattagaggcgctgagggccgaatctgttgccacaaaggcggaacttgcatcgtataaggagaaggccgagaagctccaggaagaacttttagtgaaggaaacaaacatgacctcattgcagaaggacctgtctcaggtccgggaccacttagctgaggctaaagaaaaactatcaatccttgagaaggaggacgagactgaggtccaagagtcgaagaaggcatgtatgtttgagccactgcccataaaattgtccaaatcaatcgcgagccagacggacggaactctgaaaattagcagcagcaaccagactccacagatcctggtcaagaatgccggaatacagattaatctacagtctgagtgttcaagcgaagaagttaccgagatcatcagccaatttaccgagaaaattgagaagatgcaggagcttcacgcagctgaaattctcgatatggagagtcgccatatctccgaaactgagaccttgaagagagaacactatgtcgcagtgcagcttctaaaggaagagtgtggcaccctgaaggctgtgatccagtgtctgcgatccaaggaagtatttgggttctacaatatgtgcttctctaccctctgtgatagtggtagtgactggggacagggaatctatctgactcactcacagggatttgacattgcttctgaaggacgcggagaggagtccgaatctgctaccgactccttccctaagaagatcaagggcctgttgcgtgcggtacataatgaggggatgcaagtcctctccttaactgaatcaccctattccgacggtgaagatcatagtattcagcaggtgtccgagccttggctggaagagaggaaggcttatattaatacaatcagcagcctcaaggatctgatcacaaagatgcagctgcaaagagaggcggaagtctacgactcctcccagagtcacgagtcttttagtgattggcgaggggaactgctcctggctctccaacaagtctttctggaggagaggtcagtgcttttagctgcttttcggaccgagctgactgcactcgggactaccgacgccgtcggcctcctgaattgcttggagcagcgaatccaggaacagggtgtggagtatcaggccgctatggaatgtctgcaaaaagccgatcgtaggtctttgctgtctgaaatccaggctttacatgcccaaatgaatgggagaaagatcacactgaaacgggaacaagaatccgaaaagccctcacaggaactgcttgaatacaatatccagcaaaaacagtcccagatgctggagatgcaggtggagttatccagcatgaaggaccgggcaacagaactccaagagcaactgtcctcagagaagatggtggtagctgaactcaaatcagaactggctcagacgaagctagaactggaaaccacattgaaggcccaacacaaacacttgaaagagcttgaagcatttaggctggaagtcaaagacaagactgatgaggtgcatctcctgaacgacacactggctagtgagcagaagaagagtcgtgagcttcagtgggcactggaaaaagaaaaggcaaagcttggtcggagtgaagaacgcgacaaggaagagctggaggacctgaaattctccctggagtcacagaaacagcgaaatttgcagttgaacctcctccttgagcagcaaaagcagttgcttaatgagtcccagcagaaaatcgagtcccagagaatgctgtatgacgcgcagctcagcgaggaacaaggcaggaaccttgaactgcaagtgctactcgagagcgagaaggtgaggattcgtgagatgtcatcgaccttagacagagagcgggaactgcacgcgcagctgcagtcttcagacggcaccggtcagtcccgacctcctttgccatctgaggacctgctgaaggagctgcagaagcagctggaggagaagcactctcgcatcgtagaactgctgaatgagacagaaaagtataagttggactctctacagacccgccaacagatggaaaaggaccgccaagtgcacagaaaaacactgcagactgagcaggaagctaacacagaaggccagaaaaagatgcatgagctgcagtcaaaggtcgaagatcttcagcggcaactagaggaaaagcgtcagcaagtgtataaattagacttggagggccagagactccagggaatcatgcaagaattccagaaacaagaactggaaagagaggaaaaacgcgagagccggcgtattctgtaccagaatcttaatgaaccaactacatggagccttacttctgaccgaactaggaactgggtactccagcagaagatcgaaggagagaccaaagagtcaaattacgccaagttaatcgaaatgaatgggggaggcacagggtgcaatcacgagctcgagatgattagacagaaactgcagtgcgtagctagcaagctccaggtacttccccagaaagccagcgaacggctgcaatttgagactgctgatgatgaggactttatctgggtccaggaaaacattgacgaaataatccttcagcttcagaaactaaccggccagcagggcgaagaacccagtctggtgtccccatcaacctcttgcggatctcttaccgaaaggctcctgagacagaacgctgagctgaccggccacatttcccagctcaccgaggagaaaaacgatttgcggaatatggtcatgaaactggaggaacagattaggtggtatagacagactggggcaggcagagacaactcaagtagatttagcctgaatgggggagccaatattgaggccatcatcgccagcgaaaaggaagtatggaaccgcgagaagctcaccttgcagaagagcttgaaacgtgccgaagctgaggtatacaagctgaaagctgagctcaggaacgactcactgcttcagacgctgagtccggactcggagcacgtcacactcaaaaggatttatggtaaataccttcgagctgaaagtttccggaaggcgttgatttaccagaaaaagtacctgctgctgctgctgggcggattccaggagtgtgaggatgcaaccctggccctgctggccaggatgggaggccagcccgcatttaccgatctagaggtaataacgaatcggcctaaggggtttacccgatttcgttccgctgttcgggtttccattgccatctcaagaatgaaatttctcgtgcgacgctggcatcgcgtgactggcagtgtctccatcaatatcaatcgagacggctttggcttgaatcagggggcagagaaaacggactcattttaccactctagcggcggactcgagctctatggagaaccacgccacaccacctaccggagtaggtctgacctcgattatatccggagtccactgccgtttcaaaatcggtaccccggaaccccagccgactttaatcccggaagcctcgcctgctctcagctacaaaactatgatccagacagggctctgacagactacattacgaggctggaagccctccagagacgattgggcactatccagtcaggctcaaccacgcagtttcacgctggcatgcggcgttat

SEQ ID NO: 212856 - DNA, 4932 bp, synthetic construct
  misc_feature 1..4932: note = Description of Artificial Sequence: Synthetic coding sequence
  source 1..4932: mol_type = other DNA
atggaggatgaggaacggcagaaaaaactggaagctgggaaggccaaaattgaggagctgagtttagcttttctcgtgagacaactcgcccagtttcggcagcgcaaggcacagtctgacggacagtctcctagtaaaaagcagaagaagaaaagaaaaaccagtagttctaaacatgatgtttctgctcatcatgacctgaatatagatcagtcccagtgtaatgagatgtacataaattcaagccagagggtggagagtaccgttatcccagagagcacaattatgaggaccctacactctggtgaaattacctcccatgagcaggggttctcagtcgagctggaatccgagattagcactacggcagatgattgtagttctgaggttaatggctgctcatttgtgatgaggaccggaaaacccaccaatctgctccgcgaggaagaattcggcgtcgacgatagttactccgaacagggtgcgcaggactcacctacacacttggagatgatggagtccgaattggccggaaagcagcatgaaattgaggagctcaaccgcgagttggaagagatgcgagtcacctatggaactgaagggctccaacagcttcaagagttcgaggctgccatcaaacaacgcgatggcatcatcacccaattgaccgccaaccttcaacaagctcgcagagagaaagacgagaccatgagagagttcctagagctaaccgagcagtctcaaaagctccagattcagtttcaacagctccaggcgagcgaaacactgaggaactcaactcattctagcacagccgcagatctgttgcaggctaaacagcagatactgacacatcaacaacagctggaagaacaggaccacctgcttgaagattaccagaagaaaaaggaggattttactatgcagatctcgtttcttcaggagaaaatcaaagtctacgagatggaacaagataagaaagtggaaaactcaaacaaggaggagatccaggagaaagaaacaattatagaggaactcaataccaagattatagaagaggaaaaaaagacactggaacttaaggacaaactgactaccgcagataaactcctgggggagttacaggagcagatcgtgcagaagaaccaagagatcaagaacatgaagttggaattaactaactccaagcaaaaggagcgccagagctccgaggagatcaagcagttaatgggtacggtcgaagaactgcagaagagaaatcacaaagattcccagttcgaaaccgatatcgtccagagaatggagcaagaaacccagaggaaacttgaacagctgcgcgctgaactggacgagatgtacgggcagcaaatcgtgcaaatgaaacaagaactaattcgccagcacatggcccaaatggaggaaatgaagactcggcacaaaggcgaaatggagaacgccttgagaagttactctaatataacagttaacgaagatcagataaagttgatgaatgtggccattaatgagctgaacattaagctgcaggatacgaactcacagaaagaaaagttgaaagaggagctaggattgatcctagaggaaaaatgtgcgctgcagagacagttggaggatctggtggaagaactgtcttttagccgtgagcagatccagcgcgctaggcagaccatcgccgaacaagagagcaaacttaacgaagcccataagtccctgtctacagtggaagatttaaaggctgaaattgtcagcgcttccgagtctcgtaaagagctagagctcaagcacgaggctgaagttaccaactataaaatcaaactggagatgctggagaaagaaaagaatgctgtccttgatcgaatggccgagtcccaggaggcagagctcgagagattaaggacacaactgttgttctcacacgaggaagagctgtcaaaactgaaggaggatttggaaatcgaacacagaatcaatatcgagaagctgaaggataacctgggaatccactacaagcaacaaatagatggactccaaaacgagatgtcacagaagattgagaccatgcagtttgaaaaagacaacctgatcactaaacagaaccagcttattctggagatctctaaacttaaggatctccagcagtctctggtgaattcgaagtccgaggagatgaccttacagattaatgagctccagaaggaaatcgaaattctgcgacaggaagaaaaggagaagggtacgctggaacaggaagtacaggagctgcagctgaagaccgagctactggaaaagcagatgaaagagaaagagaacgacctgcaggagaagtttgctcagctcgaggcggaaaactcaattctaaaggacgaaaaaaaaactctggaagatatgctcaaaatccatacacccgtgtcacaagaagaaaggttgatttttctggacagtatcaagagtaagtccaaggattcggtgtgggagaaagaaatagagatcctgatcgaggagaacgaagatctgaagcaacagtgtatccagctcaacgaggaaatcgagaagcagcggaatacttttagctttgctgaaaagaactttgaggttaactatcaggaactacaagaggaatacgcctgccttctaaaagtgaaagacgaccttgaggattccaaaaacaagcaggaactcgagtacaaatctaaacttaaggccctgaatgaagaactccatcttcaacgcataaatccaactaccgtgaagatgaagagtagcgtttttgatgaggacaaaacctttgtagctgagacccttgagatgggcgaggtggtggagaaggatacaacagagttaatggaaaaactcgaagtaactaagcgggagaaattggagctgtcccagaggctgagcgatttatccgagcagctcaagcagaagcacggagaaatctcgtttctcaacgaggaggtgaaatcactcaagcaagagaaagagcaagtatctcttagatgccgtgagctggagattataatcaaccacaacagagctgaaaacgtccagagctgcgacactcaggtgtcaagtctcctggatggtgtcgtcaccatgacaagccgaggtgccgaaggcagtgtgtccaaggtgaacaaaagcttcggggaggaatccaaaattatggttgaggataaggtatcttttgaaaatatgacggtcggcgaagagagcaaacaggagcaattgattttagaccacctcccatcagttacaaaggagtcttctctcagagcaactcaacctagcgaaaatgacaagttgcagaaagaacttaacgtgctgaaaagcgaacagaatgacctgaggctccagatggaagctcagcgcatttgcctgtctttggtctactcgacacatgtagaccaggtgagagaatatatggaaaatgaaaaagacaaggctctgtgtagccttaaagaggagttgatcttcgctcaggaggaaaaaatcaaggaattgcaaaaaatccaccaacttgagttacagactatgaaaacacaggaaactggcgacgaaggaaaacccctgcatctacttatcggtaagctgcagaaggccgtgtccgaagagtgcagctacttcctacagactctatgcagcgtcctaggagagtattacacccccgcactgaagtgcgaagtcaatgctgaggacaaagaaaattctggggactatatcagtgaaaacgaagatcctgagttgcaagattatcggtacgaagtgcaagactttcaggagaatatgcacaccctgctcaacaaagtgacggaagaatataataaattgctcgtacttcaaacgcggttaagcaaaatttggggtcagcagacagacggcatgaagcttgagttcggagaggagaaccttcctaaagaggagaccgagttcttgtcgatacatagtcagatgactaacctggaagatatagacgtcaatcacaagagtaaactgagctccttacaggacctcgagaagacaaaacttgaggagcaggtacaggaactcgagtccctaataagctccctgcagcagcagttgaaggaaaccgaacagaactacgaagccgagatacactgcctccagaagcgactacaagccgtgtcggagtcgacagtgccgccttccctgcctgtcgactctgtcgtcatcaccgagtctgacgctcaaaggactatgtatccagggtcttgtgttaaaaaaaacatagacggaacaattgaattctcaggcgaatttggagtgaaggaggaaactaacatagttaagctgctcgagaagcaatatcaggagcagttagaggaagaagtggcaaaggtgattgtgtctatgagcatcgcctttgcccagcagactgaactgtctcgtatatctggtggaaaagaaaacactgcaagctcgaaacaggctcacgccgtgtgccaacaggagcagcactatttcaacgaaatgaaactgtcccaggatcagatcggctttcagacatttgaaacggtcgacgtaaagttcaaagaagagtttaaaccactgagtaaggagcttggtgaacacggaaaagagattctgttgtccaactccgacccccatgatattcctgaaagcaaggattgcgtgctgactatttcagaggagatgtttagcaaagataagacttttattgttcgtcagtccatacacgatgagatctcggtgtcctcaatggatgcctctcggcagttgatgcttaatgaggagcaactggaggatatgaggcaggagcttgtaagacaatatcaggaacaccagcaggctaccgagctgctgcgtcaggctcacatgagacagatggagaggcagagggaggatcaggaacagctgcaggtgagagttctgtag

SEQ ID NO: 212857 - DNA, 11631 bp, synthetic construct
  misc_feature 1..11631: note = Description of Artificial Sequence: Synthetic coding sequence
  source 1..11631: mol_type = other DNA
atggaagacgaagaacgccagaaaaagctggaagctggcaaagcaaaaatagaagaactttctttggcctttctggtacgtcagctggctcagttcagacagcggaaagcacaaagtgacggccagtcaccttcgaagaagcaaaagaagaaacgcaagacatcctcttctaagcacgatgtgtccgcccaccacgacctgaatattgatcaatctcagtgcaacgagatgtacatcaacagcagtcagcgggtagagagcaccgtaataccagaatctaccatcatgagaaccttgcactccggagaaattacatcacacgagcaggggttttctgttgagctcgagtcggaaatatctacaactgccgatgactgcagctccgaggtaaatggctgtagcttcgtaatgcgaacggggaaacccaccaacctacttcgcgaagaagagttcggcgtggatgattcttattcagaacagggcgcacaggactcccctacccatttggaaatgatggaaagcgagctcgctggcaagcaacatgagatagaggaattaaacagagaattggaagagatgcgcgtgacctacgggaccgagggcttgcagcaattacaggaattcgaggctgcgataaagcaaagggacggaattattacgcaattaactgccaatctgcagcaggcccgaagagagaaggatgagaccatgcgagaattcctggaactgaccgagcaatctcagaagctgcaaatccagttccaacaattacaggcctcagagacactgaggaattctacgcatagcagtaccgcggctgacttgctgcaggctaagcagcagatcctaacgcatcagcagcagctcgaggaacaggaccacttactagaagactatcagaaaaaaaaagaggatttcaccatgcagatttcatttctacaagaaaaaataaaggtttacgagatggaacaagataaaaaagtggagaactcaaataaggaagagatccaggagaaagaaaccattattgaagagttgaacacaaaaatcatcgaagaagaaaagaagacacttgaactcaaggacaagttgaccacagctgataagctgctgggagagctgcaggaacagattgtacagaagaatcaagagattaagaacatgaagctggaacttaccaacagcaaacagaaggagcggcagtccagcgaagaaattaagcagctcatgggcactgtcgaggaactccagaaacggaaccataaagactcccagttcgagacagatatcgtccagcgcatggagcaagaaactcaaaggaagttggaacagctaagggccgagctggacgagatgtacggccagcagattgtgcaaatgaaacaggagcttattcgacagcacatggcacagatggaagaaatgaaaacacgccacaagggcgagatggagaatgctttgcggtcttactcgaacattactgtgaacgaagatcagataaaactgatgaacgtggcaatcaacgagctgaatattaagctccaagacaccaactcccagaaagagaagctgaaagaggaactcggactgattctggaagaaaaatgcgccctccagcgccaactcgaagacttagtagaagagctctcattctcccgagagcagatacagcgcgctagacagacgattgccgaacaggagtctaaactcaacgaagcacacaagtccctgagcaccgtcgaagacttgaaggccgaaatcgtgagcgctagcgaatcacgaaaggagcttgagctaaagcatgaagctgaggtgacgaattacaaaataaaactggagatgctagagaaggagaaaaacgcggtgttggaccgcatggccgaaagccaggaagctgagctcgagaggctgagaacacagctcctttttagccacgaggaggagctgagtaaacttaaggaggatcttgaaatcgagcaccggattaatattgagaaacttaaagataacctcggcatacactacaaacagcaaatcgacggcctacagaacgaaatgagccagaaaattgaaactatgcaattcgaaaaggataacctgatcactaagcagaaccagctcattctcgagatttctaaattaaaagatttgcagcagtccctcgtgaattccaagtccgaggaaatgactctccagatcaatgaactgcaaaaagaaatcgagatcctgagacaggaggaaaaggaaaagggcacactcgagcaggaagtgcaggagctgcagctgaagaccgagctgctggagaagcagatgaaggaaaaggagaatgatctgcaggaaaagtttgcccagctagaggccgagaattccatcctcaaggacgaaaagaaaaccctggaagacatgctgaagatacacacccctgtgtcacaagaagaaaggcttatcttcttggactccataaaaagcaaatcaaaggactcagtctgggagaaggaaatcgagatcctcattgaagagaacgaagacctaaaacagcagtgtattcagctgaatgaagagattgaaaaacagcgtaacacattctcctttgccgaaaaaaattttgaggtaaactaccaggagcttcaagaggagtacgcatgtctcttaaaggtcaaggacgatctcgaagattcgaaaaacaagcaagagttggagtataagtcaaagctgaaagcgctgaacgaggaactgcatctgcagagaatcaatccgaccacagtgaaaatgaagtccagcgtgtttgacgaagataagacattcgtcgcggagactcttgagatgggcgaggtggttgagaaggatactacggaactcatggaaaagttggaagtaaccaagcgggaaaaattagaactctcgcagcgactcagcgatctgagtgagcagttgaagcagaaacatggggaaataagcttcctgaatgaggaggtgaaatctttaaagcaggaaaaggaacaggtttctctgaggtgtcgggaactggaaatcatcatcaatcataaccgggctgagaacgttcagtcatgcgacacacaggtgtccagcctactcgacggagtggtcaccatgacctcccgcggagcggagggttccgtaagcaaggtgaataaaagctttggcgaggagtctaaaatcatggtagaggataaagtgagttttgaaaacatgaccgtgggggaggaaagtaagcaagagcaactgattctggatcatctgccttcagtgacaaaagaatcctctcttagggccacgcagccctcagaaaacgataagttgcagaaagaactgaacgtgctgaagtctgagcagaatgatctgcggttacagatggaagcgcagcgcatctgtctcagcctggtgtatagcacacacgtagatcaagtgcgggagtacatggagaacgaaaaggataaggctctgtgtagtctgaaagaggagcttattttcgcccaggaggaaaaaatcaaggagttacagaagatacatcagctggaactccagactatgaaaacacaggagactggagatgaggggaaaccactgcacctgctgatcggcaagctccagaaagcagtctccgaggagtgtagctacttcctgcagaccctatgctcagtcttgggtgagtattatacacctgcactgaagtgtgaagttaacgctgaagacaaggaaaattcaggcgattacatctccgagaatgaggacccggagctgcaggactataggtatgaggtacaggattttcaggaaaacatgcacaccctactaaataaggtgactgaagaatacaataaattattagtgctccaaactaggctgagtaaaatctggggccagcagaccgatggtatgaaactcgagtttggtgaggagaatttgcctaaagaagaaactgagttcctttctatccattcacaaatgactaacctggaggacatagatgtgaatcataaaagcaagctgtcctccctgcaggatcttgagaagaccaaactcgaggaacaggtgcaggagctcgaaagtctgatttcttcactccagcagcagctgaaagagacggaacaaaactacgaagccgaaattcactgtttacagaagcgtctgcaggctgtgagcgaatccacagtgccgccatctcttccagtggacagtgtagtaataaccgaatctgatgcccaaagaactatgtaccctgggagctgtgttaagaagaatattgatggaaccatcgagttctctggggaattcggggtaaaagaagagacaaatattgtgaagctcctcgaaaaacagtatcaagaacagttagaggaggaggtggccaaggtgattgtgagcatgtccatcgcctttgctcaacagacagagctgtccaggattagcggagggaaagaaaacaccgcctcttccaagcaggcccatgccgtgtgtcagcaggaacagcattattttaatgaaatgaaactgtctcaggatcagattgggttccagacatttgaaaccgtggatgtcaaattcaaggaggaatttaagccattgagtaaagaattgggggagcatggaaaggagatattgttgtccaatagcgaccctcacgacattcctgaaagtaaagactgtgtcttgaccatatccgaagagatgtttagtaaagataagacattcatcgtcagacagagtatacacgacgagataagcgtgtctagcatggacgccagtcggcagctaatgctgaatgaggaacaattggaggatatgaggcaggagctcgtgaggcagtatcaagaacaccaacaggccaccgagctgttgaggcaggcacacatgagacagatggagcggcagcgggaagatcaggaacagctacaagaagagatcaaacgcctgaacagacaattagcacagcgaagctccatcgataatgaaaacctcgtgtccgaacgagagagggtgctcttggaagaattggaggctctcaaacagctttcattagcaggtagggagaagctatgctgtgagctcaggaacagctccacccaaactcaaaatgggaatgagaatcagggtgaggtggaagagcaaaccttcaaagagaaagaattagatcgtaagcctgaggacgtcccacccgaaatcctcagcaatgagcgctacgcacttcagaaagccaacaataggctgttgaaaattctcctcgaggttgtcaaaacaaccgcagctgttgaggagactattggcagacatgtgctgggaatcctggaccggtctagtaaatcccagagcagtgcctccctgatctggcgatccgaggctgaagcatccgtgaagtcgtgcgtgcatgaggagcatacccgagttacggacgagtcaattccaagttactccggctccgatatgccgcgtaatgatatcaacatgtggtctaaagtaactgaggagggaacagagctatcacagcggctcgtgaggagtggctttgccggaaccgaaatcgatcccgagaacgaggaactgatgctgaatatttcctctagattgcaggcagctgtggagaagcttctagaagccatatcggaaacttccagccagctcgagcacgctaaggtcacccaaaccgaactgatgagagagtccttccggcaaaaacaggaagccaccgaatcactgaagtgccaggaggagctgcgagagagacttcacgaggaaagtcgggcaagggagcaactggcagtcgaattgtccaaggccgagggggttatcgatggctatgctgatgagaagacgctctttgaaaggcaaattcaggagaaaactgatattatcgacaggttagagcaggaacttctttgcgcaagcaatcgcctgcaggagctggaggcagaacaacagcagattcaagaggagagagagctgctctccaggcagaaggaggctatgaaagcggaggccggtcctgttgaacagcagcttctgcaagaaacagagaagctcatgaaagagaagttggaggtacagtgccaagctgaaaaagtacgagacgacctgcagaaacaggttaaggcactggaaattgacgttgaggaacaagtaagcaggttcattgagctggaacaagaaaagaacaccgaactaatggaccttaggcagcaaaatcaagcactcgagaagcagctggaaaaaatgcggaaattcctggatgagcaagctattgaccgcgagcacgagcgggatgtttttcagcaggaaattcagaaattggaacagcagctgaaagtggtgccacggttccaaccgataagtgaacatcaaactagagaggtagagcagctcgcaaaccatctcaaagaaaagaccgacaagtgttccgaactgcttctctctaaggagcagctccagcgagatatccaggaaagaaatgaggaaatcgagaaactagagttcagagtccgtgagctggaacaagcccttctcgtggaagacaggaagcacttcggagcggtggaagctaagccggagctgtcgctggaggtgcagctgcaagccgagcgtgatgccattgatcggaaagaaaaggaaattactaatttggaggagcagctggagcagttccgagaagaattggaaaacaaaaatgaggaggtccagcagctgcacatgcaactggaaattcagaaaaaggagagcactacccgccttcaggaactagagcaggagaacaagttattcaaggacgatatggagaagctgggtctggcgatcaaggagagcgatgctatgtcaacccaagaccaacatgtgttgtttgggaagttcgctcaaattatacaagaaaaagaagtcgagatcgatcagctcaatgaacaggtaaccaagctgcagcagcagcttaagatcaccacagacaataaggtgattgaggaaaagaatgagctgattcgtgacctcgagacgcagatcgagtgtctgatgagcgaccaggagtgcgtgaaacgaaacagagaagaggaaatcgaacaattgaatgaagttattgaaaaactgcagcaggagctggcaaacatcggccaaaagacatccatgaatgctcacagtctgagcgaagaggccgacagtttgaagcaccagctcgatgtggtgatcgctgaaaaactggctcttgagcagcaggtggagactgcaaacgaagagatgacgtttatgaaaaacgtcctcaaagaaaccaacttcaaaatgaatcagctgacacaggaactcttttctctgaagagagaaagagagagcgtggaaaaaatacagagcatacccgaaaacagcgtgaacgtagcaattgaccacctcagtaaagataagccagagctagaagtggtcctgactgaagatgctttgaaatctctcgagaaccaaacctacttcaagagctttgaggagaacggcaagggatccatcattaatttagagactcgactgctccagctggaatctacagtgtcagccaaagaccttgaactcacacaatgctacaaacagataaaagatatgcaggagcaggggcaatttgagacggaaatgctgcagaaaaaaatagtgaacctccagaaaatcgtcgaggaaaaggtcgccgcagccttggtctcccagatacagctggaagccgtgcaagagtatgccaagttttgtcaggacaatcaaactatatcttccgaaccagaacgcaccaatatccagaacctaaaccagctcagggaagatgagctgggaagcgatatcagcgctttaactttgagaattagtgagctggagagccaggtggtggagatgcacaccagtctgattttggagaaggaacaggtggaaatcgcggaaaagaacgtgttagagaaagagaagaagttactggagttgcaaaaactgctggaaggcaatgaaaaaaagcagagggagaaggaaaagaagcgttccccacaagacgttgaagtcttgaagacaaccacagagctgttccacagtaatgaagaatccggcttttttaatgaacttgaagccctgagggcagaaagtgttgccactaaagcagagctggcttcatataaagaaaaggcagagaaactacaggaggagctgctggtaaaagaaacaaatatgacaagcctacagaaggacttgagccaggtccgggaccatctcgctgaggccaaagagaagctgtcaattctggagaaggaggatgagacagaggtgcaggagagtaagaaggcctgtatgttcgagccacttccgattaaactttctaagtcaatcgcttcccagactgacggcactctcaagatctctagtagcaatcagactccccaaatcctcgtcaagaacgccggaatccagatcaaccttcaaagcgagtgcagtagcgaagaagtgaccgaaataatctcccagttcaccgaaaagattgagaaaatgcaggagttgcacgcagcggagatcttagatatggagtcacgccatatctcagaaacagaaaccctgaaacgagagcactacgtggctgttcagctcctaaaggaggaatgcggcactttgaaggctgttatccagtgtctgagatccaaagaagggtcaagtattcctgaattagcacatagcgatgcctatcagacacgcgagatctgctcaagcgattccggctctgactggggtcaggggatctacctgacgcacagccaggggtttgacattgcttcagaggggaggggggaggagagtgaaagtgccactgactcattcccaaagaaaataaaggggctgctccgtgcagtgcacaacgagggtatgcaagttctctctctcaccgaatcaccgtatagtgacggggaggaccactccatacagcaggtcagcgagccctggctggaagagcggaaggcatacatcaacacaatcagttcactcaaagatcttattacaaagatgcagctgcagagggaggctgaagtttacgattcatcccagagccatgaatcgtttagcgactggaggggggaactgctgttggcactgcaacaagtgtttctggaagaacgaagtgttctattggccgctttcagaacagaattgaccgcccttggcactacagatgcggtgggtctcctgaactgcctggagcagcggatccaggaacagggggtcgagtatcaggcagccatggagtgcttgcagaaggccgaccggcgaagcctcctgtccgagatccaagcactgcacgcacaaatgaacggcagaaaaattaccttaaaacgcgagcaagagtccgagaaaccatcccaggagctgctggagtataacattcagcagaaacaaagtcagatgttggagatgcaagttgagctctcctccatgaaggatcgagctactgagttgcaggaacagctgagttctgaaaagatggtggtagccgaactgaagtccgagctggcccaaaccaagctcgagcttgagacaacactgaaggcacagcacaaacaccttaaagagttggaagctttcagactggaggtgaaagacaagactgacgaggtacatcttctaaatgacactctagcttccgagcagaaaaaatcccgagaattgcaatgggcgctggaaaaggagaaggccaagctgggtaggtccgaggaacgggacaaggaggagctcgaagatctaaaattcagcctagagagccagaagcagcgcaatctgcagcttaacctgctgctggagcagcaaaagcagttgcttaacgagagccagcagaagattgagtcccagcgcatgctgtacgatgcccaactttcagaagagcagggcaggaatctggaactacaggtgcttctggagtccgaaaaagtccggatccgtgagatgtcttccacattggacagagaacgggagttgcatgcgcagctccagagttccgacggcaccggccagagccggcctccgctgcccagcgaggatctccttaaagagcttcagaaacaattggaggagaaacactcccgtatagtagagttgctcaacgagactgagaaatataagctcgatagtcttcaaaccaggcagcagatggagaaggaccgtcaggtacacaggaagactctgcagacggaacaggaagccaacactgaagggcaaaaaaagatgcacgaacttcaaagcaaagtggaagatctacagcgacagctggaggaaaaacgccagcaggtgtataagctcgacctggaggggcaaagactgcagggtatcatgcaggagtttcaaaagcaggaattggaaagagaagaaaagcgcgagtctcggaggattttgtatcagaatctgaacgagcctacaacctggtctctcacatctgatcggactcggaactgggtcctgcagcagaagattgaaggagagactaaggagtctaactacgctaagctcatagaaatgaatggcggaggcaccgggtgcaatcatgagctcgaaatgattagacagaaactgcagtgcgtcgcctcgaagctgcaagtcttaccccaaaaggccagtgaacgtttgcagttcgaaaccgcggatgacgaagattttatttgggttcaggagaacattgacgaaataatcctgcagcttcagaagctgacagggcagcagggcgaggagccctccctcgtcagtccaagcacctcctgtggctcgctgacagaacgcctcctgcgccagaacgcagagctgacaggccatattagccaactgactgaggagaagaacgatctcagaaacatggttatgaagctagaagaacaaataaggtggtataggcagaccggtgccggacgcgataactcttcacggttctcattgaatggcggtgccaacattgaggccattatcgccagcgaaaaggaagtttggaacagagaaaaactcactctccagaagagccttaagagggccgaggcagaagtatacaagctgaaagccgagctaaggaatgattcactgctgcaaactctgtcccctgattccgagcacgtcacactgaaaaggatctatggcaagtatttgagggcggaatctttccggaaggccctcatctaccagaagaaataccttctgttgctactgggcggatttcaggaatgtgaagatgccaccctcgcattgcttgccaggatgggcggacagcccgcattcaccgatctcgaggtgatcaccaataggcccaaaggctttacaagattccgttccgccgtcagagtgtctatcgctattagtcgcatgaaattccttgtgcgcagatggcaccgggtgactggatcagtgtctataaatattaacagggacggattcggcctgaaccaaggcgcagagaagactgatagcttctaccatagctctggcggactggagctgtatggtgagccacggcatacgacttatagatctcgatctgatttggattacatacgatcaccactgccttttcagaaccgctatcccggaacccccgctgacttcaaccccggatctcttgcatgctcccaactacagaactatgacccatag

SEQ ID NO: 212858 - DNA, 1782 bp, synthetic construct
  misc_feature 1..1782: note = Description of Artificial Sequence: Synthetic coding sequence
  source 1..1782: mol_type = other DNA
atggcaattcaattccgctcattgtttccattggcgttgcccggaatgctggcattgttgggttggtggtggttcttcagcaggaaaaagggacatgtgtcctcccacgatgagcagcaggtggaggccggagccgtccagctgcgagccgatcctgcaattaaggagccactgccagttgaagacgtgtgtcccaaagttgtcagcaccccaccttctgtgaccgagccaccagagaaggaactgtccaccgtttcgaagctccctgccgaaccgcctgccttgctgcagactcacccaccctgccgcagatcagaatcaagcggcattctgcccaatactacggatatgcgcctgaggcctggtacgagacgcgatgattctaccaaattggaattggcacttaccggtggggaagcgaaaagcattccgctggagtgccccctgagcagcccgaaaggcgtcctgttttctagcaaatccgccgaagtatgtaagcaggactcccccttcagtagagtcccgcgaaaagtacagccaggatatcctgtggtccctgccgagaaacgctcttctggagagagggcacgggaaactgggggagctgaaggcacaggcgacgccgttctgggtgagaaggtccttgaggaggctctgctgtctcgcgagcacgtcctggaactcgaaaacagtaagggcccttccctcgcctcacttgagggagaggaggacaagggtaagtcaagctcctcccaggtggtgggcccagttcaggaagaggagtatgtcgcggaaaagcttcccagcaggttcattgaatctgcgcatactgagctggccaaggatgacgcagccccagcccctcctgtggccgacgccaaggcccaggaccggggagtcgaaggagagttgggaaacgaagagtcgctcgaccggaatgaggaagggctcgatagaaatgaggaagggctggacaggaatgaagaatcacttgatcgtaatgaggaaggcctcgaccggaatgaggagatcaaacgggctgcgttccaaattattagccaggtaatatcagaagctacagagcaggttctcgcgaccacagttggcaaagtcgcaggcagagtttgccaggcatcccagttgcaggggcagaaggaagagagctgcgttcctgtgcatcagaaaactgtgctgggaccagacactgccgaaccagcgacagccgaagctgcagtggctcccccagatgccggactgcctctccctgggttgcctgctgagggctccccccctcctaagacctacgtgagttgcttaaaatccctattatcaagcccgacaaaagacagcaaacccaacattagcgctcatcacatctctttggcttcctgcttagctttaacgacaccctcagaagaacttccggaccgggctggcattctcgttgaggatgctacttgtgtgacttgtatgtccgatagttcccagtctgtgccattggttgcttccccaggacactgttctgactccttcagcacctctggcctggaggattcctgcacagagactagctcttcgccacgagacaaagccatcaccccacccctccccgagtctactgtgccatttagtaacggcgtgctaaaaggtgagttgtcagatttgggggctgaagacggctggacaatggatgccgaggcagatcattccggggttgcagcaccccctccgggaaagagagggaccctgatcaccagatgccccggtttttttgagtgctag

SEQ ID NO: 212859 - DNA, 2712 bp, synthetic construct
  misc_feature 1..2712: note = Description of Artificial Sequence: Synthetic coding sequence
  source 1..2712: mol_type = other DNA
atggccatccagttcagatcccttttcccacttgcactgccagggatgctggcattactgggctggtggtggtttttttcccgcaaaaagggccacgtcagctctcatgacgaacagcaggttgaagcaggggctgtgcaactaagagcggatccagccataaaggaacctctccctgtcgaggatgtttgtcccaaggtcgtgagcacaccgccatctgtgacagaaccccctgagaaggaactctcgaccgtttccaaacttccagccgaacccccagcactgctgcagacgcaccccccttgtcggaggagcgagtcgagtggcatcctccctaatacaactgatatgcggctgcggcctggcacaaggcgcgacgacagtactaagttggagctggctctgactggaggggaggctaagagcattccactggaatgtcctctgagtagccccaagggcgttttgttcagctcaaaatcagccgaagtgtgcaagcaggattccccattctcgcgcgttcctcgcaaggtccagccaggctaccccgtggtgccagcagaaaagcgtagcagcggcgagagggctcgggagaccggaggagctgaggggacgggagacgcagtgctcggcgaaaaggtgctggaagaagctttactatctagagagcatgtgcttgaattggagaactcaaagggaccatcgctcgcctccctcgaaggagaagaagacaagggaaagagttccagctcccaggtcgtgggcccagtgcaggaagaggagtacgttgctgagaaattaccttcaagattcatcgagagtgcccacacagaactagcaaaagacgacgccgctcctgcccctcctgtggccgacgccaaagctcaagatagaggtgtggagggtgaactgggcaacgaggaatctctcgaccgaaacgaggagggactggatagaaatgaagaaggcctggatcgcaatgaggaatcattagaccgtaatgaggagggattggatagaaacgaagagattaaacgcgcagccttccaaattatctctcaagtgatctccgaagccaccgaacaggtcttggccactacagtaggcaaggttgccggaagagtttgtcaggccagccaactgcaaggacagaaggaagagagttgtgttcctgtccaccagaaaaccgttctgggaccagatacggccgaacccgctacagctgaagcagcggtcgccccaccggatgctgggctgcctctgcccggtttgcctgctgagggttctcctccgcctaaaacatacgtatcttgtctgaaatccttactgagttcccctaccaaagacagtaaaccaaacatatctgcccaccacatttcacttgcctcgtgccttgctctgaccaccccgtccgaagagctaccggatcgagctggcatcttagtggaggatgctacttgtgtgacatgtatgagcgacagtagccagtccgtgcccctcgtcgcttctcctggccactgctccgatagttttagcactagcgggttggaggattcctgcacggaaacctcttcgagcccccgtgataaggcgatcacacccccactgcctgaatcaactgtgcccttctcaaatggggtgttaaaaggagagctgtctgacttgggggcagaggacggttggacgatggatgcggaagccgaccacagcggcggtagtgaccggaactcaatggacagcgtggatagttgttgcagtttgaagaagactgaatccttccagaacgcgcaggccggttcaaaccctaagaaagtagatttgataatttgggagatcgaggtccccaagcaccttgttgggaggctgattgggaaacaaggacgctacgtgtcatttttgaagcagacaagcggcgctaagatctatatctctactctgccctacacccagtcagtacaaatctgtcatatcgaaggatctcagcaccacgtggataaagctttgaatttgatcggtaagaaatttaaagaactcaacctaacaaatatttatgcccctcctctgccaagtctggccctcccctctctgcccatgacctcttggttgatgctgccagatggaatcacagtggaggtgattgttgttaaccaagtgaacgccggtcatctgtttgtgcagcagcacactcatcccactttccacgccctgcgcagcctcgaccagcagatgtacctgtgttactcccaacccggaattcccacactcccaaccccagtagaaatcacagtgatttgcgccgcaccaggcgctgacggagcctggtggcgcgcacaggtcgtagcttcctacgaggagacgaatgaggtagagattaggtacgtcgactatggcggatataaacgggtcaaggtggacgtgctgaggcagatccgaagcgattttgtgactctgccattccaaggtgcagaggtcctgctggactctgtgatgcccctttccgatgacgaccaattcagccccgaggccgacgccgctatgagcgaaatgaccggcaatacagctctcttggctcaggtcacaagctattcccctactggtctgccactgatccagctgtggtcagtcgttggcgacgaggttgtgctcattaatagaagtctggtagaacggggactggctcaatgggtggattcctactacacctcattgtag

SEQ ID NO: 212860 - DNA, 2838 bp, synthetic construct
  misc_feature 1..2838: note = Description of Artificial Sequence: Synthetic coding sequence
  source 1..2838: mol_type = other DNA
atgggggctctaggagtatctggaagctcaagccctggaggctgcccaggctggaggcggctccccgcagctgtaaataccaaccccgttgacttcgcgccaggtgttatcacgcaggcttcccgcatggctatacagttccgctcgctgttccctctcgccctccccggaatgcttgcactgctaggttggtggtggttcttcagtcgcaagaaaggccacgtgtcctcccatgacgagcagcaggtggaggccggagccgtgcaactgcgggctgaccccgctattaaggagcccctcccggtggaggacgtttgccccaaagtcgttagtacccctccctctgtaaccgaacccccagaaaaggagctgagcaccgtgtccaagctgcccgcagagccccctgctctgctgcagacccatcccccttgtaggagaagcgagtcaagcggcatacttcccaacaccactgatatgaggctgcgccctggcacaagacgtgacgactccacgaaactggaattagccctgaccggaggcgaagctaaatcaatccccttggagtgtcccctttccagtccgaagggagtgttgtttagctctaagtcagctgaggtatgcaagcaggatagcccattctcacgagtcccccgtaaggtacaacccggatacccagtcgtgcctgccgaaaaaagatcctccggagaacgtgcacgggagactggtggcgctgagggtacaggggacgctgtgctgggggagaaggtcctggaggaggcacttctgtctcgcgagcacgtcctagaactagagaactcaaaggggccttcccttgcctcactagaaggcgaagaggataaaggaaagagcagcagcagccaggtcgtgggcccagtccaagaggaggagtacgtcgctgaaaaacttccatcaagattcattgaatcagcccatacagaactggccaaagacgatgcggctccggcaccccctgttgcagacgctaaggcgcaggataggggggtcgaaggcgagctcgggaatgaggagtccttggacaggaacgaagaagggctggaccggaacgaggaggggttagaccgaaacgaggagtcgcttgaccggaacgaagagggtctggatagaaacgaagaaatcaaacgagctgcgttccagatcatcagccaggttatatcagaagcaactgagcaggtgctggccacaacagttggtaaggttgcgggaagggtgtgccaggcatctcagctacagggacagaaggaggagtcatgtgtgcctgtacatcagaaaactgtactgggacctgacaccgccgagcccgctaccgccgaagcagctgtcgcccctccagacgctggacttccactccctggcttgcctgcagagggatcgccacctccaaagacttacgtttcttgccttaagagccttctaagctctccaactaaggactcaaagcctaatattagtgctcaccacatcagtctggcatcatgtcttgctcttacgacccccagcgaggaactgcccgacagggcaggaatattagtggaagatgctacatgtgtcacctgtatgtctgactctagccaaagcgttccgctggtcgctagccccggacattgttccgattcctttagcacctcagggctggaagacagttgcacggaaactagtagctctcccagggacaaggctatcacaccacctctgccggaatcgaccgtgcccttttcaaacggggttcttaagggagagctgagcgacctcggcgcagaggatgggtggacaatggacgccgaggccgaccacagtgggggttctgataggaactctatggactcggttgatagctgttgctcgctcaagaagacggaatcctttcaaaacgctcaggcaggcagtaaccccaaaaaggttgatttgattatctgggaaatcgaggttccgaaacatcttgtgggaagactgatcgggaagcaggggagatacgtttcctttttgaaacaaacctccggtgccaagatatacatcagtactctgccatatacccaatcagtgcagatatgccacatcgagggaagccagcaccatgtcgacaaggcgttgaatttaatcggcaagaagttcaaggagctgaacttaactaacatctatgcacctcccctgccatctctggcacttccatctctgccaatgaccagttggctgatgctacccgacggcatcaccgtcgaagtgatagtcgtaaatcaggtaaatgctggacacttgtttgtacagcaacacactcaccctaccttccacgcactgcgctccctcgaccagcaaatgtatctctgttatagccagcctggcatccctacactaccaacccctgtggagattacagtcatttgcgccgcaccaggagctgacggggcttggtggagggcacaggttgtcgcctcgtacgaggaaacaaatgaagtggagatccggtacgtagactacggtgggtacaagcgagtcaaagtcgacgtgcttcggcagatccgcagcgacttcgtcactctaccctttcaaggtgctgaagtcctgctcgactctgtgatgccgctatctgatgatgaccaattctcgcctgaagcggacgcagcaatgagtgagatgacaggcaataccgcacttctcgcccaggtaacgtcgtactcacctaccggcctccccttgatccagctgtggtcagtggtgggagatgaagtggtcctgatcaacaggagccttgtcgagcgcggactggcccaatgggtggactcctactacacctccctctag

SEQ ID NO: 212861 - DNA, 2712 bp, synthetic construct
  misc_feature 1..2712: note = Description of Artificial Sequence: Synthetic coding sequence
  source 1..2712: mol_type = other DNA
atggccatacagttcagaagcctctttcccttggcactcccaggtatgctggcgcttttgggttggtggtggttcttctccagaaaaaagggacatgtgagtagtcacgacgaacagcaggtcgaggctggggctgtgcagttgcgagcagatccagctatcaaagagccgctccccgtggaagacgtgtgccctaaggtggtttctacgcctccttccgtgaccgagcccccagagaaagaactgtcaactgtatcaaaactccccgctgagccacctgctctgctccaaactcaccctccgtgcagacgtagtgagagcagcgggattttgccaaacacgaccgatatgagattacgaccaggaaccaggcgggatgactctacaaaactggaactggcactcaccggcggtgaggccaaatctattcctctggaatgtcctctgtcctcacctaagggggtcttgttttcctctaaaagcgccgaggtttgtaagcaggattcaccttttagccgggtgcctaggaaagtgcagccaggataccccgtggtccccgctgagaaacggtcaagtggcgagagagccagagagaccggaggagccgagggcacaggggacgccgtccttggtgagaaagtgctagaggaagcactgcttagccgcgagcatgtattggaacttgagaattccaaaggaccttctctggcttccctggaaggggaagaagataagggcaagagcagctccagccaagtcgttggtcccgtgcaggaggaggaatatgtggccgagaaattgcccagccggttcattgagagcgcccataccgagctcgcaaaggacgatgcagcacctgctcccccagttgctgacgctaaggctcaggacagaggagtagagggggagctcggaaacgaggaatctttggacaggaacgaagagggcctagatagaaatgaggagggactcgaccgcaatgaagagagcctggatcgcaacgaggagggacttgacagaaatgaggagatcaagcgcgctgcattccagattattagccaggtaatctctgaggcaactgagcaggtcctggctaccactgtgggcaaagttgccggtcgcgtgtgtcaggcctcgcagctacagggacagaaagaggaatcctgtgtgccagtacaccagaagacagtgttaggcccagacaccgcggagcccgcaacggctgaagccgcagtcgccccaccagatgcaggactgcctctgcctgggctgcccgcagagggctctcctcctcctaagacctatgtgagttgtctgaagagcctactgtccagcccaactaaggatagcaagcccaatatctccgcccaccatatctccttagcctcttgtctggccttaacaacccccagcgaagaacttcctgatcgggcaggcatccttgtcgaggatgctacttgtgttacctgcatgagtgactcttcccagagcgtccccttggtagcgagtccaggtcactgctctgactcctttagcacctcaggcctggaggattcctgtactgaaacgtcatcctcacccagggacaaagctatcaccccaccattgcccgaatcaaccgtgccgttttccaacggtgtgttgaaaggggagctatctgatttgggcgctgaggacggatggaccatggatgccgaagcggaccactccggaggctcggatcgcaacagcatggactctgtggattcgtgttgttctctgaaaaagaccgagtcgttccaaaatgcccaggccggatctaaccccaagaaggtcgacctgataatctgggaaattgaggtgcctaagcaccttgtcggaaggctcattggcaagcaaggaaggtatgtgtcctttctgaaacagacctctggggcaaaaatctacatcagtaccttgccctacacacagagcgttcagatctgtcacatcgaggggagccagcatcatgtggacaaggcactgaatctgatcggaaaaaagttcaaggaattgaatttaactaatatctatgccccacctctgccctccctcgcactgccgagtcttcctatgacatcctggctgatgctgcccgacggaatcaccgtggaagtaattgtggtaaaccaagtcaatgccggacacttgtttgtgcaacagcatacccatcctacttttcatgctttacgaagccttgatcaacagatgtacctctgctattctcagccaggtatccctactctgccaactccagtcgagattactgtcatctgtgccgctcccggagccgacggtgcctggtggcgagcacaggtggttgcttcgtacgaggaaaccaatgaggtggaaattaggtacgttgattacggagggtacaaaagggtgaaggtcgacgtattacgtcaaatacgttccgactttgtcactctgcccttccagggcgctgaagtgctgctcgactcggtgatgcccctgtccgacgatgatcagttctctcccgaagcagatgccgcaatgtctgagatgactgggaacaccgcgttgctggcacaggtgacaagttacagccctaccgggctgccacttatccagctatggagcgtcgtcggcgacgaagtagttctaattaacagatctctagtggaacgcggactggcccagtgggtggattcatattacacatccctctag

SEQ ID NO: 212862 - DNA, 1095 bp, synthetic construct
  misc_feature 1..1095: note = Description of Artificial Sequence: Synthetic coding sequence
  source 1..1095: mol_type = other DNA
atgggcatactggagaaaatctcagaaatcgagaaagaaatcgccagaacacagaagaacaaggcgaccgaataccatctcggtttgctgaaagcgaaattagccaaatacagggcacagctgctcgagcctagcaaatctgcaagtagcaagggcgaagggttcgacgtgatgaagtctggcgacgctagagtcgccttaatcgggtttccgagtgtgggcaagtctaccttcctgtcgctcatgaccagtacggcctcagaggctgccagctacgagttcaccacgctgacgtgcatccctggcgtgatcgaatacaaaggtgcgaacatacagttactggacctgccagggatcattgagggagcggctcagggcaaaggcagagggagacaagtcatcgcagtggcaaggacagcagatgtaatcataatgatgctggacgccactaagggagaggtccaacgaagtctccttgagaaggagctggagtccgttggaatccggctcaacaagcataagccgaacatttacttcaaaccaaagaaagggggtggaattagctttaactccaccgtgacattaacccaatgcagtgaaaaactggtgcagctgatactacacgaatacaagattttcaatgccgaggtgttgtttcgggaagactgttctccagacgagttcatcgatgtaatagttggaaatcgcgtttatatgccctgcctgtacgtttacaataaaattgatcagatatctatggaagaggtcgatagactcgccaggaaaccgaattccgtcgttatctcctgcgggatgaagcttaacctggattatctcttagagatgttgtgggagtatcttgccctgacctgcatctataccaaaaagagggggcaacgccctgacttcactgatgccatcattctgcgtaagggcgcaagcgtcgagcatgtttgccatcggatccacaggagcctggccagtcaattcaagtatgcattggtctgggggactagtacaaagtactcgcctcaacgcgttggcctgacgcataccatggaacacgaagatgtaattcaaatagttaaaaagtag

SEQ ID NO: 212863 - DNA, 1815 bp, synthetic construct
  misc_feature 1..1815: note = Description of Artificial Sequence: Synthetic coding sequence
  source 1..1815: mol_type = other DNA
atgcgaggtgccggtccctcccccaggcaatcccctcgaaccttgagaccagacccaggtcccgctatgtccttcttcagaagaaaggtgaagggcaaagagcaggaaaagacatccgacgtgaaatcaattaaggcgagtatcagtgtacatagtccacagaagtctactaaaaatcatgcgctgcttgaagccgctggtccttcacatgtagcgattaacgccattagcgctaacatggactccttctcctcttcacgaaccgctacactaaagaaacagccaagccatatggaggctgctcacttcggagacctcgggagatcttgtctcgactatcagacccaggagaccaagagttccctgagcaaaacattggagcaggtcttgcacgacacgatcgtgctgccttattttatccagttcatggagcttaggcggatggaacatctggtgaaattctggctcgaagcagaatctttccattcaactacatggtcacgtatccgcgcacactccctcaatactgtaaaacaatctagtttagctgagcccgtgagccctagcaaaaagcacgagacaacagctagtttcctcacagatagcctggacaaacggttagaggacagcggatctgcccagctgttcatgacccactcagagggcatcgacctaaataatcggacaaatagcactcagaatcacctgctgctgtctcaggagtgcgattctgctcacagtttgagacttgaaatggcaagggcaggcactcaccaggtgtctatggagacacaggagagcagtagcacgctcaccgtagcctcgaggaatagccctgccagccctttgaaggagctgagcggcaagctgatgaagagcatcgaacaggacgctgttaacacattcaccaaatatatttccccagatgcagccaaacctattcctatcaccgaggcaatgcgaaacgacatcatagcacggatctgtggtgaagacggacaggtggatcctaactgtttcgtactggcccaatccatagttttcagtgccatggaacaagaacactttagcgaatttctgagatcacaccacttttgcaaataccagattgaagttcttacttccgggaccgtgtaccttgccgatatactgttctgtgaaagtgccctgttttatttcagcgaatatatggaaaaggaggacgcagttaatatccttcaattttggctggccgctgataattttcagtcacagctcgctgctaaaaaagggcaatacgacgggcaggaggcacaaaacgatgctatgatactgtacgataagtactttagcctgcaggctactcaccccctgggttttgacgacgtggtgaggctcgagatagagagcaatatatgtagggaagggggtcctctccctaactgcttcactacccccctgaggcaggcttggacaaccatggaaaaatcatctgtcaaaaaagcatcgataaaaatactgaagaacttcgatgaagccatcattgtggacgccgcatcacttgacccggaatcactgtaccagcggacctacgccggaaaaatgacgttcggcagggtgtcggatctgggccagttcattagagaaagcgaacccgaacccgacgtgaggaagtccaagggttccatgttctcccaagccatgaagaaatgggtgcaaggaaatacagacgaggcccaagaagagttggcctggaagattgctaaaatgatcgttagcgatattatgcaacaagcacagtacgatcagccattagagaaatctaccaaggtctag

SEQ ID NO: 212864 - DNA, 8453 bp, synthetic construct
  misc_feature 1..8453: note = Description of Artificial Sequence: Synthetic coding sequence
  source 1..8453: mol_type = other DNA
atgaagctgaatccccagcaagcaccactgtatggcgattgtgtcgtgacagtgctgctcgcggaagaggacaaggctgaggacgacgtggtgttctacctggtgttcctaggatcaacactgagacattgcacttcaacgcgtaaagtgtccagtgacacgttggagaccatcgctccaggccacgattgctgtgaaaccgtgaaggttcagctgtgtgcctccaaggagggactcccggtgtttgtcgttgctgaggaggatttccatttcgtgcaggatgaggcatatgacgcagcccagttcctggccacgtccgccggtaaccagcaagccctaaactttactaggttcctggaccagagtgggccaccgtctggtgacgttaactctctcgataagaaacttgtcctggcgttcagacacctgaagctgccaaccgaatggaacgtccttggtaccgatcagagcctccatgacgccggtccgagggagactctaatgcacttcgcagttaggcttgggttacttcggttgacctggttcctgctgcagaagcctggaggccgaggggctcttagtatccataaccaggagggtgcaacacctgtgtcactggcactcgagcgagggtaccataagctccatcagctccttaccgaggaaaatgcaggagaacccgacagctggtcctcactgtcatacgagatcccctatggggactgctcagtcagacatcatcgagagttagacatctatacattgacttccgagagtgactcccaccacgaacacccattcccaggggatggctgcaccggcccaatttttaaactgatgaatatccagcaacagcttatgaaaaccaatcttaagcagatggactcgctgatgcctttgatgatgacggcccaggacccatcatccgcgccagagacagacggacagttccttccctgcgctcctgagcctacagaccctcagcgtttgtcgagcagcgaggagaccgaatctactcagtgctgcccaggatcccccgttgctcaaacagagagcccatgtgatcttagcagtattgtggaagaggaaaatacggacaggtcttgcagaaagaaaaataagggggtagagcgaaagggtgaggaagttgaaccagccccaattgtggactctggcacagttagtgatcaggacagctgcctccagtctctgcccgattgtggagtcaaggggaccgagggactgagcagctgcggcaatcgaaacgaggagaccggcaccaagtcttcaggcatgcctacggaccaagaatcattgtcctctggtgatgccgtcttacagcgcgacctagtgatggaacctggcactgcccagtacagcagcggtggagagttaggaggaatctctaccacaaatgtgtccacaccagatactgcaggtgagatggaacacgggttgatgaatccagacgccacagtgtggaagaacgttctacaggggggtgagagcaccaaagaacggttcgagaactccaacatcggtacagcgggagccagtgacgtgcacgtgacctccaagcctgttgataaaatcagtgtgcccaattgtgctccggctgctagctctctggatggaaataaacctgccgaatcaagcctggcttttagcaacgaggaaacgtccaccgagaaaaccgcagagacggagacaagtcgttctagagaagagagtgccgatgcacccgtggaccagaatagcgtcgtgatacctgcagcagctaaggacaaaatatctgacggccttgagccctacactctacttgctgcgggaatcggcgaggcgatgtcgcctagtgacctggctctgcttgggcttgaggaggacgtcatgccacaccagaattcagagacgaacagcagtcatgcacagagtcaaaaagggaaatcttcacctatctgtagcaccaccggcgacgacaagctctgcgccgattccgcttgtcagcagaatactgtaacaagttccggagatctggtcgccaagttatgcgacaacatcgtctcagagagcgaaagcacaactgccagacagccttcgtctcaggatcctcctgatgcttcacactgcgaggatccgcaggcacacactgtaaccagcgatccagttcgggatacccaagaacgcgctgacttttgccctttcaaggttgtagacaataaggggcaaaggaaggacgtgaaactggataaacctctgacaaatatgctcgaagtggtgtcccacccccatcccgtcgtgcccaaaatggaaaaggagctggttcccgaccaagcagtgatttcagatagtacattttcgctggcgaattcgcctggatcagagtctgttaccaaggacgatgccctgtccttcgtgccatctcagaaggaaaaagggactgccacccccgagctccatactgccacggattacagggacggtcccgacggtaatagcaacgagcctgataccaggccactagaggaccgcgctgtgggccttagcacatcctccaccgccgcagaactccagcatggcatgggaaacactagtcttacaggcctgggcggagagcatgaaggtcccgctcctccggcaataccagaggctcttaacattaagggaaacactgactcatcgctgcagagtgtaggaaaagctactcttgccctggactccgtgctcactgaggagggcaagctgttagtggtgagcgaaagcagcgctgcccaagagcaggataaagataaggcggtgacctgttccagtataaaggaaaacgccctgagttccggaaccttgcaggaagagcaaagaactccaccacctggacaggatacccagcaattccatgagaaaagcatttcagcagattgtgccaaggacaaggccctccagctgagcaacagccctggagcctcatccgctttcctgaaagccgagaccgagcacaataaagaggtcgctccacaggtctccttattgacacagggaggtgccgctcagagtctcgtccccccaggcgctagcttggcaacggaatctcggcaggaagcactcggtgccgaacacaatagtagcgcactcctgccttgcctgctgccagacggcagcgacgggtccgatgctctcaattgttcacagccttctccattagatgtgggcgtgaaaaacacacaaagtcaagggaaaacctccgcatgcgaggtttccggtgacgtcacagtcgacgttaccggagtgaatgcattgcagggaatggcagaacccaggagggaaaatatttcccacaacactcaggacattctgatcccaaacgtgctcctgtcacaggagaagaacgccgtgctggggctgccagttgctctgcaggacaaggctgtgacagacccccaaggcgttggcacacccgagatgatccctttggattgggaaaagggcaaattagaaggggcagatcactcctgtacaatgggcgacgcagaggaggcacagatcgacgacgaggcccaccccgtcctgcttcagcccgtggccaaggagctgccaacagatatggaactgtctgctcatgacgacggcgctcccgctggtgtgcgcgaggtgatgagggccccaccgtctgggagggagcgcagcactccgtctctgccgtgcatggtgagtgctcaggacgcacccctaccaaagggtgccgacctaatcgaagaagccgcttcgcggatcgtggacgcggtgattgagcaagtcaaggcggcaggggctttgttgacagaaggagaagcttgtcacatgtcactatcctcccccgagctcggacctttgacaaagggtctggagtctgcctttactgagaaagtgtcaacttttcctcctggcgaatccctgcctatgggctccaccccggaagaggccacaggatctctggctggttgtttcgccggaagagaggagccagaaaaaatcatccttcccgtccagggacctgaacctgctgccgagatgcctgacgtgaaggcggaggacgaggtcgactttcgggcatcatctatttcggaggaagtcgcagttgggagtatagctgcaaccctgaagatgaagcagggcccaatgactcaggctatcaatagagagaattggtgcaccatcgaaccatgtcctgatgcagcctcccttctagcttccaagcagagcccagaatgcgaaaatttcctggacgttggacttggcagggagtgcacatcaaagcagggagtgctgaaacgggaatctggttctgattcggatctattccactcccccagcgacgatatggattctatcatcttccccaaacccgaagaggagcatttggcctgtgacatcaccgggagctcctcctccactgatgacacagcttcactagataggcacagttctcacgggtcagacgtgagcctttcacaaatactaaagccaaatcggtccagggatagacagagcctggacgggttctacagccacgggatgggagccgaaggacgggaaagcgaaagcgaacccgctgatcctggagatgttgaggaggaggagatggatagcatcacggaggtgccagcaaactgcagcgtgctaaggtcttccatgagatccctgtctccatttagacgtcacagttggggccctggaaaaaatgccgcttcggatgccgagatgaaccacagatcaatgtcctggtgccctagtggcgtgcagtacagcgcagggctttcagcagattttaactataggtctttcagtctcgaaggtttgaccggaggcgctggtgttggtaataaaccatccagctctctcgaagttagtagcgcaaacgccgaagagctgcggcatcctttctccggcgaggagagagtcgactccctggtgagcctttctgaagaagatttggagtccgaccaacgagaacatcgaatgttcgatcagcaaatatgccacagaagcaaacagcagggattcaattactgcacctctgctatctccagccccctgacgaagtcaatttcgcttatgacaatctcccatcccggactcgataacagcagaccctttcactcgacgtttcacaatacctccgcgaacctcaccgagtccatcaccgaggagaattataattttctgccacactctccatctaaaaaggatagtgagtggaagtccggaaccaaagtatcccgaacctttagttacattaagaacaaaatgtcctctagtaagaaatcgaaagaaaaagagaaagagaaagacaagattaaggagaaggagaaggactccaaggacaaagaaaaggacaagaagactgttaacggacacaccttcagctcaatcccagtagttggcccaatttcctgctctcagtgtatgaagccattcacaaataaggacgcatatacatgcgccaactgttcagcctttgtgcacaaggggtgcagggagagtctggcctcatgtgctaaggtgaaaatgaagcagcctaagggatcgctccaggcccatgacaccagtagccttcccaccgtgattatgaggaacaaaccctcacagccgaaagagaggcctcggagtgccgtgttgctcgttgacgaaactgccacaacacccatctttgccaatcggaggagccagcagtctgtctctctttccaagagcgtgagtattcagaacatcactggagtagggaacgacgaaaatatgagtaatacctggaaatttctgtctcactccacagattctctgaataagatctcaaaagtaaacgagtctacagaaagtctgaccgacgaaggcgtcggaactgatatgaacgaaggacagctcctgggcgactttgaaatcgagtccaaacaactggaagcagaatcttggtccagaatcatcgatagtaagttcctgaaacaacagaaaaaagacgtggtgaaaagacaagaagttatctatgagctgatgcaaactgagtttcaccatgtacgcacgctgaagatcatgtccggagtctactctcaggggatgatggctgatttattgttcgagcagcaaatggtcgaaaagctgttcccatgccttgatgaacttatctctatacacagtcagtttttccagagaatcctggaaaggaaaaaagagtcattagtggacaagagtgaaaaaaatttcttgattaagcgcattggggacgtgctcgtgaatcagttttctggtgagaatgccgagaggcttaagaagacctatgggaagttctgtggccagcacaatcagagtgtgaactattttaaggatctctacgccaaagacaagcgcttccaggcctttgttaaaaagaagatgtcgagctccgtcgtgcgccgacttggcatacctgagtgcatcctccttgtgacacagagaattaccaaatacccagttctctttcagagaattcttcagtgcacaaaggacaatgaggttgagcaagaggacctggctcagtcactttcactggtgaaggacgtgatcggagcggtcgattctaaggtggcgagctatgagaagaaggtgagactcaacgagatctatacaaagactgattccaaatcgattatgaggatgaaatcagggcaaatgttcgcaaaggaagatctgaagagaaagaaactggtgagggatggctccgttttcctcaagaatgccgcaggacgcctgaaagaggtgcaggctgtgttactgacagatattctggtgttcctgcaggagaaggaccagaaatacatattcgcctcactggatcagaagtccacggtaatttccctgaagaaacttatcgtccgcgaggtagcccacgaggagaaaggcctgtttttaataagcatgggaatgaccgatccagaaatggtcgaagtacacgcatctagtaaggaggagcgcaacagctggatccagatcatccaggacacaatcaacacactgaaccgcgacgaggatgagggaataccttccgagaacgaggaggaaaagaagatgctggatacgcgcgctcgagaattgaaagagcagctgcatcagaaagaccagaaaattctgctccttctggaggagaaagagatgatatttagagatatggccgagtgcagcactcccttgccagaagattgctcgcctacgcattctccccgagtactttttcgatctaacaccgaggaggctctgaagggaggccctctcatgaagagtgcaattaatgaggtggagattctgcagggtctggtgtctgggaaccttggcggaacgctcggacccaccgtgtcaagccctatagaacaggatgtggttggcccagtgagcctcccacgtagggccgagaccttcggcggattcgacagtcatcaaatgaacgcttcaaagggaggagagaaggaggagggggacgacggccaggacttacggcgaacagaaagcgattctgggttgaaaaaaggcggtaacgcaaacctcgtctttatgctgaagcggaatagcgagcaggttgttcagagtgttgtacacctgtacgagctgctgtcagctctccagggagtcgtgctacaacaggactcatatattgaagaccagaaactggtcttgagcgagcgggctttgacacgctccctgagtagaccctcctcccttattgagcaggagaagcagaggtctctcgagaagcaaagacaggacctggccaatctccagaaacagcaagcccagtacctcgaagagaagcggcgtcgcgaaagagaatgggaagcgcgagagagagagctgcgtgagcgcgaggccctgttggctcagagagaagaggaagtgcagcaaggccagcaggacctggagaaggaacgggaagagctccagcaaaaaaaaggaacataccaatatgacttggaacggctcagggccgcacagaaacagctcgagcgcgagcaggagcagcttaggcgagaagccgagcggttaagtcagcgacaaaccgagcgagatctgtgccaggtgtcacatccccacacaaagctcatgcgaatccccagttttttcccaagccccgaggaaccgcctagcccctcagcaccctcaattgccaagtcaggttccctcgacagtgaattatctgtgtctcctaagagaaacagcatatccagaactcataaggacaaaggccctttccacatactgagttctactagccaaaccaacaaaggcccagagggtcaatcccaggccccagcctctacatctgcctccactagactatttggactgactaagccaaaagagaagaaggagaagaaaaagaaaaacaaaactagtcggtcccagccaggcgatggtcccgcttctgaggtttctgctgaaggtgaggaaattttttgcta

SEQ ID NO: 212865 - DNA, 3177 bp, synthetic construct
  misc_feature 1..3177: note = Description of Artificial Sequence: Synthetic coding sequence
  source 1..3177: mol_type = other DNA
atgagctcaagcaagaaatccaaagagaaggaaaaggagaaggataagattaaagaaaaggagaaggactcaaaagacaaggaaaaggataagaaaactgtgaacgggcataccttctccagcatccccgtggtgggacctatttcttgctcgcagtgtatgaagccttttacgaataaagacgcgtacacttgtgctaactgttctgcctttgtgcacaagggatgtagggagtccctcgcctcgtgcgccaaagtgaaaatgaagcagcccaagggaagtttgcaagcccacgatacttcctcccttcccaccgtcataatgagaaataagccctcacagccaaaagagcgcccaaggagcgctgttcttctcgtggacgaaactgctacaacgcccatctttgcaaacagacgatcacaacagagtgtctctttgtctaagagcgtatctattcagaatataacaggcgtgggcaacgatgagaatatgtccaatacctggaaatttctgtctcactcaactgattctctgaataaaatatccaaagtcaacgaatccaccgagtcactgaccgatgagggggtaggaacagatatgaacgaggggcagctcctgggcgatttcgagatcgaaagcaagcagctggaggcggaaagttggtccaggataattgacagcaaatttctgaagcagcagaagaaggatgtcgtgaagagacaggaggtcatctacgagttgatgcaaactgagttccaccatgtgcggaccttgaagatcatgtctggagtttacagccaggggatgatggctgacttattgttcgagcagcagatggtggaaaagctctttccatgcctcgacgagctcatttctatacactcccagttttttcaacgtattttggagaggaaaaaggagtccctggtggataagtctgagaagaacttcctcattaaacgcataggggacgtgctcgtgaatcagttctcaggtgaaaatgcggagcgcctgaagaagacatacggaaagttttgtggccaacacaaccagagcgtgaattatttcaaagacctctatgcaaaggacaagcggttccaagccttcgtgaaaaaaaaaatgagctcttctgttgtgcgtcggttggggatcccagagtgcattctgcttgtgacacagaggattacgaagtatcccgtgctgttccagcgaatcctgcagtgcactaaggacaatgaagtcgaacaggaggacttggcccagtctttgtctttggtgaaagacgtgataggcgcagtagattctaaagttgcatcctacgaaaaaaaagtccgccttaatgagatctacaccaaaacagactcaaagagcataatgcgcatgaagtcgggccagatgtttgccaaagaggatctgaagaggaagaaactggtcagagacggtagcgtatttctcaagaatgccgcaggcagattaaaagaagtccaggctgtgctactgaccgatatactggtgttcttacaggagaaagatcaaaagtatatattcgccagccttgaccagaagtccacagtcatttcactgaagaagctcatcgtgagggaggtcgctcatgaagagaaaggactgtttctcatatccatggggatgacagacccagaaatggtcgaagttcatgccagctctaaggaggaaagaaattcttggatccagatcatccaggacacaattaacacgttgaaccgcgatgaagatgaaggtattccttccgagaatgaggaggaaaaaaaaatgttggacactagggccagggaactgaaagagcaactccatcagaaggatcagaagatactgcttctgctggaggaaaaggaaatgatctttagggatatggcagaatgttcaactcctctcccagaggattgctccccaacgcatagtcctagagtgctgttcaggagtaacacagaagaggcactgaaaggcggacctctgatgaaatcagccataaacgaagtggagattctgcaagggctggtgagtggtaatctgggcggtacgttgggccctaccgtttctagtccgatcgagcaggatgtggtcggccctgtatcgctcccaagaagagcagagacattcgggggtttcgatagccaccagatgaatgctagcaagggcggagagaaggaagaaggagatgatggacaggacttgaggcggactgagagtgactcggggctcaagaagggcggtaacgctaatttagtcttcatgcttaaaagaaattccgagcaggtggtacaatccgtggtacatttatacgaacttctgagtgcacttcaaggggtcgtgctccagcaggacagctacatcgaagaccaaaagctcgtgctcagtgagagagcgctgaccaggtcactctccagaccaagcagcttgatcgagcaggagaagcagcggagtcttgaaaaacagaggcaagatctggccaatctgcagaaacagcaggcccaatacctggaggaaaaacggcgaagggagcgggagtgggaagccagagagcgagaactgcgtgaacgggaggctctgctggcccagagggaggaagaggtgcagcagggacagcaggatttggagaaggaacgagaggaactccagcaaaaaaaaggcacttaccagtacgacctggaaaggctgagggctgcacagaaacaacttgagcgggagcaggagcagttgcgacgagaagccgagcgcctctctcaaagacagacagagagagacctctgccaggtgtcccacccccacaccaagctgatgaggatcccctcctttttccccagtccagaggaaccgccatcaccttccgctccatccatcgccaagtctggtagtttggatagcgaactgagcgtgtccccgaaacgcaatagcatttcaaggacccataaagataagggcccattccatatcttgtcttctacttcccagaccaacaagggacccgaaggccagagccaggctcctgccagcacatcagcgtctacccgcctgtttggtctgactaagccaaaggaaaagaaagagaaaaaaaagaaaaataagacatctcgaagtcaaccaggagacggaccggcaagtgaggtgtcagcagagggagaagaaatcttctgttag

SEQ ID NO: 212866 - DNA, 8450 bp, synthetic construct
  misc_feature 1..8450: note = Description of Artificial Sequence: Synthetic coding sequence
  source 1..8450: mol_type = other DNA
aaactgcttgaaaagcagcccccaatcgagggcgattgcgtagtgacagtacttctcgctgaggaggacaaagctgaagatgacgtcgtgttctatttggtgtttctcgggagcactctccgccattgtacctccacacggaaggtttccagcgataccctcgaaacaatcgctccaggccacgactgctgtgaaactgtcaaggtccaattgtgtgcctcaaaagagggcctccctgtgtttgttgtcgcagaagaggatttccattttgtccaggacgaggcgtatgacgccgctcagtttctagcaacttccgcagggaaccaacaggcacttaactttacacggtttctagaccagtctgggccaccttcgggagatgtaaactcattggataagaagttggtcctggccttccgccatcttaaactccccactgagtggaacgtgttgggtaccgaccaatccttgcacgacgccggtccaagggaaactctgatgcatttcgctgtaaggctgggactcctcaggcttacctggttcctgctgcagaagccaggtggcagaggtgcactatccatacataaccaagaaggggcaacgcctgttagccttgcgctggaacgcggataccacaaattgcaccagctgctcactgaagaaaacgcgggagagcctgactcttggtccagtctgagctacgagatcccatacggcgattgttctgtgcggcatcaccgcgagttggatatttacacgctcacatcagaatccgattcccaccacgagcacccattccccggtgacggctgtaccggccctattttcaagctgatgaatattcaacagcagcttatgaagacaaacttaaaacagatggattctctcatgcccctaatgatgaccgctcaggacccctctagcgcccctgagaccgacggccaatttctgccatgtgcccctgagcctaccgacccacagaggcttagctcttccgaggagacagagtctacacagtgttgcccaggatctcctgtggcacagacagagagtccctgcgacttgagcagcattgtggaggaggagaacaccgatcggtcatgtaggaaaaagaataagggtgtcgagcggaaaggcgaggaggtagaaccagcgccaattgtggattctgggaccgtgtccgaccaggatagctgcctgcaaagtctgccagattgtggagtcaagggcactgaaggcctttcctcctgcgggaacaggaacgaagaaacgggtacaaagtccagcggaatgcctacagatcaggaatcccttagcagcggggatgcagtcctgcagcgtgacctggtgatggagcccggaaccgcacaatattccagcgggggagagctgggaggaatttcaaccaccaacgtcagcactcctgatacggccggtgagatggagcatgggttaatgaacccagacgctactgtttggaagaacgtgttacaggggggtgaatctacgaaggagcgcttcgagaattctaacatcggaactgccggagcgagtgatgtgcacgtcacctcaaagccagttgataaaatctctgtgcccaactgtgcaccggctgcttcaagcctcgacggcaacaaaccagcggaatcctccctcgcgttcagcaacgaggagacgtctactgagaaaactgctgagaccgagacgtctcgctcaagagaggagtcagctgatgcccctgttgaccagaactcagtggttatacccgcagctgctaaagataaaatttcagatgggctcgaaccttataccttactggccgcaggcattggggaagccatgagtccctcggatctggccctgctaggcctggaggaagatgtaatgcctcaccaaaattccgagacgaacagctctcacgctcagtctcaaaagggcaaatcctcacccatctgttccacaactggcgatgacaagttgtgcgccgactccgcgtgccagcagaacactgtcactagcagcggagatctggtggccaaactctgcgataatatcgtctcggaaagcgagtccacaacagccagacagccgtcatcacaggatccccctgacgcttctcactgcgaggatcctcaggcacataccgtaacaagtgaccccgttcgcgatacccaggagagggccgatttctgtcccttcaaggttgtggacaacaagggtcagagaaaggacgttaaactggataaaccattgaccaatatgcttgaggtcgtatctcatccacatcctgtggttccgaaaatggagaaagagctcgtgccagaccaggcagtaatatccgatagcacgttttccctagcgaattccccaggcagcgaaagtgtgacaaaagatgatgcactgtcttttgtgcccagccaaaaagaaaaaggaaccgcaacccctgagctgcatactgccaccgattatcgggacggacccgacgggaactctaatgaacccgataccaggcccctggaggacagagccgtgggcttaagtaccagttccaccgccgcagaactgcagcacggaatgggaaacacttccctgaccggactgggcggtgagcatgaaggaccagcacctcctgccattccagaggcgctaaacattaagggtaataccgactcaagcttacagtcagtgggcaaagccactctcgctctcgactctgtgctcacagaagagggcaaactgctggtcgtcagcgagtcctctgcagcccaggaacaggataaagataaagccgttacttgttcatcaatcaaagagaacgccctatccagcggaaccttacaggaggaacagcggaccccaccccctggtcaggatactcagcagttccatgagaaatccatttcagccgattgtgctaaggataaggctctccagctgagcaatagtccaggcgcaagttctgcattcctgaaggcagagactgaacacaacaaagaagtggcccctcaagtgagcctgcttacccagggcggagcagcccagtccttggtgcctcctggcgctagcctcgctactgagagccgacaggaagctctgggagcggagcataactcctctgctctgctaccctgcctgcttcctgatggttctgatggaagcgacgcccttaactgctcccagccttcccccctggacgtgggcgttaagaacactcagtcccagggcaaaacaagtgcttgcgaggtgtccggggatgtcactgtggatgtgaccggcgttaacgcacttcaggggatggccgagcccagacgggagaacatttctcataatacccaggatattttaatacccaatgttctactgagccaggagaagaatgcagtgctggggctgcctgttgcattgcaggacaaagcagttaccgatcctcagggggtgggtacccccgagatgattccactcgactgggaaaagggaaaacttgagggcgctgatcactcttgtaccatgggcgatgcagaggaggcccaaattgacgatgaggcacacccagttttgctccagcctgtggctaaagagctccccaccgacatggagctcagcgcccacgatgacggagcccctgctggcgtgcgagaggttatgagggcccctccatccggaagagaaaggagcaccccttccctcccgtgtatggtctcagcccaggatgctccgctgccaaaaggggcagatctcatcgaagaagctgcctctcgcatcgtggacgcagtcatagagcaagttaaggctgccggtgcactgctcacggagggggaagcgtgtcacatgtctctatctagcccagaactgggcccattgacaaaagggctggagtccgccttcaccgaaaaggtgtcaacttttccacccggagagtctctccccatgggctccacccctgaggaagcgaccggctcactggccggttgttttgccggtcgcgaagaaccagagaagatcatcctgccggtccagggacccgaacccgctgctgagatgcctgacgtgaaggccgaggatgaagtggacttcagggccagcagtattagcgaggaggtggctgtgggatccatagcagccaccctcaagatgaaacaggggccaatgacacaggctataaacagggaaaattggtgcaccatagagccatgccccgacgctgcttctttactggcttctaagcagagccccgagtgtgaaaatttcctggacgttggcctgggccgagagtgcacgtcaaaacagggggtacttaagagagaatctggttctgactccgatctgttccactcgccatccgatgatatggattccataattttccctaagccggaagaggagcacctggcctgtgatatcacaggcagctcttcgtccacggatgacaccgccagcctggataggcacagttcgcacgggtctgatgtttcactgtcccagatcttgaaaccaaatcggagtcgggataggcagtctctagatggtttctattcccatggcatgggcgcagagggtcgggagtctgaaagtgagcctgcagacccgggtgatgtggaagaagaagagatggacagcatcacagaggtgccggcaaattgctcagttctgaggtccagtatgcggtcattgtcccctttcaggcgacactcatggggccctggcaagaatgcggcttctgatgcggaaatgaatcaccgaagcatgtcatggtgtccatctggggtgcagtactccgccggactttccgccgactttaattatcggtctttcagccttgagggcctgacagggggagccggagtcggtaacaagcctagctccagccttgaagtttcgagtgccaacgcagaggaactgcgccacccgttctccggagaggagagggtagattcactggttagtcttagcgaagaagatttagagtcggaccagagagagcacaggatgttcgatcagcagatttgccatagatccaaacagcagggatttaattactgtacgagtgctatctcttccccgctcacaaagagtatatccctgatgaccattagtcacccagggttagataactctaggccttttcatagtacattccacaatacatccgctaatctaactgagtctatcactgaagagaactataattttttgccccactctccttccaagaaagattctgaatggaaaagtggaaccaaggtatcaagaactttcagctatatcaagaacaagatgagctcctcgaaaaagtccaaggaaaaggaaaaagagaaagataaaataaaggaaaaagaaaaggattccaaggacaaggagaaggacaagaagacggttaatggccacacattctccagcatcccagtggtcggtcctatcagttgtagtcagtgtatgaagcctttcaccaataaagacgcttatacatgcgctaactgttccgcctttgttcacaagggctgtagagagagcctcgcatcctgcgcaaaagtcaagatgaagcagcccaaggggtctctgcaggcccatgacacgtcctctctgcctacggttattatgcgaaataaaccatctcagccaaaagagcggccaaggtccgccgttctgcttgtggatgaaacagccaccacgccaattttcgctaataggcgctcccagcagtcagttagcctaagcaagtcggtgagcattcagaacataaccggagttggtaacgacgaaaatatgtcgaacacctggaagttcctttcacacagtactgacagcctgaataagattagcaaggtaaacgagtctacggagtccctgactgacgaaggcgttgggaccgatatgaacgagggacagcttttgggggacttcgaaattgaaagcaagcagttggaagcagaatcatggtctcggattatcgactccaaattccttaagcaacagaagaaggacgttgttaagcgccaggaagtcatatatgaactgatgcagacagaattccatcacgtgaggactctgaagatcatgagtggagtgtattctcagggtatgatggcagacctgctgtttgagcagcagatggttgagaagctctttccttgcttggacgaactaatatccatccactcacagttctttcagcgcatcctggaacgcaagaaggaaagcttagtggacaagagtgagaaaaactttcttataaaacgaatcggggacgtgttagtgaaccagttctctggggaaaatgctgagcgcctgaaaaagacatacgggaagttttgcggccagcataatcagtccgtgaactattttaaagatctttatgctaaagacaaacggttccaagcttttgtgaagaaaaaaatgagttcttcggtggtccgaagattggggatacccgagtgcatcttgctggtaactcagcggatcacaaaatatccagtccttttccagagaatcctacagtgtacaaaggacaacgaagtggagcaggaggacctcgctcagagtctcagcctcgtgaaagacgtgattggggcagttgattccaaggttgccagctatgagaagaaagtccggctgaatgagatctacaccaaaacggacagcaagagcattatgaggatgaagtctggccagatgttcgcgaaggaggatctcaaaaggaaaaagttggtacgtgatgggagcgtcttcttaaaaaatgccgctggcagactgaaggaggtgcaggctgtgctgctgaccgacatactcgtgtttctccaagagaaggatcagaagtatatatttgcttccctcgaccaaaaatcgaccgtcatcagcctgaagaaactaattgtgcgagaagtcgcacacgaagagaagggtctcttcctcatcagtatgggtatgactgaccccgagatggttgaagttcacgccagctcaaaggaagaaaggaactcgtggatccagatcatccaggatacaatcaacacactgaaccgtgacgaagacgaaggtattccttccgaaaatgaggaggagaagaaaatgctggacactagagcacgtgaactgaaggaacaacttcatcaaaaggaccagaagatattgcttctgctggaggagaaagaaatgattttcagagacatggccgagtgttctacccctttgcccgaggattgttcacccacacactctccacgcgtgctgttccggtctaacactgaggaagcgctgaaggggggaccacttatgaagtcagccattaatgaggtagaaatcctccagggactggtctccgggaatctaggcggtactcttggccctacggtatcgtcaccaattgagcaggatgtcgttggtccagtgtctctcccacgccgagccgaaaccttcggaggttttgactcgcaccagatgaatgcaagtaaaggtggggagaaagaggagggagatgatgggcaggatctccggcgaacagagtcagattccggattgaagaagggagggaatgccaatctggtgtttatgttaaagcggaatagcgaacaggtggtgcagtctgttgtacacttgtatgaacttctgagcgccctgcagggcgtggtcctgcagcaggattcttacattgaagaccagaaactggttctgtcggaaagagccttgacgagatctttgtctcgcccttcaagcttgatcgagcaggagaagcagcgaagcttggagaagcagcgccaggacctggccaatctacagaagcaacaagcgcagtatctggaggaaaagaggcgcagagaacgtgagtgggaggcgcgagaaagagagttaagagaaagagaagcgcttctggctcagagagaggaggaggttcagcaggggcagcaagacctggagaaggagcgggaagagctgcaacagaagaaaggcacctaccagtacgaccttgagaggctccgagcggctcagaagcagcttgaaagggagcaggagcagcttcgaagagaggccgaacgcctgtcccaaagacaaactgagcgcgacctgtgccaggtgtcccatccccacaccaagttaatgcgcattccgtctttctttccaagccctgaggaacctccatccccctccgcaccttcaattgctaagagtgggtctctggactctgaactgtcagtgtcacctaaaaggaactcgatctcaagaacccataaggacaagggcccattccacattttatcaagcactagccaaaccaataaggggcctgaaggccagtcgcaagcacctgcttccaccagtgcctctaccaggctgtttggcctaacaaaacccaaagagaaaaaagagaaaaagaagaagaataagaccagtaggtcccagcctggagatggacctgcctcagaagtctcagccgagggcgaggagatcttttgtta

SEQ ID NO: 212867 - DNA, 8441 bp, synthetic construct
  misc_feature 1..8441: note = Description of Artificial Sequence: Synthetic coding sequence
  source 1..8441: mol_type = other DNA
atgaagttgaatccccagcaggcccctctttacggggattgcgtggttaccgtcctactggcagaggaggacaaagccgaagacgacgttgttttttatctggtgtttctgggaagcacgctccgacattgcacttccaccaggaaggtcagcagtgacacactggaaactatagcaccaggacacgattgttgcgagacggtcaaggtccagctgtgcgcctctaaggaggggctgcctgtgtttgttgtggccgaggaagattttcacttcgtgcaggacgaagcttacgatgccgcacagttccttgctacaagcgctggtaatcagcaggccttaaatttcacgaggtttctggaccagagcggcccacctagtggggacgtgaactctctcgataagaagctggtgttagccttccgccaccttaaattgcctaccgagtggaacgtgctgggcactgaccagtccttgcacgacgctggacccagggagaccctaatgcacttcgctgtgaggctggggcttttacgcctgacatggttcctgctccagaagcccggaggtagaggcgcactatcaattcacaatcaggagggggctacgcccgtgtccctcgctttggaacgcggataccacaagctccatcagttgctaacagaagagaatgcaggagagcccgattcttggtccagcctgtcttatgagatcccgtacggtgactgtagcgtcagacaccatcgagagcttgatatctacactctaacctccgagagtgatagccaccacgagcacccattccccggtgacggctgtacaggtcctatatttaaacttatgaacatccaacagcagcttatgaagactaatctgaagcagatggactccctcatgcctctgatgatgaccgcgcaggatccctcctccgcccctgaaactgacgggcagttcctgccttgcgcacccgagcccacagacccgcagaggctttcctcctcagaagaaactgagtcaacgcagtgttgtccaggctcacccgtcgcgcagacagaatctccatgcgacctgtcgagtattgttgaagaggagaatactgaccgctcgtgccggaaaaagaataaaggagtggaaagaaagggggaagaggtcgagccagccccaattgtcgattcgggtactgtctctgaccaggactcatgtctgcagagtcttcctgattgcggagttaaaggcacagaagggctgagtagctgcgggaacaggaatgaggagaccggcaccaagtcttccggtatgcccaccgatcaagagtccctgtcctcgggtgacgccgtattacagagagatctggtgatggagccagggacagcacagtattcctccggaggagagctcgggggtatctctactaccaatgtgtctacacccgacacagccggtgaaatggagcatggcttgatgaatccggatgccaccgtgtggaagaacgtgttacaaggcggagaatccactaaagagaggtttgaaaattctaacatcggcaccgccggtgctagtgacgtgcatgtgacatctaagcccgtggacaagatctcagttcctaactgtgcacccgctgccagcagtctggacggcaacaaacccgctgagtctagcctcgccttttcaaacgaggagaccagcaccgagaaaaccgccgagaccgagacatcccgtagtagggaggagtctgccgacgctcctgtcgatcagaactctgtggtgattccagccgcagccaaggataagatctccgacggcctggaaccgtacactctgctcgccgcaggcattggcgaggctatgtctccctcagacctggctctacttgggttagaagaagatgtaatgccacaccagaatagcgagacgaattccagccacgcccaatcgcaaaagggaaagtcctctccgatttgttctacgactggcgacgacaaactctgcgcagattccgcatgtcagcagaacaccgtcaccagctcgggagacctggtcgcaaagctatgcgataacatcgtgagcgaaagtgagtcgactacagccaggcaaccttcctcacaagatccacccgatgcaagccactgtgaggaccctcaagctcacaccgttacttctgacccagtgcgagatacccaggagagagctgacttctgtccatttaaagtggtggataataaagggcaaagaaaggacgtcaaactggacaagccactgaccaatatgctcgaagtggtatctcacccacaccccgttgtcccgaaaatggaaaaggaactcgtgcctgaccaggctgttatttctgactcaactttttcactggccaattctccaggaagcgagtccgtgaccaaggatgacgccctttcctttgtaccttcgcagaaggagaaaggaaccgctacccctgaactacatacagccaccgactaccgggatggaccagatggaaattcaaacgagcccgatactagaccacttgaggatagggcagtgggtctatcaaccagttcaactgcggctgagctccagcatggaatggggaatacctcattaaccgggctggggggagaacatgagggccctgccccacccgcaattcctgaagccctgaatattaaaggcaacacagatagttcactacaatccgtgggaaaagcgacgttagcattagactcagtgctgaccgaagagggtaaattgctggtggtttcagagtcttcagccgctcaggagcaggataaagataaagccgtaacatgcagcagtatcaaagaaaatgccctgtcttctggcactctgcaggaggaacaacgcacacctccccctggccaggatactcaacagtttcacgagaagtcaatcagcgcggactgcgcaaaagataaagcccttcaactgtctaactcccccggagccagctctgctttccttaaggctgagacagagcacaataaagaggtggcgccacaggtgagcttgctcacccagggaggggctgctcagtccttggtgccgcctggcgcttctctagcaaccgagagccgacaagaggccctgggagcggaacacaacagcagcgccctgctgccatgcctcctgccggacggaagcgatgggagcgatgcgttaaattgctcccagccatctccactcgacgttggagtgaagaatacacagtcccaagggaaaacgtctgcctgtgaggtctccggggatgtgaccgtcgacgtgaccggggtcaacgcgctgcagggaatggccgagcccagaagggaaaacatttctcataacacacaggatatcctgatccctaatgtcctgttgtcccaagagaagaacgctgtgctgggtctaccagttgcactgcaggacaaagccgttacagatccccagggggtagggactccagagatgatccctctcgattgggagaagggaaagctcgaaggggctgatcactcatgcacaatgggtgacgccgaggaggcccagatagacgacgaagctcacccagtgttgctgcagcctgtggcaaaagaactccctacagacatggagctctcggcccatgacgacggtgcacctgcaggagtgagggaggtcatgcgggcacccccatccggcagggaacgttctaccccgagccttccatgcatggtgagtgcccaggacgctcccttgcccaagggggcagacctgatcgaggaagcagccagtcgcatcgtggacgctgttatcgaacaggtgaaagctgccggtgctcttctgaccgaaggagaggcatgtcacatgagcctgtcttctccagaactggggccactaacgaagggcctggagtcagcttttactgagaaagtgtctacattcccacctggagagtccctgccgatgggatctacaccggaggaagccaccggaagcctcgctggctgctttgccggaagagaggagccggaaaagatcattctgccggtccagggacctgagccggcagctgaaatgccggatgtgaaagcagaggatgaggtcgacttcagggcgtccagtatctcagaggaggtcgctgtcgggtccatagccgcaaccctgaaaatgaaacagggtccaatgacccaggctatcaaccgggaaaactggtgcactatcgagccatgcccagacgctgccagtctgctggccagcaagcagagccctgagtgtgagaacttcttggacgtaggtctgggccgtgagtgtacttccaaacaaggagtgctgaagagagagtcaggatccgattccgacctatttcactcgccaagcgacgatatggattcaattatattccccaagccagaagaagagcacctggcatgtgacatcaccggctcctcaagcagcacagatgatacggcaagcttggataggcacagctcccatggcagcgacgtaagcctctcccagatcttgaaacccaaccgatcccgcgatcggcagtcactggacggtttctactctcacgggatgggcgcagaggggagggagagcgagagtgagcccgctgatccgggtgatgtggaggaggaggagatggacagtatcactgaggtgcccgctaactgcagcgtactgcggtctagcatgcggtcgctgagccctttccgcagacactcttggggccctggtaagaacgccgcatcagacgcagaaatgaatcaccggtcttctatgcgagttctcggcgacgtggtgcggaggccacctatccaccggaggagtttctcgctcgagggcctgacagggggagctggagttggcaataagccatcgagctctcttgaggtgtcctccgccaatgctgaagaactgcgccacccattcagtggagaagaaagggtggacagcctcgtgtccctgtcggaagaagatctggaaagcgatcagcgggaacatcggatgttcgaccagcaaatctgccatcggtctaaacagcaggggtttaactattgcactagtgccatcagcagcccccttacaaagtccatttcactgatgaccatcagtcatccaggcttagataacagccggccatttcactcaacgtttcataatacatctgccaatctgaccgagagtattaccgaagagaactacaatttcctgccgcatagccctagcaaaaaagactcggagtggaagtcgggcaccaaggtgtctcgcactttctcgtatatcaagaacaaaatgtcttcgtccaagaaaagtaaggaaaaggaaaaggaaaaagataagatcaaagagaaggaaaaggacagtaaggacaaggaaaaagacaaaaaaactgtgaacggtcacaccttttcttcgatccccgtggtgggcccaatttcatgttcccagtgtatgaaaccttttactaacaaggatgcctacacatgtgcgaattgtagtgcatttgtccataaggggtgtcgggaaagcctggcatcttgcgctaaggtcaagatgaagcagcccaagggcagcctgcaagctcacgacactagcagcttgcccacggttatcatgcgcaacaaaccatctcagcccaaggagcggcctcggtccgctgtgttgctggtggacgaaaccgccaccacaccgatcttcgctaatagaaggtcccagcagtccgtaagtttatcgaagtcggtcagcattcagaatatcactggggttggtaacgacgaaaacatgagcaatacatggaaattcctctcgcactctaccgatagtctgaataaaatcagtaaagtgaatgagtcaaccgaaagccttactgacgagggggtggggaccgacatgaatgaaggacagctcctgggggattttgagatcgagtccaagcagcttgaggcagagtcctggtcgcgcatcatagactcaaagtttctgaaacagcagaaaaaggacgtggtgaaaaggcaggaagttatttacgaacttatgcagacagaattccatcacgtgagaactctgaagatcatgtcaggagtctatagccaaggaatgatggcggatttattgttcgaacaacagatggttgaaaagctattcccttgccttgatgagcttatctccatacattcccaatttttccagcgtatcttagagcggaaaaaagagagcttagtcgataagagcgagaagaacttccttatcaagaggataggagacgtcttagtgaatcagttctctggagagaatgctgagaggctgaagaaaacttacggaaaattttgtggccagcacaatcagtctgtaaactactttaaagacttgtacgcaaaagacaagagatttcaggcgttcgttaagaaaaagatgtcttcctccgtcgtgagacgcctggggatacctgagtgcattttgttggtcacacagaggattaccaagtatcccgttctgttccagcggatcctgcagtgtactaaagacaatgaagtggaacaggaggacctggcccagagtttgtccctggttaaggacgtcattggggcagttgattccaaggtcgccagctatgaaaaaaaggttcggctgaacgaaatatataccaaaacagatagcaagtctataatgcggatgaaatccgggcaaatgttcgctaaggaggacctgaagcggaaaaagctggttagagatggcagtgtttttctgaagaatgccgctggacgactgaaggaggtgcaggctgttcttctgacagatatcttagtgtttctccaagaaaaggaccagaagtatatctttgcttcgctggaccagaagtcaaccgtcatcagtctcaagaaactcattgtgagggaagtcgctcatgaagaaaagggcttgtttctcatctcgatgggtatgacggaccctgagatggtggaggtccacgccagctccaaggaggagcggaactcatggattcagataatccaggatacgatcaacaccttaaatagagatgaggacgaaggcatcccaagcgagaatgaggaggagaaaaaaatgttggacacgcgcgcacgtgagttgaaagagcagttgcatcagaaagaccagaaaattctgctgttgctggaggaaaaagagatgattttcagagacatggccgagtgcagtacacccctgcccgaggattgcagtcccacacattcccccagggttctctttaggagcaacactgaggaggcactgaaagggggaccactaatgaagagcgccattaatgaggttgagattctacagggcctggtcagcggtaatttgggcggtaccttaggcccaacagtatcgagtccaatcgagcaggacgtggtgggcccagtatcccttcctcgccgagccgagacgtttggcggtttcgactcgcaccagatgaatgcttctaagggaggggagaaagaagagggggacgacggccaagacctcaggagaaccgagagtgatagtggactcaagaaaggagggaacgccaacctggtgttcatgctcaagcgcaatagcgagcaagttgtgcagagtgtggtccatctgtacgagttgctgagtgccctgcagggcgtggtgcttcaacaggatagctatatagaagaccagaaactagtactgtctgaaagggctctgactcgcagcttaagtcggccttcttcccttattgaacaggagaagcaacggagtctagaaaagcagcgccaagacctggcgaatctgcagaaacagcaggcccagtatctcgaggagaagcgccgaagagagcgcgagtgggaggcccgagaacgggagctgagagaacgggaggcactgctagctcagagggaagaggaggtccagcagggtcagcaagatctggagaaggaacgcgaggaactccagcagaaaaaaggtacctatcagtatgatctggagaggctcagggctgcccaaaaacaattggagcgggaacaggaacagctccgtcgtgaagctgaaagactgagtcagcggcagacagagcgggatctctgtcaggtttctcatccgcacacaaagctgatgcgaatccctagtttctttccttctcccgaggagcctccatcgcctagcgcccctagtattgctaagagtggaagtcttgattcagagctgagtgtgagccccaagcgtaacagcatcagcagaacccacaaagataaaggaccttttcacatcctgtccagcacatcccagacgaacaaaggcccagagggacagagccaagccccagcctctacctctgcgtccactcggctttttggcttaaccaaacctaaggaaaaaaaagagaagaaaaagaagaataaaacctcccgttctcagccaggggatggtccagccagtgaggtctctgcagagggagaggagatcttctgtta

SEQ ID NO: 212868 - DNA, 1245 bp, synthetic construct
  misc_feature 1..1245: note = Description of Artificial Sequence: Synthetic coding sequence
  source 1..1245: mol_type = other DNA
atgtctaacacgtggaagtttctgagccattcaactgactccttgaataaaattagtaaagtgaatgagagcaccgagtccttaactgacgagggtaccgacatgaacgagggccaactactgggagactttgaaatagaaagcaagcaattggaggctgagtcttggtccaggataattgatagcaagtttctgaagcagcagaaaaaggacgtggtgaaaaggcaagaggtgatctatgagcttatgcagactgaattccatcatgtacgaactctcaagatcatgagtggagtttattcgcagggaatgatggcagatttgttgttcgagcagcagatggtcgagaagcttttcccatgccttgacgaacttatctctatacatagtcagttctttcagaggattctcgaacgtaagaaagagtcactagtggataagagcgagaagaacttcctcattaaaaggatcggagacgtgctcgttaaccagttctcaggtgagaatgcagagcgtcttaaaaagacatacggcaagttctgcggtcagcacaaccagagcgtgaactattttaaagatctgtacgcaaaagacaagcggtttcaggctttcgtgaaaaagaaaatgtcgtccagcgtagtgcgcaggctcggtatcccagagtgtatactgttagtcactcagagaattaccaagtatcctgtgctcttccagaggattctccagtgcacgaaggacaatgaagtggagcaagaggacctggcacagtctctgagcctcgtaaaagatgtgattggggctgtcgacagtaaagtggccagctatgagaagaaggtgagactaaacgaaatctataccaaaaccgacagtaagagtatcatgaggatgaagagcggccaaatgttcgctaaggaggatttaaagcggaaaaaactggtgcgggacgggtccgtgttcttgaaaaatgccgcagggagactgaaggaggttcaggccgtcctgcttactgacatcctggttttcctccaggaaaaggaccagaagtatattttcgcatccctggatcagaagtctactgtgatctcgctaaaaaagctaattgtgagagaagtggcacatgaggaaaagggcttatttctgataagtatggggatgaccgatcccgaaatggtggaagtgcatgcatcctccaaggaagagagaaattcgtggatacaaatcatccaggacacaataaatacatag

SEQ ID NO: 212869 - DNA, 1158 bp, synthetic construct
  misc_feature 1..1158: note = Description of Artificial Sequence: Synthetic coding sequence
  source 1..1158: mol_type = other DNA
atgtatgagagacacaaacgaaggtattccctgtgcgacattagcaaggtggatagaacagtagacgtcgtgttgttgaagattaatcgggaaaattggtgcactatcgagccttgccctgacgcggctagccttctcgcaagtaagcaatcacctgagtgtgaaaatttcttggatgttggtcttggacgcgaatgtacatcaaaacaaggggtgctcaagagggaaagtggtagcgactctgatttatttcattccccttccgatgatatggactctatcatcttccccaaaccggaagaggagcacctagcctgcgatatcacagggtcttcctccagcactgacgacaccgcttctctcgatagacactcgtctcacggcagtgacgtgtctttatctcagatcctcaaacctaacagatcacgagaccgacagtctttggatgggttctactcccacggtatgggagcagaaggaagagagtcagagtctgagccagcagaccctggggatgtagaagaagaggagatggactcgattactgaagtgccggcaaattgcagtgtccttagatcttccatgcgtagcctatcacctttccgcaggcattcttgggggcctggaaagaatgccgcaagcgacgccgaaatgaatcaccgctctttcagcttggaggggctcacagggggagccggagttggaaataagcccagtagtagcctcgaggttagctcagcaaacgctgaagagctgaggcacccgttcagtggtgaagaacgtgtagactcattggtaagtctgtccgaagaagatttagaatccgatcagcgcgagcaccgcatgtttgatcaacaaatctgtcatcggtcaaaacagcaaggattcaactattgcacttccgccatttcttcacctctgactaaatcgatcagccttatgacaatatcacaccccggactggacaactctcggccttttcatagcacattccataatacatcggccaacctaactgaatctattaccgaggaaaactataattttctgccccattccccttctaagaaagacagcgaatggaaaagtggcacgaaggtttctcgcaccttttcgtacataaaaaacaaaatgtcatcgagcaaaaagtctaaatag

SEQ ID NO: 212870 - DNA, 8378 bp, synthetic construct
  misc_feature 1..8378: note = Description of Artificial Sequence: Synthetic coding sequence
  source 1..8378: mol_type = other DNA
aaattgttggagaagcagcctccaattgagggtgattgcgtggtcacagtcctgttggcagaggaggacaaggcagaggacgacgtcgtcttctatctggtgtttctgggcagtactctgcgacactgtacctctacacgcaaagtgtcttcagatacactggaaaccattgctccagggcacgattgctgtgagaccgttaaggtgcaactgtgtgcaagtaaagagggactccccgtttttgtcgtggccgaggaggacttccactttgtccaggatgaagcctatgatgccgcacagtttctcgcgacaagcgccggaaaccaacaggccctcaatttcaccaggtttctcgaccagtccggaccaccttctggagatgtcaattctctggacaaaaagctggtgcttgctttccgccacctgaagctaccaactgaatggaacgtgctaggcacagaccaatccctccacgatgccggacccagagagacgctcatgcatttcgctgtgcgacttggcctgctccgcttgacctggttcctgctccaaaagcccggtggcagaggggctctgtcaatccataaccaggaaggagccacccccgtgtctttggccctggaacgaggttatcacaaactgcatcagctgctgacagaggagaacgcgggtgaacctgattcctggtccagcttgagttatgagattccctatggggactgctccgttcggcatcatagggagcttgacatctacaccctgacctctgagtccgattcccaccatgagcaccccttcccaggcgacggctgtacaggacctatattcaaattgatgaatatccagcaacagctgatgaaaactaatcttaagcagatggattctctcatgcccttgatgatgactgcccaggacccatcctccgccccagagaccgatggccaattccttccctgtgcacctgagccaaccgatccccaacgacttagcagcagtgaggagactgaatctacgcaatgctgccccggttcacctgtcgcccagaccgagagcccgtgtgacttaagctctatcgtcgaggaggaaaatactgacaggtcgtgccggaagaagaacaagggcgtggaaagaaagggcgaagaggtcgagcccgcacccatcgtcgatagcggcacggtctcagatcaggattcttgtctgcagagcctgccggactgtggagtcaaggggactgaaggccttagctcttgcggaaaccggaatgaggaaacgggcaccaagtcctctggcatgcctacagatcaggaaagtttgtcatcaggggacgctgttttgcagagggacttggtaatggaacccggaactgcgcaatactcctcaggtggagaactcggagggatttccactaccaatgtgagcactcccgatacagccggtgagatggagcacggtctgatgaacccagatgccacagtttggaaaaacgttctgcagggtggggagagtactaaggagcgtttcgaaaactctaatatcggcactgccggagcctctgacgtgcatgtcacatccaaacccgtggacaaaatcagcgttccaaactgcgccccagctgcatcaagtctggacgggaacaagccggcagaaagctcccttgccttctccaacgaagagacttcgacagagaagacagcggagaccgaaacgtcacggtctagagaggagagcgcggatgcccctgttgaccagaacagcgtagtgatccctgcagctgccaaggataagatttctgatgggcttgagccatataccctccttgctgccggtataggggaagccatgagcccgtctgacctcgctctactgggcctggaagaagacgtaatgccacaccaaaatagtgaaacgaacagttctcatgctcagtcgcagaagggaaagtcctctccaatctgtagcacaactggtgacgataaactttgtgcggattctgcatgtcagcagaatactgtaacgtccagtggtgatttggtggccaaattgtgcgataatattgttagcgagtccgagagtaccacggcccgtcagccatcatcacaggatccacctgatgcgagtcactgcgaagacccgcaggctcatactgtcacaagcgaccccgtgcgggacacgcaggagcgggctgatttctgtcctttcaaagtggtcgataataaaggacagagaaaggacgtcaagttggacaagcctctcaccaatatgctggaggtggtcagccacccacatccagtggtcccaaagatggagaaggagctagtgcccgatcaagcggtaatttcagactccaccttttccttagcgaactctcccggttcggagtctgttaccaaagacgacgccctgagcttcgtgccaagccagaaggagaaaggtacagccactcccgagctgcacaccgctactgactaccgcgacgggcctgacggaaattcaaatgagcctgacacacggcctctcgaagaccgcgctgtgggactgtccacgtcgagtactgccgcagagctccagcatggaatgggcaataccagtttaactgggctgggcggagaacacgaggggccagctccccctgcaatccctgaggcattgaatattaaagggaataccgatagtagcctgcaaagcgtgggcaaagcaaccttggcactggatagtgtgctgacagaagaaggcaagctcctggtggtgagcgagtctagcgctgctcaggaacaagacaaagataaggccgtcacatgtagtagtattaaagaaaacgcactgtcttctggcaccctgcaggaggagcagcgcacccctccccctggccaggacacccagcagttccacgagaagagcatctcagcggattgtgccaaagacaaagcactgcaactgtctaattcaccaggcgctagcagtgcgttcctgaaggcggaaaccgaacacaacaaagaggtggcaccacaggtgagcctgctgactcaggggggtgcggcacaatccctggtgccccctggcgcaagcttagcgactgaaagtcgccaggaagccctgggagccgagcacaactcgtccgctctgttgccttgcctgctgccagatgggtccgatggttcagatgccctcaattgcagccagccgtcgccactggatgttggagtgaagaacactcagagccaagggaagacatccgcctgcgaggtgagcggggacgttacagtagacgtgacaggggtgaatgctctgcaaggtatggcggaacctcgacgggagaatatatctcacaatacacaggacattctcatacccaatgtcctgctatcacaggagaaaaacgcagtcctcgggctacccgttgctctgcaggataaggccgtaacagacccacagggagtagggactcccgagatgatcccccttgattgggaaaagggcaagctggagggagctgatcacagttgcactatgggtgatgctgaggaggcccagattgacgacgaagcccaccccgtgttactgcaacctgtcgcaaaagaattgcccactgatatggagctgtccgcccacgatgacggggcaccagcaggggtgcgtgaagtgatgagggcccctcctagtggcagggagagatcaaccccctcactgccctgcatggtaagcgcgcaagatgccccactgcccaagggggctgaccttatcgaggaggccgcttcaagaattgttgatgccgttattgaacaggttaaggccgctggggcactcttaaccgagggcgaagcatgtcatatgtcattgagtagccccgagctggggcctcttaccaaggggctggagtcagcctttaccgagaaggtttccactttcccacctggcgagtcactaccaatgggttcaacccctgaggaggctaccggcagcctcgcagggtgtttcgcagggcgagaagaacccgaaaaaatcatcctgccagtccagggacccgagcccgctgccgagatgccggatgtgaaagccgaagatgaggtggacttccgtgcaagctctatcagcgaggaggtagcagtcggtagcatagcagccacattaaaaatgaaacagggccctatgacacaagcgatcaaccgagagaactggtgcacaatagaaccatgtccggacgccgcaagtctgttggcgtccaaacaaagccccgagtgcgaaaattttcttgacgttgggctcggtagggagtgcaccagcaaacagggcgtgctgaaacgggaatctggatccgatagtgatttattccacagtcctagtgatgacatggactctataatcttccccaaaccagaagaagaacacttagcatgtgatatcactgggagcagtagcagcacagatgataccgcctcattggaccgccattctagtcacggatctgacgtctcactgagccagatcctgaaaccaaaccggagtagagataggcagtctctggatggcttctacagccacggtatgggggctgaaggacgagagtcggaaagcgaacctgccgacccaggggatgttgaggaggaagaaatggattcaatcacggaggtacctgccaactgcagtgtcctgagatccagcatgcggtctctctccccattccgaagacactcatggggaccaggaaagaacgcggcatccgacgccgagatgaaccacagaagtttctctttagagggactcaccggtggagccggagtgggaaacaaaccttcgtcctctttagaagtgagctcagcgaacgccgaagagctaaggcatcctttttctggagaagagagagtcgactctctagtgagtctcagcgaggaagacctcgaatccgaccagcgggaacaccgtatgttcgatcagcagatttgccacaggagcaagcagcagggctttaattactgtaccagcgccatttccagtcctcttactaagtctataagtctgatgactatctcgcatcctggacttgacaactccaggccattccactcaacatttcataatacttctgctaatctgacagagagcatcaccgaagagaactacaacttcttgccccatagcccaagcaaaaaggatagtgagtggaagagcgggactaaggtgagccggaccttctcatacatcaagaataagatgagttcatcaaagaagtccaaagaaaaggagaaggagaaggacaagattaaagagaaagagaaagattctaaggataaagaaaaagacaagaagactgtgaacggccatacattcagctctattccagtggtcgggccaattagttgctctcagtgcatgaaaccatttacaaataaggacgcctacacgtgcgccaattgttctgccttcgtgcacaagggctgcagggagtctctcgcctcgtgtgcaaaggtaaagatgaaacagcctaaaggctccctccaggcccatgatacatcatcattgcccacagtgatcatgcgcaataaaccaagccagccaaaggaacggcctagatcagccgttctgctagttgacgagactgccaccaccccaatattcgctaaccggagatctcagcaatctgtatctctgagtaaatcagtgagcatccagaacattaccggcgtcgggaatgacgagaacatgtctaatacatggaaattccttagccacagtacagacagcctgaataaaatcagtaaagtgaacgagagcactgagagtctgaccgacgaggggaccgacatgaacgaagggcagctgctgggggacttcgagattgagagcaagcaactggaagcagagtcttggagcagaattatcgattccaagttcctaaaacagcagaagaaagacgtggtgaaacggcaggaggtgatctatgaattaatgcagaccgagttccaccacgtgagaacactgaagataatgtccggagtttattcacagggcatgatggccgaccttctctttgaacagcaaatggtggaaaagctattcccatgcctagacgagttgatttcaattcacagccagtttttccagcgaatcttagaaagaaaaaaggagtccctcgttgacaaaagtgaaaagaactttctgatcaagcgtattggagacgtgctcgtaaatcagtttagtggggagaacgcagagcggctgaaaaagacttatggaaagttctgtggtcagcataaccagagtgtaaattactttaaggatctgtatgccaaggataagcgctttcaggcatttgtcaaaaagaagatgtcttcctcagttgtgcgccgactggggatccccgaatgtatcctgctcgtgacacagaggatcaccaagtatccagttctgttccaaaggatcctgcagtgtaccaaggacaatgaagtggaacaagaagacttggcacagtccctgagcttggtgaaggacgtgatcggggcagtggatagtaaagtggccagctatgaaaaaaaggttaggttaaacgaaatttatacgaaaacagattcaaagagcattatgcgcatgaagtcaggacaaatgttcgctaaagaggatctgaaacgcaagaagctggtgcgcgacggttccgtgtttcttaagaatgcggctggtcgtctgaaggaggtgcaagccgtacttctgactgacatactggtatttctgcaggaaaaggaccagaagtacattttcgccagtctggatcagaagtccacagtcatcagtttgaagaagctgatcgtccgggaagtggctcatgaggaaaaaggtctgtttctgatttccatggggatgacggaccccgagatggttgaagtacacgccagttccaaagaagagagaaattcttggatacagattatccaggatactattaatacgttaaatagggatgaagatgaaggcattcccagcgaaaacgaggaggaaaaaaaaatgctggataccagggctcgggagctgaaagagcagcttcatcagaaggaccagaagatcttattgctgctggaggaaaaagagatgattttccgagacatggccgagtgttccacacctcttcctgaggactgtagtccgacccattccccgcgagtactcttccgctccaacacagaagaggcactcaagggaggcccactgatgaagtccgccatcaatgaggtagagatactgcagggccttgtcagcgggaatctcggcggaacattgggaccaactgtgtctagcccaatagaacaggatgtggttggtcctgtgagcctgccacgtagggcggaaaccttcggcggattcgacagccaccagatgaatgcttccaagggaggcgagaaggaggaaggagacgatgggcaggacctgagacgcacggaaagcgattcgggccttaaaaaggggggtaatgccaatctggtgtttatgttgaagaggaactctgaacaggtcgttcagagcgttgtgcatctgtatgagctgctcagtgccctacaaggtgttgttctgcaacaggacagctatatcgaggatcagaagctggtgctcagcgaaagagcattgactaggtctctgtcaagacccagcagtctaattgagcaggaaaagcaaagaagccttgaaaaacagagacaggatttagccaaccttcagaaacagcaagcccaatatctggaagaaaaaaggcgccgtgagagggagtgggaggcgcgagagcgggaactacgcgaaagagaagccctcctcgcacagcgcgaggaggaggtgcagcagggtcagcaggacctagaaaaagagcgagaagagttgcaacagaagaagggcacttatcaatacgatcttgagcgccttcgggctgcacagaaacagctcgaacgcgaacaagagcagttgagaagagaagccgaaagactcagccaaagacaaacagagcgagacctctgccaggtgtctcatccacacaccaaattaatgcggatcccttcgttctttccaagtccggaagaaccgccaagtccctccgcgccttccattgcaaagtctgggtcactcgactccgagctgtctgtttcaccaaaacggaactcaatctctcgtacccataaagacaagggtccttttcacattttatccagcaccagccagaccaacaaaggtcccgaagggcagagccaagcccctgcttcaacaagcgcctccactaggctgttcggtcttacaaaacctaaggaaaagaaggagaaaaaaaaaaagaataagacgtctcgcagccagccgggagacgggcctgcttccgaagtaagcgccgagggggaagaaatcttctgtta

SEQ ID NO: 212871 - DNA, 5237 bp, synthetic construct
  misc_feature 1..5237: note = Description of Artificial Sequence: Synthetic coding sequence
  source 1..5237: mol_type = other DNA
atgaagcttaatccacaacaggcaccgctctacggagattgtgtggttactgtccttcttgccgaggaggacaaggctgaagacgatgtggtcttctacctcgtcttcctgggcagtacactgcgccattgcaccagtaccagaaaggtgtcaagtgacacactggagacaattgcaccgggtcacgactgctgtgaaacagtaaaggtgcagctctgcgcctccaaggagggcctgcccgtcttcgtcgtcgctgaagaggacttccacttcgtacaggacgaagcatatgatgccgctcagtttcttgcaacatctgccggtaatcagcaggcactcaatttcacccgctttcttgaccagtctggtccaccgagcggagatgtgaatagcttggataaaaagttagtgctagcctttcgtcatctgaagctgcctacagagtggaacgtattgggaaccgatcagtctctacacgatgcagggcctcgcgaaacactgatgcattttgctgtacggctgggtctgttgcggctgacctggtttctccttcagaaacctggagggagaggcgctctgtccatccacaatcaagagggcgctaccccggtctctctggccctggaacgaggctatcacaagctccatcagctcttgactgaggagaacgccggagagcccgacagttggtcctccctgagttacgagatcccgtatggggattgcagcgtgcggcaccatcgggaacttgatatctatacactgacgtctgaatccgactcccatcatgaacacccttttcctggggatgggtgcactggacctattttcaaacttatgaatatccagcagcagcttatgaagaccaacctcaaacaaatggattctctgatgccattgatgatgactgcacaggacccatctagcgctcctgaaacagacggacagttcctgccgtgtgcacctgagccaaccgatccccaaagactgtcttcctccgaagaaacagagtccacgcagtgctgccctggaagccctgtggcccagaccgagagtccatgcgatctgagctccattgtggaagaagagaacaccgacagatcctgtagaaagaaaaacaagggagtggaacgtaagggggaagaggtagagccggctcctattgttgactccggaacagtcagcgaccaggactcctgccttcaaagcctgcccgattgcggcgtgaaaggtactgaaggactcagcagctgtgggaaccggaacgaagagactgggaccaagagctccggcatgcccaccgatcaggagagtctcagctctggagatgctgtgctccagcgagatctcgtgatggagcccggaacagcccagtacagcagtggaggggaattaggcggaataagtactaccaacgtgagcacaccggatacagcaggtgagatggagcatggtctgatgaatccagatgcaacagtctggaagaatgtgttgcagggaggagaaagtacaaaggagcgatttgagaactccaatatcggcacagccggagcctccgatgtccatgtaacatccaaaccggtggataagattagcgtgccaaactgcgccccagccgcaagtagtttagacgggaataaaccagcagaatcttcgctggcctttagtaacgaagaaacgagcacagagaagaccgccgaaacagagacgagccggtcaagggaggagtccgctgacgctcccgtcgatcaaaatagtgtagtaatcccggctgccgcaaaagataagatttccgacggactcgaaccttacaccctcctcgccgctggaataggggaagccatgagtccctcagatttggctctgctcggcctagaggaagatgtgatgcctcatcagaatagcgaaactaactcctctcatgctcaaagtcaaaagggcaaatcttcaccgatctgctctaccaccggagatgacaagctgtgtgccgacagcgcttgccagcagaacaccgtcacaagcagcggcgacctcgtggcaaagctctgtgacaatatcgtgagcgaaagcgagtctaccaccgcaaggcaaccatcttcccaggatccacccgacgcttctcattgcgaagatccccaggctcataccgtcacgagcgatccagtgcgcgacacacaagaaagagctgatttttgcccgttcaaagtggttgataataaggggcagcgcaaagatgtgaagttagataaacctctgaccaacatgcttgaggtggttagccatcctcatcccgttgtgccaaagatggaaaaggagctggtgcctgaccaggccgtaatctcagactcaacgtttagccttgctaatagccccggaagcgaatcggtgaccaaggacgacgctctgtctttcgttccgtcgcagaaggaaaaaggtaccgcaactccggagcttcatacagcaactgactatcgcgacggaccggatggaaactcaaacgagcccgataccaggcctctggaggacagagcagtaggcctgtcaacctcgtcaaccgcggcagagctgcagcatgggatggggaacacatccttgaccgggctaggcggagaacacgagggcccagcccctccggcaatcccagaggccttaaatattaagggcaatacggattcctctctgcagtctgtggggaaagccacacttgctctagacagcgtgcttactgaggaagggaagttgctggtggtgtcagagtcatcggccgctcaggaacaagacaaagacaaagcggtcacgtgtagctccataaaggagaatgcgctgtcctcggggaccctccaggaggagcagaggacgcctcctcctggacaggacacccaacaattccatgaaaaatccatttcagctgattgtgccaaggacaaggccctccagctcagtaatagtcctggagcctcaagcgcgtttctgaaagccgaaactgagcataataaggaagtggcacctcaggtgagcctgctgacacagggtggcgctgcacagagtctggtgccacctggcgcttctctggctactgagtccaggcaggaagccctaggagctgaacataactcaagcgccctgttgccttgtctgctgcctgatgggagcgacggcagcgacgccctgaactgctcacagccttctcctcttgatgtgggagtgaagaacacccagtctcaaggcaaaacctctgcctgcgaggtgagtggagacgtgacagtggacgtgacaggcgtgaacgctttgcaaggcatggccgaaccaaggcgcgagaatattagccataacacccaagacatcctgattccaaatgtgctgctgtcacaggagaagaacgctgtcctcggcctgcccgttgcccttcaggataaagcggtgaccgacccacagggagtggggactccagagatgatccccttagactgggagaagggcaagctagaaggggcagatcactcctgcaccatgggagatgcagaagaggctcagatagacgacgaagctcatcccgtcctgctacagccggttgcaaaggagctacccacggacatggagctcagtgctcatgacgacggcgctcctgccggtgtgagagaggttatgcgcgcacccccatccggcagggagcggtccacacccagtctgccctgcatggtgtcagctcaggatgcaccactacccaagggtgcagatttaatcgaggaggccgctagccgcattgtcgatgcggttattgaacaggtgaaggcagcaggggctctgctgacagagggcgaagcttgtcacatgagcctctctagccccgagttaggccctctgactaagggacttgaatcagctttcacagagaaggtcagtaccttcccgccaggagagtctctaccaatgggttctacaccagaggaagcaacaggcagcctggccggatgctttgctgggagagaggagcccgagaagattattctcccagtgcagggaccagaacccgctgcggagatgcccgatgtgaaggctgaagacgaggtcgatttccgggcttcttccatctccgaagaggtggccgtgggctccatcgcagctactctcaagatgaagcaaggcccaatgacgcaggcaatcaatcgtgagaactggtgcactattgaaccgtgtcctgatgctgcttcactgctggcttcaaagcagtcgcccgagtgtgagaactttcttgatgtagggttaggcagggaatgtactagcaagcagggtgtcctgaagagggagtccggctctgactcagatctcttccacagcccgtcagacgacatggatagcattatctttccaaaacccgaagaggagcatctagcatgtgacatcacgggatcctcaagctcgaccgatgataccgcaagcttagatcgccatagctcccatgggtcagacgtgtccctctctcagatcctgaagcccaataggtcacgtgataggcagtctctggacggattctacagccacggtatgggcgcagaaggaagggagtctgagagtgagcccgcagaccccggtgatgtcgaggaggaggaaatggattcgataaccgaggtgccagctaactgctccgtgcttcgaagttctatgcgttccctttctccctttcgtaggcactcttggggtcctgggaagaacgcggcaagcgacgctgagatgaaccaccgttcgttctcattggagggattgacaggtggtgcgggagtgggcaacaagccaagttcttctctcgaagtgagttctgctaacgcagaagagctccgccaccccttcagcggagaggagagggtggattcgctagtctccttatcagaagaggatcttgaatccgaccagcgagagcaccgaatgtttgatcagcagatctgtcaccggtccaagcagcagggatttaactattgcacttccgcaatctcctcccccctaaccaaatccatcagcttaatgacaatatcccatccaggtctggataactcccgacctttccatagcacctttcacaacacttctgccaatttgacagaaagtatcaccgaggagaattataactttctacctcattctccctcaaagaaggattcagaatggaagagcggcactaaagtgtctcgcaccttttcctacatcaagaataaaatgtcgtcaagcaagaagagtaagta

SEQ ID NO: 212872 - DNA, 828 bp, synthetic construct
  misc_feature 1..828: note = Description of Artificial Sequence: Synthetic coding sequence
  source 1..828: mol_type = other DNA
ccatcagacgatatggactcaattatctttccgaagcccgaggaggagcatctggcctgcgacatcacggggtcttcatcttccactgacgacaccgcttccctggaccgccacagtagtcacggcagcgatgtgagcttatcacagattttgaaaccgaacaggagcagagatcgccagtccctagacggattttactctcatgggatgggggctgaggggcgagaatccgagtctgaaccagccgacccaggcgacgtcgaagaggaggaaatggattccatcaccgaagtacctgcaaattgcagcgttttgaggagctccatgcggtcccttagcccctttcgcaggcacagctgggggcctgggaaaaacgccgcttctgacgccgagatgaaccatcgaagctcaatgagggtcttgggggacgtagttagacgacccccaatccatcggcgtagcatgagctggtgccctagcggcgttcaatatagcgctggactatccgctgactttaactacaggtccttttctctcgaaggcctgacaggcggagccggtgttgggaataagccctcgtcaagcttggaggtgagttccgcgaatgccgaagagctgcggcacccctttagtggagaagaacgggtagacagcttggtctcattaagtgaagaggacctagaatccgatcagcgggagcatcggatgttcgaccagcagatttgccatcgttctaaacaacagggatttaattactgcacctcggcaatctctagtccactgaccaagagtatctctctgatgaccatctcccacccaggattgtag

SEQ ID NO: 212873 - DNA, 117 bp, synthetic construct
  misc_feature 1..117: note = Description of Artificial Sequence: Synthetic coding sequence
  source 1..117: mol_type = other DNA
atgaagctaaatccacagcaggcacctctgtatggtgactgcgtagttactgtcctgctcgccgaagaggataaggccgaagatgacgtggtattctacctggtgtttctcgggtag

SEQ ID NO: 212874 - DNA, 540 bp, synthetic construct
  misc_feature 1..540: note = Description of Artificial Sequence: Synthetic coding sequence
  source 1..540: mol_type = other DNA
atgaagctgaacccccagcaagcgcctttatacggggactgcgtggtcacagtactactggctgaagaggacaaggccgaagatgatgtcgtcttttaccttgttttcctaggctctacactgcggcattgcacttccacacggaaggtgtctagcgacaccctcgaaactatagcccctgggcacgactgctgcgagacggtgaaggtccaattatgcgccagtaaagaaggactgccagtcttcgtggtggccgaggaagattttcatttcgtgcaggatgaagcatatgacgctgcacagttcctggcaacgtccgccggtaatcaacaggcactgaacttcactcgttttctggaccaatcgggaccccctagcggcgatgtgaatagcctcgacaaaaaactcgtgctggcattccgccaccttaagttgcccaccgaatggaatgtcctcgggaccgaccagagcttacatggagagaacttgtatgatctgcagacgcatttcaaattcgtcattttcctgctgttcttttag

SEQ ID NO: 212875 - DNA, 414 bp, synthetic construct
  misc_feature 1..414: note = Description of Artificial Sequence: Synthetic coding sequence
  source 1..414: mol_type = other DNA
atgtcagagacccagaatagcacctcacagaaggctatggatgaagataataaagccgctagccagaccatgccaaacacccaagataaaaattatgaggacgagctgactcaagtcgcattagcgttggtggaggacgtgatcaactatgccgtcaagatcgtggaagaagaacgtaatcccctaaaaaatatcaaatggatgacccacggcgagtttactgtggagaaaggcttgaagcagatcgacgaatacttctcagacgcccctatagtcgtctcgtacgtgggcgaccaccaggcactcgtccacagacctgggatggtgagatttagggaaaactggcagaagaaccttacagatgccaaatattctttcatggaatctttccctttcctatttaacagagtatag

SEQ ID NO: 212876 - DNA, 270 bp, synthetic construct
  misc_feature 1..270: note = Description of Artificial Sequence: Synthetic coding sequence
  source 1..270: mol_type = other DNA
atgtctgaaacacagaactctacctcccagaaggccatggatgaggacaataaagctgctagccaaaccatgcccaacactcaggacaaaaactacgaggatgagctgactcaggtcgccttagcactggtggaagatgtgattaactacgccgtgaagatcgtggaggaagagcgtaatcccttaaagaacattaagtggatgacccatggtgaattcacggtagaaaaggggttgaagcagattgacgaatattttagcgtgtcttag

SEQ ID NO: 212877 - DNA, 417 bp, synthetic construct
  misc_feature 1..417: note = Description of Artificial Sequence: Synthetic coding sequence
  source 1..417: mol_type = other DNA
atgtccgaaacgcagaattctactagtcagaaagccatggacgaggacaacaaagcagcatcccagaccatgccaaatacccaagataagaactacgaagatgaactcactcaagtcgcattggccctggttgaggacgttatcaactacgcagtgaagatcgtggaggaagaacggaatccactgaagaatatcaaatggatgacacacggtgagttcacagtggaaaaggggcttaaacagattgacgaatacttttctcccgacgcacccatcgtggtcagctatgtgggtgaccaccaagcactggtccataggcctggtatggtcagatttcgggaaaactggcagaagaatctaaccgatgccaagtactcattcatggaatcttttccctttctgttcaatcgggtgtag

SEQ ID NO: 212878 - DNA, 414 bp, synthetic construct
  misc_feature 1..414: note = Description of Artificial Sequence: Synthetic coding sequence
  source 1..414: mol_type = other DNA
atgtctgaaacacagaatagcacgagccagaaggctatggatgaagataataaggctgcaagccagaccatgccaaatactcaggacaagaattatgaggacgagctgacacaggtggcactggctcttgtggaggacgttatcaattacgcagttaagatcgttgaggaggagagaaatcccctcaaaaacatcaagtggatgactcatggcgagttcacagtcgaaaaaggtcttaagcagattgacgaatacttcagtgacgctcccatcgtggtgagctacgttggtgatcatcaggccctggtgcaccgccctggcatggtcaggtttcgagagaattggcagaagaacctcacggatgctaagtatagtttcatggaaagcttcccctttctgtttaatcgagtttag

SEQ ID NO: 212879 - DNA, 594 bp, synthetic construct
  misc_feature 1..594: note = Description of Artificial Sequence: Synthetic coding sequence
  source 1..594: mol_type = other DNA
atgtccgaaactcaaaactctaccagtcagaaagccatggacgaggataacaaggcagcgtctcagacaatgccaaatacccaagacaaaaattacgaggacgaattaacccaggttgccctggccctagttgaagacgtaattaactacgccgtaaaaatcgtggaggaagaaagaaaccccctgaagaatatcaagtggatgactcatggcgagtttacagtggaaaaggggcttaagcagattgacgagtatttctccaaatgcgtcagcaagaaatgctgggcgcacggagtagaattcgtcgagcgcaaggatctaatacatagtttcctatacatctattacgtccattggagtatttccacagcggatcttcccgtcgccagaatctcagctggaacttacttcaccatgaaagtgtcaaaaactaagccacccgacgccccaattgtggtttcgtatgtgggtgaccatcaggctctcgttcatagaccgggaatggtgcggtttcgggaaaattggcagaagaatctgaccgatgccaagtattcattcatggagtcattcccattcttgtttaacagggtctag

SEQ ID NO: 212880 - DNA, 270 bp, synthetic construct
  misc_feature 1..270: note = Description of Artificial Sequence: Synthetic coding sequence
  source 1..270: mol_type = other DNA
atgagtgagacgcagaatagtactagccaaaaggcgatggacgaagacaacaaagccgctagtcagactatgccaaatacacaggacaagaactacgaagacgagctcacccaggttgcacttgccctggtcgaggatgtcataaattacgcagtcaagatcgtggaggaagaaagaaaccctctgaagaatattaagtggatgacacatggcgagtttacagtcgaaaagggacttaaacagattgatgagtacttcagcgtttcttag

SEQ ID NO: 212881 - DNA, 2088 bp, synthetic construct
  misc_feature 1..2088: note = Description of Artificial Sequence: Synthetic coding sequence
  source 1..2088: mol_type = other DNA
atggccgcagccacaatcgttcatgacaccagcgaggctgtcgaactgtgccctgcgtacgggttgtacctgaaacccatcaccaaaatgactatttccgtggccttgccacagttaaagcagccgggaaaatcaatttcaaactgggaagttatggaacgactcaaagggatggtccagaatcaccagttctctaccctcagaatttctaagtcgacaatggacttcattaggtttgagggcgaggtggagaataagtcactggtcaaatctttcttggcctgcctggatggcaagacgatcaagctgtctggtttcagtgatatcctgaaggtgagagcagcagaatttaagattgatttcccgacacggcacgattgggatagcttttttcgggacgccaaagatatgaacgaaacattgcccggagaaagaccagacacaatccaccttgaagggttaccctgtaagtggtttgctctgaaggagtccggctccgaaaagccaagcgaggatgtgctggtcaaggtatttgagaagttcggagaaatacgaaacgtggacattccaatgctggacccatatcgggaagagatgaccggacgaaacttccatacatttagttttggcggacacctgaacttcgaggcttacgtacaatacagagagtatatggggttcatccaggcaatgtccgctctccgagggatgaaactgatgtacaaaggtgaggacgggaaggccgttgcgtgcaatattaaggttagctttgatagtacgaagcacttgtcagatgcctcaatcaagaaacgccagcttgagcggcaaaagctgcaggagttggaacagcaacgtgaggaacagaagcgtagagaaaaagaggcagaggagcggcaaagggcagaggaaaggaaacagaaggagcttgaggagctggagcgagaaagaaagcgggaggaaaagctgcgcaagcgggaacaaaagcagagggaccgggaactccgcagaaaccagaagaagctggaaaaactccaggctgaagagcaaaaacagctccaggaaaagataaagctggaggaacgcaagctcctgctggctcagaggaacctgcagagcattcgtctcatagccgaactccttagcagggcaaaggctgtgaagctccgtgaacaagagcaaaaagaggaaaagctcaggttacagcagcaggaagaacggagacggctacaggaggcggagctacgacgagttgaagaggaaaaggaacgagccctgggcctgcagcggaaagaacgggaactgagagagagactgctatccatcctgttaagtaagaaaccggacgacagccatactcacgacgaactcggggtggctcatgccgatctgctgcagccagtcctggacattctgcagacagtatcctctgggtgcgtgagcgctaccaccctccatcccctgggcggacagccacctgccggagcacccaaggaaagtccagcacatcccgaggccgatggcgctccaaagagcgtgaacggcagcgtggctgaagaagctccctgtaaggaagtccagtccagctgtcgggtggtgcctgaagatggcagccccgagaagcggtgtccgggtggggtcctgagttgtatcccggataacaatcaacagcccaagggaatccccgcatgcgaacagaacgtgtctcggaaggatactcgatccgaacaggacaaatgtaatcgcgagccttctaaggggagaggaagggcgacgggcgacggcctggccgacaggcataagcgcgagaggtccagagctcgcagggcttcctcccgggaagatgggagacctaggaaagagcggcgaccccacaaaaagcatgcgtataaagacgattcaccaaggagacgctccactagccctgatcacacccgaagcaggcgatctcactcaaaggaccggcatagacgggaaagatctagagagcgcaggggctctgcttcaaggaaacactcgcgtcatcgcagacgtagtgaacgtagccggagccgctcgccgtcccgccaccgctctacttggaaccgatag

SEQ ID NO: 212882 - DNA, 1341 bp, synthetic construct
  misc_feature 1..1341: note = Description of Artificial Sequence: Synthetic coding sequence
  source 1..1341: mol_type = other DNA
atggccgcagctactatcgtccacgataccagtgaggctgtagaactgtgccctgcatacggactatatctaaagccaattactaagatgaccatctcagtggccctgccgcagttgaagcaaccaggcaaaagtatttcaaattgggaggtgatggagcggcttaaggggatggtccagaaccaccagttctcgaccctacggatatctaagtctacaatggatttcatacggtttgagggggaggtggagaacaaatctctggtcaaatcttttctcgcctgcctggatggtaagacaattaagctcagcggcttctccgatatcttaaaggttagagcagccgaatttaagatcgactttccgacaagacacgactgggactctttttttcgggacgctaaagatatgaacgagacacttcccggagagcgtcccgatacaatacacctagaaggccttccgtgtaaatggtttgcacttaaggagagtggatcggagaaaccaagtgaagacgtgctggtcaaggtgtttgaaaagtttggcgaaatcaggaacgtggacattccaatgctggatccttacagagaggaaatgacaggacggaacttccatacgtttagttttgggggtcacctgaatttcgaggcctacgtccagtacagggagtacatgggctttatacaggcaatgagtgccctgcggggtatgaagctaatgtataaaggagaggatggaaaggcagttgcttgcaacatcaaggtatctttcgactctaccaaacacctctctgatgcgagtattaaaaagagacaactggagaggcagaagctgcaggagcttgaacagcaaagagaggagcagaagcggagagagaaggaagcggaggaacgtcagagggcggaagagcgcaagcaaaaggagctggaggagctggagcgagagcgtaaaagagaggagaagctgaggaagcgggagcagaaacagagagacagagagctccgcagaaatcaaaagaagctcgagaaattgcaggccgaggagcagaagcagctgcaggagaagattaagctggaagaaaggaaactgctgctggctcagaggaacctccaatctatcaggctaatcgctgaactgctgtctcgtgcaaaggtgcccggaggcagcctgtgtagcaggcaaccgcgaccagggtgccctcagtgcccccctctgaaatgcggtcggcgtcatggtgcggtgtccccacctgcggctgccgtggcaacaaagcctgctctgatgccacgaatgaccgcaccttcacgcgaaggcgttgcccttgtttgccggagccggtag

SEQ ID NO: 212883 - DNA, 2580 bp, synthetic construct
  misc_feature 1..2580: note = Description of Artificial Sequence: Synthetic coding sequence
  source 1..2580: mol_type = other DNA
atggaaattgaagtgtctgtggccgagtgcaaaagcgtcccaggaatcacatcgactccccatcctatggatcaccccagtgccttctattctccgcctcacaacgggctgcttaccgatcatcacgagtctctcgataacgatgtcgcccgagagattcggtacctagacgaggtactggaggcaaactgctgtgatagcgccgtggacggaacttataacggtacctccagcccggagccaggcgctgttgtgttagttggcggacttagcccaccagtccatgaggccacccagcccgagcccactgaaagaacagcttccagacaggcccctccccacatcgagctttctaactcttcgccagaccccatggctgaggctgaaagaaccaacgggcattcaccttctcagccccgtgatgcactgggggatagcctgcaggtgcccgtgtctcctagttctactacaagtagccgttgttcatcaagggatggggaattcacattgacgacgttgaagaaggaggccaagtttgagctgagggcatttcacgaggataagaagccctctaagctcttcgaagacgatgagcatgagaaggaacaatactgcataagaaaagtgagaccctctgaggaaatgctggaattggaaaaggagcgccgtgaactgattcggtctcaggccgtgaagaagaacccaggcatagcagctaaatggtggaacccaccccaggaaaaaacaatagaggagcaactcgatgaggaacacttggaaagccacaagaaatacaaggagaggaaggagcgcagagcccagcaggaacagttactgctgcagaaacaattgcagcaacaacagcaacaaccaccatcacagctttgcaccgctccagcctcttctcacgaacgagcaagcatgattgacaaagctaaggaagatatcgtaactgaacagatcgactttagcgctgcacgcaaacagtttcagctgatggagaattcacgtcaagctgtggccaaaggtcagagcactcccaggctcttttcaattaaacctttctatcggcctttgggaagtgtgaattcagacaagccactgaccaatcctaggcccccaagcgtgggcggacctcctgaggattctggggcaagtgctgccaaaggacagaaaagccctggagccctcgaaacccccagcgcagccggtagccaaggtaacactgcttctcaggggaaggaagggccatattctgagccctctaaacgagggccactgtccaaactatgggccgaagatggcgagttcacgtcagctcgagctgttctgaccgtggtgaaagacgatgatcacggcattctggaccagtttagccgaagcgtgaacgttagcttgacccaggaagagctagactcagggcttgacgaactcagcgtgcggtcacaggacaccacggtgctagaaactctgtccaatgacttctccatggataacatttccgattccggggcaagcaatgagaccacgaatgccctccaggagaattctttggccgatttttctcttccccagacccctcagaccgacaatccgtccgagggtcggggtgaaggggttagtaagagtttctctgatcacgggttctactccccgagctccaccctgggggactcaccgctggtcgacgatcctctagagtatcaggctggccttttagtgcaaaacgccatacaacaagccatcgctgagcaagtggacaaagccgtaagtaagactagccgtgatggagctgaacaacaaggtcctgaggctactgttgaagaggctgaggcagcggcatttgggagcgagaaaccccagtcaatgttcgagccaccccaggtaagcagccccgtacaggaaaagagagacgtcctgcccaaaatccttcctgccgaggacagagcacttcgggaacgcggtccgcctcagccattgcctgctgttcagccatctggcccaataaatatggaggagacgcgaccagagggttcctacttcagcaaatacagtgaagcagctgaactgaggtctaccgctagcttgctggctacccaggaatctgacgttatggtcggaccctttaagctgcgatcccggaaacagagaactctctcaatgatcgaggaagagatcagggccgctcaggagagagaggaggagctcaaacgacagcgccaggtactccagagtacccagtcaccacggacaaagaacgcaccgtcactgccttcaagaacatgttacaagacagcgccaggtaagatagagaaggtgaagccaccacctagtcccactaccgaggggccatctttacagcctgatctcgcacccgaggaggctgccggaacacagcgacctaaaaacctgatgcagactctcatggaagactatgaaacccacaagagcaaaaggcgggaaaggatggatgattctagtgtgctggaggctacccgcgttaaccgcagaaagtctgccctggctctgagatgggaggctggaatctatgcaaatcaagaagaggaggacaatgaatag

SEQ ID NO: 212884 - DNA, 2847 bp, synthetic construct
  misc_feature 1..2847: note = Description of Artificial Sequence: Synthetic coding sequence
  source 1..2847: mol_type = other DNA
atgaggtggcctcagccaggggcagccgctcggctgcccccagagtcaccgggaccccctgagtcacctggccctccagagcgagaggctgccgcagctcgcaggtggaccggtgctgagcctcaggattgcgcccctgggtcaggtagacccgagaagccacctcagttaagcgaggacgacatatggctgaaatcagagggagacaattacagtgcaactttgttggagcccgctgcatcaagtctgtccccagatcataagaacatggagattgaggtttctgttgccgagtgcaagtccgtgccgggaattacttctaccccacacccaatggatcatccatccgccttttattctccaccccacaatggactgctgacagaccatcacgaatcactggacaatgatgttgcgcgtgagattcgctaccttgacgaggtgctcgaggctaactgttgtgactccgccgttgatggtacttataatgggacttcctccccagaacccggagctgtcgtgctcgtaggcggtttgagccctcctgtgcatgaagcgacccagcctgagccgacagaacgaaccgccagtcgacaagctccgcctcatattgagctgtccaacagcagccctgaccctatggccgaggcagagagaactaacgggcattcgccttcacagcctcgcgatgctctcggagactctctccaggtgcctgtaagccctagcagcaccacctcgtcgagatgttcctcaagagacggcgagttcactctcacaaccctcaaaaaagaggccaagtttgagctgagagcttttcatgaagacaaaaaaccatccaaactgttcgaggatgatgagcacgaaaaggagcaatactgcattagaaaggtcagaccaagcgaggagatgctcgagctggaaaaggagcgacgggagctcatccggtcacaagccgtgaaaaagaatcccggtattgccgctaagtggtggaatcctccgcaagagaagactattgaggaacagttggatgaggaacatctggagtcccataagaaatacaaggaacgtaaggaacgtcgagcccagcaggagcagctcttgctgcagaagcagctccagcagcagcagcagcagcctccatcgcaactctgcacagcccctgccagctctcatgagcgggcttcaatgattgacaaggccaaagaggatatcgtgactgaacaaattgatttctccgccgcaagaaaacagttccagttgatggaaaatagtaggcaagctgtcgctaagggacagtctactccaaggctcttcagtataaaaccattttataggccactagggtctgttaacagcgacaagcccctgaccaatccgaggcctcctagtgtcggcggtcctcctgaggactcaggtgcaagcgccgctaaagggcagaaatcaccgggtgcgctagagacccctagtgctgccggatctcaggggaacaccgcgtcccaaggcaaggaaggcccatactcagaaccaagcaagaggggtccgctgtcaaagctgtgggccgaagacggtgaatttacttctgctcgtgcagtgcttactgtcgttaaggatgacgatcacggcatcctcgaccagttttctcggtcagtgaatgtgtctttaacgcaggaagagcttgactcgggactggacgagctgagcgttcggtcccaggatacaacggtgttagagacattatcaaacgacttctctatggataacatttctgattccggggcatctaacgagaccaccaatgcactgcaggaaaattcactcgctgacttctctcttcctcagaccccacaaaccgataaccccagcgaggggagaggggagggagttagtaagagtttcagcgatcacggcttttacagcccatcgtcaaccctgggcgactctcctctggttgacgatcccttggagtaccaagctggactcctggtccagaacgccattcagcaagccatagctgaacaggtagataaggctgtcagcaagacctcaagggatggggcagagcaacaagggcctgaggccaccgttgaggaggccgaggcagctgctttcggaagtgagaaaccccagtcaatgttcgaaccccctcaggtatcaagtccagtgcaagaaaaaagagacgttctgccgaagatcctacctgctgaggacagggcacttcgcgagcgcggacctccccagcctctgcccgctgttcagcctagcgggcctatcaatatggaggagactcgaccggaaggctcctacttctctaaatacagtgaagcagccgaactcagatcgacagcctcgttgctcgcgacacaggaatccgacgtgatggtcggaccttttaaactgcgcagcaggaaacagaggaccctgagcatgatcgaggaggagattagggcggcacaggaacgagaggaggaactgaaaagacagagacaggtcttacagtctacacagagcccacggacaaagaacgccccaagtctgccatccagaacatgctataagaccgcacctggcaagattgagaaggtgaagccacctccctctcctaccacagagggtccctccttgcagccagacctagccccagaggaagccgctggtacccagcggccaaagaatctaatgcagaccctcatggaagattatgagacccataagtctaaacgcagggagagaatggacgattcctcagtgctagaggccacacgagtaaaccggaggaaatctgctcttgctctgagatgggaagccggaatatatgcgaatcaggaggaggaggataacgagtag

SEQ ID NO: 212885 - DNA, 3273 bp, synthetic construct
  misc_feature 1..3273: note = Description of Artificial Sequence: Synthetic coding sequence
  source 1..3273: mol_type = other DNA
atggccgaggccgagctgcacaaggagagactgcaggctatcgcagagaagaggaaacgtcaaaccgaaatcgaaggaaaaaggcagcaattggacgaacaaatcctcctcctccaacatagcaagagcaaagtgctcagagagaagtggctgcttcagggcatccctgctgggactgccgaggaagaagaagccagacgaaggcagtccgaagaagacgagttcagagtgaaacagcttgaggacaatattcagcgtttggagcaggagatacagacacttgaaagtgaggagtctcagattagcgcaaaggagcagataatcctcgaaaagctgaaagaaacggagaagtcctttaaagatttccagaagggcttctcatctaccgacggtgatgccgtgaactacatcagctcccagctgccggatctgccaatcctgtgtagccgcactgcggagccttcaccaggccaggacgggacctctagagccgctggcgtgggatgggaaaacgtgctccttaaggaaggtgagagcgccagcaacgctacagaaactagtggcccagacatgactataaagaagcctccccagctcagtgaggacgatatctggttaaaaagtgagggcgacaactactcagccaccctgctggagcctgctgcttccagtctctctccagatcacaagaacatggagattgaggtgagcgttgcggaatgtaagtccgtgcctggcatcaccagtaccccccatccaatggaccacccgtccgcgttctactcaccgccacacaatggcctactgacagaccatcacgaatcactggataatgacgtcgcacgcgagataagatatctcgatgaggttttagaagccaattgttgcgacagcgcagtggatggtacttacaacgggacaagtagccccgagcccggtgccgtcgtgttggtcgggggattaagtcccccagtgcacgaagctactcagccagagccgaccgagcgcacggcttcccgacaagccccacctcacatcgagttgagcaatagtagtccagaccctatggctgaggcggaacgcacgaacggccactccccctcccagccgagagacgccctgggcgactctttgcaggtacctgtctcccccagcagcacgacatcatctagatgctcctcccgggatggggaatttacactcactactctcaaaaaggaagcaaagtttgaactaagggctttccacgaggacaagaagccatcaaaactctttgaggatgatgaacacgagaaggagcagtattgcatcagaaaagtcaggccatccgaagaaatgctggagctggagaaggagagacgtgaattaattcgctctcaggccgtcaagaagaatcccggaatcgctgcaaaatggtggaacccacctcaggagaaaacaattgaggaacagctcgatgaggagcacttagagagtcacaagaagtataaggagcgaaaggaaagaagggcccaacaggagcaactccttctacagaagcagcttcagcagcagcagcagcagcccccatctcagttgtgcacagcacccgcatcatcacatgaaagggctagtatgatagacaaggccaaggaagatatcgtgacagaacagattgatttcagcgccgctcgcaaacagttccaactgatggaaaactcaagacaggcggtcgccaaggggcagagcaccccacggctgttcagcatcaagcccttctaccgacctctagggtcagtaaatagcgacaagcccctcaccaaccccagacccccatcagtgggcggaccccctgaggactctggggcttcagcagccaaaggtcagaaaagccctggtgctctggaaacaccatccgctgctgggagtcagggcaacaccgccagccagggaaaagaaggaccttacagtgaacccagtaagagggggccattgtccaaactctgggccgaggatggagaatttacttcagctcgtgccgtgctcaccgtagtcaaagatgacgatcatggaatcctcgatcagttctctagatctgtaaacgtctcactgactcaggaggaacttgatagcggattggatgagctgagtgtcagatcacaggacacaaccgtgctcgagacgttgagtaacgacttcagcatggataatatcagcgactctggcgctagtaacgagacaactaacgccctacaggaaaacagcctggccgatttctctctcccgcagacacctcagacggacaatccctccgagggaaggggcgagggtgttagcaaaagcttctccgaccatggtttttacagcccctcatctacactcggcgatagccccttggtggacgatcccttggagtaccaagctgggctactcgtacagaatgcgattcagcaggcaatagcggagcaagtggacaaagcagtgtccaaaacctcaagagatggagcggagcagcaaggcccagaggctactgtggaagaggctgaggccgctgcgttcggaagcgagaagccccagtctatgtttgagccgccacaggttagttctcccgtgcaggaaaagagggacgtccttccaaagattctgcctgctgaggaccgggcactccgcgagaggggcccacctcaacccctgcctgccgtgcagccatccggaccgattaacatggaagaaacccggccagaaggctcgtactttagtaagtacagcgaagccgcagagctgagatccacagcttctctgctggccacacaggaaagcgatgtgatggtgggtcctttcaagctaaggtccagaaaacagagaaccctatctatgatagaggaagaaatccgggctgcccaagaaagggaagaggaattgaagcgtcaaagacaggtgcttcaatcaacccagagccccaggacaaagaacgccccatccctccccagcagaacctgctacaaaacagctcctggcaaaatcgaaaaggtcaaacccccacccagcccgacaaccgaggggccatccctgcaaccagacctggcccctgaagaggctgcgggaacacaaagaccgaaaaacctgatgcaaactctcatggaggattatgagacgcacaagtccaaaaggcgtgagcgcatggatgattccagcgtgctcgaggctacacgagtgaaccgcaggaagagcgctctggccctaagatgggaggcagggatttatgctaatcaagaggaagaagataatgagtag

SEQ ID NO: 212886 - DNA, 3312 bp, synthetic construct
  misc_feature 1..3312: note = Description of Artificial Sequence: Synthetic coding sequence
  source 1..3312: mol_type = other DNA
atggcggaagccgagctacataaggagcggctccaagccattgccgagaagaggaagaggcagaccgagatcgagggaaaacgtcaacaattggatgagcagattctgcttcttcagcactcaaagtccaaagtacttcgcgagaaatggcttttgcagggcatcccggctgggaccgccgaagaagaagaagcgagacgtagacagagcgaggaggacgagtttagagtgaagcagctggaagacaacattcagcgacttgagcaggagatacagactctcgagtccgaagaatctcagatcagcgccaaggagcagattatactcgagaaactgaaggagactgagaagtccttcaaagactttcagaagggattctctagtaccgacggtgatgccgttaattacatctcctcccagttaccagatctccccattttatgtagccgaaccgccgagccaagccctggacaggatggtacctccagggctgccggagtggggtgggagaacgtgctgctcaaggagggtgagagcgcgtccaacgccactgaaacatctggcccagacatgacaattaagaagccaccccagctgagcgaggacgacatttggttgaagagcgaaggcgataattattcagccacactgttggagcctgccgctagctcactgtcacccgaccacaagaatatggagatagaagtttcggttgcggaatgtaagagcgtgcctgggattacgagcacaccccaccccatggatcaccctagcgccttttactcacctccccacaatgggctcctcaccgaccatcacgaaagtctggacaatgacgttgcacgggagatccgctatctggatgaagtgttagaagccaattgctgtgactctgccgttgacggcacatacaatggcacttccagccccgaacccggagctgtcgtactggttggcggtctgtcccctccagtgcacgaggccacccagcccgaacccaccgagcgcacagcatcgcgccaggccccaccccatatcgaactcagtaactcaagtccggaccccatggcagaggctgagaggacaaatgggcatagccccagtcagcctcgggatgcactgggtgatagtctgcaggtgcccgtttcgccctcttccactacatcatccagatgttcatctcgggatggtgagttcaccttaaccacactgaagaaggaggccaagtttgaactgcgggcttttcacgaggataagaagccctcaaagctcttcgaggacgatgaacacgaaaaggagcaatattgcattagaaaggtgcgtccatctgaagagatgcttgagctggagaaagagcgacgcgaacttattagatctcaggctgtgaaaaagaatcccggaatagccgctaagtggtggaaccccccacaggagaagacaatagaagagcaactggatgaagaacacctggagagccataaaaaatacaaggagcgcaaagagagaagggcacagcaagaacagctcttgttgcagaagcagctgcagcagcagcagcagcaaccgccatctcagctgtgcacagctccagcctcttcgcacgagcgtgcctccatgatcgataaggcaaaggaggatattgtgactgaacagatcgacttcagcgccgctcggaagcagttccagctcatggagaattctcgtcaggcggtggcaaagggccaatccacaccgaggctgtttagtattaaaccgttttaccggcctctcggatctgtgaattccgataagccactgaccaacccaaggcctccaagcgtgggcggaccgccagaggacagcggtgcatctgccgcaaaggggcagaaatctcctggagccctggaaacaccttctgctgctgggtcccagggcaacacagcctcacaggggaaggagggaccatactctgagccctccaagagaggccctctgagtaaactatgggctgaagatggggagtttacctccgctcgggctgttctgactgtggtgaaggatgacgaccacgggatcttagaccagttttccagatctgtgaatgtgtcactgacccaggaggagctggacagtggcctggatgaattgagcgtgagaagccaggatacaactgtgctggagaccctctcaaacgacttcagcatggataacatcagcgactcaggtgctagtaacgagacgacaaatgccttgcaagagaactctctcgccgacttcagcctgcctcagacgccacagaccgacaacccttccgaaggcaggggtgagggggtttccaagtcatttagcgatcacggcttctactctccgtcttccacgctgggggatagtcccttagtggacgatcccttggagtaccaggcagggcttctggtccaaaacgcaatccagcaggcaatagctgagcaagtcgacaaagccgtgagcaagactagccgggacggagccgagcagcaagggccagaagccacagtggaagaagcagaggcagctgccttcggcagtgagaagccacaaagtatgtttgaaccaccccaggtgagttcccccgtgcaggaaaagagggatgtcctccctaaaattttgcctgcagaagacagggccctgcgggaacgaggtccaccacaacccttacctgcggtgcagccctctggcccaattaacatggaggagacaaggcctgagggcagttatttcagcaaatattcggaggcagccgagctgcggtccaccgcttcattactcgccacccaggaatccgacgtgatggtgggaccattcaaactgcgtagcagaaagcaacggacattgagtatgattgaggaggaaatcagggctgcccaggaaagggaagaagaactcaaacgccagcgccaggtgctgcagagtacacagtctcctagaacaaaaaatgctccaagtttgccgagccgaacatgttataaaacggccccaggaaagatcgagaaggtgaagccacctcctagcccaactacggaagggccatccctccagcccgatctagcccctgaggaagccgctgggacacaaagaccaaagaacctcatgcagacgctcatggaggattacgagacccataaaagcaaacggcgagagcggatggatgacagctcctatacctccaaactcctgagctgtaaggtgacatccgaagttttggaggctacccgcgtgaaccgacgtaagtcagcgctcgctctccgctgggaggcagggatttacgccaatcaggaggaggaggacaatgagtag

SEQ ID NO: 212887 - DNA, 2886 bp, synthetic construct
  misc_feature 1..2886: note = Description of Artificial Sequence: Synthetic coding sequence
  source 1..2886: mol_type = other DNA
atgagatggccccaacccggagcggcagccaggcttcctcccgagagccccggacccccagaatctccaggccctccagaaagggaggccgctgctgccaggcggtggacgggggctgagccacaggactgcgccccaggtagcggccgaccggaaaagcccccacagctcagtgaagatgacatttggctgaagagcgagggcgataactacagtgctaccttactcgagcccgcagcctctagcctgtcaccagaccacaaaaatatggagatcgaggtatccgtggctgagtgcaaaagtgtgcccggaatcacatcaactccccaccccatggaccacccatccgccttttacagtccgcctcacaatggtctgctgactgaccaccatgaaagcttggacaatgatgtagcacgagagatccggtatctggatgaagtactggaggccaattgttgcgacagcgccgttgacggtacttataacggaacaagctctcccgagcccggtgcagtggtgcttgttgggggactaagcccccctgtgcacgaggccacccagcccgaacccactgaaaggacggcttcacgacaagcacctccccatatcgagctgagcaacagcagccctgatccaatggccgaggcagagcggaccaacgggcacagtccctcccaaccccgagacgccctgggagactccctgcaagtgccagtgtccccatcaagcacaacctctagcagatgtagctcacgagacggcgagtttacactaacaaccctgaaaaaagaggcaaagtttgagctccgggctttccacgaggacaagaagccctccaagcttttcgaagatgacgagcacgaaaaggaacaatactgtattaggaaagtaagaccgtctgaggaaatgctcgaactcgagaaagaaaggcgtgagctcattagaagccaggcggtcaagaagaatcctgggatcgccgctaaatggtggaaccctcctcaggaaaaaacaatcgaagagcagctggatgaagaacacctggagtcccataagaagtataaggaacggaaagagcgcagggcgcaacaggagcaacttcttctacagaaacaactccagcagcagcagcagcagccaccctcccagctgtgtactgctcctgccagctcacacgagcgcgctagcatgatagacaaggccaaggaggacattgtcacggagcagatcgatttcagcgccgcaagaaagcagtttcagctgatggaaaattctcgacaggccgtcgctaagggccagagtaccccacgcctgttcagtatcaagccattttaccgtcctttagggagcgtgaattctgacaagccactcactaacccacggcctccaagcgtgggcggaccaccagaagactcgggcgcatctgccgctaagggccagaaatcacccggagctctggaaactccctcagcagccggttcccaaggcaatacggcgagccagggtaaagaaggcccttacagcgaaccgagtaagcggggacccctttcaaaactgtgggccgaggatggcgaattcacttctgctcgcgctgtgctgaccgtcgtaaaggatgatgaccacggaatccttgaccagttctcgagaagcgtcaacgtcagtctcacacaggaagaattggactccggactggatgagcttagcgtgcgtagtcaagatactactgtgctggaaacgctcagtaatgattttagtatggacaatatcagtgacagtggggctagcaacgaaaccacgaatgccctacaggaaaattctctcgcagatttttcactgcctcagaccccccaaaccgataaccctagcgaaggccgtggagagggcgtgagtaagagcttttcggatcatggcttttattctcctagttctaccctgggcgattctccactcgtggatgaccctctggagtatcaggcgggtcttctggttcagaacgccatccagcaggccattgctgagcaagttgataaagccgtatccaagacatcccgggatggcgctgagcagcaaggaccggaagccaccgtggaggaagcggaggcagctgccttcgggagtgagaagccccagtcaatgttcgaaccacctcaagtgagctcccctgtgcaggagaagcgcgacgtccttcctaagatcctcccagccgaggatcgcgctctgagagagcgcggaccgcctcagcccctcccagccgtgcagcctagcgggccaatcaacatggaggaaactagacccgagggctcctacttctcaaagtactctgaggccgctgaactgaggagcactgcttcactgctggccactcaggaatctgatgtgatggtgggacccttcaagctgcggtcacgcaaacagaggacccttagtatgattgaagaggagatccgtgccgctcaggaacgggaggaggaactgaaacggcagaggcaagttctccaaagtactcagtcccctcggaccaaaaatgctccttccctgccatccagaacttgttataaaacagcaccgggaaagatcgaaaaagtcaaacccccaccttctccaacgaccgaaggcccatctctgcagcctgacctggcgcctgaggaagccgctggtacgcagaggcctaaaaacctgatgcagacactgatggaagactacgagactcataaaagcaaacggagggaacgtatggacgactcatcatacaccagcaaactgctaagttgcaaggttactagtgaggttctggaagccacaagggttaatcggcgaaagagcgctctggcgttgcgatgggaggccggtatttatgctaaccaggaggaggaggacaacgagtag

SEQ ID NO: 212888 - DNA, 2565 bp, synthetic construct
  misc_feature 1..2565: note = Description of Artificial Sequence: Synthetic coding sequence
  source 1..2565: mol_type = other DNA
atgatggcctatagtgatacaaccatgatgtctgacgatatcgactggctgcggagtcaccggggagtatgtaaagtggatttgtataaccctgagggccaacaggaccaggaccggaaggtgatatgttttgtggatgtaagtacgttgaacgtggaggacaaagattataaagatgcagcatcctcgtcctccgagggcaatttaaatttgggctctctcgaggagaaggaaattatcgtcatcaaggacacagagaaaaaggaccagtccaaaaccgagggatctgtctgcctcttcaagcaggctccgtctgatccagtgtcagttctcaactggctgctctctgatcttcaaaagtacgcactgggatttcagcacgccctgtccccttccaccagtacatgtaagcacaaggtgggagataccgaaggggaataccacagggcgtctagcgagaactgttactccgtttatgcggaccaagtgaatatcgactatctgatgaatagaccgcagaacctccgactcgagatgacagccgctaagaacaccaacaataaccagtctcctagcgctccccctgccaagcccccttccacccagcgcgctgttattagtcctgacggggagtgttcaattgacgacctgtctttttacgttaatcggttgtcctcactggtcatccaaatggcacataaagaaatcaaggagaagttagaggggaagtccaagtgcctccatcactcgatttgtccatctccaggcaataaagagagaatttctccccgaaccccagcttctaagatcgcctctgagatggcttacgaagccgtggaactgaccgcagccgagatgagggggaccggcgaggaaagccgagaagggggacagaagtcctttctttattccgaactgtctaataaatcgaaatctggcgacaaacagatgtcccagcgagagtctaaagagtttgcagattctatctctaagggtttgatggtctatgctaaccaggtggccagtgacatgatggtttccctaatgaagacactaaaggtgcatagctcaggaaaacccattccagccagcgtggtgctcaagcgcgtgctcctgagacataccaaggagatcgtgagtgatctcatagatagctgcatgaagaatctccacaacataacaggcgttctgatgaccgacagcgacttcgtgagtgctgtcaaacgaaacctcttcaatcagtggaagcagaacgcaaccgacattatggaggctatgctgaagagactggtcagcgctcttatcggagaggagaaggaaacaaagtcccaatctctatcatacgctagcctaaaggcaggctcgcatgatccgaaatgtcgaaaccagagtcttgagttctcgacgatgaaagccgagatgaaggagagggataaaggtaagatgaagagcgatccatgtaagagtttgaccagcgctgaaaaggtaggtgaacatatcctgaaggagggccttaccatttggaaccaaaagcaagggaactcctgcaaagttgccactaaggcctgctcaaacaaagacgagaaaggcgagaaaatcaacgctagcaccgactcgctggcgaaggacctgatcgtttccgccctgaagttgatacagtaccacttaactcaacaaaccaaagggaaagatacttgcgaggaggattgccccggttctacaatgggttacatggcacaatcaacccaatacgagaagtgtgggggaggccagtccgccaaagccttaagtgttaagcagttagaatctcacagagcccctggacccagcacatgtcagaaggagaaccagcaccttgattctcagaagatggacatgagcaatattgtgctcatgctgattcaaaaattgctcaatgagaaccctttcaagtgtgaggatccatgtgaaggcgaaaataaatgcagcgagccccgtgcttcaaaagctgcatcaatgtccaacagatccgataaagctgaagagcaatgccaagaacaccaggaactggattgcacgtcaggaatgaagcaagcaaatggtcagttcatcgacaagctggtagagtcagtgatgaaactgtgcctgattatggccaaatactctaacgatggggctgccctggccgaactggaagagcaggctgcatctgcaaacaagcctaactttaggggaacccggtgcattcactccggagctatgccccagaactaccaggacagtctcggccacgaggtgattgtgaacaaccagtgctccacaaactccctccagaagcagttgcaggcggtgctccaatggattgccgctagccagttcaacgtgccaatgttgtattttatgggcgacaaggacggccagctggagaaactcccccaggtatccgcaaaagccgcagaaaagggctattctgtggggggtctacttcaggaagtgatgaagttcgccaaggaacggcagccggacgaggccgtgggaaaagtggccaggaaacagctgctagactggttgctggcgaatttgtag

SEQ ID NO: 212889 - DNA, 2538 bp, synthetic construct
  misc_feature 1..2538: note = Description of Artificial Sequence: Synthetic coding sequence
  source 1..2538: mol_type = other DNA
atgtccgacgatattgactggctaagatcccatcggggagtgtgcaaggtggacctgtacaaccccgagggccagcaggatcaggatcggaaagtcatctgtttcgtggacgtgtcaactctgaacgtggaagacaaggattataaagacgcagcttctagctcgagtgagggaaacctgaatttgggatccctggaagagaaagaaatcatcgtcatcaaagatactgaaaagaaggatcagagtaagactgaaggtagtgtgtgcttatttaaacaggcgccttcagaccctgtgagtgttctaaattggctcctttccgatctgcagaagtacgctctgggattccagcatgcactatctccttccacgtccacatgtaaacacaaagtaggcgacaccgagggagagtatcatcgtgccagcagcgaaaactgttattcggtgtacgcggaccaggtgaatatcgattaccttatgaatcgtccacagaatctaaggcttgagatgaccgccgctaagaataccaacaacaaccagagcccaagtgcccctccagcaaagcccccaagcactcagcgagccgtgatctcaccagatggagagtgctctattgacgatttgtcattctacgtcaaccgcctctcttcactcgtgatacagatggcccataaggagatcaaagagaaactggagggcaagtccaagtgtctgcaccacagcatctgtcccagcccaggaaataaagaaaggatctcgccccgaactccagcgtccaaaattgcatctgagatggcatatgaagcggttgagcttaccgccgcagaaatgcgaggaactggtgaagagtctcgagagggtggccagaaaagtttcctgtatagtgagctgagtaataagtctaagtctggtgataagcagatgagccagcgggagagcaaagaatttgccgatagcatctctaaggggcttatggtgtacgctaatcaagtggcctccgatatgatggtttcactgatgaagactttaaaggtgcacagcagcggcaagcctatccccgcatctgtggtgctgaagcgagtccttttgagacacacgaaggagattgtgagcgacctgatcgacagctgtatgaaaaacctgcacaacattactggggttctaatgaccgactccgatttcgtgtctgccgtcaaaaggaacctctttaaccagtggaagcaaaacgccaccgacattatggaggccatgctgaagcgactggtgtcagcgctgataggagaggagaaggaaactaagagtcagtcgttatcctacgcgtccctgaaggccggatcccacgacccgaaatgccggaatcagagcctggaattctctacaatgaaggccgagatgaaagagcgcgacaaaggcaaaatgaagtcagatccatgcaaaagtttgaccagcgctgagaaagtgggcgaacacatcctcaaggaaggtttgactatatggaaccagaagcagggtaactcctgtaaagtcgcaacaaaagcttgctctaacaaggacgaaaaaggggagaagatcaacgcctctacggactcactggccaaagacctcattgtttcagctctcaagctcattcaatatcatctgacacagcagacaaagggaaaggacacttgcgaagaggattgcccagggtctactatggggtatatggcccagagcacccagtatgagaaatgcggaggcggtcaatccgcaaaagctctttccgtaaagcagctggagagccacagagcccctgggccttcaacttgccagaaggaaaaccagcatcttgactctcaaaagatggacatgtccaacatcgtactgatgctaattcagaaactgttaaacgaaaatccattcaaatgcgaggatccatgtgaaggcgagaataaatgctccgagccgcgtgcgtctaaagccgcttcaatgtcaaatagaagcgacaaggctgaggagcagtgtcaggagcaccaggagctggattgtaccagtggaatgaaacaggctaacgggcaatttattgacaagctggtcgaatcagtgatgaagctgtgcctgattatggccaagtactcgaacgatggggctgccctagcagagctggaggaacaagccgcttccgcaaacaagcccaacttccgcggtacaagatgcatccatagcggcgcaatgcctcaaaactatcaggattctttgggccatgaggtgatcgtgaacaatcagtgtagtacaaacagccttcagaaacaactccaggctgtattgcagtggatcgccgctagccagtttaatgttccaatgctctactttatgggtgataaagacggccaactcgaaaagttgcctcaggtcagcgcaaaagcagctgaaaaggggtacagcgtgggaggcttattgcaggaagtaatgaagtttgctaaagagaggcaacctgatgaagcagtagggaaggtcgccagaaaacaactgctcgactggctgcttgccaacctgtag

SEQ ID NO: 212890 - DNA, 1416 bp, synthetic construct
  misc_feature 1..1416: note = Description of Artificial Sequence: Synthetic coding sequence
  source 1..1416: mol_type = other DNA
atgtcagatgacatcgactggttacgaagccatcgaggtgtatgcaaagtcgacctgtacaatcctgaaggccagcaggaccaggaccgcaaggtgatatgctttgtcgatgtttctacacttaatgtggaggacaaggattataaggatgccgcttcttcaagttccgaaggcaatctgaacctgggctcgctagaggagaaagagataatagttatcaaggatactgaaaagaaggatcagtctaagactgaaggttctgtttgcctcttcaaacaggctccaagcgatcccgtttctgtgttgaactggctgctctcagatcttcagaaatatgccttagggttccagcatgccctgtccccttccacaagcacgtgtaaacataaggtcggcgataccgagggggagtaccacagggcctctagtgaaaattgttattcagtctatgctgaccaggtgaacatcgattatcttatgaatcggcctcagaacctgcggctagagatgactgctgcgaagaacacaaataataaccagaatacctgtgaggaagactgccctggttcaacgatgggttacatggcccagtcaacccaatacgaaaaatgcggtggtggacagtcagccaaggccttgtctgtgaagcagctcgagagtcacagagcaccaggtccttcaacctgccagaaggagaaccagcacctagactctcagaagatggacatgtcgaatatcgtgctcatgctaatccagaaactgctgaatgagaatcctttcaaatgcgaggacccctgtgaaggtgagaataaatgtagcgagccgagggcctcaaaagcagctagtatgtctaacaggagcgataaggccgaagagcaatgccaggaacaccaggagctcgactgcaccagcggcatgaaacaggctaacgggcagttcatcgataaactcgtcgaatctgtgatgaaactttgcctcatcatggcaaaatattcaaacgatggagccgctctcgctgaactagaggagcaggctgcttccgcgaacaagcctaattttagaggtactagatgcattcacagcggtgctatgccccagaactatcaggacagcctgggacatgaagtcattgtgaataatcaatgtagcacaaattctctgcagaagcagctgcaagcagtcctgcagtggattgccgcatcacagtttaacgttccaatgttatactttatgggggataaggatggccaactagagaagctgcctcaagtgagtgccaaagcagctgaaaagggctattccgtgggagggctcctacaggaagtcatgaagtttgctaaggaacggcaacctgacgaggctgtcggcaaggtggccaggaagcagctcttggattggctgctggccaacttatag

SEQ ID NO: 212891 - DNA, 2538 bp, synthetic construct
  misc_feature 1..2538: note = Description of Artificial Sequence: Synthetic coding sequence
  source 1..2538: mol_type = other DNA
atgtccgatgatatcgactggctaagatcccatcggggagtgtgcaaagtcgacctttataaccctgagggccagcaggatcaagatcggaaggttatatgcttcgtagacgtaagcactctcaatgtcgaggataaggactacaaggacgccgcatctagcagttctgagggaaacctcaatcttggctccctagaagaaaaagagattattgtcattaaggatactgagaaaaaagatcaatcaaaaaccgaaggctccgtctgtctgtttaaacaggcaccgagtgaccctgtgagtgtcctgaactggctgctgtccgacctacaaaaatatgccctgggattccagcatgccctttcaccctccacatccacttgcaaacacaaagttggggacactgaaggggaataccatcgggctagctccgagaactgctactcagtctacgccgaccaggtcaacattgattacctaatgaaccgcccacagaaccttaggcttgaaatgacggcggctaagaacactaacaacaatcaatctccttccgccccacccgcaaaaccacccagcacccagcgcgcagtgattagtccagacggagagtgctctatcgacgacctctcgttttacgtgaacagactctcttcactggtgatacagatggcccacaaagagatcaaggagaagttagaaggcaagtcaaaatgtctccatcactctatatgccctagtccagggaataaagagaggatatctcccagaacgcccgctagtaaaattgctagcgaaatggcctatgaagcagtggaactgaccgcagcagagatgcggggaaccggcgaggaaagccgggagggtgggcagaagagcttcttatattctgagctgtccaacaagagcaaatccggagacaaacaaatgagccagagggagagtaaagagttcgccgactccatatcgaagggactgatggtgtatgccaatcaagtggcatcggatatgatggtgagtctgatgaagaccctgaaggttcacagctctggaaagccaatccctgcctcagtcgttctgaagcgagtactgttaaggcataccaaggagattgtgtctgacctgatcgattcctgtatgaagaacttgcacaatatcacaggcgtcctgatgaccgatagtgatttcgtgagtgccgtgaaacgcaacctgtttaatcagtggaaacagaatgcaacagatattatggaggcgatgctcaaacgactggtgtccgctctaattggggaagaaaaagaaaccaaatcacaatccttgtcttacgcctctttgaaagccggaagccatgaccctaagtgcaggaatcaaagtctggaattctctacgatgaaggccgagatgaaagaaagggataagggcaagatgaaatctgacccctgcaagagtctgacaagtgcagaaaaggtaggtgagcacatactaaaagaggggctcactatctggaaccaaaaacaaggcaacagctgtaaggtcgcaacaaaagcatgctccaacaaagacgagaagggggagaaaattaatgctagcaccgatagtctggcgaaggatctgattgtgagcgctcttaagctgatccaatatcacctgactcagcaaactaagggcaaagatacttgcgaagaagactgtccaggctctacaatggggtatatggctcaaagcacccagtatgaaaagtgcggaggcggacagagcgctaaagcactgtccgtgaaacaactggagtcacacagagcccctggcccatctacatgtcagaaggagaaccagcacctcgacagtcagaagatggacatgagcaatatcgtgctgatgcttatacagaagttgctgaacgagaacccattcaaatgtgaggacccatgtgaaggtgaaaacaaatgcagtgagcctcgggcatctaaggccgcaagcatgtcaaaccgctccgacaaggcagaagagcagtgtcaggagcaccaggaactcgattgcacgtccgggatgaaacaggctaatgggcaatttattgacaaactggttgagagcgtcatgaagctgtgtctaattatggccaaatatagtaacgatggagcagccttagctgaactggaggaacaggcagctagtgccaataagccaaactttaggggcacaagatgcatccactccggagccatgccacagaactaccaggattcactcggacacgaggtgatcgtgaacaatcaatgttctaccaacagcctgcagaagcagctacaggcggtgctgcagtggatcgcagcctcgcagttcaatgttcccatgctttactttatgggggataaggacgggcagctggaaaagctacctcaggtcagtgcaaaggccgcagagaagggttactccgtgggaggattgctgcaagaggtcatgaagttcgctaaggaaaggcaacctgatgaggctgtggggaaggtggcacgcaagcaactcctggattggctgctggcaaatctctag

SEQ ID NO: 212892 - DNA, 765 bp, synthetic construct
  misc_feature 1..765: note = Description of Artificial Sequence: Synthetic coding sequence
  source 1..765: mol_type = other DNA
atgtcagatgacattgattggttgcgatcccaccgtggcgtgtgcaaggtagacctttataatcccgagggccaacaggatcaggacaggaaggtgatttgctttgtggacgtgagcaccctcaacgtggaggacaaggactacaaggatgccgcttcgagctccagcgaagggaatcttaacttgggaagtcttgaagaaaaggagatcatagttataaaagatacagaaaagaaggaccagagtaagactgaagggagtgtgtgcctgttcaaacaggccccaagcgacccggtgtccgttctgaattggcttttatctgacttgcagaaatacgctttgggatttcagcacgccctctcacccagtacaagtacttgcaagcacaaagtcggggacacagagggagagtatcaccgcgcaagcagtgaaaactgctacagtgtctacgccgatcaggtcaacattgattaccttatgaatcgcccacagaatctacgcctggagatgactgccgcaaaaaatacaaacaacaatcaatcgccttctgccccacccgctaagcctcccagtactcagagggctgtaatctcacctgatggtgagtgtagtatcgacgatctaagcttctatgtcaacagactttccagcctcgttattcagatggcccacaaggaaatcaaggagaaactggaaggtaaatccaagtgcctccaccactctatctgcccctcccctggtaataaggagcgtatctcgccctag

SEQ ID NO: 212893 - DNA, 642 bp, synthetic construct
  misc_feature 1..642: note = Description of Artificial Sequence: Synthetic coding sequence
  source 1..642: mol_type = other DNA
atgtccgacgacatcgactggttgagatcccatagaggagtgtgtaaagtggacctctataatccggagggacaacaagatcaggaccgtaaggttatctgctttgtggatgtctcgaccctcaacgttgaagataaggattacaaagatgccgcttcgagcagttctgaaggaaacctgaacttaggatcactcgaagagaaagagatcattgtgatcaaagatacagaaaagaaggaccagagtaaaaccgagggttctgtctgtttatttaagcaagcaccaagcgacccagtgtcagttttaaattggctgctctccgaccttcagaaatacgcattaggctttcagcacgccctatcaccgagcacatcaacctgtaaacacaaagtgggcgatacggaaggcgagtaccatagggcatcatctgagaattgctatagcgtctatgccgaccaggtgaacatagattatttaatgaacagacctcagaacctgcgcctggagatgacagcggcaaagaacacaaacaataaccagaatacctgcgaggaagactgccccggatctacgatgggatacatggcacagagtacccaatatgagaagtgtggcggtggacagagtgccaaggctctttag

SEQ ID NO: 212894 - DNA, 552 bp, synthetic construct
  misc_feature 1..552: note = Description of Artificial Sequence: Synthetic coding sequence
  source 1..552: mol_type = other DNA
atggacaactgcctggcagctgctgctttaaacggcgttgataggcgttctctgcagagatctgctcggctggccctggaggtcctggagcgcgctaagaggagagctgtggactggcatgcgctcgagaggcccaaggggtgcatgggcgtgctggccagagaggcgcctcacctcgaaaagcagccagccgcaggcccacaaagagtgctgcccggagaaaagtactatagttctgtgcccgaggaaggaggagcaactcacgtgtacagatatcaccggggtgagtccaagctgcacatgtgtctggacatcggcaacgggcagcggaaagacaggaagaagacctcactcggcccaggcggatcttatcaaattagcgagcatgcgccagaggctagtcaaccagccgagaacatctctaaggacttgtatattgaggtgtaccccggaacttattccgtaacagtaggtagcaacgatttgacaaaaaaaactcacgtggtggccgtggactccggccagtcagtggacctcgtgtttcccgtgtag

SEQ ID NO: 212895 - DNA, 552 bp, synthetic construct
  misc_feature 1..552: note = Description of Artificial Sequence: Synthetic coding sequence
  source 1..552: mol_type = other DNA
atggacaactgtttggccgctgcagccctgaacggtgtggatcggaggagccttcagagatccgctagactggcccttgaggtgttagagcgcgcaaagagaagagctgtcgattggcacgcacttgagcggccaaagggctgcatgggcgtgttagcgagggaagcgccacatctggaaaaacagccagccgcaggacctcaacgagtgctccctggagagcgtgaggagcgaccacccacacttagtgcatcttttcgtacaatggccgagtttatggactatacatcctcacagtgcggcaagtattatagtagtgtccccgaggaaggtggcgctactcacgtgtatcgatatcaccggggagagtctaaattgcatatgtgcctggatattggaaatgggcaggccgaaaacataagtaaggatctgtatatcgaagtttacccaggaacatacagcgtgactgtaggctcgaacgacctgaccaaaaagacacacgttgtcgctgtcgattcaggacagagtgtagatctcgttttccctgtgtag

SEQ ID NO: 212896 - DNA, 633 bp, synthetic construct
  misc_feature 1..633: note = Description of Artificial Sequence: Synthetic coding sequence
  source 1..633: mol_type = other DNA
atggacaattgtcttgcagctgcagccttaaatggtgtggaccgtcggtcactgcagaggtcagccaggctggccttagaggttcttgaacgggcaaaaaggcgtgctgtggactggcacgccctggagagaccaaagggatgcatgggtgtgctggctagggaggcaccccaccttgagaagcaaccggcagctggaccccagcgcgtgctgccaggtgaacgcgaggagagacccccaaccctgtcagcctctttccgcaccatggccgagttcatggattacacctcgtcacagtgcggaaagtactattcgtctgtcccagaagaagggggtgcaacgcatgtttaccgctatcaccgtggagagagcaaactccatatgtgcttggacattggcaacgggcagcggaaagacagaaagaaaacatcactgggacctggcggatcgtaccagatttcggaacatgcgccagaagctagccagccagctgagaatataagtaaggacctttacatcgaagtttatcctggaacttattctgttactgttggttcaaatgatctcacgaagaaaacgcacgtggttgccgttgactccggacaatcagttgacttggtatttccagtttag

SEQ ID NO: 212897 - DNA, 552 bp, synthetic construct
  misc_feature 1..552: note = Description of Artificial Sequence: Synthetic coding sequence
  source 1..552: mol_type = other DNA
atggacaattgtctcgccgcagccgcactgaatggggtggatagacgcagcctacagcggtcggccaggctggcgcttgaggtcctggagcgtgcaaagcgcagagcggtggattggcatgcactggagcgcccaaagggatgtatgggcgtgctagccagagaggccccacatttggagaaacaacctgccgcaggtccccagcgtgtattgcccggagaaaagtactatagctccgtgccagaggagggcggagccacacacgtctacaggtaccatcgcggagaatcaaagcttcacatgtgcctggatatcggcaacggtcagcgcaaggatagaaaaaaaacaagtcttgggcctggcggtagctatcagatcagtgaacatgccccagaggcctcccaaccagccgaaaacatcagcaaggacctgtacatagaagtgtatccaggcacctattccgtcaccgtgggcagcaacgacctgactaaaaagacgcatgtggtcgccgtcgacagtgggcaatctgtcgatctggtgttcccagtgtag

SEQ ID NO: 212898 - DNA, 633 bp, synthetic construct
  misc_feature 1..633: note = Description of Artificial Sequence: Synthetic coding sequence
  source 1..633: mol_type = other DNA
atggataactgtctggcggctgctgccctcaacggggtggatagacgctcactgcagaggtccgcaaggctggccttagaagtgctggagagggcaaagagaagggctgttgactggcatgcgctggagcggcctaagggatgcatgggagtcctggctcgagaagcgcctcacctggagaaacaaccggctgctggccctcagagggtcctgcctggtgagagggaggaacgccctccaacattaagtgcctcctttcgtaccatggcagagttcatggactatacatcctcacagtgcgggaagtactacagctctgtgcccgaggagggcggagcaacccatgtctatcggtaccataggggggaaagcaaattgcatatgtgcctagatattggtaatggccagcgcaaagacagaaagaagaccagcctgggcccaggaggatcctaccaaataagcgagcacgcacccgaagcctcccaacctgccgagaatatatccaaggacctttatatcgaagtctatcccggtacgtatagcgtcacagtggggagtaacgacttgaccaaaaaaacacacgtggtcgcagtggattccggccagagcgtggacctggtgtttcccgtatag

SEQ ID NO: 212899 - DNA, 1479 bp, synthetic construct
  misc_feature 1..1479: note = Description of Artificial Sequence: Synthetic coding sequence
  source 1..1479: mol_type = other DNA
atgggtttccaaagaaggttcttccatcaggatcagtccccagtcggcggactcacagccgaagatatcgagaaggccaggcaagcaaaagcgagaccagagaacaagcaacataaacaaaccctgtccgagcatgcccgagagagaaaagtgccagtgactaggatcggcaggctcgccaattttggcggactagcggtcggacttggattcggagctttggcggaagtggcaaagaaatcattacgaagtgaagatcccagcggcaagaaggccgtgctcggatccagtcctttccttagtgaagccaatgctgaacgcattgttagaactttatgcaaggttaggggagccgctctgaagctgggtcagatgctcagcatccaggatgatgcctttataaacccacacctcgccaaaatctttgagagagtgcggcagtccgccgacttcatgccactgaagcagatgatgaaaacgctcaataatgatctcgggccaaattggagggacaaactcgagtattttgaggaacgacctttcgcagccgcttcaatcggacaggttcacttggctcggatgaaaggcggaagagaagttgctatgaagatccagtatcccggagtcgcccagagtattaattcagatgtgaacaacctgatggcggtgcttaacatgtctaatatgctgcccgagggactgttccctgaacacttaatcgatgtgctgagacgcgaattggccctcgagtgtgactatcaaagagaagccgcatgtgctcgcaagtttagggacctgctgaagggccaccccttcttttatgtccccgagattgttgacgagttgtgttctccccacgttttgacaactgagctcgtaagtgggtttcctctggaccaggccgaggggctgagtcaagaaatccgcaatgaaatctgctataatatcttggtgctgtgcttgcgggagctgtttgaatttcatttcatgcagaccgacccaaattggagtaacttcttttatgatccacagcagcacaaagttgccctgctcgattttggtgctactcgggagtatgataggtcgtttacggatctgtacattcaaatcatcagagccgcagccgatagagaccgggaaacagtccgggctaagtccatcgagatgaaatttcttacagggtatgaagtaaaagttatggaggacgcccacctggatgcaatccttatcctgggcgaagcctttgcctcggacgaacctttcgattttgggactcagtccaccaccgaaaaaattcataacttgatacccgtcatgctcaggcataggctagtccccccacccgaggagacatattccctgcatcggaagatgggcggtagtttcttgatctgcagcaaactgaaggctaggttcccctgcaaagccatgttcgaggaggcgtattcaaactactgcaagcgacaggcccagcaatag

SEQ ID NO: 212900 - DNA, 1719 bp, synthetic construct
  misc_feature 1..1719: note = Description of Artificial Sequence: Synthetic coding sequence
  source 1..1719: mol_type = other DNA
atggctgccatactcggggataccatcatggtagccaaaggtctggttaagctgacacaggccgcagtggaaacccacctgcagcacctcggcatcggcggtgagctgatcatgggcccagcccctgcatatgtggcgagtggccctttcagggaagccggttttcctggtcaggcttcatcacctctgggccgagccaacgggaggctgttcgctaacccacgcgactcctttagtgccatgggctttcagcggcgtttctttcaccaagaccaaagccctgtcggagggttgactgctgaggacatcgagaaggcaaggcaggctaaagctaggcccgagaacaagcagcataagcagaccttgagcgagcatgccagagagagaaaggtccccgtcactaggattggcaggctcgcaaatttcggcggtctggctgtgggtcttggattcggcgctttggcagaagtagctaaaaaatcgctcaggtctgaggacccttctggcaagaaggctgtgctgggcagttcaccttttctctccgaggccaacgcagaaaggatagtgagaacactctgcaaagtacggggtgcagccctgaagctcgggcagatgctgagcattcaggacgatgctttcatcaacccacatcttgccaaaatttttgaacgggtgcggcaaagcgctgattttatgcccctgaaacaaatgatgaagactctgaataatgatctggggccaaattggcgtgacaagctagaatacttcgaggagcgtccttttgccgctgcttctatagggcaggttcacctggctagaatgaagggagggcgtgaagtcgccatgaagatccagtatcctggcgttgcccaaagtataaacagcgatgtgaataacctgatggctgtacttaacatgtccaacatgctaccagagggtcttttccctgagcatctgattgacgtcctgcggcgagagctcgcccttgaatgcgactaccaaagggaagctgcctgtgcccgaaaattccgggacctgctgaaggggcaccctttcttttatgtccccgaaatcgtcgacgagctttgtagtccccacgtccttaccaccgaacttgtgagcgggttccccctggaccaggccgaagggcttagtcaagaaattcgcaacgaaatatgctacaacatattagtcctctgtctgagggaactatttgagttccacttcatgcaaactgatccaaattggtccaattttttctacgacccacagcagcataaagtggccttgctcgacttcggtgctactcgggaatacgataggtcttttacagatctgtacattcaaattattcgcgctgcagccgacagggatcgtgagaccgtcagggcaaagtctatagagatgaaattcttgacgggctacgaggtcaaagtgatggaagacgcccacctggacgccatcctcatactgggggaagcgttcgcatcagatgagccttttgactttggcacacagtcaacaacagagaaaatacacaacctgatcccagtgatgctgaggcatcgccttgtgccgcctccagaggagacatattcgttgcatcgaaaaatgggagggagttttctgatctgcagcaaacttaaggcacgctttccctgcaaagctatgtttgaggaggcttattccaactactgtaaaaggcaggcccagcagtag

SEQ ID NO: 212901 - DNA, 1944 bp, synthetic construct
  misc_feature 1..1944: note = Description of Artificial Sequence: Synthetic coding sequence
  source 1..1944: mol_type = other DNA
atggctgccattctcggcgatactatcatggtggccaagggcctcgtcaagctgacgcaggccgcagtagagacacatctgcagcacctggggattgggggagagctcattatggccgctcgggctctgcagagtacggcggtggagcaaattgggatgttcctcggcaaggtgcagggccaggataaacacgaggaatattttgccgaaaactttggtgggccagagggagaatttcacttctctgtcccgcatgctgccggtgcatcaactgatttctcatcagccagcgcacctgatcaatctgcaccacccagcctggggcacgctcatagtgaaggtcctgcacccgcttacgtggcgtccggaccatttcgggaggctggatttcctggccaggcctcctctccactgggcagggccaatggcaggttattcgccaacccgagggacagcttttctgccatgggattccagcggcgtttcttccatcaggatcaaagtcccgtaggagggctcacagcggaagatatcgagaaagctagacaggcaaaggcccgacctgagaataaacagcacaaacagaccttgagcgagcatgccagggagaggaaagtccctgtgactagaatcgggagactcgccaactttggtgggctggcagtaggccttgggttcggcgctctggccgaggtggccaaaaaatcccttagaagtgaggacccttcggggaaaaaggccgtactggggagtagcccatttctgagtgaggccaacgctgagcggatcgtccgcactctctgcaaggtgcgcggagcagctctaaaactagggcaaatgctctccattcaagatgacgctttcatcaatcctcatcttgcaaagatattcgagcgggtacgacagagtgccgactttatgcctctcaagcaaatgatgaaaacactgaataatgacttaggccctaactggagagataagctggagtacttcgaagagcggccattcgccgcagcttctattggacaggtgcacctcgctagaatgaaggggggaagggaagtggccatgaaaatacagtatccgggagttgcccagtctattaatagcgatgttaataacctcatggctgtgctgaacatgtctaacatgctaccggagggtctgttcccagaacatctgatcgacgttcttagacgcgagttagcgctagaatgcgattatcagcgagaggccgcttgcgccagaaaatttagagatttgctcaagggccaccctttcttctatgtccctgagattgtcgacgagctttgtagtccgcacgtccttaccacggaactggtctctggctttcccctggaccaggccgaagggttaagtcaagagattcggaatgaaatctgctataacatacttgtactgtgtttgagagaactgtttgagttccactttatgcagaccgatccaaattggagcaattttttctatgatccgcagcaacataaggtggccctgcttgattttggcgcaacaagggagtacgatcggagcttcacagatctgtacatccagattatccgggctgctgcagatagggaccgagaaacggtgcgcgctaagtctatagagatgaagttcctgaccggttacgaggttaaagtcatggaagatgcacacttggacgcgattctgatcttaggcgaagcattcgcatcggatgagccttttgatttcggtacacagtccacaactgagaaaatccataacttgatccctgtgatgctcagacatcgtctggtgcctccaccggaagagacatattctctgcacaggaagatggggggaagtttcctcatctgttccaaactgaaggctaggtttccatgtaaggccatgtttgaagaagcctacagcaactactgcaagcgccaggcccaacagtag

SEQ ID NO: 212902 - DNA, 1788 bp, synthetic construct
  misc_feature 1..1788: note = Description of Artificial Sequence: Synthetic coding sequence
  source 1..1788: mol_type = other DNA
atgttcctgggtaaggtgcagggacaggataagcacgaagaatactttgctgaaaacttcggcggaccggagggggagtttcatttctctgtacctcacgctgccggtgctagtactgacttctctagcgcctccgcaccggatcagtctgccccaccctccctgggccacgcacattcagagggacccgctcccgcttacgttgcctctggcccttttcgagaagcaggattccccggacaggcctctagtcctttagggagggccaacggaagactattcgcaaaccctagggattcattcagcgccatgggctttcagcgtaggttttttcaccaggatcaatctcctgtggggggactaacagccgaggacattgaaaaggcaagacaagccaaagctcgaccggagaataagcagcataaacagacgctgagcgagcatgcaagggagaggaaggtacccgttacgcgaatcggtcgtttggccaacttcggcggattagccgtcgggttagggtttggtgccctggctgaagtagctaagaagtcgctgagatctgaggacccatccggtaagaaggcagtcctgggatccagtccgttcctctccgaagcaaatgccgagagaattgtcagaacgctctgcaaggtgagaggtgcagctttgaagctggggcagatgctctctattcaggatgacgcttttatcaacccacatcttgccaagatatttgaacgcgtgcggcaatcagctgatttcatgcctctcaaacagatgatgaaaaccctcaataatgacttaggaccaaattggagagataagctggagtacttcgaggagaggccgttcgccgctgcctccatcggccaggtgcatctggctagaatgaagggcggtagagaggtcgcaatgaagatacagtatccgggagtggctcagtcgatcaactcagacgtgaacaatctcatggccgtgctcaacatgagcaatatgttgcccgagggcttgtttcctgagcacctgattgacgtcctgcggagagagttggccctcgagtgtgattatcagagggaggctgcatgcgcccgaaaatttcgtgacctcttgaagggccacccattcttctacgtgccggaaatcgtagatgaactttgttcacctcatgtactcacaactgagctggtgtcagggtttcctttggatcaggctgaaggcctgtcccaagagatcagaaatgagatctgttacaacatcctggtgctgtgcttaagggagttgtttgaatttcactttatgcaaactgaccctaattggagtaattttttttacgatccccaacagcacaaggtcgctctcttagactttggagccaccagggaatacgaccgaagtttcactgatctgtatatccagatcatccgtgctgccgctgatcgcgaccgggagactgtcagagcaaagagcatcgagatgaagttcctgacggggtacgaggttaaagtaatggaggatgcacatctcgatgcaatcctcattctaggggaggctttcgcctcagatgaaccattcgatttcggaactcaaagcaccaccgaaaagatccacaacctgatcccggtcatgctgcgtcatcgtttggttccaccccctgaggagacatacagtctccacaggaaaatggggggatcgttccttatctgcagtaagctgaaagctcgctttccttgcaaagcgatgttcgaggaagcctacagtaattattgcaaaagacaggcacagcagtag

SEQ ID NO: 212903 - DNA, 1944 bp, synthetic construct
  misc_feature 1..1944: note = Description of Artificial Sequence: Synthetic coding sequence
  source 1..1944: mol_type = other DNA
atggcggctatcctgggtgacacaatcatggtggcgaagggcctggtgaaattgacccaggctgcagttgagactcatctccagcatctgggaattgggggagaactgatcatggccgctcgggctctgcagagcaccgccgtagaacagatcggaatgttcttggggaaggtgcagggccaagataagcatgaagaatattttgctgaaaactttggtggcccagaaggagaatttcacttcagtgtcccccatgcggcaggtgccagcactgatttcagttctgcgtccgctcctgaccaaagcgcccctcctagtctgggacacgcgcactccgaaggacctgctcccgcttacgtggcctctggccctttccgcgaggccggattcccaggtcaggcatcaagcccactgggcagggccaacggacgattgtttgctaacccacgggatagtttcagcgcgatgggcttccagcgcagattctttcatcaggaccagagcccggttggcggactcacagcagaggacatcgaaaaggccaggcaggccaaggccagacccgaaaataagcaacataagcagaccttgagcgagcacgctagggagcggaaagtcccagtgacccgcattggcagactggccaatttcggtgggttagccgtgggcctcgggtttggcgctctcgccgaagtagcaaagaagagtctgcgttccgaagaccctagtggtaaaaaagcagtccttgggagcagcccgttcctttccgaggccaatgcggaacggatcgtgcgaacgctgtgcaaggtgcggggagcagctctcaagttaggacaaatgctgagcattcaagatgacgcattcatcaatccacatctggctaaaatcttcgagcgagtgcggcagtcagctgactttatgcctctcaaacagatgatgaaaaccttaaataatgatctgggtccaaactggcgcgataagttagaatacttcgaggagcgccctttcgctgctgcgtccattggccaggtacatctggccaggatgaaggggggtagggaggtggccatgaaaattcagtaccccggagtcgcacagagtatcaacagtgacgtgaataacctgatggcagttctgaatatgagcaacatgcttcccgaaggattgttccccgaacacttgatcgatgttttacgacgggaactggccttggagtgcgactaccagagggaggcagcctgcgcaagaaagttccgcgaccttctgaagggacatccttttttctacgttccagaaattgtggacgaattgtgttcaccgcacgttctgacaactgaattagtgtctggcttccccttggatcaggccgaggggctctcgcaggaaatcagaaacgaaatttgttacaatattcttgttttatgcctccgggaactcttcgagttccacttcatgcaaacagaccccaattggagcaatttcttctatgatcctcagcagcataaggtggcattgctggactttggagcaaccagagaatatgataggtcctttacagatctgtatatccagatcattcgagcagccgctgacagggatagggagacagtgagggcaaaatcgatcgagatgaaattccttacgggctacgaggtcaaggtgatggaagacgcgcacctagacgcaatactcatattgggggaagccttcgccagtgacgaaccgtttgatttcgggacacaaagtacaaccgagaaaatacacaatcttatcccagtgatgcttagacacaggttagtaccaccacccgaggaaacctattccttgcaccgcaagatgggtgggtccttcctgatttgttctaagttgaaagcacgcttcccctgtaaggccatgtttgaagaggcttacagcaactattgtaagagacaggcccaacaatag

SEQ ID NO: 212904 - DNA, 1797 bp, synthetic construct
  misc_feature 1..1797: note = Description of Artificial Sequence: Synthetic coding sequence
  source 1..1797: mol_type = other DNA
atggctgcacgcgctttgcaatccaccgctgtggagcaaataggaatgttcttgggtaaggtccagggccaggataagcacgaggaatactttgcagagaatttcggtgggccagagggcgagtttcattttagctctgcctctgcccctgatcagagcgcaccaccctccctcggtcacgcacattccgagggacccgctcccgcttatgtggcatccggcccttttcgggaagctggattccccggtcaagccagcagcccattaggccgagcgaacggacgattattcgcaaatccacgggactccttctcggccatgggattccagagacgattcttccaccaggaccagtccccagtgggaggcctgactgccgaggacatcgagaaggcacgacaagccaaggcgcgtccagagaataaacaacacaagcagacactctcagaacacgcacgcgaacgtaaggtgcccgtaacacgaatcggcagattggccaactttggcggactcgccgtgggcctgggtttcggggctctggcagaagttgccaagaaaagtctccggtctgaagatccaagcggtaaaaaagcagtcctcgggtccagcccattcctgtccgaggcaaatgccgagagaatcgtgagaactttgtgtaaggtccgcggagctgcactcaagctgggccagatgctgagcattcaggacgacgcgtttatcaatccgcaccttgctaagattttcgaaagagttcgccagtcggcggattttatgcctctgaagcaaatgatgaagaccttgaataacgacttaggaccaaactggagggataagctggagtacttcgaagaacggccattcgcggctgcctctattggccaggtgcatttggctcgaatgaagggtgggagggaggtcgcaatgaaaattcagtatccaggcgttgcccaaagtatcaatagtgacgtgaataatctgatggccgtgctgaatatgagtaacatgctccctgaaggcctgtttcctgagcacctgatcgacgtcctgaggagggaacttgctttggaatgcgactaccagagggaggccgcatgcgccagaaaattccgcgacttactgaaaggccatccctttttttatgtgcctgagattgtggacgagctatgctcaccacacgtcctgaccaccgaactggtaagcggcttcccactcgatcaggccgaaggcctgagccaggaaatccggaacgagatttgttacaacatcctggtgttgtgcctcagggagttattcgaatttcattttatgcagacagatcccaattggagtaatttcttctatgatccacagcagcacaaggtggccctgcttgactttggtgctacccgcgagtacgaccggtcatttacggatctgtacattcaaattattcgggctgccgcagaccgggaccgcgaaactgttagagccaaatccattgagatgaaatttcttacaggctacgaagtgaaagttatggaagacgcgcatctggatgcaattttaattctcggcgaggcttttgcttccgatgaaccgtttgattttggcactcagtcaactacggagaagatccacaatctcatacccgtcatgttgcggcatcggctggtgccgccacctgaagaaacatattcactgcacagaaaaatgggaggctctttcttaatttgttccaaattgaaagcaaggttcccgtgtaaggctatgtttgaagaggcctacagcaattattgtaagcgccaggcacaacagtag

SEQ ID NO: 212905 - DNA, 966 bp, synthetic construct
  misc_feature 1..966: note = Description of Artificial Sequence: Synthetic coding sequence
  source 1..966: mol_type = other DNA
atgttatcaatccaggatgatgcatttatcaatccgcatctggcgaaaatcttcgagcgtgttcgtcagagtgccgacttcatgccactgaagcagatgatgtaccccggagtggcccagtcgataaactctgacgtcaataatttaatggcggtactcaacatgtcgaacatgctcccagagggactctttccagagcatctgattgacgtactgagacgcgaactagcccttgagtgcgactaccagcgggaagctgcatgtgccagaaaattccgggaccttttgaaaggacatcctttcttctatgtacccgaaattgtcgacgagctgtgctctccacatgtcctgacaacagaacttgtttctggctttccgcttgatcaagccgagggacttagtcaggagatacggaacgaaatctgttacaatatactagttctgtgtctacgggaactgtttgaatttcacttcatgcagacagatcccaactggagcaacttcttctacgatccccagcagcataaggtggccctgcttgattttggcgctaccagggaatatgatcgttccttcaccgatctttacatccaaatcattcgagccgctgccgaccgtgatagggagactgtcagagccaaatctatcgagatgaagtttcttacaggctatgaagtcaaagttatggaagacgcgcacctggatgctatcctgattctcggagaggcttttgccagcgatgagcccttcgatttcgggacacaaagtacgactgagaagattcacaacctgattcctgtcatgctcagacatagattggtgcctccacccgaggagacctattctcttcaccggaagatggggggatcattcttaatatgtagtaagttgaaggcccgtttcccgtgcaaagctatgttcgaggaagcgtactctaattactgcaagaggcaggcccagcaatag

SEQ ID NO: 212906 - DNA, 1107 bp, synthetic construct
  misc_feature 1..1107: note = Description of Artificial Sequence: Synthetic coding sequence
  source 1..1107: mol_type = other DNA
atgttaagtatccaggacgacgcttttatcaatccccatttggcgaagattttcgagcgggtgcggcagtctgctgactttatgcctctgaagcagatgatgaaaaccttgaataatgatctgggacccaattggagagacaagcttgaatatttcgaagagcgaccgtttgctgccgcatcaattggccaggtacatcttgcgcgtatgaaaggtggaagagaagttgctatgaagatacagtacccaggcgtggcgcagagcatcaattctgatgttaacaatctgatggctgtgctcaacatgtcgaatatgcttcccgaaggactgtttccggagcacctgattgatgtgttacgccgagagctcgcactcgagtgtgattaccagagggaggccgcttgcgccagaaagttcagagatctgctgaagggtcatccttttttttatgtacctgagatcgtggacgaattatgttcaccacatgtcttgacaacagagcttgtgagcggcttcccgctggatcaggctgaaggcttgtctcaggagattaggaatgaaatttgctataacatactggtgctgtgtttaagagagctgtttgagtttcatttcatgcagactgaccctaactggagtaatttcttctatgaccctcaacagcataaagtggctcttctagacttcggagcaacccgggagtatgaccggagttttactgacctgtatatacagataattagagccgctgccgatagggaccgagagacagttcgggctaagtccattgaaatgaagtttttaaccggatacgaagtgaaggtcatggaagacgcccaccttgatgctatcctaatcctaggagaggccttcgcctccgatgagccctttgatttcgggactcagtccaccaccgagaagatccacaatttaattccagttatgctgcgtcaccggttggtgccacctccggaggaaacctatagcctacaccggaaaatgggcggttcattcctgatctgctccaaattgaaagcacgctttccatgcaaagccatgttcgaagaagcctattccaactattgcaaaaggcaagcccagcagtag

SEQ ID NO: 212907 - DNA, 3591 bp, synthetic construct
  misc_feature 1..3591: note = Description of Artificial Sequence: Synthetic coding sequence
  source 1..3591: mol_type = other DNA
atgcccaccgcggagagcgaggcaaaggttaagacgaaggtgcggtttgaagaactgcttaaaacccacagcgacttaatgcgagagaagaagaagttaaagaagaaactggtgagaagcgaggaaaatatatcccctgacacaataagatcaaatctacactacatgaaggagacaacgtccgatgatccagataccataagatcgaacctcccacatattaaagaaacaacctccgacgacgttagcgccgcaaatacaaataatctaaagaaatccacaagagttaccaagaataagctgcggaacacacagcttgctactgagaatcctaacggcgatgcctcagtagaggaggacaagcagggtaagcccaacaaaaaggtgattaagacagtgccccagcttaccactcaggatctgaaaccagagacacccgaaaataaggtggacagtacacatcagaaaacccatacgaaaccccaaccaggtgtggatcaccagaagtctgaaaaggcgaacgaggggcgagaggaaaccgacctggaggaagacgaagagctgatgcaggcatatcaatgtcacgtcaccgaggaaatggccaaggaaatcaagcgtaagatcagaaaaaagcttaaagaacagctgacttattttccctccgatactctattccacgacgacaagctttccagtgaaaaaaggaagaaaaagaaggaagtgcctgtatttagtaaagctgagactagtactctcacgatatctggggatacagtggaaggggaacaaaagaaagagtcatccgtacggagcgtgtccagcgactctcatcaggacgacgagataagctccatggagcagtctacggaagatagcatgcaggatgacaccaagccaaaacccaaaaagaccaaaaagaaaaccaaggccgtggccgataacaatgaggatgtcgacggtgacggcgtgcatgaaattacttcaagagacagccccgtgtaccccaagtgcctgctcgatgacgacttggtcctgggcgtgtacattcacaggacagatcgactgaagtctgattttatgatctcccacccaatggtaaagatccatgtggtggacgagcataccggacagtacgtaaagaaagatgattcgggcagaccagtctcttcctattatgaaaaggagaatgttgactacattctgccaattatgactcagccctatgattttaaacagctcaagagtagactccccgagtgggaagaacagatcgtctttaacgagaatttcccttacctcctgcgaggtagcgacgagagtcccaaggtgatcctgttcttcgagattcttgatttccttagcgtagacgaaatcaaaaacaattctgaagtgcagaaccaggagtgtggctttagaaagattgcctgggcatttcttaagctgctgggcgctaacggcaatgccaacatcaattcgaaactcagattgcaactctactacccccctactaagcctagatcccctttgtccgtagtcgaagccttcgaatggtggagcaagtgcccacgaaatcactacccaagtacactttacgtgacagttcgaggactcaaggtgcccgactgcatcaagccttcctatcggtccatgatggcacttcaagaagaaaaagggaagcctgtgcattgcgaacggcaccatgagagtagttccgtggatactgagcctggtctggaagagtcgaaggaggtgatcaaatggaagaggctgcccggacaggcctgtcgaatcccgaataagcatctattttctcttaatgccggagaaaggggttgtttctgcttggacttctcccacaacggcaggattctggcagcagcatgtgcatcacgcgatggctacccaatcattctgtatgagattccaagtgggcgttttatgagggagctttgcggccacctcaacattatatacgatctgtcatggtccaaggatgaccattatatcctgacaagcagttctgacgggaccgccagaatctggaagaacgagatcaataacactaatacctttcgagtactcccgcacccatcgttcgtctatactgctaaattccatcctgcagttcgggagcttgtggtcaccggctgctacgacagtatgatccgaatatggaaggtagagatgagagaggattctgccatcctcgtccggcagtttgatgtgcataaaagtttcatcaactcattgtgctttgacaccgagggccatcacatgtactccggagattgtaccggggtgatagtggtctggaacacatatgtcaaaataaatgatcttgagcacagtgtccaccactggaccattaacaaggagatcaaggagactgagttcaagggcattccaatcagctacctggagatccaccccaatgggaagcggttgcttattcacaccaaagactcaaccctccggataatggacctgaggatcttagtggccaggaaatttgtgggcgctgctaattatagagagaagattcacagtacactcactccttgcgggacgttcttgtttgctggttccgaggatggtatcgtttatgtgtggaaccctgagaccggagagcaggtggccatgtactcagacttacccttcaaaagtccaatccgagatattagttatcacccctttgagaacatggtggcattttgcgccttcggccagaatgaacctatcctgctgtacatctacgacttccacgtagcacagcaggaggccgaaatgtttaagcgatataatgggacctttccccttccaggcatccaccagagccaggacgcactgtgtacctgccccaaattacctcatcaggggtcatttcagatagacgagtttgtccatacagagtcttctagcactaagatgcagctggtcaagcaacgccttgaaaccgttactgaagtgatacgctcttgtgcggctaaggttaacaagaacctttctttcactagccctccggcagtgagcagccaacagtcgaagctcaaacagagtaacatgctcaccgcccaagagattcttcaccaattcgggttcacgcaaactggtattatatcgattgagagaaagccgtgtaaccaccaggttgatacggctcccactgttgtggctctgtatgattatacggcgaacagatcagatgagctcaccatccatcggggtgatatcattagggtctttttcaaggacaatgaggattggtggtatggttcaataggaaaaggacaagagggatacttcccagccaaccatgtggcgtcagaaacgctgtaccaggagttacccccagagatcaaggagcggtctccacctttaagccccgaagagaagaccaagatcgaaaaaagtccggctcctcagaagcagtctattaataagaataaatcacaagactttcgattaggttcggaatccatgacgcacagcgagatgagaaaggagcagagccatgaggatcaaggccatattatggacacccgcatgcgcaaaaacaaacaggctggcagaaaagtgactctcattgaatag

SEQ ID NO: 212908 - DNA, 3162 bp, synthetic construct
  misc_feature 1..3162: note = Description of Artificial Sequence: Synthetic coding sequence
  source 1..3162: mol_type = other DNA
atgcccaccgcggaaagcgaagcaaaggttaaaactaaagtaaggtttgaagaacttctgaagacacattctgatctcatgcgcgagaaaaagaagctcaaaaaaaaattagtcagaagtgaagagaacattagtcctgataccatccggagtaacctccactacatgaaggagaccacgagcgacgacccagacacaatcagaagtaacctacctcatattaaggaaaccaccagcgatgacgtgtccgcggctaataccaataatttgaaaaaaagtacgcgtgtgaccaaaaataaactgcgtaatactcagttggccaccgaaaatcccaatggggatgcttctgtcgaagaagataaacaaggcaaacccaataagaaagtgataaagaccgtgccccaattgacaacccaggatctgaagccagagaccccagagaataaggtagacagcacacaccaaaagacacacacaaaaccccagccaggggtggatcaccagaagtcagaaaaagctaacgaaggaagggaagagacagatctggaggaggatgaagagctgatgcaagcctatcagtgccacgtaaccgaggagatggcaaaggagataaagcggaagatcagaaagaagttaaaagagcagctcacctatttcccgagcgatactttgttccatgatgacaaacttagtagcgaaaaacgcaaaaagaaaaaggaggtgcctgtcttttcgaaagccgaaacttctacactcaccatcagtggagataccgtcgagggtgaacagaagaaggaatcttccgtgcgaagtgtgagttcggattctcaccaagacgatgaaatcagttctatggagcagagcacagaagacagcatgcaggacgatacaaagcccaagcctaaaaaaacgaagaagaagacaaaggccgttgccgacaacaacgaggacgtcgatggcgacggagttcatgagataaccagtcgcgattcccccgtgtacccaaaatgtcttctagacgacgatctggtcctgggagtgtacatccaccgcacggataggctgaagtcagatttcatgatctcccacccaatggttaagattcatgtagtggatgagcacactggacagtatgtgaaaaaggacgattccggacgtcctgtaagctcctactatgaaaaagagaacgtggattacatccttccaattatgacacagccttacgatttcaagcagttgaagtcaagactgcccgagtgggaagagcagattgtgttcaatgaaaacttcccctacttgcttcgaggttctgacgaaagcccaaaggtcattcttttcttcgagatcctcgattttctttcagtcgacgaaattaaaaataatagcgaggtgcagaaccaggagtgcggttttcggaagatcgcatgggcctttctgaaactactgggcgctaatggtaacgccaacatcaactccaagcttagattgcagctatactaccccccaactaagccccgttcgcctttgtccgtcgttgaagcctttgagtggtggtcaaaatgtcccaggaatcattacccttccacgctgtatgttacggtcagggggctgaaagtgccagactgcatcaagcccagttaccggtccatgatggcattgcaggaggaaaagggcaagcctgtccattgcgaaaggcaccacgagtcttctagtgtcgacacagagccaggtctcgaagaatccaaggaagttatcaagtggaagcggctgccgggacaggcatgccggattcccaataagcatcttttctccctcaacgccggagagcgagggtgtttttgcctcgattttagtcataacggaaggatcttggctgcggcttgcgcttcccgcgatggataccccatcattttgtacgaaatcccctccggcagattcatgcgcgaactgtgtggacacttaaatattatttatgacctatcttggtccaaagatgaccactacatcctcacgagcagtagtgatggaacggcacgtatttggaaaaatgagataaacaatacaaacacatttcgagtactgccgcacccaagctttgtgtacaccgctaagtttcaccctgcagtgagagagctggtcgtgactggatgttacgattcaatgatccggatttggaaagtggagatgagagaagatagtgctatcctagttcggcagtttgacgttcataaatcatttattaactcactgtgcttcgatacagaaggccaccatatgtattccggggactgtaccggggtcattgtagtgtggaacacctacgtcaagattaacgacctggaacacagcgtccatcactggaccattaacaaagagataaaggagaccgagttcaaagggattcccatttcctacctagagatccaccctaacggcaaacgcctgctcatccatacaaaggattcaacccttagaattatggacctgaggatcctggtagcccgtaagttcgtaggagcagctaactaccgcgagaagatacattccacactcacaccctgtgggacgttcttattcgcaggtagcgaggatggaattgtctatgtatggaaccccgagaccggagaacaggtcgcgatgtattccgatttacctttcaaatctcctataagggatattagctaccaccccttcgaaaacatggttgctttttgcgcttttggacagaatgagcctattctcttgtatatctatgacttccacgtggcgcagcaggaagccgaaatgttcaaacgctataatggaaccttcccactgcccggaattcatcaatctcaggacgctctatgtacctgtccaaaattgccacaccaggggtcctttcagatagacgagtttgttcacacagaatccagcagcacaaagatgcaactggtaaagcagcggctggagaccgtgacagaagtcatccgatcatgcgccgcaaaggtgaataagaatctgagctttaccagcccacctgccgtgtcatcccaacagagtaaactgaagcagtctaatatgcttacagcccaggaaatattgcatcagtttggcttcacccagacggattcccacttcgccgagttcaatacgtgtatcctatggtggaagaagcattag

SEQ ID NO: 212909 - DNA, 165 bp, synthetic construct
  misc_feature 1..165: note = Description of Artificial Sequence: Synthetic coding sequence
  source 1..165: mol_type = other DNA
atgcccactgctgaaagcgaggcgaaggtcaagacaaaagtccgcttcgaagagctgctgaagacccactcagacttaatgagggaaaaaaaaaagctgaagaaaaagcttgtgaggtctgaggaaaacatttcaaaccaggagaaatctatggcagtctggtag

SEQ ID NO: 212910 - DNA, 3591 bp, synthetic construct
  misc_feature 1..3591: note = Description of Artificial Sequence: Synthetic coding sequence
  source 1..3591: mol_type = other DNA
atgcccacagccgagtcggaggccaaagttaagacaaaggtgcgatttgaggaactactgaaaacacactcagatctgatgagggaaaagaaaaagctgaagaaaaagctggtgagatcagaggaaaatatcagtccggatacgattcgttccaacctgcactacatgaaagaaaccacttccgacgatcctgacacaatccgttccaacctacctcatatcaaggaaactacaagcgacgacgtgtctgccgctaacacaaataatctcaaaaagtccactagagtgaccaaaaacaaactacggaacactcaactcgctaccgaaaatccaaacggggacgctagtgttgaagaagataagcaaggcaagcctaacaagaaagttatcaagaccgtacctcagctcacgacacaagatcttaaacccgagacgcctgagaataaagtcgatagcacccatcaaaaaacacacacaaagccccagcccggagtagaccaccagaagtcagagaaggccaacgagggtcgagaggaaaccgatttggaggaggatgaagaacttatgcaggcatatcaatgtcacgtcaccgaggagatggccaaggaaatcaagcgcaagatcaggaagaaactgaaagagcagcttacttatttccctagcgacacccttttccatgacgataagttgagcagtgagaagcggaaaaagaagaaagaggtgccagtgttctcaaaagctgaaacttctacactgacgatcagtggggacacagtagaaggggagcagaagaaggaaagcagtgtcaggtcagtttcatccgattctcaccaagacgacgaaatcagctcgatggagcagagtactgaggacagtatgcaggacgataccaaacccaaacccaaaaaaactaaaaagaaaacgaaggccgtggctgataacaatgaagatgttgacggcgacggggttcatgaaatcacgagcagggactcaccagtctatccaaagtgcctactggacgacgacctggttctgggagtctacatccatcgcaccgatcgtctaaagagtgatttcatgatttcccacccaatggtgaaaatccatgttgtcgacgagcatactggccaatacgtcaagaaagatgattccgggagacctgtatctagctattatgagaaggaaaatgtggactacatcctgccaatcatgactcaaccatacgattttaaacaactgaagtctcggctgcccgagtgggaggaacagattgttttcaatgagaatttcccgtacctgctgcgagggagcgatgaaagccccaaggttatcctgtttttcgaaatcctggattttttaagcgtggacgagataaaaaataacagcgaagtacagaatcaggagtgcggcttccgtaagatcgcctgggccttcctgaagcttcttggagccaatggcaacgcgaatatcaatagcaagttgcgattgcagctgtactaccctccgaccaagccacgatctccactcagcgtagtggaagccttcgagtggtggtccaaatgtcctcgcaatcattatccctctacactttatgtgaccgtccgaggccttaaggtgccagactgtatcaagccgtcttaccggtccatgatggcgctgcaagaggagaaagggaagcctgttcattgtgagaggcaccatgaaagcagctcggtagacacggaaccgggacttgaggagtccaaggaagtgatcaagtggaagcggcttccgggtcaggcatgtcgcatccccaacaaacatctgttcagcctgaatgcaggtgagcgtgggtgtttctgcctggacttttctcacaacggcaggatcctggccgcagcttgtgccagtagagacgggtacccaatcatcctgtacgaaatcccgagcgggcgatttatgagagagctctgcggacatctgaatatcatctacgacctctcatggagtaaggatgaccattacatactgacatcttcgagcgatgggaccgcgagaatatggaagaatgaaattaataacaccaacacatttcgcgtcttacctcaccccagcttcgtctacactgcgaagtttcacccagccgttagggaactggtggtgacgggctgctacgacagtatgatccgcatctggaaagttgagatgcgcgaggactctgcgatcctggtgcgccagtttgatgtacacaaaagttttataaattccttgtgcttcgatacagagggtcaccatatgtattctggcgattgtaccggtgtgatagtggtgtggaacacatacgtgaagatcaacgaccttgagcactctgtccaccactggaccatcaataaggaaattaaggagacggagttcaaaggcatcccaatctcttatctggagatacatcccaacgggaaacgactgctcatccataccaaagattctaccctgagaattatggatctaagaattttagtcgctaggaagttcgtgggagctgctaattacagggaaaagatccattcgacgctgactccctgtggtacattcctgttcgcaggaagcgaggacgggatcgtgtacgtctggaaccctgaaacaggcgagcaagtagcaatgtacagtgatttgccatttaagtcgcccatccgagacatctcttaccaccccttcgagaacatggtcgccttctgcgcttttggacaaaatgaaccgatactcctctacatctacgattttcacgtcgctcagcaagaggctgaaatgtttaagcggtataacggaacgtttcccttacctggaatccaccagtcccaggatgccctctgtacttgtcccaaactgccccatcagggttcatttcagattgatgaattcgtgcacacggaaagttctagtacgaagatgcaattagtgaaacagcgcttagagacagtgaccgaggtcatacggtcctgcgccgctaaggtaaacaagaatctttcatttacttcaccacccgcagtgtcctcacagcagagtaaacttaagcaaagtaatatgcttacagcccaggaaattctgcatcagtttgggtttacgcaaaccggaatcatttccatcgaacggaagccctgcaatcatcaggtcgatactgcacccaccgtagtggcactgtacgactataccgccaaccgttccgacgaactcactatccaccggggtgatattatccgggtcttctttaaagacaacgaggattggtggtacggatcaatcggtaaaggccaggaggggtacttcccagccaatcacgtggctagtgaaactctttatcaggaactgccccctgagattaaggaacgaagcccacctctgtcaccggaagaaaagacaaagatcgagaaatctcccgcaccccaaaagcagtctatcaataagaacaaaagccaagactttagactaggctctgaaagtatgacccacagtgaaatgcggaaggaacaatcacatgaggaccaagggcacataatggacacacgcatgcgcaaaaacaaacaggccggacgtaaggttaccctaatagaatag

SEQ ID NO: 212911 - DNA, 3162 bp, synthetic construct
  misc_feature 1..3162: note = Description of Artificial Sequence: Synthetic coding sequence
  source 1..3162: mol_type = other DNA
atgcctacaacagagtctgaggctaaagtaaaaaccaaagtgaggttcgaagaactcctgaagactcacagtgacctgatgagagagaaaaagaaactgaagaagaagctcgttagatcagaggaaaatatctcccctgacaccattcggtctaacctgcattacatgaaagagacaacaagtgacgaccccgacaccatcagaagtaacctgccccatattaaagaaactacgagtgacgacgttagcgctgcaaacactaacaatcttaagaaaagcactagagttaccaagaacaagttgcgtaacacacaattggccacagaaaatcctaacggagatgcttcagtcgaggaggataagcagggcaagccaaataagaaagtgatcaagacggtgccacagctaactacacaggacctaaagcctgagacccctgagaataaggtggattccacacatcagaagacgcataccaaaccgcaaccgggagtggaccaccagaagtctgaaaaggctaacgagggcagagaagagacggatctcgaagaggatgaagagctgatgcaggcttaccaatgtcacgtcacagaagaaatggcgaaggagattaaacgtaagattaggaagaagttaaaagaacaactgacctattttccatctgatacccttttccacgacgataagctgtcctccgaaaagaggaagaaaaaaaaagaggtacctgtgttttctaaagcagaaacttccactctgacaataagtggcgacacagtcgaaggagagcagaagaaagaatcatcagtgcgctcagttagttcagactcacaccaggacgacgaaatttccagtatggaacagtccacagaggattcaatgcaggacgacaccaagccaaaaccaaagaagactaagaaaaagaccaaggcggtggctgacaataacgaggatgtggacggcgacggagtccatgagataaccagccgagacagcccggtttatccaaaatgtctgctggatgatgacctagtgctaggggtctacatccataggacggataggctgaagtcagacttcatgatttctcaccccatggtcaagatccatgtcgtggacgagcatacggggcaatatgtgaaaaaagatgattctggaaggccagtttccagttactatgagaaggaaaatgtggattatatactgccaattatgacccagccgtacgatttcaagcagttgaaaagcagactgccagaatgggaagagcagatcgtcttcaacgagaacttcccttatctgctgcgcggtagcgatgaatccccgaaggttatattgtttttcgaaatcctggacttcctttccgttgacgagatcaaaaataatagcgaggtgcaaaaccaggagtgcggattcagaaaaattgcctgggcgttcctcaaactcctgggggctaacggcaatgcaaacattaactcgaagctgcgacttcagttgtactacccgccaacaaagccccgtagtcccctgtctgtcgtggaagcttttgaatggtggagcaagtgcccaaggaatcattatccatcaacactctatgtaaccgtccgaggactcaaagtccctgactgcatcaaaccaagctatagatccatgatggctcttcaggaggaaaagggcaaacctgttcactgcgagcgtcatcacgagtcttcatccgtcgatacggaacctggactggaagagtctaaggaggttattaagtggaagcgtctgcctggacaggcatgtaggattcccaacaaacacctgtttagccttaacgctggagagagaggttgcttctgtcttgatttctctcataacggacgtattttggcagccgcttgtgcttccagggacggatatcctatcattctgtacgaaataccaagcgggaggttcatgcgggagctgtgtgggcatctcaacatcatttacgacttatcctggagtaaagatgaccactatattctgactagtagcagtgacggcacagcacgcatttggaagaatgagataaataacactaacacttttcgtgtcttaccgcacccctctttcgtatataccgccaagtttcaccctgctgtacgcgagctcgtggtcaccggatgctatgattctatgattcggatatggaaggtggagatgcgcgaagattcagccattctggtccgtcaatttgatgtccacaagtccttcataaattctctgtgttttgatacagaaggacatcacatgtactccggggattgcactggggtaatagtggtctggaatacttacgtcaaaatcaatgatttggagcactcagtccaccattggacaatcaataaagagatcaaggaaaccgaattcaaagggatcccaatttcttacctggagatacacccaaatgggaagcggttattgattcacaccaaggattctaccctgcgcattatggaccttcgtatacttgtcgccagaaagttcgtgggagcggcaaattatcgcgaaaagatacactctacattaacaccctgcggaacattcctcttcgccggttccgaagatgggatagtgtacgtgtggaacccagaaactggagagcaggtggccatgtatagtgacttgcctttcaaatcaccaattagagatattagttatcaccctttcgagaacatggtggcattctgtgccttcggtcagaacgagcccattttgctttatatctacgacttccacgtagcccagcaggaagccgaaatgtttaaaagatataatggaacctttcccctgcctgggattcaccagtcacaggatgccctttgcacctgcccgaagctgccgcaccagggttcgttccaaattgatgagttcgtgcatactgagagtagctccaccaagatgcagttggtgaaacagcgtctggaaactgtgaccgaagtgatcagatcctgcgctgcaaaagtgaataaaaacctttcattcacatctccgccagccgtgagctcacagcaaagcaaactgaagcagagcaacatgctgactgcccaggagatcctacatcaatttggcttcactcagaccgactcgcacttcgcagaatttaatacatgcatattgtggtggaaaaagcactag

SEQ ID NO: 212912 - DNA, 1497 bp, synthetic construct
  misc_feature 1..1497: note = Description of Artificial Sequence: Synthetic coding sequence
  source 1..1497: mol_type = other DNA
atgagagaactctgcggccatctcaacattatctatgacctgagctggtctaaagacgatcactacatactcacaagttcctctgatggtacagcacgcatctggaaaaatgagattaataatactaatacatttcgcgtgctgcctcacccttcctttgtgtacacagctaaattccatccagcagtaagagagctggtggttaccggttgttacgatagcatgatcaggatctggaaagtggaaatgcgggaggattccgcaatactcgtgaggcagtttgacgtgcacaaatccttcattaattctctgtgcttcgacactgagggccaccacatgtactctggcgactgtaccggagtaatcgtcgtgtggaacacctacgtaaaaatcaatgatctggaacactctgtacatcactggacaatcaataaggagatcaaagaaacagagtttaagggcatacccatttcttacttagaaatacatccaaacggaaagagactgctgatccataccaaggactccaccctgaggattatggacctccgaatccttgtcgctcgcaaattcgtgggggcagccaactatagagagaaaatccatagtactttgaccccttgcgggacctttctctttgcaggatcggaagatggcatcgtctatgtctggaaccctgaaaccggcgagcaggtggctatgtactctgatctgccttttaagtctcccatcagagacatttcataccacccgtttgagaatatggtggccttttgcgcgttcggtcaaaacgagcccattttactgtacatctacgactttcatgtggcccaacaggaagcagagatgttcaaacgctacaatggcacctttcctcttccagggatccatcagagccaggacgctttatgtacttgcccaaagctcccacaccagggcagtttccagattgatgagttcgtccataccgagagctcttcgactaaaatgcagcttgttaaacagcgcctggagaccgtcaccgaggtcattaggagctgtgctgcaaaggtaaataaaaatttaagtttcactagtccgccagccgtgagttcccaacagtcaaagctaaagcagtcaaatatgctgacggcccaggaaattctgcatcagtttggcttcacacagacaggcatcatatccatcgagaggaaaccatgtaaccatcaagtcgacactgcccctactgtcgtggcactctacgactataccgccaaccgcagcgacgagctgactattcataggggagacataataagggtgtttttcaaggacaacgaggattggtggtacggatcaatcggaaaggggcaggaaggctactttcccgctaatcacgtcgccagtgagaccctctaccaagagctgcccccagagatcaaagagcgctccccccctctttccccagaagagaaaaccaaaattgagaaatcacccgcacctcagaaagtgaaatag

SEQ ID NO: 212913 - DNA, 3591 bp, synthetic construct
  misc_feature 1..3591: note = Description of Artificial Sequence: Synthetic coding sequence
  source 1..3591: mol_type = other DNA
atgcctaccgcagaaagtgaggccaaggtaaaaactaaagtacggttcgaagagctcctgaaaacacattcagacctcatgcgtgagaagaaaaagctaaagaagaaactagtgaggagcgaggagaacatctcgcccgatactattcgcagcaatctccattacatgaaagagactacttctgacgatccagacacaattcgctcaaacctccctcacattaaggaaacgaccagcgacgatgtcagtgctgccaatactaacaatctgaaaaagtctacccgagtgactaagaacaagctacgaaatacccagctggccactgagaaccctaatggggatgcttctgtggaggaggataagcaaggcaaacctaacaaaaaggtcatcaaaaccgtgccgcagctgaccacacaagatctgaagcccgagacccccgagaacaaagtggattccacgcaccagaaaacccataccaagcctcagcccggtgttgaccatcagaagagtgagaaagctaatgaagggcgtgaggagacagatctcgaggaggacgaagaactaatgcaggcataccagtgccatgtgaccgaagaaatggccaaggagatcaaaagaaagatcagaaagaaactgaaagagcaactgacatatttcccaagtgatactttatttcacgatgacaaactgtcctccgagaaaaggaagaaaaaaaaagaggttccggtgttcagcaaagccgagacctctactcttacaatcagcggtgatacagtggaaggggaacaaaagaaggagtcatctgtgcggagtgtgtcctccgattcgcatcaggacgacgaaatcagcagtatggagcagagcactgaggactccatgcaggacgacactaaacccaaaccaaagaagacaaaaaagaagacaaaagcagtcgcagacaataatgaagatgtagacggagatggggtacacgagatcacctctcgggactctccagtgtaccctaaatgccttctggacgacgatctggtgttgggggtctacattcataggaccgaccggctcaagtctgacttcatgataagccatcctatggttaaaatccatgtcgtggatgagcatactggacagtatgtgaaaaaggatgattcaggccgacccgttagttcctattacgagaaagagaatgtggattatatcttgcctatcatgacacagccgtacgactttaaacaactgaaatcccggttaccagaatgggaggaacagattgtgtttaacgagaacttcccgtacctgcttcggggttccgatgaaagtcctaaagtcatccttttctttgaaatcctggactttttgagcgttgacgaaattaagaataatagtgaggtccagaatcaggaatgtgggtttaggaaaatagcttgggcatttctgaagttactgggcgctaacggcaacgcgaatattaactccaagcttaggctgcagctgtactacccaccaacaaaaccacggagtcccctgtctgtcgtcgaggcattcgaatggtggagcaagtgtcccaggaaccactacccaagcaccctatatgttactgttcggggattgaaagtgcctgactgtattaagccgagctatcggtccatgatggccctccaggaggagaaggggaaaccagtccactgtgagagacaccacgagtccagcagtgttgataccgagccgggtctggaagagagtaaagaagtgatcaaatggaagcgccttccaggccaggcatgtaggattccaaataagcacctgttcagcctgaacgctggggagcgcggttgtttttgcctggatttctcccataatggccgtatcctcgctgcagcctgcgccagtagggacggttatcccataatcttgtacgagatcccgtctggacggttcatgcgagaactctgcggccatcttaatattatctacgacttgtcctggagcaaggacgatcattatatactgacaagttcgagcgacgggaccgctcggatctggaagaatgaaattaataatactaacaccttcagagtactcccccacccatctttcgtctataccgcaaaatttcatcctgcggttcgtgagctggtggttacgggttgctacgattccatgatccggatctggaaagtggaaatgagagaagatagtgcaatcctcgtccgacagttcgatgtccataagtctttcataaattccttgtgctttgataccgaagggcatcacatgtacagcggggactgcaccggagtaatcgtggtttggaatacatacgttaagattaatgatctcgaacactccgttcaccattggactatcaacaaggagatcaaggaaaccgaatttaagggaatccccatttcctatctggagatccaccccaacggaaaaaggctgctgatacacaccaaggacagtaccttacgcataatggacctccgtatcttagtggcccgtaagttcgttggcgcagctaactaccgcgaaaaaattcactcaacgctgacgccctgcgggaccttcctcttcgctggcagtgaggacgggattgtgtacgtttggaaccccgagaccggcgagcaggtggctatgtactctgatctgccctttaaaagcccaatccgggacattagctaccatcccttcgaaaacatggtggcgttttgtgcgttcgggcaaaatgagcccattcttctctatatatatgacttccacgttgctcagcaggaagctgaaatgttcaaaagatataacgggacttttccactgcccggaattcaccagtcacaggatgctttgtgcacctgtcccaagctgccacaccaaggcagttttcaaatcgatgaattcgttcatacggagtcctcctctacgaaaatgcagctggtcaaacagcggctggagacagttaccgaagtgatcaggtcctgtgccgcaaaagtcaataagaacctgtcctttacatcacctccggcagtttcatcacagcagagcaaactcaagcaaagtaatatgctgacagctcaagagattctccaccagttcggcttcactcaaaccggcattatctcaatagagcgcaaaccctgtaaccatcaggtggatactgcccctaccgtagttgcactttatgattacaccgccaatcgttctgatgagctcacgatccacaggggtgatattatcagggtctttttcaaggacaacgaagattggtggtacggttctattggcaaaggccaggaaggatactttccagctaatcatgttgcatcagagactttgtaccaggaactgccacctgagatcaaagaacggtcaccccctttgtcccctgaagagaaaacaaagattgagaagagtccagcgcctcaaaaacaatctattaacaagaacaagtcgcaggatttcaggttggggtctgaatccatgacgcattcggagatgaggaaagaacaatctcacgaggatcaggggcacattatggatactcggatgcgcaaaaacaaacaggcaggccgaaaagtcacacttatcgaatag

SEQ ID NO: 212914 - DNA, 1218 bp, synthetic construct
  misc_feature 1..1218: note = Description of Artificial Sequence: Synthetic coding sequence
  source 1..1218: mol_type = other DNA
atgttgtctagttttctgtctccacagaacggaacctgggcagacaccttctcactgctccttgctcttgccgtggccctctacttgggatactattgggcctgtgtgctgcaaagaccacggctggtcgcaggaccccagtttctggcgttcctggagcctcactgtagcattaccaccgagaccttctatcccactctctggtgcttcgaagggcgactgcagagtatattccaggtgctcctccagtcccagccacttgtgctgtaccagtccgacatcctgcagactcctgatggaggacagcttctcctcgactgggcaaagcaaccagatagctcccaggacccagatcctaccacacagccaatcgtgttactgctgcctgggatcactggtagctctcaggatacttacgtcctgcatctggtgaaccaggctctgcgcgacggatatcaggctgtggtttttaacaaccggggatgtcggggagaggaactcagaacccaccgagctttctgtgcaagtaacactgaggatctagagactgttgttaaccacatcaagcaccggtacccgcaggccccactgttggcagtaggtatttcatttggaggtattctcgttctgaatcacttggcgcaggccagacaggctgccggactggtcgcagcactgaccctcagtgcttgctgggactctttcgagactacaaggtcactggagacccccctgaacagtctccttttcaaccagcctctaacggcaggactttgtcagttggtcgagagaaatcggaaagtgatcgaaaaggtagtggacatcgactttgtgctgcaagccaggacaatacgccagtttgacgagaggtatacctctgtggcattcggctatcaggattgcgtcacttattacaaagcggctagcccaagaaccaagatcgacgccattcgcattccggttctatacttatctgccgctgatgacccctttagtccagtgtgtgcactgcccatccaggctgcgcagcatagtccctacgtcgcactcctgattaccgctcgcggaggtcacatcggttttctggagggtctgctgccctggcagcattggtatatgagtcgactacttcatcaatacgcaaaggcaattttccaggatcccgagggattgccggacctgagggccttgctgcccagcgaggataggaacagctag

SEQ ID NO: 212915 - DNA, 1197 bp, synthetic construct
  misc_feature 1..1197: note = Description of Artificial Sequence: Synthetic coding sequence
  source 1..1197: mol_type = other DNA
atgcgcaaaagaactgagcctgttgcgctggagcacgagcgatgcgctgctgctggcagcagtagtagcggctccgcagctgctgcgttagatgcagattgtcgattaaaacaaaatctgagactcactggaccagccgctgcagagccaaggtgtgccgctgatgccggaatgaagcgggctttagggcgtagaaagggggtgtggcttcgcctgcggaaaattcttttctgtgttcttggcctgtatatcgccattccattcttgataaagctgtgtccagggatccaagccaagcttatttttctgaactttgtccgggtgccatattttattgatcttaagaaacctcaggatcaaggtctgaatcacacctgtaattactacttgcagccagaagaggacgtaaccatcggtgtttggcacacagttcctgctgtctggtggaaaaacgcccagggtaaggaccaaatgtggtatgaggatgcccttgcgagtagtcatcctattatcctgtaccttcatggcaacgctggaacacgcggtggcgatcacagagtcgagttatacaaggttctgtccagtctgggctaccatgtcgtgacctttgattacagggggtggggagacagcgtgggcacaccgagcgagaggggcatgacatacgatgccctgcatgtgtttgactggattaaggctaggtcaggggacaaccctgtgtatatttgggggcattcactgggaactggcgtggccacgaatcttgttcggaggttatgcgaacgggagactcctccagatgccctgattttagagtcgccgttcacgaatattcgtgaggaggcgaagagccatccctttagcgtgatctaccggtatttccctggattcgactggttcttcctggatcctatcactagtagcggaattaaattcgccaatgacgaaaatgtcaaacatatttcctgccccttactaatcctccatgccgaggatgatcccgtggtccctttccagctgggcaggaagctgtatagtatagccgctccggctaggagtttcagggattttaaagtgcagttcgtaccctttcacagcgaccttggctataggcacaagtatatttacaagagtccagagctcccacggattcttagagagttcctgggtaagagtgagcccgaacaccagcactag

SEQ ID NO: 212916 - DNA, 1215 bp, synthetic construct
  misc_feature 1..1215: note = Description of Artificial Sequence: Synthetic coding sequence
  source 1..1215: mol_type = other DNA
atgaggaagaggacagaaccggtggctctggaacacgaacgctgtgctgccgctggaagttcttcctctgggagtgcagccgcagccctggatgctgattgtagactgaaacagaacctcaggctcacaggccctgccgctgccgagccaaggtgtgccgctgatgccggtatgaaacgcgctctcgggagacgcaaaggagtttggctgaggctgagaaagatccttttctgtgtcttgggtctttacattgccattccatttctgattaaactgtgccccggtatccaggctaagcttattttcctgaatttcgtccgcgtgccatattttatcgaccttaaaaagccccaggatcagggcctgaatcatacttgtaactactacctccagccagaagaagatgtgactatcggcgtttggcacacagttccagctgtgtggtggaagaatgctcaggggaaagatcaaatgtggtatgaggacgcactggcaagcagtcatcctattattctgtacctgcacggcaatgctgggacccgaggaggggatcaccgcgtagaactttacaaggttctgagttcgctcgggtaccatgtagttacttttgattaccgtggatggggcgactctgtgggtacgccctccgagcggggaatgacctacgacgccctgcatgtcttcgattggataaaggccaggtcaggggacaacccagtctatatctggggtcacagcctggggactggcgtcgccacaaatctcgtgaggcggctgtgcgagcgtgagacccctccggacgccctaatcctcgaaagccccttcaccaatattagggaagaagcaaagtctcatcctttcagcgtgatctatcggtattttcccggttttgactggttttttcttgacccaatcacaagcagtggaatcaagtttgcaaatgatgagaatgtgaaacatatctcctgccccctcctgatactgcatgctgaggatgaccccgtcgtgccattccagcttgggcgtaaactatacagcatcgcagcgccagcccgttcattccgagacttcaaagtgcagttcgtccccttccatagcgatcttgggtatcggcacaaatatatctataaaagtccagaacttcccagaatcttgcgccctcagcagggaccaggatcatcacctgacccaagtatgtggtctgagttggtgtag

SEQ ID NO: 212917 - DNA, 564 bp, synthetic construct
  misc_feature 1..564: note = Description of Artificial Sequence: Synthetic coding sequence
  source 1..564: mol_type = other DNA
atgtcagggggaggccatgggggagtgtgttttctgtgctgtatattgctgcagggacgaaaaggagtttggctccgactgagaaagatcctgttctgtgtgctggggctgtacattgccatcccctttctaattaagctctgccccggaatacaagccaagttgattttcctcaatttcgtcagggtgccctacttcattgacctgaagaagccacaggaccaggggctgaaccacacctgtaactactatctgcagccagaagaggatgtcaccattggtgtatggcacaccgtgccagccgtgtggtggaaaaatgcccagggaaaagaccagatgtggtacgaggatgctcttgccagctcacatcccattatactatatctccacggcaacgctggaacacggggaggcgatcaccgggttgagctgtataaagtcctgagttctctagggtaccatgtggtgacgttcgactacagaggctggggggacagcgtcggaactccaagcgagcgcggaatgacgtatgacgccctgcatgtcttcgactggattaaatag

SEQ ID NO: 212918 - DNA, 1083 bp, synthetic construct
  misc_feature 1..1083: note = Description of Artificial Sequence: Synthetic coding sequence
  source 1..1083: mol_type = other DNA
atgagaaaacgcaccgagcctgtggctcttgagccgaggtgtgcggctgatgccggtatgaaacgggcacttggcagaaggaagggggtatggctgcgcctgagaaagattttgttctgcgtgctggggctctatatcgctattcccttcttaatcaagctatgcccaggaatccaagctaagttaatttttctgaattttgtgagagtgccctatttcatcgatttgaaaaaaccccaagaccagggtctgaatcacacctgtaactactacctgcagcctgaggaggacgtgaccatcggcgtctggcacaccgtcccagccgtgtggtggaagaacgcccaaggcaaagatcagatgtggtacgaggacgctctggcttcaagccaccccatcatcttgtacctacacggcaatgctgggacccgcggaggcgaccatcgtgtggagctgtataaagtgctatcatctctggggtaccacgtggtgacgttcgattaccgcggttggggagattctgtgggcaccccctccgagcgcggaatgacgtatgacgcactgcacgtcttcgattggatcaaagcacggtccggggacaatcccgtctacatatggggacacagcctgggaaccggggtggcaactaaccttgtcagacgattgtgtgaaagggagactccacctgacgccctaatactggagtcaccctttacaaatattagagaggaagcaaaatctcaccccttcagcgtaatctatcgctactttcccggatttgattggtttttcttggaccctatcacctcgtccggtatcaagttcgcaaacgacgaaaatgttaagcacatctcatgccctctcctgatactgcacgcagaggatgaccccgtcgtccccttccagctgggcaggaagttgtactcaattgccgcaccggctcgatcttttagagattttaaagtgcagttcgtgccctttcattcagacttgggctacagacacaaatacatatataagtccccagagctccccagaatactcagggagtttttaggcaagagtgaaccggaacatcagcattag

SEQ ID NO: 212919 - DNA, 1020 bp, synthetic construct
  misc_feature 1..1020: note = Description of Artificial Sequence: Synthetic coding sequence
  source 1..1020: mol_type = other DNA
atgctgtatcccggaagcgtctacttattacagaaggccctgatgccagtgcttttacaggggcaagcgaggctggtggaagaatgcaacggcaggcgtgccaaactcctggcatgcgacggcaatgaaattgacactatgttcgtggacagaaggggcacagccgaaccccagggtcaaaaattagtgatttgttgtgaaggaaatgccggattctatgaagtgggctgtgtgagtactccgctcgaagctggttacagtgtgcttggctggaatcaccccggtttcgcagggtccaccggtgttccatttccccaaaatgaggcaaatgcgatggacgtggtcgtgcagtttgccatccaccgactcggctttcagcctcaggatatcattatttacgcatggtcaatcggcggattcacagcgacgtgggccgcaatgtcttatcctgacgtcagcgccatgattctggatgcttctttcgatgatctggtcccactcgcactgaaggttatgccagactcttggagaggtctggttacccggaccgtgaggcagcatctcaatctgaacaatgctgagcagctttgtcgttaccaaggccctgtattactgatcaggcgaactaaagacgagatcattaccaccactgtccctgaggatattatgtcgaaccgaggaaacgacctccttcttaaattgctccaacatcgatatccccgtgtgatggcggaggaaggacttagagtggtgcgtcagtggctggaggcctcttctcagctggaggaggcttcaatctacagtagatgggaggtggaggaagactggtgtttaagcgtcctccggagctatcaggccgaacacgggccagattttccatggagcgtgggcgaagatatgagcgcggatggacggagacaactggccctcttcttggctcgtaaacacctgcacaatttcgaggctacccactgtacacccttgcccgcacaaaactttcaaatgccttggcacctctag

SEQ ID NO: 212920 - DNA, 1677 bp, synthetic construct
  misc_feature 1..1677: note = Description of Artificial Sequence: Synthetic coding sequence
  source 1..1677: mol_type = other DNA
atggctaaactgctgtcatgcgtgctgggccctcggctgtataagatctaccgcgaaagagatagtgaacgggctcctgcaagtgtacctgagactcccaccgctgtcacggccccacacagttctagctgggatacgtattaccagccacgtgcgcttgagaaacatgccgattcgattctggcgctcgcaagcgtgttttggtccattagttactactcttccccattcgccttcttttacctgtacaggaaaggctacctttctctgtctaaagtcgttcccttttcgcattatgcaggcaccctgttactcctcctggccggtgtggcttgtctgcgaggcatagggaggtggacaaacccgcagtacaggcagtttatcaccatccttgaggctactcacagaaatcagagctctgagaacaaacggcagttagccaattataattttgacttccgaagctggcccgtggatttccattgggaagagccttcttctagaaaggaatctcggggtggcccaagtcgtcgtggagtcgcacttctcagaccagaaccattgcacaggggaacagccgataccctgctgaatcgagtgaagaagctcccatgccagatcactagttatctcgtagcacataccctcgggagacggatgttgtacccaggcagcgtttacctgctccaaaaagctctgatgccggtcttgctgcaggggcaggcaagactcgtggaagagtgtaatggcaggcgagctaaacttctggcttgcgatggcaatgagatcgacacaatgtttgtagaccggagggggactgcagaaccccaaggacaaaaactcgtcatttgttgcgaaggaaatgccggattctatgaggtcgggtgcgtaagtacgccactcgaagccggttacagcgtgcttggctggaatcacccgggtttcgccggttctacaggggtaccgtttccgcaaaacgaagctaacgctatggacgtagttgtgcagttcgcgatccacaggctgggttttcagccccaggatattatcatctatgcctggtccattgggggtttcacagcaacgtgggctgcaatgtcctatcctgatgtgagcgccatgatactggatgcctcctttgatgacctggtgccacttgctctcaaagtgatgcccgactcgtggagaggactcgtgacccgaaccgttcgacagcacctgaatcttaacaacgctgaacagctctgccgctaccaaggacctgttctgctcattagacggaccaaggacgagattatcactacaaccgtgccagaggatatcatgtccaatagaggcaatgatctgctgctcaaattgctgcagcaccggtaccccagagtgatggccgaggagggactgcgggttgtgagacagtggctcgaggcatcctctcaactggaagaggcttcaatctattctcgctgggaggttgaggaggactggtgcctcagcgtgctccgatcctatcaggcagagcatggtcctgattttccttggtctgtgggcgaggatatgtccgccgatgggcgtaggcagcttgctctgtttctggcgcgaaaacatttacacaacttcgaagccacgcattgtacgcccttgcctgcccagaacttccagatgccttggcatctgtag

SEQ ID NO: 212921 - DNA, 1806 bp, synthetic construct
  misc_feature 1..1806: note = Description of Artificial Sequence: Synthetic coding sequence
  source 1..1806: mol_type = other DNA
atgagtcagcttgctcgcaggaggtcccgctatggattgacgagcagggcgcacaatacctccgaggctgggagagcaggccctgccggtggccctgcagcgggacgcgcagctgcgcgtgcaggagctatggcaaagctgcttagctgcgttctaggtccaaggctctacaagatctatagagagagggactcagaaagagctcctgcttccgttccagagacaccaaccgctgtcactgcacctcattcctcctcatgggatacatactatcagccccgagccttagaaaaacatgctgactctatcttagccctagcgagcgtcttctggtctatttcttactattcttctccatttgcatttttctacttgtaccgcaagggctatctctctctgtccaaagtcgttcctttctcgcactacgccggaacattactcttactccttgctggggtcgcctgtctccggggaattggaaggtggactaacccacagtaccggcagttcattactattctggaagcaacgcaccgcaaccagtcatctgaaaataagaggcagcttgccaactataacttcgactttagatcgtggcctgttgattttcattgggaggagcctagttctaggaaggagtccagagggggaccttcaagacgcggagtggccttactacgaccagaaccactgcaccgaggcaccgccgatacgctcctcaaccgggtgaagaaactcccctgccagataactagctacctcgtggctcacacactgggaagacgcatgttgtacccgggatccgtgtatctcttgcagaaagcactcatgcctgtgctacttcaagggcaggcacggctagtggaggagtgtaatggacgcagagctaaactgctcgcctgtgacggtaatgaaattgacactatgttcgtggacaggcgaggcactgctgaacctcagggacagaagttagtgatatgttgtgaggggaacgctggcttctatgaggtggggtgtgtgtctacaccactggaggctggctactccgttctgggctggaatcatccgggatttgcaggatctacaggtgtgccctttcctcagaatgaagcgaacgcgatggatgttgttgttcagtttgcaatccatcgactcggcttccagccccaggacattatcatttacgcgtggagcataggcggattcactgccacctgggccgctatgtcctaccctgatgtatccgctatgatcttggacgcgagctttgacgacctggtgccgctggctttgaaagtcatgcccgactcatggcgcggactggtgactaggacagtgcgtcagcatttaaacctgaacaacgctgagcaactgtgcaggtaccaggggccagtgctgctcatcaggcgcaccaaagatgagattattacgacaacagtgcctgaagacatcatgtcaaaccgcggaaacgacttgctgctgaagttactgcaacaccgatatcctagggtgatggctgaagaaggcctaagagtggtgcgccaatggctggaagcgagttcacagctggaggaagctagtatctattccagatgggaggtggaggaagattggtgtttaagcgtgctgagaagttatcaagcggagcacggtccagacttcccttggtcggtaggggaagacatgagtgccgacggcaggcggcaactggcattgttcctcgcgagaaagcacctccacaatttcgaagctacgcactgtacacccctgccagctcagaatttccaaatgccatggcacctctag

SEQ ID NO: 212922 - DNA, 795 bp, synthetic construct
  misc_feature 1..795: note = Description of Artificial Sequence: Synthetic coding sequence
  source 1..795: mol_type = other DNA
atgccaccaccagccctctttctctcctccctgtaccccaggcttgagttccaaaatgatttctatcggtcctgcattcgacggtcctctccacaacctcctccaaaccttgcttggaggccagaatcactttattccggagaattggcaggcggtggctatctaagtctctcaaaggtggtgcccttctcacactatgctggcaccctgctcctgcttcttgccggagtggcctgtttacgcggtattggccgttggactaatcctcagtaccgccagtttattacaattctcgaagcaacacaccgtaaccagagctcagagaataagcgtcagctcgcaaactataattttgactttcggagctggccagtggatttccactgggaagagccctctagccgcaaggaaagcaggggcggacccagccggcgaggtgttgccctgctgaggccggaacccctacaccgtggtacagctgataccttgctgaacagggtgaagaaactaccatgtcagatcacttcctatttggtggctcacacccttgggaggagaatgctttatcccggaagtgtgtacctcctgcagaaggccttaatgccggtcttattacaagggcaggcgaggctagtggaagagtgcaacggaagaagggccaaacttctggcttgtgatgggaatgaaattgacacaatgttcgtcgataggcgcggaaccgccgaaccacagggccagaagttggtgatttgctgtgagggcaacgccggattttacgaggtcggatgcgtctag

SEQ ID NO: 212923 - DNA, 795 bp, synthetic construct
  misc_feature 1..795: note = Description of Artificial Sequence: Synthetic coding sequence
  source 1..795: mol_type = other DNA
atgccacctccggctttgttcctctcctctctttacccgaggttggaattccagaatgacttctatcgttcctgtatacgacgtagttctccccagcctccacctaatctcgcctggcggcctgaaagcctgtacagcggcgaactggctggagggggttacctctccctttctaaagtggtgcctttttcccattatgctgggaccctactgctgctcctggctggcgtggcgtgtctcaggggaattggcaggtggacaaatcctcagtatcgccagtttatcacgattctggaagccacccacagaaatcaatcctcagaaaataaacggcagctggccaattacaatttcgactttcgttcttggcccgtcgacttccactgggaggagccctcttcccgcaaggagtccaggggtggtcccagcaggcgcggtgtggccctgctcagacctgaacccctccaccgtggcactgctgacactctactgaatcgcgtgaagaagctcccctgtcaaattacctcatatctggtcgcccacactctgggcagaagaatgttgtaccctggttcagtgtacttgttgcagaaggcacttatgcctgtgctccttcaggggcaggctagactcgtagaggagtgcaacggcaggagagcgaagctgctggcctgtgatggaaatgagatcgacactatgttcgtggacagacggggaactgctgagccgcagggccagaagctagtcatctgttgtgaggggaatgccggattctacgaggtgggctgtgtatag

SEQ ID NO: 212924 - DNA, 795 bp, synthetic construct
  misc_feature 1..795: note = Description of Artificial Sequence: Synthetic coding sequence
  source 1..795: mol_type = other DNA
atgccccctcccgctctgttcctgtcctcgctttacccgaggctcgagttccagaacgacttttacaggtcttgcattcggcgaagctcccctcagccgccaccaaatcttgcatggcgcccagaaagtctgtattctggagaactagccggaggtggctacctgagcctgtctaaggtggtgcctttttctcactacgcaggaaccctattactcctgctggccggtgtcgcatgccttagggggatcgggagatggactaacccccaatatcgtcaatttatcaccatcctggaggcaactcaccgaaaccagtcaagcgagaacaaaagacagttggccaattacaacttcgatttcagatcatggcccgtggactttcattgggaagagccatccagcaggaaggagagtagagggggaccttcaagaaggggcgtagcactgttacggcctgaacccctccatcgaggcacggctgacacgttacttaacagggtgaagaagcttccatgccagatcacttcttacttggtggcacatacccttgggaggaggatgttataccccggttctgtgtacctgctgcagaaagcgctgatgccagtcctcctgcaaggacaggcaaggctggtggaagagtgcaacggacgccgagccaaactacttgcttgtgatggtaatgagatcgacactatgttcgttgacaggcggggaaccgcggagccacagggtcagaaactcgtcatctgttgtgagggcaacgccggattttatgaagttgggtgcgtgtag

SEQ ID NO: 212925 - DNA, 1806 bp, synthetic construct
  misc_feature 1..1806: note = Description of Artificial Sequence: Synthetic coding sequence
  source 1..1806: mol_type = other DNA
atgagtcagttggccagaagaagatcacgctacggcctgacgagtagagctcacaacactagcgaagcgggacgtgctggtccagccggtggtcccgcagccggtagagccgctgctagagccggagcgatggccaaattgttatcctgtgtgctgggacctcgactttacaaaatttacagggagcgagattccgagcgggctcctgcctcagttcctgaaacacccacagccgtgacagccccacatagctcatcatgggacacctattaccagccgagagctctcgaaaaacacgcagactctattctggcactcgcgagcgtattttggagcatcagttattattcatccccattcgccttcttctacttgtaccggaagggatatctttctctgtcaaaggtcgtgcctttctcacactacgccggtacgctcctgctactgttagccggtgtggcatgcttgagggggatcggtaggtggaccaatccccagtaccgccagtttattacaattcttgaagccactcacagaaaccaatcttcagaaaacaagcggcagctcgctaactataattttgatttcagatcctggccagtggatttccattgggaagagcctagttccagaaaagaaagtagagggggtcccagccgaagaggcgtggctctcctgcggcctgagcctctgcatagaggtacagccgacaccttgttgaatagggtcaagaagcttccatgccagataacgtcctacctggttgcccacacactaggacggagaatgctgtaccctggctcagtgtacctgctgcagaaagccttgatgccggttctgctgcaggggcaggcacggctggtcgaagagtgcaatggaaggcgagccaaattgctagcctgcgatggcaatgagatagatactatgttcgtggatagaagagggacagcagaaccccagggacagaaattagtcatttgttgtgaaggtaacgcaggcttttatgaggtgggatgcgtgtccacccccctggaggccggatattccgtcctcggctggaaccaccccggttttgccggaagtactggcgttccctttccccagaacgaggcaaacgcgatggatgtggtggtccagttcgcaatccacagactgggtttccagccacaggacattataatttatgcttggagcatcgggggtttcaccgcgacatgggcggctatgtcttaccctgacgttagtgcgatgattctggatgccagctttgacgatctggtcccccttgccctgaaagtaatgcccgactcctggagaggcctggtgacccggactgtcaggcagcatctaaatcttaacaacgccgagcagctgtgccgataccaggggcctgtgctcctgatccgacgaaccaaggacgagatcatcaccactactgtaccagaggacatcatgagcaaccgaggcaatgatcttctcttgaaactcttgcagcaccgctacccccgagtgatggccgaggagggactcagggtggttaggcaatggttagaggccagctctcagctcgaagaggcatcgatttactctcgttgggaagtggaggaagactggtgcctgagcgtcctgcgctcatatcaagctgagcatgggccagacttcccctggtccgtaggggaagacatgagtgccgacgggaggcgccaattggctctctttctcgctcgtaagcacttacacaatttcgaagccacccactgtactccgctgcctgcccagaatttccagatgccatggcacctatag

SEQ ID NO: 212926 - DNA, 795 bp, synthetic construct
  misc_feature 1..795: note = Description of Artificial Sequence: Synthetic coding sequence
  source 1..795: mol_type = other DNA
atgccacctccggcacttttcctgagttctttataccctcgacttgagttccagaatgacttctacagatcctgcattaggcgctcgagtccccaacccccacccaacctggcatggcgccctgagagtctctatagcggagagctggccggtggcggttatttgagcctgtctaaagtggtgcctttctcacactacgctggcaccctgttgcttctgttggcaggggtcgcttgtttgagaggaattggcaggtggaccaacccacagtatcgtcaatttattaccattctagaggctacacacaggaaccagagtagtgagaataagcgccaattggccaactataattttgacttcagatcctggcctgtcgactttcattgggaggaaccaagttcaagaaaagagtctaggggaggtccaagtagacggggagttgcgcttcttcggcctgaacccctgcacagggggacggccgatacccttttgaaccgcgtaaagaagcttccttgtcagattacgtcctatctggtggcccacacacttggcagacgcatgctatacccaggaagcgtgtacctgctgcagaaagcgctcatgcccgttttgctgcaaggccaggcacgccttgtggaggagtgcaatggcagacgtgccaagctgctcgcttgcgatgggaatgagatcgacacaatgtttgtggacagaagaggtacggctgaacctcagggccagaaactggtcatttgctgcgaaggcaacgctgggttctatgaagtggggtgtgtatag

SEQ ID NO: 212927 - DNA, 1806 bp, synthetic construct
  misc_feature 1..1806: note = Description of Artificial Sequence: Synthetic coding sequence
  source 1..1806: mol_type = other DNA
atgtcccagctcgcccgtcgtaggtcaagatacggactgacgagccgggctcacaatacatccgaagccggacgggcaggtcctgccggaggtcccgcagctggtcgtgcagccgctagggcaggggcaatggcaaagctcctgtcctgtgtgttgggccctcgcctatataagatctaccgggaaagagacagcgagagggcgcctgctagcgttccagaaacccccaccgctgtcacagcacctcatagcagctcctgggacacatattaccaacctcgtgcactggagaaacatgcggattccatcctggcgctggcctctgtgttctggagcatctcgtattactcctcaccatttgccttcttctatttatatcggaaaggctacctgagcctgagtaaggtggtgcccttctcccactacgccggaacccttctgttgctgctggccggagtggcatgtttgcgtggcataggcaggtggaccaaccctcagtatagacagttcatcaccatcctcgaagccactcaccgcaaccagtccagcgagaacaagcgtcagcttgcaaattacaacttcgattttaggagttggccagtggacttccattgggaggaaccaagcagcagaaaagagagtagaggaggccctagccggaggggggtggcattacttcggccagaacctttacaccgagggactgcggatacactgctgaatagagtcaagaagcttccgtgccaaattacctcttacctcgtcgcgcacactctcggacgcaggatgctgtacccgggatccgtgtacttattgcaaaaagctctgatgcccgtgttgttgcagggtcaagcgcgtctcgttgaggaatgcaacggccgacgggcaaaattattggcctgtgatggtaacgaaattgacacaatgttcgttgacagacggggtaccgcagagcctcaggggcaaaaactggtgatatgttgtgaagggaatgcagggttttatgaagtgggctgtgtttcgacacctctggaggccggatacagcgtgcttgggtggaaccatcccggatttgcaggcagtacaggggtccccttccctcaaaatgaagcaaatgccatggacgtggtggtacaattcgctattcatcgcctgggcttccaaccacaggatattataatttacgcatggagcattggaggttttacagccacctgggcagcaatgtcttatccagacgtgagtgcgatgatcctcgacgccagctttgacgatttggtgccactcgccctgaaggtgatgccagacagctggcgcggtcttgttacccgcactgtgagacagcacctgaatctaaataatgcggagcaactgtgcaggtatcagggccctgtcttgctcattagaagaaccaaagacgaaatcataacaacaaccgtgccagaggacataatgtccaatcggggaaacgacttgctgctgaaactcttgcaacaccgttacccacgggtgatggctgaagagggcctgcgtgtggtgaggcagtggttggaggcatcctcccagctagaggaagcttctatatactctcgatgggaggttgaagaggactggtgccttagcgtgttaagaagttaccaagccgagcacggtcccgatttcccttggagcgtcggagaggacatgtctgccgacgggagacggcagctggctttgtttctggcccgaaagcatctgcacaacttcgaagccacccactgtacacccttgccggcacaaaacttccagatgccatggcatctgtag

SEQ ID NO: 212928 - DNA, 795 bp, synthetic construct
  misc_feature 1..795: note = Description of Artificial Sequence: Synthetic coding sequence
  source 1..795: mol_type = other DNA
atgccccctcccgctcttttcctctcaagcctgtaccccagacttgaattccagaacgatttctatcgatcctgtatccggaggtcgagcccccagcctccaccaaatcttgcttggcgtcctgagtccctctattcaggcgagcttgctgggggtggttacctcagcctgagcaaggtcgtgccattcagccactatgccggaactctgctcctgctgcttgctggcgtcgcatgcctccgaggcattggcaggtggaccaatccacagtacaggcaatttatcaccatactggaggccactcaccgtaatcagtcctctgagaacaagaggcagctcgccaactataatttcgactttaggtcctggccagtagacttccactgggaggaaccttctagcagaaaggaaagccgcggtggcccttcccgcaggggggtggccctcctgcggcctgagcctctgcatagaggtactgccgatacgctcttgaatcgagtcaaaaagttgccttgccagatcacatcctacctggtggcccataccttggggaggagaatgctgtacccagggtccgtctatcttttgcaaaaggcccttatgccggtcctgctacagggccaagctcgactggtggaagagtgcaatggaagacgcgctaagttgctggcctgtgatggtaacgaaattgacaccatgtttgtggaccggcgtggcaccgctgagccacagggccagaagctggtaatttgctgcgagggtaacgccggattttatgaggtgggctgtgtgtag

SEQ ID NO: 212929 - DNA, 1806 bp, synthetic construct
  misc_feature 1..1806: note = Description of Artificial Sequence: Synthetic coding sequence
  source 1..1806: mol_type = other DNA
atgagtcagcttgcacgccgacgatctaggtacgggctcactagcagggcacacaacacaagcgaagcagggagagccggacccgcaggtgggcctgctgctgggcgtgcagccgcaagagctggcgcaatggctaaactgctgtcctgtgtgctcggacctcgcttgtacaagatctacagagagcgagattcggagcgggctcccgcttccgtgcccgagacaccaactgcagtgacagccccacacagcagttcatgggacacttactaccagccaagagcacttgaaaagcacgccgatagcattcttgctctcgcgtccgtcttctggagcatttcttattactcctcacctttcgcatttttttacctgtaccgcaagggttacctttccctgtcaaaggtcgttcctttctcacactatgctggcactctgctcctgttgctggccggtgtggcctgtcttcgcggaattggacgttggacaaacccacagtataggcagttcattacaatcctggaggctacccatcgaaaccaatcttccgaaaacaaaaggcagctcgccaactataatttcgattttcgctcctggccagttgactttcattgggaggagccgtctagccggaaagagagtcgaggaggcccttcccgtcgtggcgtggccttgctgcgacctgaacctctgcatagaggcaccgccgatacactgttgaatcgcgtgaagaagttaccgtgtcagatcaccagctacctcgtagcccataccttggggaggagaatgttgtaccccggttctgtgtatctgctgcagaaggcccttatgcccgtgctgctgcagggccaagctagactggtggaggagtgtaacgggagacgtgcaaaactgctggcttgtgatggaaacgagatcgatacaatgtttgtggacaggagaggcacagccgagcctcaggggcagaaacttgtcatatgttgcgagggtaatgcgggtttttatgaagtgggctgcgtgtccacaccattagaagcagggtatagcgtcctggggtggaatcatccagggtttgctggaagcactggggtaccattcccacagaatgaagcaaatgccatggacgtagtagtccagttcgccattcaccgcctgggatttcagcctcaggacataatcatctacgcatggtctatcggaggcttcacggccacatgggctgctatgtcttatccagacgtgagtgcaatgattctcgacgcatcatttgacgatctggttcctctcgctcttaaagtgatgcccgacagctggcgcggtctggttacacgcaccgtgcgccagcatctgaacctgaataacgccgagcagctgtgtaggtatcaaggcccagtactgctgatccgtcgcaccaaggacgagatcatcaccaccactgtgcccgaggacattatgagtaacaggggcaatgatctgttgctcaagttactccaacatagatacccaagagtcatggcggaggaaggactgcgcgtggtgaggcagtggttagaggcttcctctcagttagaggaagctagcatctactccagatgggaggtggaagaagattggtgcctgagtgtgctccggtcgtaccaggctgaacatggacccgactttccatggagcgtcggagaagatatgagtgctgatgggcgacggcagctggctctgttcctcgcccgaaagcacctgcacaactttgaagccactcactgcaccccactgcctgcacagaatttccaaatgccttggcatctttag

SEQ ID NO: 212930 - DNA, 795 bp, synthetic construct
  misc_feature 1..795: note = Description of Artificial Sequence: Synthetic coding sequence
  source 1..795: mol_type = other DNA
atgcctccgcctgccttgttcctatctagcctctacccccgacttgagttccagaacgacttttataggagctgcattcgcagaagctctcctcagcctccacctaacctcgcctggcggcctgaatctttatactctggtgagctggcaggtggcggatacctgtccctgtcgaaagttgtaccctttagtcactacgccggtacactgctcctgcttctcgcgggtgtggcatgtctgagagggattggcagatggaccaacccgcagtaccgtcagttcattacaatcttagaagcaacccaccgaaatcaatcatctgaaaacaaaaggcagttggcgaattataactttgactttcgctcctggcccgtagattttcattgggaggagccgtcctccaggaaagagagtcggggaggcccaagtcgcaggggagttgcattgctaaggcccgagcccctgcaccgcggtacggcagacactctgcttaaccgcgtgaagaaactgccttgtcagattacatcatatctcgtcgcgcacactttgggcaggcggatgctgtaccctggatccgtgtacctcctacaaaaggcgctcatgcctgtgttgctgcagggccaggcgaggctggtggaagagtgcaacggcagaagggctaaactattagcttgcgacggaaatgaaatcgacactatgttcgtcgatcgacggggaactgccgagccacaagggcagaagctggtgatctgctgtgaaggtaacgcagggttctacgaggtcggctgcgtttag

SEQ ID NO: 212931 - DNA, 1677 bp, synthetic construct
  misc_feature 1..1677: note = Description of Artificial Sequence: Synthetic coding sequence
  source 1..1677: mol_type = other DNA
atggcaaaactgttatcatgtgtcctcggacccagactttacaagatctatagagagcgggattcggagcgcgctccggctagtgtccccgaaacccccaccgcagttacagctccgcacagctctagctgggatacttactatcagccgcgagctcttgaaaagcacgcagattcgatacttgctctggcttctgtgttctggagtatctcatattacagtagtccattcgccttcttttacctatacagaaagggctatctctcgctgtctaaggttgtcccgttttcccattacgccggtacactgttgttgctattggccggtgtggcctgtctcaggggaatcggtcgttggacgaatccacagtaccggcaattcatcacgatactggaggcaacgcaccgcaatcagtcgtctgagaacaagcgccagctagcaaactacaacttcgacttcagatcctggcccgtggactttcactgggaagaacctagcagcagaaaggaatccagagggggaccctctcggaggggagtggcactgctgagaccagaacccttgcataggggtacagccgacacgctcctgaatcgagtgaagaagcttccctgccagataacgtcttacctggtggcacacacattgggcagacgcatgctttaccccggtagcgtctacctcctgcagaaagccctgatgcctgttttgctgcaaggacaagctaggcttgtggaagagtgtaatggtcggcgagctaaactcctagcgtgtgacggcaatgagattgacaccatgttcgtggatagaagagggactgccgagccccaagggcagaaactagtgatttgttgcgaggggaatgccggattttacgaagtggggtgcgtgagtacgccgcttgaggccggatatagcgtcttgggatggaatcatccaggattcgcaggaagtactggtgtccctttccctcagaatgaagccaacgccatggatgtcgtggttcagttcgcaattcatcggttgggctttcaaccacaggacattatcatctatgcctggagcattggcggattcacagcaacatgggccgcaatgtcctatccagacgtttcagcaatgattctggacgcctctttcgatgacttagtgcccctagctctgaaagtcatgccagatagctggagaggcctggttacccgtaccgtccggcaacacttgaaccttaataacgcagagcagctctgccgctaccagggccctgtgttgctcatccgtagaactaaagacgaaattattactactaccgtccctgaggacattatgagtaatagggggaatgatttgctgttgaaactgctacagcatcgctaccccagggtcatggctgaggaaggcttgcgagtcgttaggcagtggctcgaagcgtcctctcaactggaagaggcaagcatttattccagatgggaggtggaagaagattggtgcttaagcgtgctgcgatcctaccaggccgagcacggcccagacttcccttggagcgtgggcgaagatatgagtgcggacggacgacggcagctagctctgttcttggcaaggaagcatctgcacaattttgaagccacacattgcacacctttgcccgcacagaatttccaaatgccttggcacttgtag

SEQ ID NO: 212932 - DNA, 1806 bp, synthetic construct
  misc_feature 1..1806: note = Description of Artificial Sequence: Synthetic coding sequence
  source 1..1806: mol_type = other DNA
atgagtcaactggcacggagaagatctcgatatggcctgacatcaagagcacataatacaagtgaagccggtcgcgctgggcctgcaggcggacccgcagcaggcagagctgccgctcgagccggtgccatggctaagttgctgtcttgtgtgctgggaccgaggctctataagatctaccgagaaagggattccgagagggcccctgcgtcagtccctgagacacctaccgctgtgaccgcacctcattcctcctcttgggatacttactaccagcctagagcattagagaaacacgctgacagtatattagccttagcgagcgtgttttggtccattagctactatagctcccctttcgccttcttctacctctaccgcaagggatacctgagcttatcaaaagtggtgccattctcccactatgccggtactctgctgctgcttctcgccggtgtggcatgtcttcgagggatcgggagatggactaacccacagtatagacaattcatcactatactggaagccactcatcgcaaccagtcatccgaaaataaaagacagctagccaactacaattttgactttcgcagctggccggtagactttcactgggaggaacccagcagccgaaaggagtctcggggtgggccaagcaggaggggcgttgcactgctcaggccggaaccgttacaccgtgggacggctgatacactgttaaacagggtaaaaaaacttccatgccaaattaccagctatcttgtggcacataccctgggcagaaggatgttatacccagggagcgtatacctgctgcaaaaggccttaatgccagtgttgttacaggggcaagccaggttggttgaagaatgcaacggtcgtcgagccaaactgttggcttgtgacggaaacgagatcgacacaatgttcgtagataggcggggaacagccgagccccaaggtcaaaaactggtgatttgttgtgagggcaacgccggattttacgaggtgggatgtgtgagtacacctttggaggctggttacagtgtcctgggctggaatcatcctggcttcgccggtagcaccggagtgcccttcccccagaatgaggccaatgccatggatgtggttgtccagtttgccattcatcgtctcgggttccaacctcaggatatcatcatttacgcttggtcaattggcggttttaccgctacatgggctgcaatgtcatacccagacgtgtccgctatgatcttagacgctagctttgatgatcttgtgccactggccttgaaggttatgccagactcctggcggggactcgttactcggacggtaagacagcatctgaacttgaacaacgcagaacagctctgcagataccaggggccagttctgctgattcgcagaaccaaggatgaaataataaccacaaccgtgccagaggatatcatgagtaacaggggcaatgatctgctcttgaagttgctgcaacaccgataccccagggttatggcagaggaggggttgcgggttgtgcgacagtggttagaagcctcctctcagctagaagaggcttccatctatagccggtgggaggtagaagaggactggtgcctgtcagtcctgagatcatatcaggccgagcacggccctgacttcccatggtctgtaggcgaagatatgagtgcagatggtcggcgtcagctcgccctgttcctagcgaggaaacatctacacaacttcgaagcgactcattgtacgcccctgcctgctcaaaattttcagatgccctggcatttatag

SEQ ID NO: 212933 - DNA, 438 bp, synthetic construct
  misc_feature 1..438: note = Description of Artificial Sequence: Synthetic coding sequence
  source 1..438: mol_type = other DNA
atgttggggcattgctgctacttctggcaggtatggcccgctagcgaagcgcttgcggcagggcctacaccctccaccggaagttccagccccagctggaaacagcatataggaactagtctccagaagactaggggttccctccctacgacaaccctaacctcgggtgcaggccaaagcacttcaactggcaagaaccccgctgccggtcgcagcctcgagggagcgctccctgccggagtatggccatgctttgcgcagagcccatgcacagggggacaacagacgccaagcagcaccggactgcgtagttgtctggtgagaagccctggtggcaagcagcagagaggggaagctcattggggcggtggtgccatatcgggtgtgctttgggaatgggcgctccactgcaagattgccgtcacacattgggcatag

SEQ ID NO: 212934 - DNA, 1677 bp, synthetic construct
  misc_feature 1..1677: note = Description of Artificial Sequence: Synthetic coding sequence
  source 1..1677: mol_type = other DNA
atggccaagctgctgagctgtgtcctgggtcccaggctgtacaaaatctatagggaaagggattctgaacgggctccagccagcgtgcccgaaacacccaccgcggtgacagcaccgcatagcagttcatgggacacctattaccagccaagagcattggaaaagcatgctgatagcattctggcactggcgtccgtgttttggagtatctcctattacagctctcccttcgcctttttttatttgtatagaaaggggtatctctcactgagtaaggtagtgcctttctcacactatgccggtacactgctgttactcctggccggagttgcctgccttcggggaatcggtcgttggaccaacccacagtacagacagtttattaccatcttagaggctacacaccgcaatcagagctccgagaacaaacgtcagttagccaactacaacttcgatttccgatcctggccagttgactttcattgggaggaaccgagctcccggaaggaaagccggggaggccctagtcgcagaggagtggctctgctcagacctgagcccttgcatcgcggtacggccgatacccttcttaatcgagttaaaaagctgccatgccagatcacctcctatttagtcgcccacacactagggcgtcgaatgctgtaccccggatccgtgtacctgctgcagaaagctttgatgcctgtactgttacaggggcaagccagattagtggaggaatgcaatggccgtagggctaagctgctcgcctgcgatggaaacgagattgacacgatgttcgttgacagaaggggtaccgcggaaccccagggccagaaactggtgatctgttgcgaaggtaacgcagggttctatgaagtaggatgcgtttctacccccctagaggctggatactctgtcctcggctggaatcacccagggtttgccggttccacaggcgtcccttttccccagaatgaggcaaatgccatggacgtagtggtccagtttgcaatacatcgactggggtttcagcctcaagacattatcatctacgcatggtcgattggcggattcactgctacttgggctgcaatgagctacccagacgtttccgcaatgattctcgatgcctccttcgacgacttagtccccctagctctaaaggtgatgccggattcttggcggggacttgtgactcggaccgtgcgtcagcacctgaatctcaacaatgccgagcagctttgtcgctatcaaggaccagtcctgctgatcaggcgtacaaaagatgagatcattaccactacagtccctgaagatatcatgagtaaccgtgggaacgatctgttgctcaagctcttgcagcacagatatccaagggtgatggctgaggagggccttagagtggtgagacagtggctagaagcgtcaagtcagctcgaggaagcctctatctactctcgctgggaggtggaagaagattggtgtctcagcgttctgcgcagctaccaggctgaacacggacctgatttcccctggtccgtaggagaagacatgtctgctgacggacgcagacaactggcactcttccttgctcggaaacaccttcataacttcgaggcaacacactgcacacctctgcccgcacagaacttccagatgccttggcatctgtag

SEQ ID NO: 212935 - DNA, 1677 bp, synthetic construct
  misc_feature 1..1677: note = Description of Artificial Sequence: Synthetic coding sequence
  source 1..1677: mol_type = other DNA
atggctaagctgctctcatgtgtcctcggaccacgcctgtacaaaatctacagagaaagggattccgaaagggcccctgctagcgtccccgagacacccacggccgttactgcccctcattcaagctcctgggatacatactaccagccaagggcccttgaaaagcacgctgacagtattctcgctctggccagtgtcttctggtcaatatcatattactcttctcccttcgcatttttttacctctatcgcaaggggtacctgtctctcagcaaggtggtgcccttttctcactacgcaggtaccctgctgctgctgctcgccggtgtggcatgtctgaggggaataggcagatggaccaatccacagtatcgacagttcataacgatacttgaggccacacatcgaaaccagagttctgagaataaacggcagttggctaattataattttgatttcagatcttggccggtggacttccactgggaggaaccgtcctccaggaaagaaagcaggggcggaccctccaggcggggagtggctctcctgaggcctgaaccattgcaccggggtacagccgacactctgctgaacagagtgaaaaagctgccttgtcaaattacatcatatttagtggcacatacattgggcaggaggatgctttatcctgggtctgtttatttgctgcagaaagccctcatgcccgttctccttcagggacaggctcgacttgtggaagagtgtaatggcagaagagccaaactgctcgcttgcgacggtaatgaaattgatacaatgttcgttgaccgtagaggtactgccgagcctcaggggcagaaactcgtgatttgttgcgaaggaaacgcagggttctacgaggtcggttgcgtcagcactccattggaagctggttactcagtcttgggctggaatcaccccggattcgccggttccactggcgtccccttccctcagaacgaagctaacgctatggatgtggtagtccagttcgcaatccaccgactgggatttcagcctcaggatattatcatctatgcttggtcgatcggcggttttaccgccacatgggctgccatgtcgtatcctgacgtgtcagccatgatcttggacgcaagtttcgatgacctcgtgcctctagccttgaaggtgatgccagattcatggcggggattagtgaccaggaccgtccgtcaacatctgaatctcaataacgcagagcagctgtgccggtatcagggtcctgtgctgttaatccgccgaacaaaggacgaaataattaccaccaccgtgcctgaagacatcatgagcaaccgcggtaacgaccttctcctgaagttactccagcacaggtatccaagagtgatggccgaggagggacttcgggttgtccgccaatggctggaagccagctcccaactggaagaggcgagcatttactctcgttgggaggttgaggaggactggtgcctctctgttctcaggtcgtaccaagccgaacacggtccagacttcccctggagtgttggagaggatatgtctgcggatgggagacggcagctggctctgtttttggccagaaagcaccttcacaatttcgaagccactcattgtactcctttacccgcacaaaacttccagatgccttggcatctgtag

SEQ ID NO: 212936 - DNA, 1677 bp, synthetic construct
  misc_feature 1..1677: note = Description of Artificial Sequence: Synthetic coding sequence
  source 1..1677: mol_type = other DNA
atggcaaaattattgagctgcgttctgggccctaggttatacaaaatttatagagaacgagatagcgaaagggctcccgcttcggtgcccgaaaccccaaccgcagtgacagcgccacactccagtagctgggatacatactatcaacccagggccctagaaaagcacgccgatagtatcttggccctggcgtcagtattttggagcatttcgtattactcctccccctttgcattcttttacctctataggaaaggatacctctcactcagcaaggtcgtgccgttctcgcattacgccggtaccctgctgctgctactggcaggcgtcgcttgcctgcgaggaataggtcgctggaccaaccctcagtaccgccaatttataactattctggaagcaacccaccgtaaccagtcttccgagaacaaacggcagctcgccaattacaacttcgacttccgatcctggcccgtcgacttccattgggaggagcctagctccagaaaagagagccgaggcggaccctcacgccgtggagtcgctctcctgaggcctgagcctctgcataggggaacagctgacaccctcctgaatagagttaaaaaactcccctgtcagatcacctcatatctcgtggcacacactctgggtagacgcatgctgtaccctgggtctgtgtacctgctccagaaggccctgatgcccgtgctgctccagggacaggccagattagtggaggagtgcaatggcaggagagcaaagctattagcttgcgacggtaacgagatagacacgatgttcgttgaccgccgtggcactgcagagcctcagggtcaaaaactggtcatctgctgtgaggggaatgccggattttacgaagtgggttgtgtgagtaccccactggaggcaggctacagcgttttgggatggaatcaccccggtttcgctgggtctaccggggtccctttcccccagaatgaagctaatgctatggatgtggttgtgcaattcgcaattcacaggctgggcttccagccacaggatatcattatttacgcttggagcattgggggattcaccgcaacatgggctgctatgtcctaccctgacgtttcagctatgatcctcgacgctagctttgacgatctagtacccctggcactaaaggtgatgcctgatagctggaggggtctagtgacgagaacagtgcgtcaacacctaaacctgaataatgctgaacaactttgtcgttaccagggcccagtgctgttgatcagaaggacaaaggacgagattattacaacgactgttcctgaggacatcatgagtaataggggaaacgacctgctcctgaagcttctccaacacagatacccccgagtgatggccgaggagggcttgagagtcgtgcgtcaatggttggaggccagcagccagctcgaggaagcttccatttactccaggtgggaagtggaggaggactggtgcctgtctgttcttcgtagctaccaggctgagcacggccctgacttcccctggtccgtcggggaggacatgagcgccgacgggcgtagacagttggctctatttcttgccagaaagcatctgcacaactttgaagcaacgcactgcacccctctcccagctcagaatttccagatgccgtggcacctttag

SEQ ID NO: 212937 - DNA, 438 bp, synthetic construct
  misc_feature 1..438: note = Description of Artificial Sequence: Synthetic coding sequence
  source 1..438: mol_type = other DNA
atgcttgggcactgctgctacttttggcaggtttggccagcctcggaggctctggctgcagggccaaccccttccactggctcctcctctccttcctggaaacagcatatcggcacctcattgcagaagacaagaggaagccttccaacaactacgttaacctctggggcaggccaaagtacatcaacaggcaaaaaccccgcagctgggcgaagtctcgagggcgcacttccggctggcgtctggccttgtttcgcccagagcccttgtacgggcggacagcaaaccccttcaagcacaggattgaggtcctgtcttgttagatcacctggcggaaagcaacaaagaggggaggcccactggggaggaggagctatctccggagtgctctgggaatgggctctgcactgcaagattgctgttactcactgggcttag

SEQ ID NO: 212938 - DNA, 438 bp, synthetic construct
  misc_feature 1..438: note = Description of Artificial Sequence: Synthetic coding sequence
  source 1..438: mol_type = other DNA
atgcttggccattgttgttacttttggcaggtgtggcctgcgagtgaagccctcgcagctggaccaacccccagcacaggcagttcttctcccagctggaaacagcacattggaacctcattgcagaagacgagaggatccctgcccactaccaccctgaccagtggagcaggccagtccaccagtactggcaaaaatccagcagccggaagatcgcttgaaggcgcactaccagccggagtatggccatgcttcgctcaaagcccatgcacgggagggcagcagaccccttcctccaccggcctgcgaagctgtcttgtgcggtccccagggggtaagcaacagaggggggaagctcattgggggggaggggctataagtggagtgctgtgggaatgggctctgcactgtaagatagccgtcacccattgggcttag

SEQ ID NO: 212939 - DNA, 438 bp, synthetic construct
  misc_feature 1..438: note = Description of Artificial Sequence: Synthetic coding sequence
  source 1..438: mol_type = other DNA
atgcttggccactgctgttatttttggcaggtctggccagctagtgaggccttggcagctgggccaactccaagcacagggagctcttctcccagctggaagcaacacatcggaacctcactgcagaaaactcggggatccctgcctacaaccacgctcacctctggagctggccaaagtacctcaactggaaagaaccccgctgcaggccgttccctggaaggagccctcccagccggtgtttggccctgttttgcgcagtcgccatgcactggcggtcagcagactccatcgtctacgggcctccgtagctgtctggtgcggagccctggtggcaagcaacagcgcggagaggcccattggggaggcggagcaatcagtggggtcttgtgggaatgggctctgcactgtaagatcgccgtgacacactgggcatag

SEQ ID NO: 212940 - DNA, 1578 bp, synthetic construct
  misc_feature 1..1578: note = Description of Artificial Sequence: Synthetic coding sequence
  source 1..1578: mol_type = other DNA
atgcctcctccggcactctttctctcgtccctttatccacgacttgagtttcaaaatgatttctatagaagctgtattaggagaagtagtccccagccgcctccaaatctggcttggaggcccgaatcactctattccggagagttagcgggaggcggatacttgtctctgagtaaagttgttccattctcacactacgcagggactctgctcctccttttagcgggtgtggcctgtctcaggggcattggccgttggacaaacccccagtacaggcagttcatcaccattcttgaggctacacataggaaccagagcagcgagaataagaggcagctggcaaactataatttcgactttagatcctggccagtagatttccactgggaagagccttcaagccgaaaggaatcaagagggggaccttcccgacggggtgtggcgctgttgaggccagagcctctgcatcgtggtactgccgatacattgctgaaccgcgtcaaaaaactcccttgtcagatcacgtcatacctcgtggcccatacgttaggcagaaggatgctgtatcctggtagcgtctatcttctccagaaagctctcatgcccgtacttctgcaaggacaggcgcgattggtggaggaatgcaacggcagacgggctaagttactcgcatgcgatggcaatgagattgataccatgtttgtcgatcggcgagggaccgccgagcctcagggccagaaactcgttatttgctgtgaggggaatgcgggattttatgaagtaggatgcgtgtccaccccgctcgaggctggctatagtgtgctgggatggaatcatcccggatttgccggaagcacaggtgtgccattccctcagaacgaggcaaacgccatggatgttgtggtccagttcgctattcatcgcctgggttttcagccacaggatatcattatctacgcatggtccatcggtggcttcacggcaacttgggctgccatgagctaccccgacgtgagtgccatgatcctggatgctagctttgacgacttagttcccctggccctgaaggtgatgcctgacagctggcgcggtctggtcacaaggaccgtgcggcaacacctgaatcttaacaatgcagagcagttgtgcaggtaccaggggcctgtgctcttgatccgaagaacaaaagacgagatcatcactaccaccgttcctgaggatattatgtcgaatcgcggtaatgatctgcttttaaagctactccagcatcgttatccgagagttatggctgaggaaggtctgcgggtggtgagacaatggcttgaagcctccagccagctcgaagaggcttccatctatagcagatgggaggtcgaggaagactggtgcctgtctgtgttgcgaagctaccaggccgagcatggcccagacttcccttggtctgtgggcgaggacatgtccgccgacggacggaggcagctggctctttttctggccaggaagcatctccacaatttcgaagcgactcactgcacacccctccccgctcagaacttccagatgccgtggcacctttag

SEQ ID NO: 212941 - DNA, 1677 bp, synthetic construct
  misc_feature 1..1677: note = Description of Artificial Sequence: Synthetic coding sequence
  source 1..1677: mol_type = other DNA
atggcaaaattactgagctgtgtgctcggaccaaggctgtataagatctaccgagagcgggactctgagagggccccagctagcgttcctgaaacgccaacagccgtgactgctccacatagctcttcttgggatacctactaccagccccgagccctagaaaagcacgccgattctattctggctttagcctccgtgttctggagcattagctattatagcagccctttcgctttcttctatctgtacagaaaaggatacctcagcctgtctaaagtagtgccgttttcgcactacgctgggactctacttctgctactggccggagtcgcatgcttaagaggcatcggcaggtggacaaatccacagtataggcagttcatcacaatcctggaggctacccatagaaatcagtccagcgagaacaagcggcagctggccaattataactttgatttccggagttggccagtggacttccactgggaagagccaagcagccgtaaagagagccgtggcggaccttcccggaggggcgttgctctgctcaggccagagccactgcacaggggtaccgccgatacactgctgaatagggtcaagaagctgccctgtcagatcacatcctacctcgtcgctcacaccttggggagacgtatgctgtatcccggttctgtgtacctgttacagaaagcactcatgcctgtgcttctccagggacaggctcgcctcgtggaagaatgcaatggacgcagggccaagcttctcgcctgcgatggaaatgaaatagatacaatgtttgtggatcgccgtggcacagccgaaccacaaggacagaagctagtaatttgttgcgaaggcaacgcaggattttatgaagtcggatgtgtcagcactccccttgaagccggttactctgttctcggctggaatcacccaggctttgccggttctaccggcgttccctttccccagaacgaagccaatgcaatggatgttgtcgttcaatttgccatccatcgtcttggctttcagccacaggacatcatcatttatgcctggtcgattggagggtttacagccacatgggctgctatgagctaccccgacgtgtctgcaatgatccttgatgcttccttcgacgatctcgtgcccctggctctgaaagtgatgcccgacagttggagaggcttagtgactcgcacagtacgccagcacttaaacttgaacaatgccgaacagctgtgccgctaccagggccctgtgctgctgattcgacggacgaaggatgaaatcatcactaccactgtcccagaagacattatgagcaacagaggtaatgatttactgttgaagctgctccagcataggtatccgagggttatggccgaagagggcctgagagtggtcagacaatggctcgaggccagttcccagctggaagaggctagcatatactccaggtgggaggtggaggaggattggtgtctctctgtgctccgctcttaccaggccgaacatggtccagactttccatggtccgtcggggaggatatgtccgcggacggtagacggcaactggcactattcctagcgagaaagcatctgcataactttgaggccacccactgtaccccactcccagctcagaatttccagatgccctggcacctatag

SEQ ID NO: 212942 - DNA, 1578 bp, synthetic construct
  misc_feature 1..1578: note = Description of Artificial Sequence: Synthetic coding sequence
  source 1..1578: mol_type = other DNA
atgcccccacctgccctgttcctgtcctctctttatccgagactcgagtttcaaaatgacttttatcgctcttgcattaggcggtctagtccccagccccctcccaatctcgcctggaggcctgagagtctgtactccggggaactcgcaggcggaggttacctctccctctcaaaagttgttccatttagccattacgccggaacattgttgttgttattggcaggcgtcgcctgcctccgtgggatcggcagatggaccaatccccagtacaggcaattcattaccatcctggaggccacacaccgcaatcagtcatctgaaaacaaaaggcagctcgcaaattacaactttgacttccggtcttggccggtggacttccactgggaagagccttccagcaggaaggagtcccgaggtggaccatcccggagaggagttgcactgttaagaccagaaccactgcaccggggaacggcagatacgctgctcaatcgggttaagaagctgccatgccaaattaccagctacttagtcgcccataccctcggcagaagaatgctttaccctggatccgtgtaccttctacagaaagcgctgatgcctgtgctcttgcaggggcaggcaagacttgtggaagagtgtaacggaaggcgcgctaaactgctggcatgtgatggcaacgaaatcgacaccatgttcgtggatcgtaggggaacggcagaaccccagggccagaaattggtcatctgttgtgagggcaacgcaggtttctacgaggtggggtgcgtctcgacgccgctcgaggcaggatacagtgtcttaggctggaaccaccctgggttcgctggcagcaccggagttccttttccacaaaatgaggccaacgcaatggacgtagtggtgcaatttgcgatccaccgactgggatttcagccacaagacataataatctatgcttggtctatcggcggttttactgccacatgggccgctatgtcatatccggacgtttcagccatgatcttggacgccagctttgatgacctagtgcctctcgcactcaaggtgatgcctgactcctggagggggttagtaacgaggacggttcgacaacatttaaacctgaacaacgcggaacaactttgtcgctatcaggggccagtgcttctaatccgcaggacgaaagacgagataattaccaccactgtacccgaagacatcatgagtaatagggggaacgacctgctgcttaaactactacagcaccgctatccccgagtgatggccgaggaaggcctgagagtggtgagacagtggctagaagcatctagccagctggaggaggccagtatctattctagatgggaagtggaggaagactggtgtttatcggtccttcgatcctaccaagccgagcatggcccagacttcccctggtccgtaggtgaagacatgtctgccgacggaaggaggcagctcgcgttattcctggcgagaaagcacctgcacaactttgaggctacccattgtacccctctccctgcccagaactttcagatgccatggcatctgtag

SEQ ID NO: 212943 - DNA, 1578 bp, synthetic construct
  misc_feature 1..1578: note = Description of Artificial Sequence: Synthetic coding sequence
  source 1..1578: mol_type = other DNA
atgccacctcctgctcttttcctctcttccctttatccaaggctggagtttcagaacgacttctaccggtcttgtatccggagatcttccccccagccacctcccaacttagcatggagacccgagtccctatactcaggagagctggccggtggagggtacctgtccctttcaaaagtcgtgcccttttcacactatgccggtaccttactgttgctgctagcaggtgttgcctgtctcaggggcatcggacgctggacaaatccgcagtaccgacagttcattaccatcttggaggccactcatcggaatcagagcagtgagaacaaacgccaactcgcgaactacaacttcgacttcaggagctggcctgtcgattttcactgggaggaaccctcaagcagaaaggagtcccgtggcggaccctctcgcagaggggtggcactcttgcggccagagcccttgcatcggggtacagcggacactctgctaaaccgcgtcaagaagttgccttgccagattacaagctacctagtcgcccataccctggggaggcggatgctgtaccccggaagtgtctatctcctccagaaggcattaatgccagtgctgctgcaaggacaagcaagacttgtggaagagtgtaatgggaggcgggctaaactgctggcatgtgacggtaatgaaattgataccatgttcgtggatagacggggaacagcagaaccccaaggccaaaaactggtcatttgctgcgaaggaaacgctggtttctatgaagtcgggtgcgtctccactccgctggaggcagggtactctgtgctagggtggaatcaccccggtttcgccggatcgactggcgtgcccttcccccagaacgaagcgaacgccatggacgttgtagtccaattcgccatccacagattaggcttccagcctcaggacatcatcatctatgcttggtcaatagggggattcacggccacctgggcggctatgtcttaccccgacgtgtctgcaatgatccttgacgctagcttcgacgatctggtacctctggcactgaaagtgatgcccgacagctggcgagggctcgtcactcggaccgtaagacagcatctgaatttgaataacgcagaacaactgtgcagataccagggacctgtcctcctgatccgtcggaccaaggatgaaatcattaccaccactgtaccggaggatataatgtcaaatcggggaaatgatctcctgctgaaactattacagcaccggtaccccagagtcatggccgaagaggggctgagagtcgtgagacagtggttggaggcctccagccagctggaagaggccagcatctatagcaggtgggaagtagaggaagactggtgcctctcagttcttaggagttatcaggctgaacatggacctgacttcccgtggagcgttggcgaagacatgagcgccgacgggaggcgtcagctggctctcttcctggccagaaagcatctgcacaactttgaggccacacactgtacgccgctccccgcacagaatttccagatgccctggcacctctag

SEQ ID NO: 212944 - DNA, 438 bp, synthetic construct
  misc_feature 1..438: note = Description of Artificial Sequence: Synthetic coding sequence
  source 1..438: mol_type = other DNA
atgctcgggcactgttgttatttttggcaggtatggccagcgagtgaagcactggcagccggacctacaccctcaacgggatcttcatcaccaagctggaaacagcatattggaacatcccttcagaagactcgcggttccctccctaccaccaccttaacctcgggagctggtcagtcaacctccaccgggaaaaaccccgcagctggacgctcccttgagggcgctctcccagctggtgtatggccgtgcttcgcacaatccccttgcaccggcggacagcaaacacccagctctacaggcttacgctcatgtttggtcagatctcccggaggtaagcagcagaggggagaggcgcattgggggggtggcgcaatctcaggcgtcctatgggaatgggcgctccattgcaaaattgcagtcacccactgggcttag

SEQ ID NO: 212945 - DNA, 1578 bp, synthetic construct
  misc_feature 1..1578: note = Description of Artificial Sequence: Synthetic coding sequence
  source 1..1578: mol_type = other DNA
atgccccctcccgcattgttcctgagttcattgtacccgaggctcgagtttcagaatgatttttacaggagctgcattagacgaagctctcctcaaccccctcccaacctggcctggcgccctgagagcctttatagtggagaactggctgggggaggatatctcagcctgtcaaaagtggttccctttagccactacgctgggacccttttactcctgctagcaggagtagcctgtctgcgaggcatcgggaggtggaccaatcctcagtaccgccaattcattactatccttgaagcaactcatagaaaccagagcagcgagaataagaggcagctggctaattacaacttcgactttcgatcttggccagtggattttcattgggaggagcccagtagccgtaaggaatcaaggggtggcccatccagaagaggcgtggccctactccgccctgagccattgcaccgcggtaccgctgataccctgctgaaccgggttaagaagctgccttgccagatcacaagctatctggtcgcccatacactgggtcggaggatgctgtacccgggaagtgtgtaccttctccagaaggctctcatgcctgtactattgcaaggccaggctaggctggttgaggagtgtaatggcaggcgtgccaagctccttgcctgtgacgggaacgagatcgacaccatgttcgtcgatcgcaggggtaccgccgaaccccagggacaaaagctcgtgatatgctgcgaaggcaatgccggtttctatgaggttggatgtgttagtacccccctcgaggccggatactcagttctcggctggaaccatcccggatttgcgggttccactggcgtgccatttccccagaatgaagccaatgccatggatgtagttgttcaatttgccattcatagattaggcttccagcctcaggatattataatctatgcatggtcaatcggaggatttacagcaacctgggccgctatgtcctatccggatgtgagcgctatgatcctcgatgccagctttgatgatctggtgccactagccctgaaggttatgcccgactcatggcggggactggtcacgcggactgtccgacagcacctgaatctgaacaatgctgagcagctgtgtcgctatcagggccctgtgctgcttattcggcgtacgaaagacgagatcattaccacaaccgtgccagaggacattatgagtaacaggggcaacgacctcctgctgaaactacttcagcatcgctatcccagagtcatggccgaagagggactgagagtggtgagacagtggttggaggccagttcccaactggaagaggctagtatctactctcggtgggaggtagaagaggactggtgcctttccgtcctcagatcataccaggcagaacacggaccagatttcccctggtcagtgggagaagatatgtcagccgacggtagaagacaactggcactgttcctcgccagaaaacatctgcataactttgaggcaacgcactgcacccctctccctgcacagaatttccagatgccgtggcatttatag

SEQ ID NO: 212946 - DNA, 1677 bp, synthetic construct
  misc_feature 1..1677: note = Description of Artificial Sequence: Synthetic coding sequence
  source 1..1677: mol_type = other DNA
atggctaaactgctgtcttgtgttctcggacccagactgtacaaaatctacagagaacgagactcagagcgggctccggctagcgtcccggaaaccccgactgcggtgactgcccctcatagttctagttgggacacttactaccagccacgggcattggagaaacacgctgactcaatcctagcgctcgcttctgtgttctggtccatcagctattattctagcccctttgcattcttctacctgtacagaaaaggatacctatccctgagcaaggtggtacccttctcccattatgctggcactctgctgttattgctcgccggagttgcctgcctacgcggaatcggtcggtggactaaccctcagtataggcagttcataacaattctcgaggccacacaccgaaaccagtcgtcagaaaataagcgccagcttgccaattacaactttgacttcaggagctggcctgtcgacttccactgggaggaaccttcctctagaaaggaaagcagggggggaccttcccggagaggggtcgcactgctgcgcccagagcccctccacaggggaactgcagatacattgctcaaccgagtgaaaaagctaccctgtcaaattacaagctacctagttgcccatacgcttggcaggagaatgctctaccccggtagtgtgtatttacttcaaaaggctctcatgcctgtactgttacagggacaggcccgactcgtcgaagaatgcaatggtcgcagggccaagctgcttgcatgcgatgggaatgaaatcgatacaatgttcgtggatcggagagggactgccgaaccccagggccaaaaactcgtcatttgctgtgagggtaacgccggattttatgaggttgggtgcgtgtctacaccactggaagccggatactctgtcctaggatggaaccacccaggatttgcaggctctacaggggtcccgtttccacagaatgaagcaaatgctatggatgtggttgtgcaattcgccatacacagactggggttccagccccaagacataattatttacgcctggtctattggaggatttacagccacatgggccgcaatgtcatatcctgacgtttctgcaatgatcctagatgcctcttttgatgacctggtgccgctggctctgaaggtcatgcccgacagctggaggggcttggttacacggaccgtcagacagcacctaaacctcaataatgctgaacagctgtgcagataccaggggcctgttctccttatacggaggacaaaagacgagattatcactacgacagtgccggaggacattatgtctaatcggggtaacgacttgctgctaaagttgctgcagcatcgctacccacgggttatggccgaggaagggctgcgcgttgtccggcaatggcttgaggccagctcacaactcgaagaagccagcatttactctagatgggaagttgaagaggactggtgcctcagtgtactgaggtcttatcaggccgagcacggccctgacttcccatggtcagttggcgaggatatgtccgcagacggccgtaggcaactcgcgctttttctggctagaaaacacctccacaattttgaggccactcattgtacacccctgccagcccagaatttccagatgccctggcacttatag

SEQ ID NO: 212947 - DNA, 1578 bp, synthetic construct
  misc_feature 1..1578: note = Description of Artificial Sequence: Synthetic coding sequence
  source 1..1578: mol_type = other DNA
atgccaccacccgcactctttttgagttccttatatccacgccttgaattccagaatgatttttacaggtcttgcattcgaaggtccagccctcaaccccctccaaatctggcctggagaccagaaagtctatactcaggggaattagcaggcggtggataccttagtctctctaaagtggtgccctttagccactatgccggaacccttctgctactgctggcaggagtcgcgtgccttagagggataggacgatggaccaacccacaatacaggcagttcattacaattctggaggccacacacagaaatcagtcgagcgagaacaaaagacagctcgctaactataattttgacttccgttcttggcctgtggactttcattgggaggagcctagctctaggaaagagtcccggggaggcccaagcaggcgcggagtggccctgctcaggcccgagcctttgcacagaggcactgcggatactctgctgaatcgggtgaaaaaactgccatgtcagatcaccagctacctggtggctcatactcttgggaggcggatgctttacccaggaagcgtgtatctgctgcagaaagcgctgatgcctgtcctgcttcagggccaggcacgcttggtggaagagtgcaatggacgcagggccaagctgctggcctgtgacggaaacgaaatagacaccatgtttgtggataggcgtggcactgccgaaccacaagggcagaaactggtaatctgctgcgaggggaatgcagggttttatgaggtcgggtgtgtgtcaactccactggaggccggttactcagttctgggatggaaccaccctggattcgctggctccaccggagtgccttttccccagaacgaagccaacgcgatggacgtcgtggttcagttcgcaatccaccggttgggcttccagcctcaggatatcatcatctacgcttggtccatcggaggcttcactgcaacctgggccgcaatgtcttaccccgacgtatctgccatgatacttgatgctagttttgatgaccttgtgcccctggctttaaaggtgatgcctgattcctggagggggctggtcacaagaacggtgcgccagcatctgaacctgaacaatgccgagcaactatgcagataccaggggccagttctccttattcgaagaactaaagacgagataatcacgaccactgtgcccgaagacatcatgagcaaccgagggaatgacctcctgttgaagcttctgcagcacagatacccaagagttatggccgaggagggacttagggtggtgcgtcaatggctcgaggcctcttctcagctagaagaagccagcatttattcaagatgggaagtggaagaggactggtgtttgtctgttctccgtagttaccaggccgagcacggccctgattttccctggagcgttggcgaagatatgagcgctgacggacgacgccaacttgcactgtttctagcacgtaaacatctgcataactttgaggcaacccattgcacaccattaccagcacagaattttcagatgccttggcatctgtag

SEQ ID NO: 212948 - DNA, 438 bp, synthetic construct
  misc_feature 1..438: note = Description of Artificial Sequence: Synthetic coding sequence
  source 1..438: mol_type = other DNA
atgctcgggcactgttgttacttttggcaggtttggcctgcatcggaggcattggccgcaggtccaacgcccagcactggctctagctcccccagttggaagcagcatataggtacttccttacagaagacgcggggttctctccctacaacgaccctgacttccggagctggacagtctacttccaccggaaagaaccccgctgccggacgtagtttggagggcgcactgcctgcaggagtgtggccatgttttgctcagagcccctgtacaggaggtcagcagacccccagtagtactgggctgcgttcttgtttggtgagaagtcccggaggcaagcagcagagaggtgaggcccactggggaggtggcgcaatatccggtgtgctgtgggagtgggccctgcattgcaaaatagcagtcacccattgggcctag

SEQ ID NO: 212949 - DNA, 1578 bp, synthetic construct
  misc_feature 1..1578: note = Description of Artificial Sequence: Synthetic coding sequence
  source 1..1578: mol_type = other DNA
atgccaccccctgccctcttcttgagtagcctttacccaagacttgaattccagaatgatttctaccgctcttgcatccggaggagttccccccagcctccccctaacctggcgtggcggccagagagtctctattccggagagctggccggtgggggttacctgagcctatccaaagtggttccatttagccattacgccggaacactcctgctcttgctggccggtgtggcctgtttgagaggcatcgggaggtggaccaatccccaatatcgccagtttatcacgattctggaggctactcaccgaaaccagtcctcagaaaataagagacagctcgctaactataactttgacttccggtcttggcccgtcgattttcattgggaagaacccagcagtcggaaagagtctcgcggaggcccatctcgaagaggcgtagctttgctcaggcccgagccacttcaccggggaaccgccgacactctgctgaaccgggtgaagaagctaccatgtcagattacttcctaccttgttgcacataccctcggcagacgcatgctgtaccccggaagcgtatacctgctgcagaaagctctgatgcctgttctactgcaaggccaggcacggcttgtggaggaatgcaatggacgacgagcgaaattactggcttgcgacgggaatgaaatcgacacaatgtttgtggatcgccgagggacggccgaaccacaagggcagaagctggtgatctgttgcgagggaaatgctggattttacgaggtgggctgcgtctcaactccactggaagccggatacagcgtgcttggatggaatcatcctggcttcgctggttccaccggggtacccttcccgcagaacgaagccaacgcaatggacgtggtggtccaattcgccatccaccgactcggatttcaaccccaggatataatcatttatgcatggtccatcggtggattcactgctacttgggcagctatgtcataccctgatgtctccgcgatgatcctggacgcatccttcgacgacctcgtccccctggcgctaaaggtaatgcctgatagctggagaggactcgtgaccagaaccgtccgccaacacctcaatctgaacaacgctgagcagctctgcaggtatcaaggtcccgtgttgctgattcggagaaccaaggacgaaatcattacaacaactgtccctgaggacattatgagcaatcgcggtaacgatctcctactaaaactcctgcagcaccgataccctcgggtgatggccgaggaggggttaagagtagtccgtcagtggcttgaagcctctagccagttggaggaagcttctatctacagtcggtgggaggttgaagaggattggtgcctgagcgtactccggagttatcaggctgagcatggtcccgatttcccgtggagcgttggcgaggacatgagcgctgatggacggagacagcttgctttgttcctggcccgaaaacatctgcataactttgaggcaacccactgtaccccactcccagctcaaaatttccagatgccctggcacctgtag

SEQ ID NO: 212950 - DNA, 438 bp, synthetic construct
  misc_feature 1..438: note = Description of Artificial Sequence: Synthetic coding sequence
  source 1..438: mol_type = other DNA
atgctcggccattgttgttacttctggcaggtgtggcccgcttccgaagcactggccgcaggaccaaccccatccaccgggagctcaagtccgtcatggaagcagcatatcggcacttctcttcagaagacacgaggctctttgccgacgaccaccctgacaagtggggctggacagtccacatccactggaaagaaccctgccgctggtcgcagcctggaaggggctctacccgcaggtgtttggccatgttttgctcaaagcccatgtacgggcggacagcagaccccatcgtccacaggtctcagatcgtgtctggttcgttcccccggtggcaagcagcagcgcggtgaggcccattggggcggaggcgctatctcaggagttctgtgggagtgggcattgcactgtaaaatagccgtgacccattgggcctag

SEQ ID NO: 212951 - DNA, 1578 bp, synthetic construct
  misc_feature 1..1578: note = Description of Artificial Sequence: Synthetic coding sequence
  source 1..1578: mol_type = other DNA
atgccgcctcccgctctgtttctgtcatcattgtatcccaggctggaattccagaacgatttttatcggtcttgtattcggaggtcctcccctcagccgccaccaaatctcgcttggcggcctgaaagcctgtacagtggagaactcgctggagggggatacctgtctctctccaaggttgtgcctttttcgcactacgccggaacactactgctcctgctggctggcgtcgcatgcctacgcggaatcgggagatggactaacccccagtataggcaatttataaccatactcgaggctacccatcgcaaccagagcagcgaaaataaacggcaactcgcaaattataactttgactttcgcagctggcccgtggacttccattgggaggaaccatcttcgagaaaagagagccgcggaggcccatcccgccgaggcgtggccttacttcgaccagaaccattgcatcggggaaccgctgacacccttctcaatcgagtgaagaagctaccttgtcagataacctcctacctcgtcgcacatacgctgggtcgacgtatgctgtacccgggatcagtttacctgctccagaaagcactgatgcctgtgctgttgcagggccaggctaggctcgttgaagagtgtaatggtagaagagccaagttgttggcatgcgacggcaatgagatcgacacaatgtttgtagataggcggggaaccgccgagcctcaggggcagaagctggttatttgctgtgagggcaacgccggtttttacgaggtgggatgcgtcagtacccccctggaggcgggatactcagtcctcggttggaatcaccccggattcgccggatcaacaggagtcccgtttcctcaaaatgaggcaaacgccatggatgttgtggtgcagtttgccatccaccggcttggcttccaacctcaggatattattatctacgcctggagcatcggaggctttacagcaacatgggccgctatgtcttacccagatgtaagcgccatgattctggacgccagcttcgatgacctggtgcccctcgccttaaaagttatgcccgatagttggaggggcctcgtcacaagaaccgttcgtcagcacctaaatctgaataatgctgaacagctgtgtaggtaccaggggcctgtgctgctgattagaagaacaaaagacgagatcatcactactacagtgccagaggatatcatgtctaataggggtaatgacttgttgttaaagcttctgcaacatagataccccagggttatggctgaagaggggcttcgtgtggtcaggcagtggctcgaggcttcatctcaacttgaagaggcctccatctattcacgatgggaggtggaggaggactggtgtctgtccgttctgcggtcctatcaggccgaacatgggcctgactttccttggtccgtcggcgaggacatgagtgcagacggcaggcgccagctggctctttttctcgccagaaaacaccttcacaacttcgaagccactcattgtacccccctcccagcccagaactttcagatgccatggcatctgtag

SEQ ID NO: 212952 - DNA, 1278 bp, synthetic construct
  misc_feature 1..1278: note = Description of Artificial Sequence: Synthetic coding sequence
  source 1..1278: mol_type = other DNA
atgaatgccatgctggaaacccccgagctgcccgctgtgttcgatggagtcaagctggcagccgtggccgctgtgctgtatgttatcgtgcgctgtcttaatcttaaatcgccgacagctccccctgatctctattttcaagattcaggattgagtcgattcctattgaaatcctgtcccctgctgacaaaagagtatatcccccctctaatttggggtaaatcaggtcacattcaaacagcactctatggaaagatgggaagggtacggtcgccacatccatacgggcatcgcaagttcatcacaatgtctgatggcgcaaccagtacattcgacctgtttgaacccttagccgagcattgcgtcggagacgatattacgatggtcatatgccctgggatcgcaaatcacagcgaaaaacagtacatccggactttcgtggattatgcccagaagaatggctatcgctgcgcagtcctcaaccatttgggagctctgccaaacatagagctgacctcccctcggatgttcacctatggctgcacctgggaatttggcgctatggtgaactatatcaaaaaaacataccccctgacccagctggttgtggttgggttcagcctgggcggaaatatcgtgtgtaagtacctgggggagacacaggcgaatcaagaaaaggtactatgttgcgtgtcagtatgtcagggatactcagccctgagagctcaggaaacatttatgcagtgggatcagtgcaggcgcttctataattttcttatggccgacaatatgaaaaagatcattctctcacataggcaggccctttttggtgatcacgtaaagaagccgcagtctttggaagacacagatctgagtcgcctgtacacagcgacctctctcatgcagatcgacgataacgttatgagaaagttccacggatacaactcattgaaagagtattatgaggaagagtcgtgtatgcgctacctgcaccgcatttacgtgccgcttatgttggtgaacgccgcagacgatcctctggtgcatgagtcgctgctgacaatcccaaaatccctgtccgagaaaagggaaaatgtcatgtttgtcctgcctctacatgggggacatttgggctttttcgaaggcagcgttttgtttcctgaacccctcacctggatggataaactggttgttgaatatgcaaatgctatttgtcagtgggaaaggaacaagctccagtgctcggacacggagcaggtggaggcggaccttgagtag

SEQ ID NO: 212953 - DNA, 1278 bp, synthetic construct
  misc_feature 1..1278: note = Description of Artificial Sequence: Synthetic coding sequence
  source 1..1278: mol_type = other DNA
atgaacgctatgctcgagactcctgagctaccagccgtgtttgatggcgtaaagttggccgctgtggctgcagtactatatgtgatagtgaggtgcctgaatcttaagagccccaccgccccacctgatttgtatttccaggattctggacttagccgcttcctcctcaaaagctgtcccctgctcactaaagaatacatcccccctttgatctggggaaaatccggccatattcagaccgcgctttatggcaagatgggtcgcgtacggtcaccacacccttacggccacaggaaatttattactatgtcagacggcgctacaagtaccttcgacctcttcgagcctcttgccgagcattgcgtgggggatgacattactatggtcatctgtccgggtatcgccaaccattcagaaaagcaatacatacgcacattcgtggattacgcccagaaaaacggctaccgatgtgccgtcctgaatcaccttggagctttgccaaacattgaactgactagccccaggatgttcacatatggatgcacatgggaattcggggcaatggttaattacatcaaaaagacctatcctctgactcaattagtggttgtcggctttagcttggggggaaacatcgtctgtaagtacctgggcgagacgcaggcaaatcaagaaaaggttttatgttgcgtcagtgtttgtcagggctatagcgctcttagagcccaagaaacatttatgcagtgggatcagtgtcggagattctacaatttcttaatggccgataacatgaaaaagattatcttatcacacaggcaggcgttatttggagaccacgttaagaaaccccagtcactcgaggacactgacctctcaagactatatactgccactagtctcatgcagattgacgacaacgtgatgcgtaaattccacgggtacaattctctgaaggagtattacgaggaggaatcctgcatgcgctacctccaccgaatctacgtgcccctcatgctggtcaacgccgctgatgaccctctggtacacgagtcattattgacaatacctaagagcttgtctgagaagagagaaaacgtgatgttcgtccttccgctccacgggggtcatctcggattctttgagggctccgtactattccctgagccactgacctggatggataagctcgtggtggagtatgccaatgctatctgccagtgggagcgcaacaagctgcagtgtagcgataccgaacaagtggaagccgacttggagtag

SEQ ID NO: 212954 - DNA, 1230 bp, synthetic construct
  misc_feature 1..1230: note = Description of Artificial Sequence: Synthetic coding sequence
  source 1..1230: mol_type = other DNA
atgcagcgcctggccatggatttgcggatgttaagccgtgagctgtctctgtacttggagcaccaggtgagggtgggtttctttggttcaggagttgggttgtctctcatcctggggttttcagtggcatacgcattctactacctttcctctatagctaaaaagccgcagctggtgaccggcggagagagctttagtcgattcttgcaagatcactgtccagtggtgaccgagacatactaccctactgtctggtgctgggagggtcgcggacagacactcttacgaccctttatcactagcaagccgccagtccaatatcgaaatgaactgatcaagaccgccgatgggggacagatctccctggactggttcgataatgataactccacctgctacatggacgcttcgacccggcctactatcctgcttttgcccggactgactggaacaagtaaggaaagttacatattgcacatgatccacctaagcgaggagctaggctaccgttgcgtggtgttcaacaataggggtgtcgccggagaaaacctgttgactccaaggacttattgttgcgccaacacagaggatctggaaacagtgatccatcatgtgcactccctttacccgtccgcaccttttctagcagctggcgtgagtatgggtggaatgttattgctcaattacctgggtaaaatcggcagcaagacccctcttatggcggctgctacattctcagtaggttggaacacgtttgcttgctccgagtcactagaaaagccactgaattggctactctttaactactatctgacaacgtgcctgcaaagctcagtgaataagcacagacatatgttcgtgaaacaggtggacatggaccacgttatgaaggcaaagtcaattcgggaattcgacaaacggttcactagcgtgatgtttggatatcagaccattgatgactactacaccgacgccagccccagcccacgcttaaagtctgtcggcatccccgtcctgtgcctgaattcagttgacgatgtcttttctccgtcccatgccatccccattgagactgcaaaacagaatccaaatgtggccctggtgcttacctcatacggcggtcatattggcttcctggagggcatctggccgagacagtcgacctatatggatagagttttcaagcagttcgtccaggcgatggttgagcacgggcacgagcttagttag

SEQ ID NO: 212955 - DNA, 1050 bp, synthetic construct
  misc_feature 1..1050: note = Description of Artificial Sequence: Synthetic coding sequence
  source 1..1050: mol_type = other DNA
atggcagcagaagaagaggaggtggatagtgcggacacaggggaaagatctggctggctgactggctggctgcctacatggtgtcctaccagtatttctcatctgaaggaagcggaggaaaaaatgctgaagtgcgtcccttgtacttacaagaaggagcctgtccggattagtaacggcaacaagatttggactctgaaattcagccacaacatctccaataaaaccccgctggttctcctgcatggcttcggcggtggacttggcctgtgggctctaaatttcggagatttatgtacaaaccgcccagtctatgcctttgacctcttaggttttggcaggagctccaggccacggtttgattccgatgcggaagaggtggagaaccaattcgtggagtccatcgaagagtggcgttgtgcccttggcttagacaagatgattttgctaggccataatctggggggtttcctcgctgcagcgtactctctaaaatacccttccagagtgaaccacctgatacttgttgaaccatggggattccccgaacgtccagacctggctgaccaggatcgacccatccccgtgtggatccgggctctgggggcagccttgacaccttttaacccactggctggtttgaggatcgcgggaccttttggtttgtcgttggtgcagagactgcggccagattttaagaggaagtatagcagcatgtttgaagacgatacagtgacagagtatatctatcactgtaatgtgcagacgccatcaggagaaaccgcattcaaaaacatgacgatcccttacgggtgggcgaagcgccctatgctccagcggatcggcaaaatgcaccccgacataccggtaagtgtgatcttcggtgcacgttcctgtatcgatggaaattctgggactagcatacagtcacttaggccgcacagttatgtgaagacaattgccatcctgggcgctggacattacgtctacgccgaccagcccgaggaattcaatcaaaaggtaaaggagatttgtgataccgtggactag

SEQ ID NO: 212956 - DNA, 1491 bp, synthetic construct
  misc_feature 1..1491: note = Description of Artificial Sequence: Synthetic coding sequence
  source 1..1491: mol_type = other DNA
atggccgagttgcagatgctgctggaggaggaaataccaagtggcaaaagggcactgatcgagtcctatcagaatttaacgagggttgctgattactgtgagaataactacattcagaggcatggtttcgccgttttactgtgtctactgagcaactcttggcctcaagccaccgacaagcgcaaagcactcgaagagacaaaggcctacacaacccagtctctcgcatccgttgcctaccagataaacgcacttgcaaacaacgtgctgcagctgctagacatccaggcatctcagttgaggcgcatggaatctagcataaatcacataagtcaaactgtggatatccacaaggagaaggttgccaggagagaaatagggatccttaccacaaataaaaacacatctcggacccataagataatcgcaccggctaacatggagagacctgtgcgctacatccgaaaaccgattgactacacagtcctagatgacgttgggcatggcgtaaaatggttgaaggctaaacacggcaataaccagcccgctaggacaggaacactctccagaaccaatccacccacccaaaaaccccctagcccaccaatgtccggtaggggcactctggggagaaacacaccatacaaaactttggagcccgtgaagccccctacagtgccaaatgactacatgacgagccccgcacggctgggatctcagcattctcctggcagaaccgcttctttaaaccaaagaccgcgaactcactcggggtcttctggcggatcaggatctcgcgaaaatagcggctccagttccatcggtataccaatagcagtccccacaccgtcccctcccacaataggccctgagaacatttcagtcccaccaccatctggcgctcctcctgccccaccattggcacccctgctgcctgtgtccacggtgatcgccgctccgggatctgcaccaggcagtcagtacggaaccatgacccggcagatctctaggcacaacagtacaacctctagcacctcatcgggcggatacaggcgcactcccagcgtgacagcccagttctctgcacagccgcatgtaaacggaggcccactctacagccagaacagtatcgccgactctccaacacctccaccgccaccaccccctgatgacattcccatgttcgatgacagtccccctcctcctccacctccccctgtggattatgaggatgaagaggcagcagtggtgcagtataacgacccttacgccgacggcgatcctgcctgggcccctaaaaattacatcgaaaaagtggttgccatctatgactacactaaagataaagacgatgaactctcattcatggaaggggcaatcatatacgtcatcaagaagaatgacgatggttggtacgagggcgtgtgtaacagagttacaggcttattcccaggcaactacgtggaatcaattatgcactataccgattag

SEQ ID NO: 212957 - DNA, 1530 bp, synthetic construct
  misc_feature 1..1530: note = Description of Artificial Sequence: Synthetic coding sequence
  source 1..1530: mol_type = other DNA
atggcagagctgcagatgttgctggaagaggaaatccccagcggcaaaagagcgctcattgaaagctaccagaatttgacccgcgtggcagactactgcgaaaacaactatattcaagccacagacaaacggaaagctctagaggagacaaaagcttacactacacaatcccttgcctcagttgcttaccagatcaacgcactcgcaaataacgtgctccagctcttggacatccaggcgagccagctacggagaatggagagcagcatcaatcacataagccaaactgtagatatccacaaagaaaaagtggctcgtcgggagattggcatactgacaacgaacaagaatacctcccgaacacataaaatcatcgctcctgcgaacatggagaggccagtgcggtacatccgcaagcctattgactacaccgtgctagatgatgtagggcacggagtgaaaaaatggcataagatcatccacggaaataaccagcctgcgaggactgggaccctcagccgaactaacccacccacccagaagcctccctcgccacctatgtccggacgagggactctggggcgaaacacaccttacaagacactagagccggtaaagccccctactgtcccaaatgactatatgacttcgcctgctaggctgggaagccagcactccccgggaagaacagctagtctgaaccagcgcccacggacacacagcggatcaagtggaggatccggcagcagagaaaactctgggtccagctctatcggcatcccgatcgctgtacccaccccttcgccaccgactattgggcctgaaaacatttcagttccccctcctagcggtgcgccaccagcccctccactcgcaccactgctcccagttagtactgtcatagcagcccctggcagtgccccaggatctcaatatgggacaatgacgcgccagatcagtagacacaactcgacaacttcttccaccagctctggtggatataggagaacaccttccgtaaccgctcagttctccgcgcaaccgcacgttaatggtggaccgctctattcacagaactccatctcgattgccccaccgcctccaccgatgccccaactgacacctcagatccctctgactggtttcgttgcccgtgtacaggaaaatattgcggactctcccactccaccccctcccccaccccctgacgacataccgatgttcgacgacagtccccctcccccacccccacccccagtggactatgaagacgaggaagccgctgttgtgcagtacaacgacccatatgctgatggcgaccctgcatgggctcctaagaactacatcgagaaggttgttgctatttacgactatacaaaggataaggacgacgagttatctttcatggaaggcgcaattatctatgtcatcaagaaaaatgatgacggctggtatgagggcgtgtgcaatcgagttacagggctctttcctggcaactacgttgaatcaatcatgcactacaccgactag

SEQ ID NO: 212958 - DNA, 1443 bp, synthetic construct
  misc_feature 1..1443: note = Description of Artificial Sequence: Synthetic coding sequence
  source 1..1443: mol_type = other DNA
atggcagaactacaaatgctgttggaagaggagatcccttcaggtaaacgggctcttattgaaagctaccagaatctaacacgagtcgccgactattgcgaaaacaactatattcaagctacagacaaacggaaagccttagaggagactaaggcctatactactcagagtctcgcttccgtggcttatcaaatcaacgccctggctaacaacgttttgcaactactcgatatccaagcatctcaactgcggagaatggagtcttcaatcaatcacatttcccaaactgtcgatatccacaaggaaaaggttgccaggagagagataggtattttgactactaataagaacacctccaggacccacaagatcatcgcgcctgcaaacatggagcggcctgtgagatatatcagaaaacccattgactacactgttctcgatgacgtggggcatggcgtaaaatggctcaaagccaagcacggtaataatcaacctgcacggacaggaacgctaagcagaactaatccacccacgcaaaaaccaccctctccacctatgtccggtcggggaacactaggtcgaaacacaccttacaaaaccttggagccggtgaagcctcctacggtccccaatgattatatgacctctcccgcaagattggggagtcagcattcccctggcaggacggcaagtcttaaccaaaggccaaggacacacagtggtagctccggcggtagcggatcccgcgagaattccggatccagtagcatcggtatcccaatagcagtgcctacaccttcaccgccaaccatagggccagctcctgggtcagctcctgggtctcagtacggtacaatgaccagacagatttccaggcacaatagcacgacctcatctacttcatccggcggatacagacgaacgccctccgtgactgcgcaattcagtgcccagcctcacgtcaacggcggacctctgtattcccagaattcaatttccatcgcccctccgcctcctcctatgccacagttaacaccgcagatacctctgaccggtttcgtggcaagagttcaggagaatattgcggacagccctacacccccaccacctccgccacccgatgacatacctatgtttgacgatagccctcctcccccacctccaccacctgtcgattatgaggatgaggaagccgcagtggttcagtacaacgacccctatgccgacggagaccccgcttgggccccaaaaaactatattgagaaggtggtggcaatttacgactacactaaagataaagatgacgaactgagcttcatggaaggggctataatatatgtgatcaaaaagaacgatgacgggtggtacgagggggtgtgcaatcgggtcacgggcttgtttcctgggaattacgtcgagagcatcatgcactacaccgattag

SEQ ID NO: 212959 - DNA, 1449 bp, synthetic construct
  misc_feature 1..1449: note = Description of Artificial Sequence: Synthetic coding sequence
  source 1..1449: mol_type = other DNA
atggctgagctacagatgttgctggaggaagaaattcctagcggtaaaagagctctgatcgagtcatatcaaaatctcacgagggtggcggattattgtgagaacaactatatccaggctactgacaaacggaaagctctagaagaaacaaaggcatataccacccagagcctggcatcagtggcctaccagatcaatgctctcgcaaacaatgttcttcagctactagatattcaagcctcacagctccgccgaatggaatcttccattaaccacatctctcagacagtcgacattcataaggagaaagtggccagaagggagatcggcatcctgacgacgaataagaatacgtcacggacacataaaatcatcgccccagccaatatggaacgcccagtacgctacataaggaaacccattgactataccgtactggatgatgtaggccacggcgtcaagaaatggcacaagattatccatggcaataatcagcccgcacgtacaggaactctgtcacggacaaacccaccaacccagaaaccgccatccccccctatgagcggcagaggtactctcggacggaatactccgtacaagactctcgagcctgtaaaacccccaaccgtgccgaatgactacatgacaagccccgctcgactgggatctcagcattcgccaggaagaacagcttccctcaaccagagacctaggacacactctggatcatctgggggatctggctcgcgggagaattccgggtcatctagtatcggcattcccattgccgtcccaaccccgagccccccaacaattggcccagccgcaccgggaagtgcaccaggcagtcagtatggtaccatgacacgccaaataagtcggcacaactctacgacttcatccacaagttctgggggttataggcgaactcccagcgtgacagcccaattctccgcacaacctcatgtgaacggtggtccgctatactctcaaaactctatctcgattgcgcctccccctccacccatgcctcagctcaccccccagatccccctaacaggcttcgtggccagagtacaggaaaacattgccgacagccctacaccaccccctccaccccctccggacgatatccctatgttcgacgactccccccctccgcctccaccaccaccagtcgattacgaagacgaagaggctgcagttgtgcagtataatgatccatacgccgacggagaccctgcctgggccccaaagaactatattgagaaggtggtggcgatttatgactacacaaaggacaaagatgatgagctttcatttatggagggcgcaattatttatgtgattaaaaaaaacgacgatggatggtatgagggggtctgtaatcgggtcaccggactgtttccaggcaattatgtcgaaagcatcatgcactatacagactag

SEQ ID NO: 212960 - DNA, 1272 bp, synthetic construct
  misc_feature 1..1272: note = Description of Artificial Sequence: Synthetic coding sequence
  source 1..1272: mol_type = other DNA
atggccgaactccagatgctcctggaagaggagattccatctggaaagcgggcacttatcgaatcctatcagaacttgacgagagttgcagactactgcgaaaataattatatccaggccacggataaacggaaggcccttgaagaaacaaaggcttatactacccagtccctcgccagcgtggcttatcagatcaatgccctggctaacaatgtgctgcagttgctggatatccaggctagtcagctgcgtaggatggagtcaagcataaaccatatcagccagactgtggacatccataaagagaaagtcgcaagacgtgaaattggcatcttgacaactaacaaaaatacctccaggacacacaagattatcgcccctgccaatatggagcgaccggtgagatatattcgcaaaccgatcgattacaccgttttggatgacgtgggccacggcgtcaagaaatggcacaagattatccatggcaacaatcagcccgcacgtacaggtaccttgtcccgtacgaacccccctacccagaaaccacctagcccaccgatgagtggaaggggaactctgggaaggaacactccatataagactttggagcccgttaagcctccaactgttcccaacgattatatgacttcccctgcccgactcgggtcccagcatagtcctgggaggacggcctccttgaaccaaagaccaaggactcactcaggcagcagcggtggcagcggctccagggaaaacagcgggagttcgagcatcggaatcccaattgcagtaccaacaccctctcctcccacaattggtcctgtcagcatagctccacctcccccacccatgcctcaattaactcctcaaataccactcacaggatttgtagccagggtacaggaaaacatcgctgattccccaaccccgcctccaccaccccctccagacgatatcccaatgttcgatgatagccccccaccacctcccccacccccagtcgactatgaggatgaggaagctgctgtcgttcagtacaacgacccatacgcagacggggatcccgcatgggcaccgaaaaattacatcgagaaggtggtggcaatttacgactatactaaggacaaggacgacgaactgtcttttatggagggcgctatcatttatgtgatcaagaagaatgatgacggctggtatgagggggtgtgcaaccgagtaactgggctctttccgggtaattacgtcgagtcgatcatgcactataccgactag

SEQ ID NO: 212961 - DNA, 1359 bp, synthetic construct
  misc_feature 1..1359: note = Description of Artificial Sequence: Synthetic coding sequence
  source 1..1359: mol_type = other DNA
atggccgaactccaaatgctgctggaagaagagataccttccgggaagagggcccttattgagtcctaccagaatctaacccgagtcgctgactactgcgaaaacaactatatccaagctaccgacaagcggaaggccttggaagagaccaaagcttacacgacccaaagcctcgcgagtgtcgcttaccagatcaacgcgctggcaaataatgttctgcaattgcttgatatccaggcctcccaactccgacggatggagagttccattaatcatattagtcagacagtggacatacataaggagaaagtcgcgcgacgagaaatcggcatactcacaaccaataagaatacatcacgtacgcacaagatcatagctcccgcaaacatggagcgcccagtgcgatacatccggaaaccgatcgattataccgtccttgacgacgtggggcacggggttaagtggctgaaagccaagcacggcaacaaccaacccgctcggacaggcaccctcagcagaaccaatcccccaacccaaaaaccgccttctccaccaatgtctggaaggggcactctggggagaaacacaccatataagacgttggaaccggtgaagccccctaccgtgcccaacgactatatgacatctcccgcacgcctggggtctcaacacagtcccggtcgtaccgccagcctgaaccagcgccctagaactcactccgggagttccggcggttcgggatcgcgagagaacagcggatcaagctctattggcatccctatagccgttccaaccccttcacccccaacgattggtcccgcagcacctggcagcgctccaggttcccaatacgggactatgacacgccagatatccagacacaattcaacgacgagtagcacctcctccggaggctatcgtcgcaccccgtcagtgaccgcacagttcagtgctcagccccatgtgaacggcggaccactgtactcccagaactccatagccgattcccccacgccgcctcccccacctccccctgacgacatccccatgtttgacgattcaccaccaccgcctccgccaccgcctgtagactacgaagacgaagaagcagccgttgtccagtataacgacccgtatgccgacggcgaccccgcttgggcccctaagaactatattgaaaaggtggtagctatctatgactacacaaaagacaaggatgacgaactgtctttcatggagggtgcaatcatatacgtcatcaaaaagaatgacgacggatggtatgaaggtgtgtgcaatcgagttacaggactcttccccggtaattacgtcgaaagtattatgcactacactgactag

SEQ ID NO: 212962 - DNA, 1431 bp, synthetic construct
  misc_feature 1..1431: note = Description of Artificial Sequence: Synthetic coding sequence
  source 1..1431: mol_type = other DNA
atggccgagctgcagatgctgttggaagaggagatcccctctggcaagagggcattgatagagagctaccagaatctcacccgtgtcgcggattactgcgaaaacaattatatacaggcaaccgataagcgcaaagcactagaggagacgaaagcctataccacccagtctctcgcatcagtggcctaccagattaatgcccttgccaacaacgtactgcagttgctggacatacaggctagccagctgaggagaatggaatccagtattaaccacatttcccagacagtcgacatacacaaggaaaaagtggcacgcagggaaatcggtatcctgactactaataagaacacgagcaggacccacaagatcatcgcacccgctaacatggaacgtcctgtgaggtatatacggaagcccatcgattacactgtgttggacgacgtgggtcatggggtgaaacacggaaacaatcaacctgctcggacaggaacactgtccaggaccaatccacccactcagaagccaccctcgccccctatgtctggtagagggaccctcggtcgtaataccccttataaaaccctcgagcctgtgaaaccgccaacggttcccaacgactacatgacttcacccgctagactcggctcgcagcacagccccggaagaacggcttcattgaaccagcggccaaggactcactccgggagtagcggcggttctggtagccgggaaaacagtggatccagctctattggtatcccgatcgcggtacccactccatcacccccaactattggcccagccgctcctggctcagcaccaggatcacagtacggaacgatgacacggcaaatatcaaggcacaattctacgacatctagtaccagttccggcggatacagacgaactccaagcgtgaccgcccagtttagtgctcaacctcacgtgaacgggggaccgttatacagccaaaattctatcagtattgcaccacctccacctcccatgccccagttgacgcctcagatccccctgactgggtttgtcgccagagtgcaggaaaacattgccgacagtccgacccctcctcccccaccccctcctgatgacatccccatgttcgacgatagccctcccccaccacctcctcctcccgtggattatgaggacgaggaagccgctgtcgtgcaatacaacgacccttacgccgatggagatccagcatgggcccctaaaaactacatcgagaaagtcgtggctatctacgattacaccaaagataaggatgacgaattgtcattcatggagggggcaataatttacgtgatcaaaaaaaatgatgatggttggtatgagggtgtctgtaacagggtcacaggcctgtttcctggtaattacgtggagagtattatgcactatactgactag

SEQ ID NO: 212963 - DNA, 1446 bp, synthetic construct
  misc_feature 1..1446: note = Description of Artificial Sequence: Synthetic coding sequence
  source 1..1446: mol_type = other DNA
atggccgaactccagatgttgctcgaggaggagataccttctggaaaacgggcacttattgaatcctatcagaaccttacgcgggtggcagattactgtgaaaacaactacattcaggccaccgacaaacgaaaggccctggaagagacaaaggcctatacgacacagagcctggccagtgttgcataccaaatcaacgccttggctaacaacgtgctccagctcctcgacatccaggcgagccagttgaggcgcatggagtccagcatcaaccatatcagtcaaactgttgacattcataaagaaaaggtggctcgacgcgagatcggtatacttacaacaaataaaaatacatcaagaacccacaagattattgctcccgcaaacatggaacgtcccgtaaggtatatccgcaagcccattgattataccgtcctggatgatgtaggtcatggggtgaaatggctaaaggcaaaacacggtaataatcaacccgcaaggactggaacgctgtcacggactaacccccctactcagaaacccccatcacctccaatgtccgggagagggactctcggaaggaatactccctacaaaacgctggagcctgttaagcctcccaccgtacccaatgattatatgaccagtcccgctcgccttggcagccaacattcaccagggcgaaccgcaagccttaaccaaaggcccagaacccacagcggctccagcggcggaagtggcagtcgcgaaaattccggctccagctcaattgggattcctattgcggtgccaacgccttctcccccaacaattggcccagctgcccctggaagtgcgcctggtagtcagtacgggacaatgactcgccagatctcccggcataactcaactacgagcagtacgtcctcaggcggttataggcgaaccccctctgtcaccgctcaattcagtgcccagccccacgtgaatggtgggccactgtacagccagaactctatttctatagctcccccaccgcctccaatgccccagctaaccccccagatcccactgactggctttgttgctcgagttcaggagaacatagcagattctccgacacccccaccccctcctccgccagacgatattcccatgtttgatgacagccccccaccccctccaccgcctccggtcgattatgaagatgaggaggcggctgttgttcagtataacgacccttatgctgatggggaccctgcttgggcccctaaaaattacattgaaaaggttgttgctatttacgactacaccaaagacaaagacgacgaactgagcttcatggaaggggcaatcatttacgtaattaagaagaacgatgatgggtggtacgaaggggtgtgcaacagagtgacggggctgtttccgggaaactatgtagaatccatcatgcactatactgactag

SEQ ID NO: 212964 - DNA, 1527 bp, synthetic construct
  misc_feature 1..1527: note = Description of Artificial Sequence: Synthetic coding sequence
  source 1..1527: mol_type = other DNA
atggctgaactccagatgctactcgaggaggagatcccctccgggaaaagagcactgatcgagtcctaccagaacctcactcgcgttgcagactattgcgagaacaactacatccaggccacggacaagagaaaggcccttgaggagacaaaggcctataccacacaatcactagcgtcagtggcataccagataaacgccctggctaataacgtactgcagcttctagacatccaggccagccagctgcgcagaatggaaagcagcattaaccacatcagccagactgtcgacatacacaaagaaaaagtcgcccgaagggagatcgggattctgacaactaataagaatacttcgcgcacacataagataattgctccggctaatatggaacgacctgtgaggtatatcagaaaacctatcgattatacagttctcgacgatgtaggacacggggttaagtggttgaaagctaagcacggcaacaatcagcccgcacggacaggaacactatcgcgcaccaaccctccaacccaaaagccaccttcgcccccaatgtcaggacgcggaacgctgggtcgcaatactccctacaagacattggagcccgttaagccgccaaccgttccgaacgattatatgacatcgcccgcacgactaggctcacagcacagccccggaaggactgcttctctgaatcagcgccctcggacccactcagggagctcagggggtagcggcagcagggaaaattccgggtcttcaagcatagggatcccaatagctgtgcccaccccttcaccacccactatcggacccgaaaacatatcggtccctcccccatccggcgctcccccagcgcctccccttgcccctctcctcccagtttctactgtgatcgctgccccaggctcagcgcctgggagccaatatggaacaatgactcggcagattagccggcataatagcaccacctcctcaacctccagcggaggttatcgtcgaactccctctgtcaccgcccagttcagcgcacagcctcacgttaacggcggaccactttattcccagaatagcatctctattgcaccaccacctcctcccatgccacagctgacccctcagatcccactgaccggattcgttgctagggtccaggagaacattgccgattctccaacacctcccccaccgccacctcccgacgatatccctatgtttgacgactcccccccacctcctccgccaccacctgtggattacgaagatgaggaagctgctgttgtgcagtataatgatccgtatgccgatggcgatcctgcatgggccccaaaaaattacatcgaaaaggtggtcgcgatttacgattatacgaaggacaaggatgacgaactttccttcatggaaggcgctatcatttacgtcattaagaagaatgacgacggttggtatgagggcgtgtgtaaccgagtgacggggctgtttccgggaaactacgttgagtcaattatgcactatacagattag

SEQ ID NO: 212965 - DNA, 1428 bp, synthetic construct
  misc_feature 1..1428: note = Description of Artificial Sequence: Synthetic coding sequence
  source 1..1428: mol_type = other DNA
atggcagaactgcagatgctgctggaggaggaaatcccaagcggcaaacgggcattgatcgagagctatcagaatctcactagggtggccgactattgtgaaaataattatatccaagccactgataaacgcaaagctcttgaagaaacaaaggcttacactacccagtctctggcatctgtggcataccagattaacgccctagccaacaacgttcttcagttactggatatccaagcctcacagcttaggcgcatggagagttcaatcaatcatatctcccagactgtggacatccacaaggaaaaagtggcacgtcgggagattggtattctgacgactaataaaaacacctctcgcacgcataaaatcatcgctcccgctaatatggaacggcctgttcgttacattcggaagcctatagattacactgtcctggacgacgtcggtcacggcgtgaaacacggcaacaatcagccagccagaactggcacgctgagtcgcacaaacccacccacccagaagcctccgtctccaccgatgtccggtcgaggcacccttgggaggaacacaccgtacaaaacgctggaacccgttaaacccccaacagtgcctaacgactacatgacgtcacccgctcggcttggatcacagcattctcccggtaggacggcgtccctgaaccagagacccaggactcattctggatcctctgggggtagtggcagtcgagagaactcgggcagctcctctatcggcatccctatcgcggtccccactccctcacctcctactataggccctgcacctgggagcgcccctggttcccagtacggaactatgacgcgccagatcagccggcataactccaccacctcaagcacatcaagcggcggttaccggcgaactcctagcgttaccgcccagttttccgcccagccgcatgtaaacggcggacctctgtacagccagaactccatttcaatagcccctccccctccacccatgccccaactgactcctcagatccctttgaccgggtttgtggctcgcgtgcaggagaacatcgctgacagccctactccacctcctccacccccaccagacgacatccctatgtttgacgattccccacccccacccccaccaccccctgttgattacgaggacgaggaggctgctgttgttcagtacaatgatccatatgcggatggcgatcctgcctgggccccaaagaattacattgagaaagtggtcgccatatacgattacactaaagacaaagacgatgagttatccttcatggagggagccataatttatgtgatcaaaaagaacgatgacggctggtatgagggagtctgcaatcgtgtgactgggttatttcctggcaactatgtcgaatccatcatgcactacactgattag

SEQ ID NO: 212966 - DNA, 1341 bp, synthetic construct
  misc_feature 1..1341: note = Description of Artificial Sequence: Synthetic coding sequence
  source 1..1341: mol_type = other DNA
atggccgaactgcaaatgctgctcgaggaagaaatacctagcgggaagcgggcactgatagaaagttaccaaaatctgacccgggtagcggattactgcgagaacaactacatccaggccaccgacaaacggaaggcactagaggaaacgaaagcctatacaactcagtctctggcatccgtagcttaccagattaacgctctggcgaacaacgtgcttcaactattggatatccaggcatcacaacttcgtagaatggaatctagtataaatcatatcagtcagaccgtcgatatccataaagaaaaagtcgcaagacgcgagatcggaatcctgaccaccaacaagaatacctctcgaacccataaaatcatcgctcctgcaaatatggagcgtccggtgcgctatattcgtaaacccatagactatacggtccttgatgatgtcggccatggtgtgaagcatggcaacaatcagcctgctagaacagggactctgtcccgaacgaacccacctacacaaaagccacccagccctcccatgtccggtcgcggaacgctcggaagaaacacgccctacaagaccttagagcccgttaagccgccaaccgttcctaacgattacatgacatcaccagccagactcgggtcacaacacagccccggtcggaccgctagcctgaaccagagacctcgtacccactccggatcttctggcggtagcggcagcagggaaaacagtgggagctcttccatcggcattccaatcgccgtgcccactcccagtccccctacaatcgggcctgccccaggctctgcccctgggtcccagtacggaacaatgactcgccagatctctcggcacaactcgacgacgtcctctacctctagcggaggttacagacgcacacccagtgtgactgcccagtttagcgctcaacctcacgtgaacggtgggcctttgtactcccagaactctatcgccgactcccctaccccccctcctcctcctcctcccgacgatataccaatgttcgacgattctcccccaccccctccacctccacccgtggattatgaggacgaagaggcagcagtcgtacaatacaacgacccttacgctgacggcgaccctgcctgggcaccaaagaactacattgagaaagtcgtcgccatctatgattataccaaggacaaagacgacgagctgtcattcatggagggcgctatcatatacgttattaaaaagaacgatgatggctggtacgaaggagtgtgcaacagagttactggactgttccctggaaactacgtggagtcaattatgcactacacggactag

SEQ ID NO: 212967 - DNA, 1356 bp, synthetic construct
  misc_feature 1..1356: note = Description of Artificial Sequence: Synthetic coding sequence
  source 1..1356: mol_type = other DNA
atggctgagctacagatgttgctcgaagaagaaatcccttctggtaagagagccttgattgagtcctaccaaaacctgacccgggtggcagattactgtgaaaacaattacattcaagccaccgacaaacgcaaagccctggaggaaaccaaagcttacacgacacagagtctagcttccgtggcctaccagatcaacgccctggccaataacgtgttacagctgctggacatccaggcttctcagctccgaaggatggaatcttcaataaatcatatatctcagactgttgacattcataaggagaaggtcgcacggagggagattggtatacttactactaacaagaacacctcaaggacccacaaaattattgcccctgctaatatggagcgcccagttagatatattcgcaagccgattgattataccgtgttagacgatgtcggtcacggtgtcaagtggctgaaggcaaagcacggcaacaatcagcccgctcgtactggtacgctgagccgtaccaaccctcccacccagaaacctcccagtccccctatgagcggcaggggaacgttgggaagaaatacaccttataagactctggagcctgtaaaacctcctaccgtgccaaatgattacatgacctccccggctagactcggttctcagcatagtccgggtcggacagcgtcccttaatcagaggccacggactcacagcggctcttctgggggatcaggatccagggagaactccggttcctccagtattgggatccccattgccgtgcctacgccctcccctccaacgataggcccagcacccggatctgcacccggatcccagtacgggaccatgacacgtcagattagcagacacaattcaactacctcaagcacaagttccggaggataccggagaacgcctagcgtgacagcccagtttagcgcccaacctcacgtcaacgggggacctctctattcgcagaacagcatcgcagattccccgacccctccgccacctcccccaccagatgacattcctatgttcgatgactccccaccacctccaccaccgcctccagtagattacgaagacgaggaggctgccgtggtgcaatataatgatccgtacgcggacggcgatcccgcttgggctcccaaaaactatatcgaaaaggtggtggcgatttatgattatacaaaggacaaagacgatgaactgagcttcatggagggcgctattatttatgtaatcaagaaaaatgatgacggctggtacgagggcgtgtgtaaccgagtgactggcctgttcccagggaactatgtggagtccattatgcactacactgattag

SEQ ID NO: 212968 - DNA, 990 bp, synthetic construct
  misc_feature 1..990: note = Description of Artificial Sequence: Synthetic coding sequence
  source 1..990: mol_type = other DNA
atggccgagctgcagatgttacttgaggaagagatcccttccggtaagagagctctgatcgagagctatcaaaatctgactagagtggccgattattgcgagaataactatattcaagctacggataagcggaaggctctggaagaaacgaaggcctacaccacacagagtctcgcgagcgttgcttatcagatcaatgcacttgccaataacgtactgcaactgcttgatatacaggcttcacaactgagaagaatggagtcctccataaatcatatatcccagcatggcaacaaccagcccgcacgcaccgggacactgagccgtacgaatccccctacccagaagcccccaagcccacccatgtcaggaagagggactctcggcagaaataccccctataaaacactggaaccggtgaaacctcctacggtgcctaacgattacatgacctctccagctcggctgggctcccaacactccccaggtaggacagctagcctcaatcaaaggcccaggacccattcgggatcctctgggggatccggaagtcgcgagaattctgggtctagctcgatcggcattcccattgccgttccgactcccagtccgccaactatagggcctgtagctgacagccctacgccccctcctccaccccctcccgatgatatcccaatgttcgacgattctcctcccccaccgcctccaccgcctgtcgactatgaggacgaagaggcagccgttgtgcagtataatgacccatacgccgatggcgaccctgcatgggcacccaagaattacattgagaaggtcgtagccatctacgattacaccaaggacaaagatgatgagctatcgtttatggagggcgctattatttacgtgattaagaaaaacgacgatgggtggtacgagggcgtgtgtaaccgagttactggcttgtttcccggtaattacgtcgagagtattatgcattataccgactag

SEQ ID NO: 212969 - DNA, 1185 bp, synthetic construct
  misc_feature 1..1185: note = Description of Artificial Sequence: Synthetic coding sequence
  source 1..1185: mol_type = other DNA
atggcagaattgcagatgctactagaggaagagatcccttctggtaagcgggcactgatcgagtcataccagaacctgactagggtggccgactattgcgagaataattatatacaggccacggataaaaggaaagctttggaggagaccaaagcttacacaacacaatccctggcctcagtggcctaccagatcaatgccctggctaacaacgtcctgcagctgctggacatccaggcatcccagctgaggcggatggagagttctattaaccacatatctcagacagtcgatatccacaaggaaaaggtggctcgtcgcgagatcggaattctgaccacgaataagaacacttccagaacccacaaaattattgccccagctaacatggagcgaccggtgagatatatcagaaagcctattgactacaccgtgctggatgacgtgggccacggtgttaaaaaatggcacaaaataatacatggtaacaaccagcctgcaagaactgggaccctaagcaggacgaacccacctactcaaaagcccccaagccctcctatgagtggccgaggaacgttgggcagaaataccccgtataagaccctcgagccggtaaagcctccaaccgtccccaacgactacatgacctcccccgctaggctggggtcccagcattctcctgggcgaactgccagtctgaatcagcggcctcgcacccatagcggatcttcaggaggaagcggcagtcgtgaaaactcaggaagttccagcattggaatccccatcgccgtacccacacctagccctcctacaataggcccagtcgctgactcccctaccccacctcctccgcctcctcctgacgacatacccatgttcgatgactcacctcccccaccgcctcccccacccgtggactacgaagacgaagaagccgctgtggtccagtacaatgatccctacgcggatggcgacccagcatgggcgccaaagaattacatagagaaagtggtggcgatttacgactatacgaaggacaaggatgacgagctgtcattcatggaaggcgcaatcatctatgtgataaaaaagaatgacgatggttggtacgagggggtgtgtaacagggtgaccggcctgttcccgggaaactatgttgagtccatcatgcactataccgattag

SEQ ID NO: 212970 - DNA, 3993 bp, synthetic construct
  misc_feature 1..3993: note = Description of Artificial Sequence: Synthetic coding sequence
  source 1..3993: mol_type = other DNA
atgccgctttcgcctcccgctcagggcgaccccggtgagcctagtccgtgccggcctcccaagaagcacaccaccttccacctgtggcggtccaaaaaaaaacagcagccggctcccccagactgtggggtttttgtgccgcaccctttacccgctcccgctggcgaagccagggccctggatgtcgtggatggtaagtacgtggtccgcgactctcaggagttccccttgcactgcggcgaatcacagttcttccataccaccagcgaggccctggggagccttcttctagagagtggaattttcaaaaagtcgagggctcagccgccagaagacaaccgcagaaagcccgtgctcggcaagctgggaaccctatttaccgcaggacgcagacggaattcaaggaatggcctcgaaagtcccacaagatctaacgctaagccactgtcccccaaggacgttgtagcttctccaaaactgcctgaacgggaatcggagcgaagtcggagccaatcaagtcaattaaaacagactgatacaagtgaggagggctcacctagagaaaacccaagggaggcagaaggggagctgcccgagtctggagggcctgctgccccacctgatgctgagcttagccctaggtggtcatctagcgccgcagcagtggctgttcagcagtgccatgaaaatgacagcccacagcttgaaccccttgaagccgaaggagaaccgttccccgatgcaactacaacggcgaagcagttgcattcctctccgggaaactcctctagacaggaaaatgcggagacacccgctaggtcccctggagaagacgcttcgcctggtgcaggtcatgaacaggaggcattcctaggagtgcgaggtgcgccaggcagtccgactcaggagcgccctgccggtggactcggagaagcgcctaatggtgccccaagcgtgtgcgccgaggaaggctcactgggacctcggaatgcccgatcccagccacctaaaggggcttccgatctgcccggtgaaccacccgctgagggggcagcccacactgcatcctctgcgcaggccgactgcacagccaggcccaaggggcacgcccatcctgccaaagtactcacattagacatctacctgagtaaaactgaaggagcgcaagtcgacgagccagtagtgataacacctagggctgaagactgtggcgactgggatgacatggagaagaggagtagcgggcgacggtcaggccgacgaagagggtcgcaaaagagcactgattctccaggcgcagacgccgagttgcccgagagcgctgctcgggatgacgccgtgttcgacgatgaagtggcccctaatgctgcttctgataacgctagtgccgagaaaaaagtcaagagccccagagctgcactggatgggggtgtcgcaagcgccgcttctccagaaagcaaaccttcgcccggtacgaaaggccagctaaggggtgagtcagatcgttccaagcagccgcctccagcttcgtcacccacgaagcggaagggccgaagtagagcgctcgaagctgtgcccgctccacccgcatccggacctcgtgccccagctaaagagagccccccaaagcgggtacccgacccgagtcccgttacaaagggaaccgcagctgagagtggggaggaagctgcaagagctatccctcgagaattacccgtcaagtcctccagcttgttgccagagattaagcctgaacataaacggggacccttacccaatcacttcaatgggagagccgaaggcggaagatctcgggaactaggaagagctgctggcgctcctggcgcttcagatgcagacggcctgaagcccagaaatcatttcggggtgggcaggagcacggttactactaaggtcaccctacccgcaaagcctaagcacgttgagcttaatctgaaaacccctaagaacctagattcactgggtaacgagcacaacccgtttagccaaccagtccacaagggaaacacagctacaaagatttctttgttcgagaataagcggactaattcgtctcctaggcatactgacatcagagggcagcggaacacccctgcgagtagcaaaactttcgttggcagggccaagctgaacctggccaagaaggctaaggagatggagcaacctgagaaaaaggtgatgccaaattctccacagaatggtgtgctagttaaagagaccgcgatcgagaccaaggtaaccgtgtctgaggaggaaattctgcccgctaccagaggaatgaacggagactcctctgaaaatcaggcattgggcccacaaccgaaccaagacgacaaggccgatgtgcaaactgatgctgggtgtctgtctgaacctgtcgcctctgccctgatcccagtcaaggaccacaaactcctcgaaaaagaggactccgaggctgccgattccaagtccttagtgcttgaaaacgtgacagacactgcccaagacatacccaccactgtggacacgaaggatctcccccctactgccatgccaaaaccacaacacaccttcagtgactcacagagccctgccgagtcatctccagggccttctcttagtttatccgctccagcacccggtgacgtcccaaaggatacgtgcgtccagtctccaatttcttctttcccatgcactgatctgaaggtgtccgagaatcacaaggggtgcgtgctgccggtctccagacaaaataatgaaaagatgcccctgcttgaactcgggggagaaaccactcctcccctgtcaacagagagatcacccgaggctgtgggctcagaatgcccatcaagggtgctcgttcaggtcagatctttcgtactgcccgtagaatctacacaggacgtctcaagccaggtcattcccgagtcttccgaggtgcgagaagttcaactgcctacatgccattctaacgaacccgaggtggtgtcagtggccagttgcgcccctcctcaggaagaggtactgggaaacgaacactcccattgcaccgcggagcttgccgcaaaatcagggcctcaggtgatcccaccggcatctgagaaaacattaccgatccaggcgcagagccaggggtccagaaccccactgatggccgagtcatctcctactaactcacctagtagcggcaatcatctagcgacacctcagaggccagaccagacagtaactaatggacaggactcccccgcatcactgctgaacatctccgcaggaagcgatgattccgtcttcgactcttcatctgatatggagaagtttaccgagatcatcaagcagatggactcagctgtttgtatgcctatgaagcgtaagaaagcacgcatgccgaatagtcctgcccctcattttgcaatgccccctatccatgaagatcatttggagaaagtgtttgatccgaaggtattcaccttcggactgggcaaaaagaaagagtctcagccggaaatgtcacccgcactacacctcatgcagaatctagacacaaagagtaaacttcggcctaagagggcatccgcggaacagtccgtccttttcaagtcactacatacaaatactaacggaaatagtgagccactcgtaatgccagaaatcaatgataaggagaaccgagacgtgacaaacgggggaattaagagaagccggctcgagaaatccgcattgttcagtagcctgttatctagcctcccgcaggataaaatattctccccatctgtgacatccgtgaataccatgaccaccgctttctccacatctcagaatggctctcttagccagtcgtcagtttctcaacccaccactgaaggcgcacccccttgcgggctgaataaagagcagtccaatctactgcccgacaactccttgaaggtattcaacttcaactcaagcagcactagccactcgtcactgaaatccccaagccatatgtag

SEQ ID NO: 212971 - DNA, 5171 bp, synthetic construct
  misc_feature 1..5171: note = Description of Artificial Sequence: Synthetic coding sequence
  source 1..5171: mol_type = other DNA
atggaaaagcgatcctccggaaggaggtctggcagaagacgcggtagtcagaaatcaactgatagcccgggtgcggacgcggagcttccagaatcagctgctagggacgacgctgtgttcgatgacgaagtggccccaaacgccgctagtgacaatgccagtgcggaaaaaaaagttaaaagtcctcgcgctgcactggatggaggggtggctagtgccgcttccccagagtcaaaacccagtcccggtacaaaaggccaactgagaggcgaatctgacagatcgaagcaacctccccctgcctcctctcctactaagcgcaaaggcaggagtcgcgctctggaagcagtgccagcaccgccagcttcgggtccccgagctccagctaaggaatctccgcctaaaagagtgccagatccctctcctgtgacaaagggaacggccgctgaaagcggggaggaagcggcaagggcgatacctagagagctgccggttaaatcttcatctcttttacctgagataaaaccggagcacaagcgagggcctctgcctaaccattttaacgggagggctgaagggggaagaagtcgcgagttagggagggcagcgggtgccccaggtgccagtgatgctgacgggctcaaacctagaaaccattttggagtgggacgatccaccgtaaccactaaggtgaccctgcctgccaagcctaaacatgtcgaattgaacctgaaaacacccaagaacctcgattctttaggcaatgagcacaatcctttttcgcagccggtccacaaaggcaacacggccacaaaaatctctttgttcgagaacaaacgcaccaattcgagtccgcgacatacagacattcggggacagcgaaacacaccagcctccagtaagacatttgtcggcagggctaagctgaatcttgcaaaaaaagccaaagagatggagcagcctgagaaaaaggtgatgccaaattctcctcagaacggggtgctcgttaaagaaaccgccattgaaaccaaagtcaccgtttccgaagaagagattctcccagcgacaagaggtatgaatggggatagttctgaaaaccaggccctcgggcctcaacccaaccaggacgataaggccgacgtgcagactgatgccggttgtttatctgaacccgtcgcctcagcgctgatccctgtgaaagaccacaagttgctagaaaaggaggactccgaggccgctgattcaaaatccctcgtactcgagaacgttaccgatactgcacaggacatccctactacggtggacaccaaagaccttccacctaccgctatgccgaagccgcaacacactttctctgacagtcagtcccccgctgaatcttctcccggtccttcactgtctctaagtgctcctgcacccggtgacgtccccaaagatacctgcgtgcaatcacctatctcatcgtttccgtgcactgatttaaaagtctcagagaatcataagggctgtgtcctgccagtgagtcgacagaacaacgaaaaaatgcctctacttgagctgggaggggagacaactcccccactttccaccgagcgcagtcctgaggccgttgggagcgagtgtccatccagagttctcgtccaggttaggtcattcgttctgccagtggagagtacacaggatgtgtcatcacaggttattcccgaaagctctgaggttcgcgaagtccagctaccaacttgccattcaaatgaacctgaagtcgtgtctgtcgcatcttgcgctcctcctcaggaagaggtcctgggaaacgaacacagccattgtactgcggagttagccgcaaagtccggacctcaggtgatcccacccgcatctgaaaaaacacttccgatccaggcacagtcccagggttccagaacgcccctaatggccgagagctctccaaccaactcacctagctctggcaatcaccttgcgacaccacagcgacctgatcagaccgtgaccaacggccaggacagccccgctagcttacttaacatcagtgcagggtccgacgacagcgtgttcgactcaagctccgatatggaaaagttcacagaaatcatcaagcagatggactcggccgtctgcatgcctatgaagcggaaaaaagccagaatgccgaattcccctgcgcctcatttcgccatgccgcctatccacgaggatcacctagaaaaggtgtttgatccgaaggttttcacattcggcttaggaaagaaaaaggaaagccagcctgaaatgtctcccgctctccacctcatgcaaaatctggacaccaaaagcaagctccgacctaaaagagcctctgccgagcagagcgtgctgttcaagagtttgcatactaacaccaacggaaacagcgagccactcgtcatgcccgaaattaacgataaagaaaaccgggacgtgaccaatgggggtattaagcggtctagactcgaaaaatcggctctgttttcaagccttctctccagtctgccccaggacaaaatctttagcccctccgtcaccagcgtcaataccatgactacagctttcagcactagccaaaatggaagcctgtcccaaagcagcgtctctcagcccacaacagaaggagcacctccttgtgggttgaacaaagagcagtctaatttgctgcccgataattcactcaaggtgtttaactttaactcctctagcaccagccactctagcctgaagagcccctcccacatggagaagtatccgcagaaggaaaaaacaaaggaggacttggactctcggagcaatctgcatctgcctgagacaaaatttagcgaattatctaagctgaagaacgacgatatggagaaggccaatcatatagagagcgtcatcaaatcaaatctcccaaactgcgcaaattccgacacagattttatgggcctgtttaaaagtagtagatacgatcccagcattagcttttcaggcatgtcactgagtgacacgatgaccctaagaggctccgttcagaataaactcaatcctcgcccaggcaaggtggtcatctactcagagccggacgtgagcgaaaagtgtattgaggtgtttagcgacatccaggactgtagctcctggtccctgtcgcctgtgatccttattaaggtggtgaggggctgctggattctgtacgagcagcccaactttgaggggcactccattcctctggaggagggcgaactagaactgtctgggctttggggaatcgaggatatcctcgaaaggcatgaagaggccgaatcagataagcctgtcgttattggctcgatccgtcatgtcgtccaggactatcgggtgagtcacatcgacctttttacggagccagaaggcctgggcatcctctcctcatatttcgacgacactgaagagatgcaaggcttcggtgtcatgcagaaaacatgctccatgaaagttcattggggaacctggcttatttatgaggagcccggttttcaaggggtcccattcatcttggagccaggggagtatcctgatctgtcattctgggatactgaagaagcttacatcggtagtatgcgcccactaaagatgggaggaaggaaagtggagtttcccaccgaccctaaagtggtggtgtatgaaaagcccttctttgagggcaagtgtgttgaattggaaaccggaatgtgctcattcgtgatggaaggtggggaaacagaggaggctacaggcgatgaccacctcccatttacttccgtgggttcaatgaaggttctccggggaatatgggttgcctatgaaaagcctggatttacaggacaccaatacctgctggaggagggggagtatagggactggaaggcttggggtggatacaatggggagctccagagtttgcgcccaattctcggcgatttcagcaatgcacatatgatcatgtattctgagaagaactttggttctaaagggtcttccatcgacgtcctggggatagtggccaatctgaaagaaacgggatatggagtgaaaacccaaagcatcaatgtgctgtccggagtgtgggtcgcctacgagaacccagacttcaccggagagcagtatatcctcgacaaggggttctacacctccttcgaggactgggggggaaagaattgcaaaattagttctgtccaacctatttgcctcgacagttttaccgggccacgtcggcgtaaccagatccacctgttttccgagccacaattccaggggcattcccaaagttttgaggagactaccagccagatcgacgattcattttcaacaaagagttgccgagtcagcggcggtagctgggttgtctacgacggagagaacttcactgggaaccagtacgtgcttgaggagggacattatccctgcctgtccgctatgggttgccctcccggagctacgttcaagtctctgaggtttattgacgttgaatttagcgagcccaccatcatcctctttgagagggaggattttaaaggaaaaaaaatagaactcaacgcagaaacggttaatctgcggtctctcggctttaatacccaaatccggagcgtccaggttatcgggggaatatgggtcacctatgagtatggctcatacagggggagacagttcctgctgtcgccagccgaagttcctaattggtacgagttcagcggttgtagacagattggctctctcagaccatttgtgcaaaagagaatctattttcgcctgcggaacaaggcaacagggctgttcatgtctactaacggaaacctggaggatctgaagctcctgagaattcaggtcatggaagatgtcggagcagacgaccagatttggatttatcaggaaggctgtattaagtgtaggatcgccgaagactgttgcctcaccattgtgggctctttggtgactagcggttctaagctcggtctagcccttgaccaaaacgctgacagccaattctggtccctcaaaagcgacgggaggatctactctaaactaaaacctaacctcgtcttagatataaagggcggtactcaatacgatcagaaccatattatcctcaatacagtatcaaaggaaaagtttacccaagtatgggaggccatggtcttgtacactta

SEQ ID NO: 212972 - DNA, 951 bp, synthetic construct
  misc_feature 1..951: note = Description of Artificial Sequence: Synthetic coding sequence
  source 1..951: mol_type = other DNA
atgcagaaacctaaaaccgtcgcctgggagaatttgggaccggaaatgagtgctcttggaaccgcattcagcagagagggtggcagaaaggtagagtttccaactgatcccaaggtggttgtgtacgagaaacctttttttgaaggcaaatgtgtcgagctcgagaccggaatgtgttcttttgtcatggaaggcggtgaaactgaggaggctaccggcgatgaccatctcccattcacttctgttggttcaatgaaagtgctgaggggaatctgggtggcctatgaaaaaccaggcttcaccggacatcagtatctgctcgaggaaggtgagtaccgcgattggaaggcttggggcggttataacggggagttgcagtctctgagacctatcctgggggatttcagcaacgcccacatgatcatgtactcagagaagaacttcggaagcaagggttcctccatcgacgtactcggaatcgtggctaatctgaaggaaacgggatacggcgttaaaacacagtccattaacgtgctaagcggcgtgtgggtggcttacgagaatcccgattttactggcgagcagtatatcctcgataagggattttacacatccttcgaggattggggcggtaaaaactgcaaaatatcctctgtgcagcccatttgtctagacagctttactggcccacgccgtcgcaatcagatccatttattttctgaacctcaatttcagggccactcacaaagttttgaggagaccacaagccaaatcgacgacagcttttctacaaagtcgtgtcgggtcagcggaggaagctgggtggtttacgacggagaaaactttaccggcaatcaatacgttttggaggaggggcactatccttgtctttcagccatgggatgccccccaggggcaacattcaaatctttgcgcttcattgacgtctag

SEQ ID NO: 212973 - DNA, 1629 bp, synthetic construct
  misc_feature 1..1629: note = Description of Artificial Sequence: Synthetic coding sequence
  source 1..1629: mol_type = other DNA
atgcagaaacctaaaacagtcgcctgggagaacctcggcccagaaatgagcgctcttgggaccgccttctcaagggaaggtggcaggaaagtcgaatttcctaccgaccctaaagtggtcgtgtacgagaaaccgttctttgaagggaaatgtgttgagctcgaaaccgggatgtgctcatttgtcatggagggaggggagacagaggaagcaactggtgatgaccacttgccattcactagtgtggggtccatgaaagttctgaggggcatatgggtagcttatgagaagccaggcttcacaggacatcagtatttgctggaggagggcgagtatcgcgactggaaggcctggggcggatataatggggagctccagtccctgagaccgatcctgggagactttagtaatgcacatatgattatgtacagcgagaaaaactttgggagtaaggggtcctccatcgacgttcttgggatcgttgcaaaccttaaagagacagggtacggagtgaagacccaaagtataaacgtcctctccggagtttgggttgcttatgagaatcctgacttcactggagagcaatacattctagataaggggttttacacctcatttgaagattgggggggtaaaaactgcaagatctcgtctgttcagcccatctgtcttgactcatttacggggccacgtcggcgtaaccagatacatctcttcagcgaaccacagttccaggggcattcccaaagtttcgaagaaactacctctcagatagacgattccttctctactaagtcatgccgtgtttctgggggttcttgggtagtgtacgacggcgaaaatttcacaggaaaccagtacgtgctggaagaaggacactacccttgtctgtcagccatgggatgtccccctggggcaactttcaaatccctcagatttattgacgtcgaatttagtgagccaaccattatcctgttcgaaagggaagactttaaaggaaaaaaaattgagctgaacgcagaaactgttaatctgagaagtctcggatttaatacacagattcggagtgtgcaggtcatcggcggtatttgggtgacctacgagtatgggtcctacaggggaagacagtttctgctgtctcccgcagaggtgcccaactggtacgagttcagcggatgtcggcagatcggaagtctgaggccgtttgtccagaaacggatctactttagattacgcaacaaagctacaggactcttcatgtccactaacggaaacctcgaggatctgaaattgctccggatccaagtgatggaggatgtaggcgcagatgaccagatttggatttaccaggaggggtgcataaaatgccgaatagctgaagattgttgcctgacaatcgtaggcagcctcgttacatctggctctaagcttggtcttgcgctggatcagaacgccgattcccaattctggtcattaaagtcagacgggagaatctacagcaagcttaagcccaatctggtgctcgacattaaagggggaacacaatacgaccaaaatcatataattctcaatacagtctctaaggaaaagttcactcaggtgtgggaagcaatggtgttgtacacctag

SEQ ID NO: 212974 - DNA, 504 bp, synthetic construct
  misc_feature 1..504: note = Description of Artificial Sequence: Synthetic coding sequence
  source 1..504: mol_type = other DNA
atggtcgcacagcaagaaagcatcagggaaggattccaaaagaggtgcctgcccgtaatggtgttaaaggctaaaaagccattcacttttgaaacacaggaaggcaagcaggagatgttccacgccaccgttgcaacagagaaagaattcttttttgttaaggtgttcaacaccctcctaaaagacaagttcatacctaagcgtattatcatcatcgcgaggtactacagacactcgggatttctggaagttaattcagcctctcgtgtgctggatgcagagtctgaccagaaagtgaatgtgcctctcaatatcatcaggaaggccggtgagaccccaaaaatcaacactttacagacacagcctctgggcacaattgtgaacgggctcttcgttgtgcagaaggtgacagagaagaagaaaaatatcctatttgatctgtctgataatactggaaaaatggaggtgcttggcgtgagaaacgaggatactatgaaatgctag

SEQ ID NO: 212975 - DNA, 1032 bp, synthetic construct
  misc_feature 1..1032: note = Description of Artificial Sequence: Synthetic coding sequence
  source 1..1032: mol_type = other DNA
atggaatccaaatataaagaaattttactgttgaccggactcgacaatatcactgacgaggagctcgatagatttaaattcttcctgtccgatgagtttaacatagccacaggtaaactgcacacggccaatcggatccaggtcgctaccctgatgatccagaacgccggagccgtgtctgctgtgatgaagacaattcggatattccaaaaacttaattacatgctcctggctaagaggctccaagaggaaaaagagaaagtagacaagcagtacaaatcagtgactaaaccaaagccattgagccaggccgagatgagccctgcagcgagtgcggcaatcagaaatgacgtggccaaacagcgggctgcgcctaaggtgagtcctcacgtaaaaccggaacaaaagcaaatggtggcccagcaagagagcatccgcgaaggatttcagaagcgatgcctgcctgttatggtgctgaaggctaaaaagccgttcacctttgagacacaggaggggaagcaagagatgtttcacgcaactgtggcaaccgagaaagagttcttcttcgtaaaggtgtttaacaccctgttgaaggacaagtttattcccaaacgcattataattatcgctagatattacaggcacagcggattcctcgaggtgaacagcgcttcccgcgtacttgacgcagagagcgatcaaaaggtcaacgtgcctttgaatatcatccgaaaggcaggcgaaacgcctaagataaataccctgcaaacacagcccctggggactatcgtgaatggcctgtttgttgtgcagaaagtgaccgagaagaagaagaatatcctgtttgacctctccgacaacaccggcaaaatggaggtgctaggcgttcgtaacgaggacaccatgaaatgtaaggagggtgacaaggttagactcacgttctttacgttaagtaagaacggtgaaaagctgcagctgacatcaggtgtgcattccactatcaaggtgattaaagccaagaagaaaacctag

SEQ ID NO: 212976 - DNA, 411 bp, synthetic construct
  misc_feature 1..411: note = Description of Artificial Sequence: Synthetic coding sequence
  source 1..411: mol_type = other DNA
atggagagcaagtacaaagaaattctgctgttgacaggtctggacaacatcaccgatgaagagctggataggttcaaattctttctgagcgacgaattcaacatagctactggcaagctacatactgcaaatcggatacaggtggcaaccctgatgatccagaatgccggtgcagtttctgcggtcatgaagaccattcgaatatttcagaagttgaactatatgctcctggccaagcgcctgcaagaggaaaaggagaaggtggataagcagtacaagtcagtaactaagcccaagcctctctctcaagccgaaatgtccccagccgcatccgctgctattcgaaacgatgtagccaagcagagggctgcaccaaaagtttccccccatgtgaaacccgagcagaagtag

SEQ ID NO: 212977 - DNA, 1800 bp, synthetic construct
  misc_feature 1..1800: note = Description of Artificial Sequence: Synthetic coding sequence
  source 1..1800: mol_type = other DNA
atgtccaaggaagaacgccctggaagggaggaaattttggaatgccaggtgatgtgggaacccgattctaaaaagaatacccagatggaccgctttcgagcggctgttggggctgcctgcggacttgctctcgaatcatatgacgatttataccattggtctgtcgagtcttactcagatttctgggcagaattctggaaattcagcggcattgtgttctcgcgagtttacgatgaggtggtggacacaagcaagggaattgctgacgtcccggagtggttcaaaggtagcaggcttaactatgcggagaacttactccggcacaaagaaaacgatagggtcgcactttatatagcaagagaaggtaaggaagagattgtaaaggtcacatttgaggaactgagacaagaagtggccctgtttgcagccgctatgagaaagatgggcgtcaaaaagggtgatcgtgttgtgggatacctcccgaactccgaacacgctgtcgaagcgatgctggccgcagcgtctattggagcgatttggagtagtacgtcaccggactttggggttaacggagtgctagacaggttttcccagattcaacctaaactgatcttctcggtggaggctgtcgtctacaacggtaaagaacacaaccacatggagaagttgcagcaggtggtgaagggactcccggacctgaagaaagtcgttgttattccctacgtcagctcgcgggagaacatcgatctttctaagatcccaaactccgtcttcttagacgactttctcgccacaggcacctctgaacaagcccctcaactggagttcgagcagctgcctttttcccaccctctcttcattatgttttcttcaggcactacaggcgcaccgaaatgcatggtgcattccgccggtggcaccttgattcagcacttgaaagagcatctactgcacggcaacatgacaagctcggacatcctgctgtgttataccactgtagggtggatgatgtggaactggatggtgtcgctcctggcaacgggggctgctatggtcctatacgatggatcccctctggtgccaacccctaacgtgttgtgggatcttgttgatagaatcggaattactgtgctggttactggcgcaaaatggctgagcgtcctagaagaaaaggccatgaagccagtggaaacccattcactgcagatgctgcacacgatcctatctactggcagtccgctgaaggctcagtcttacgagtacgtctaccggtgcataaagtcttcgatcctgttggggtccattagcggtggcacggacattatttcttgctttatgggccataatttcagtctccccgtctataaaggggaaatccaggcccgaaatcttggcatggcggtggaagcgtggaacgaagaaggcaaagccgtttggggtgaatccggggaactggtatgcactaaaccgatcccctgtcagccaacccacttctggaatgacgagaacgggaacaaataccggaaagcctacttttccaagttccccggtatttgggcccacggtgattactgtagaattaatcccaagactgggggaatcgtgatgctaggacggtccgatggaacccttaatcctaacggagtgagattcgggtcctctgaaatatacaatatagtttacgcccagcgccaggagtctggcagctgcaggcagaccgatcaccggtggaaaagtcgcggagcccgtcgctgtttccttgaacccagagaccccggttccgtgcccggtcatccatag

SEQ ID NO: 212978 - DNA, 2019 bp, synthetic construct
  misc_feature 1..2019: note = Description of Artificial Sequence: Synthetic coding sequence
  source 1..2019: mol_type = other DNA
atgtccaaggaagagcggcctggacgcgaggagattttggagtgtcaggtgatgtgggagcccgacagtaaaaaaaacacccagatggacagatttagagccgcagttggcgcagcttgtggattggctcttgagtcttacgatgacctgtaccattggtcagtcgaatcctattcagatttttgggccgaattctggaagttttcagggattgtgttctcaagggtctacgacgaagttgtggacaccagtaagggtatcgctgatgtgcctgagtggtttaaggggtcacggctgaactatgcagagaatttgctccgccacaaagagaacgatagagtagcgctttacatagccagagagggcaaagaagagatcgttaaagtgacctttgaagagttgcggcaggaggtggccctcttcgccgcagccatgcggaaaatgggagtgaaaaagggagatcgcgtggtgggatatttgcccaatagtgagcatgctgtagaagcgatgctcgccgctgcgtccatcggggctatttggtcatctaccagcccggactttggagttaatggcgtgctcgatcggttctcccagatccagccaaaactcatttttagtgtcgaagccgtggtttataacggcaaagaacataaccatatggagaaactccagcaggtggtgaaggggctgcctgatctcaagaaggttgtggtgattccatacgtcagctcccgagagaatattgatctgtcgaagatccctaactctgtgttcctcgacgacttcttggcaacaggaacctcagagcaagctccacagctggaatttgaacagctccccttcagccaccccctgtttatcatgtttagtagcggaacaacaggtgcccctaaatgcatggtccacagtgctggcggtactctaatacagcacctaaaagaacatcttctgcacggcaacatgacatctagcgacattcttctgtgctatacgaccgtcggctggatgatgtggaattggatggtgtcactattggctaccggagccgcaatggtactatatgacggttccccattggtgcccacgccaaatgttctgtgggatcttgtggatcgtatcggcatcaccgtcctggttactggtgctaagtggttgagcgtgttggaagaaaaagccatgaaacccgtggagactcactccctgcaaatgctgcacaccatactatctacaggttcccctctgaaagcacagagttatgaatacgtctaccggtgtatcaagagtagtattctgcttggaagcatctccggcggaaccgatatcatctcctgcttcatgggtcataatttctccctacccgtctataaaggtgagattcaggcacgaaacctggggatggccgtcgaggcttggaacgaagaggggaaggccgtatggggtgaatccggcgagttggtctgtaccaagcctattccgtgtcagcctacgcatttctggaatgatgagaacggtaacaagtacaggaaggcgtatttttctaaatttcctgggatttgggcccacggtgattattgtcggatcaacccaaaaaccggcggaattgttatgcttggaaggtccgacggaacattgaatcccaacggcgtgagattcggctcctctgagatttataatattgtagaatccttcgaggaggtggaggacagcctgtgtgtgccgcaatacaacaaataccgcgaggaaagggtgattctctttctgaagatggcgtcaggtcatgccttccagcctgatctggtaaaaaggatccgagacgctattcggatgggactgtccgcgaggcacgtaccgagcttaattcttgaaaccaaaggtattccgtacactctgaacggaaaaaaagtcgaggtcgcggtcaaacaaataattgcaggcaaggccgtagaacagggaggtgccttctccaatccagaaactctcgacttatatcgcgatataccggaactgcagggtttctag

SEQ ID NO: 212979 - DNA, 762 bp, synthetic construct
  misc_feature 1..762: note = Description of Artificial Sequence: Synthetic coding sequence
  source 1..762: mol_type = other DNA
atgagaaaaatgggtgtgaagaagggcgacagagtcgtcgggtatttgcccaacagcgaacacgccgtggaggcaatgttagccgctgcttcaataggcgcaatctggtctagtacttccccagacttcggggtcaacggcgtgcttgacaggttttcacagatccagccaaagctgatattctcagtggaagccgtggtttataatggtaaggagcataaccacatggagaaattgcagcaggttgtaaagggtctgccggacctaaaaaaagtcgtggtgattccttacgtctcttctagggaaaatatcgatctttccaagattcccaattcagtttttttagacgatttcctagccactggtacatctgagcaggccccacagctggagttcgagcagctcccttttagtcaccccctttttattatgttctcatcaggcaccaccggagctccaaagtgtatggtgcatagcgctggcggtactttgatacagcatctgaaggaacacctactgcatggaaatatgacaagtagcgatatacttttatgctatactaccgtgggctggatgatgtggaattggatggtctctctcctggccaccggtgcagcaatggtgttgtacgatggctcccccttggtgcccactccaaatgtactctgggacttggtcgaccgaattggatacctggggagttggcgactgctgcagaatcagccgcaggaccgcggtcaccgccatgcctggcctgaatag

SEQ ID NO: 212980 - DNA, 1845 bp, synthetic construct
  misc_feature 1..1845: note = Description of Artificial Sequence: Synthetic coding sequence
  source 1..1845: mol_type = other DNA
atgaggcctccacaatgtttactgcacaccccaagcttggcaagtcctctgctgctcctgttgctgtggctactcgggggaggcgtcggagccgaagggagagaagatgccgaattgctcgtgactgttcgaggaggcagactccgaggcatcagactgaagacccctggtggtccagtcagcgccttcctgggcattccctttgctgagcctccaatgggccctaggcggtttttgccgccagaacccaagcagccttggtcaggcgtcgtggatgctacaacttttcagagcgtttgttaccagtatgttgacacactgtaccccggatttgaaggaactgagatgtggaatccaaatcgcgagcttagcgaagactgcttgtacctgaatgtttggactccatacccccgacctacatctccaacccctgttctggtctggatatacggaggtggcttctatagcggcgctagcagcctggacgtgtacgatgggagatttctggtgcaggcagagagaaccgtgctggtaagtatgaactacagggttggtgcattcggatttctggctcttccgggaagcagagaggctcctggcaatgtgggactgttggaccagagactggctctccaatgggttcaggaaaacgtggctgcctttggtggggatcccacctctgtgacacttttcggggagtctgccggagccgcttctgttggtatgcatttgctatcccctccctctcgaggccttttccatcgcgctgttttgcagagtggggctccaaatggaccatgggctacggtgggcatgggtgaggccaggagacgggcaacgcagctcgcgcacctcgtgggctgccccccaggaggcaccggagggaatgacacagagttagtggcgtgtctccgcacgaggcctgcccaggttctggtgaaccatgaatggcatgtgctgcctcaagagtcagtcttcaggttttccttcgtgccagtcgttgacggagacttccttagtgacactccagaggccctcattaatgccggagacttccacgggctgcaggtgcttgttggggttgtaaaagatgaaggctcctactttctggtgtacggagccccagggttctcaaaggataatgaaagtttgataagcagagctgagttcttagccggtgtgcgggtaggagtgccacaggtgagtgacctggccgcagaggcggtcgtgctccactataccgattggctgcatccagaggatcctgctagacttagggaggccctttctgacgtggtgggggatcataacgtggtgtgcccagtggcgcagctggccggtaggctggctgcccagggtgccagggtatacgcttatgtctttgagcaccgggctagtaccttgtcctggccgctgtggatgggagtcccgcacggttatgagatcgagtttattttcgggatcccccttgatccatctcggaattatacagccgaggagaaaatttttgcacagcggctgatgcgctattgggctaacttcgcacgcaccggcgatccgaacgaacccagagaccccaaggcacctcagtggcctccatacactgcgggagctcagcagtacgtctccctggacctcagaccgctggaagtgcggagagggcttagagcccaagcgtgtgcgttttggaataggttcctgcctaaattgctgagtgcaaccgataccctcgacgaagcagaacgccaatggaaagcagagtttcataggtggagctcttacatggtgcactggaaaaatcagtttgaccattactctaagcaggataggtgtagtgatttgtag

SEQ ID NO: 212981 - DNA, 1854 bp, synthetic construct
  misc_feature 1..1854: note = Description of Artificial Sequence: Synthetic coding sequence
  source 1..1854: mol_type = other DNA
atgcgcccaccccagtgcctgctgcatacaccctctctagcgtctccacttttattactgctactgtggttactcggcggaggcgtgggagcagaaggacgcgaagacgcggagctactggtgaccgttcggggtggccgacttcgcggtatcaggctgaagactcccggaggacccgtgtccgcttttttaggcatcccatttgccgaacccccaatgggcccacgccgatttctgccaccagaacctaagcagccgtggagcggtgttgttgacgctaccaccttccagtccgtgtgctaccagtacgtggacactctctacccgggattcgaaggaacggagatgtggaacccgaatagagagctcagcgaagattgcctgtacctcaacgtctggactccttacccgagacccacatctcctacacccgtcctggtctggatttatggtggtggcttctactccggcgcttcgtcactagacgtctacgacggcaggttcctggttcaggccgagcgtaccgtgctcgtttctatgaactaccgcgttggcgctttcggattcttggcactgccaggcagccgggaagccccagggaacgtcggccttctcgaccagagactggccctacaatgggtccaagagaatgtcgccgcatttggcggtgaccccacaagtgtcacgctctttggagagtcagctggggcagccagtgttggaatgcatctcttaagtcctccctctcgaggcctgtttcatagagccgtgttacagtctggggcacccaacggaccctgggccaccgtgggaatgggcgaggcccgtcgacgagccactcagctggcccatcttgtgggctgtccccctgggggtaccgggggaaacgacacggagctcgtggcttgtctccgcactcggcctgcccaggtgctggtaaaccatgaatggcacgtcctgccccaggagagcgtttttagattcagttttgtgcctgtagtcgacggcgactttctctctgacactcccgaggcgctgatcaacgccggtgatttccatggcctccaggttctggtgggagtcgtcaaagatgaaggttcctatttcctcgtgtacggggcaccgggattttccaaagacaatgagagtctcatctctcgtgctgagtttcttgccggtgtcagagtgggtgtgccacaggtgtcagacctcgctgccgaggccgtggtgctgcattacacagattggctccaccccgaggaccctgcccgtctccgcgaagcactgtccgacgtcgtgggagatcacaatgtggtgtgtccagtcgcacaactggcaggtcgcttggccgctcagggcgctcgcgtctacgcctacgtcttcgagcatagggcctccaccctgtcatggccactctggatgggtgtccctcacggatacgagatcgagttcatcttcgggattccactcgatccttctcgcaactatacggcagaggagaagatcttcgcacagcgccttatgaggtattgggctaactttgcacgcaccggggaccccaatgagcctagggatcctaaggcccctcagtggccaccctacaccgccggagcacaacagtatgtaagcctcgacctgaggccactagaagtgcgcaggggcctccgggcacaagcttgcgcattttggaacagatttctcccaaaactgctgtctgcaacagcctcagaggccccttcaacatgtccagggttcacccacggtgaagcagctccgaggccagggctgccacttcccctcctgctgctacatcagctgctactgctgttcttgtctcatctcagacgtctctag

SEQ ID NO: 212982 - DNA, 1854 bp, synthetic construct
  misc_feature 1..1854: note = Description of Artificial Sequence: Synthetic coding sequence
  source 1..1854: mol_type = other DNA
atgcgccctccacagtgtctgcttcatacacctagcctcgcgagcccattactgttgctcctcctgtggttgctggggggtggagtcggtgccgagggccgagaggatgcggaactgctagtgacagtacgcggaggcagactaagaggtatccgtctaaaaaccccaggtgggcctgtgagtgcattcctcggcattccgtttgcagaacctcccatgggtcctagaaggttcttgcctccggaaccaaagcagccctggtccggggtggtggacgccaccacgttccagtccgtgtgctatcagtatgtagacactttgtacccagggttcgagggaactgaaatgtggaatccaaacagagagcttagcgaagactgtctgtatctaaacgtgtggactccttacccccgtcccacttcccctacacctgtgctggtctggatttatggaggcggattctactcaggagcaagtagcctggatgtctatgatggtagatttctggttcaggcagagcgcacggtactggtatccatgaactatcgagtgggagccttcggtttccttgccttaccgggaagtcgggaagcaccaggaaacgttggacttctcgatcaacggctggctctgcagtgggttcaggaaaatgtggccgcttttggcggagatcctactagtgtcacactgttcggcgaaagtgccggtgcagcatcagttggtatgcatctcttatctccgccatcccgcggactcttccacagagccgtgctccagtctggggctcctaacggcccatgggctactgtgggcatgggcgaggcaagaagacgggctacacagctggcccatcttgtaggctgcccacccggagggaccggcggaaacgatacggagctcgttgcctgcttgcgcacccgccctgcacaggtgcttgtgaatcatgaatggcatgttctgcctcaagagtccgtgtttcggttcagctttgtacccgttgtggatggagactttctgtcagatacccctgaggctctgatcaacgctggagactttcatggactgcaggttcttgtaggcgttgtgaaagacgagggatcctactttcttgtttatggcgcacctgggttctctaaggataatgagagtctgattagccgagccgagttcctggcaggcgtgcgcgtcggggttccacaggtttcagatcttgcggcagaggcagttgtactgcactacactgattggctgcatccagaggaccccgctcggctgcgggaagctttgtctgatgtggttggcgaccacaatgtggtgtgccctgtcgcacagttggccggtagactggccgctcagggagcaagagtgtacgcctacgtctttgagcatcgggcttcgacattgagctggcccttatggatgggcgtgcctcatggatacgagattgagtttattttcggcatcccgctggacccctcccgtaactatacagctgaggaaaaaatcttcgcccagcgtctgatgcggtactgggcaaactttgcgaggaccggcgaccccaacgagcctcgggaccctaaagcccctcaatggccgccatatactgccggagcacaacagtatgtctctcttgatctgagaccgctagaggtccggaggggcttacgggcacaggcgtgcgccttctggaacaggtttcttcccaagctcctgtcagctacggccagcgaagccccttccacatgtcctggcttcacccacggcgaggcagctcccaggcccggactgccactcccactgcttctgctgcatcagcttctcctgctgttcctcagccacctgagacgtctatag

SEQ ID NO: 212983 - DNA, 1845 bp, synthetic construct
  misc_feature 1..1845: note = Description of Artificial Sequence: Synthetic coding sequence
  source 1..1845: mol_type = other DNA
atgagaccccctcagtgcctgctgcatactccttctctggcctcgcctttgctgctcttattgctctggctgctgggaggcggagtgggggcagaagggagggaggacgccgagctccttgttactgttagagggggacgtctccgaggcatccgactgaaaaccccaggtggccctgtcagcgcgtttctgggaattccgtttgccgagccccctatgggaccgaggcgcttcttaccacccgagcctaagcaaccatggtccggggttgtagatgccacaacctttcagagtgtgtgctaccagtatgtagataccttgtacccgggatttgaaggaactgagatgtggaatcctaacagggaactgagtgaagactgtctgtaccttaatgtatggactccctatcccaggcccacctctccgacacctgtcctcgtgtggatctacggcggaggcttttacagcggagcctcttcactagatgtctacgacgggaggtttctggttcaagcagagaggaccgtgctggttagtatgaattaccgtgtaggggcattcggattcctggcactccccggatccagggaggctcctggaaatgtgggcctgttagaccagcggctggccttacaatgggtgcaggagaacgtcgctgcatttggaggagacccaacaagcgtgacattattcggggagagcgcgggtgccgcttctgttggtatgcacctgctgtccccaccatctagaggcctcttccatagggcagtcctacagtcaggagcaccgaatgggccatgggctaccgtagggatgggggaggccaggcgccgagccacgcagttggcacaccttgtgggctgtccaccgggaggcacaggaggcaatgatactgaactcgtggcctgcctgcgtacaaggccagctcaggtcctcgtgaaccatgaatggcacgtgttgccccaggaatcagtctttcggtttagcttcgtgcccgtggtggatggtgatttcctgagtgacactccagaggctctgatcaacgctggcgactttcacgggcttcaggttctagtgggcgtggttaaggacgaaggctcatactttctggtctacggtgcgcctgggtttagcaaagacaacgagtcactaatctcaagagcagagtttctggcaggagttagggtgggagtgccccaggtgagcgacctggcggcagaggcagtggtcctacactatacagactggctgcacccagaagaccctgctaggctgcgggaagcattgagtgatgttgtcggagaccataacgtcgtgtgccccgtggcccagctcgcgggaaggctggctgcccagggcgcacgcgtctacgcctatgtgttcgagcatagagcctccactctcagctggccactctggatgggcgtgccccacggctatgagatcgagttcatttttggtatacccctggatccaagcaggaattacaccgccgaagagaagatctttgcccagaggctcatgcggtactgggcaaacttcgcccgtactggggacccaaacgaacccagagatcctaaggcgccacagtggcctccatacaccgccggagctcaacaatacgtgagcctcgatctccggccactcgaagtgcgtaggggactacgagcccaggcttgcgctttttggaatcggttcctccctaaactgctgtccgccaccgacaccctggacgaagccgagcgacagtggaaagccgagtttcacagatggtcaagttatatggtccactggaagaatcaatttgaccactacagcaagcaagacagatgcagcgacttgtag

SEQ ID NO: 212984 - DNA, 1581 bp, synthetic construct
  misc_feature 1..1581: note = Description of Artificial Sequence: Synthetic coding sequence
  source 1..1581: mol_type = other DNA
atgaggcccccacagtgtttgctgcataccccatccctggccagcccactcctgttgctactcctctggcttttggggggtggcgtgggagccgagggacgcgaggacgctgagctcctcgtgacagtcagaggaggacggctgcggggaatccgcctgaaaaccccaggaggtcccgtgtctgcatttcttggcatcccatttgctgagccaccaatgggccctcgaagattcctccccccagagccaaaacagccttggtcaggagtcgtggatgctaccactttccagtccgtgtgttaccagtatgtcgacaccctctatcctggatttgagggcacggaaatgtggaaccctaacagagagttatcagaagactgtctgtacctgaacgtctggaccccatatcctcggccaactagcccaacaccagtgctcgtgtggatctacggtggaggcttttacagcggtgcatcttcgctggacgtctatgatggaagattcttggtgcaggcagagcgcaccgtactggtcagtatgaactacagagttggagcatttggctttctggccctgcctgggagtcgagaggctccgggtaatgtgggcctcctggaccagcgcttggccctgcaatgggtccaggaaaacgttgcagcgttcggaggtgatccgacctccgtcactctgtttggcgaatctgctggagcagcctcggtgggcatgcatctgctcagtcctccctcacggggactgtttcatagggccgtcctgcaaagtggggctcccaacgggccttgggcgactgtcggaatgggggaggcacggaggcgtgccacccagcttgcccacctggtgggatgcccacccggtggcaccgggggtaacgacaccgagctagtggcttgtctgcgcaccaggcctgcccaggtgctggtgaaccacgagtggcacgttctcccacaggagagtgtcttccgctttagtttcgtaccagtcgtggatggagattttctctctgacaccccagaggccctaataaatgcgggtgactttcatggcctgcaattagccggtcggctcgcggctcagggcgcacgtgtgtacgcttacgtctttgaacaccgcgcatcgacactgtcttggcctctgtggatgggggtgcctcatgggtatgaaatagaatttatctttggtatccctctggatccgtccagaaattacaccgctgaagaaaagatattcgctcagcgcctcatgcggtattgggctaattttgccagaactggagatccaaacgaacctcgcgatccgaaagcaccgcagtggccaccctacactgcaggtgcacagcagtatgtgagcctagatcttaggccactggaggtcaggcggggactgcgcgctcaagcttgtgcattctggaatagatttctgccgaaattattgtcggccacagacaccctggacgaagctgaacgacagtggaaggcagaatttcatcggtggtctagctacatggtgcattggaaaaatcagtttgaccattattctaagcaggatcgctgttcggacctctag

SEQ ID NO: 212985 - DNA, 1806 bp, synthetic construct
  misc_feature 1..1806: note = Description of Artificial Sequence: Synthetic coding sequence
  source 1..1806: mol_type = other DNA
atgaggcctccacaatgcttactccacacaccatcactcgcctcgcctcttttgttgctcctgctgtggttgctgggcggaggtgtaggggctgagggcagggaagacgcagagctcctcgtgacagtccgaggtggcaggctgaggggcattcggctgaagacaccaggcggacccgtcagcgccttcttagggattccttttgcagagccccctatggggccacggcgtttcttaccgccagaacccaagcagccctggtccggggtcgttgatgctacaaccttccagtcagtgtgttatcagtacgtggatacactgtatcctggctttgaggggactgagatgtggaaccctaatagagaactgagcgaggattgcctataccttaacgtgtggacgccctacccacggccaacgagcccaacaccagtgctggtgtggatttatggcggaggcttctactccggggcaagttctttggatgtttacgacggcaggtttcttgtgcaagcggaacggaccgttttggtctccatgaattaccgggttggggctttcggatttctggctctcccaggctctcgggaagccccaggcaacgtgggactgctcgaccaacggttggccttacagtgggtgcaggagaacgtcgcggctttcggcggagatcccactagcgttaccctctttggcgagtccgccggtgccgcttcagtgggcatgcatctgctgtctccaccgagcagaggcctctttcacagagccgtactgcagtcgggagcacctaacggcccatgggcaacagtgggcatgggcgaggcaaggagaagggcaacgcaactggcccatctggtaggatgccctcccggaggaacgggcggaaatgacactgagctggttgcatgcttgcggactcgcccagcccaggttctggtaaatcacgaatggcatgtgctgccacaggaatccgtgttccggttttcattcgtacccgtcgttgatggcgacttcttatcggacacacccgaggccctcatcaatgcaggtgacttccacggtctacaggtccttgttggcgtggttaaggatgaaggaagttacttcctggtgtacggcgcacctgggttctcaaaggacaatgaatctttaatttctcgcgctgagttccttgctggtgtccgagtgggcgtcccacaagtctccgacctggccgcagaggcagtggtgctccattataccgactggctgcaccctgaagaccctgccaggttgcgagaggcactgtctgatgttgtcggcgaccataatgtcgtttgtccggttgctcaactcgcagggaggctggctgcccagggggcacgtgtctacgcctatgtgttcgaacacagagcttcaacccttagctggccactgtggatgggggtcccccacggatacgagattgaatttatcttcgggatcccccttgatccatcaaggaactacaccgccgaagagaaaatattcgctcaacgccttatgaggtactgggccaactttgctcgaactggtgaccctaacgagcctcgggatcctaaggctccccagtggcctccctacaccgctggggctcagcaatacgttagcctggacctgcgtcctttggaggtgaggagaggtttacgggctcaggcttgtgccttctggaataggttcctgccaaagttgttgtccgccacaggaatgcagggacctgctggctctggcaggaggggcgtgggggcacgctgcaacccctctctgctgccccttgcctccgagtag

SEQ ID NO: 212986 - DNA, 1845 bp, synthetic construct
  misc_feature 1..1845: note = Description of Artificial Sequence: Synthetic coding sequence
  source 1..1845: mol_type = other DNA
atgagacctccacagtgtctgctgcacacaccctcactcgcatcgcccctacttttactgttactgtggctcctcggtggaggggtgggagctgagggccgagaagatgccgagctgcttgtgaccgttagggggggaagattgcgtggaatccgcctcaaaacccccggaggtccggtgtccgcatttctaggaattcccttcgcagaaccacccatgggtcctcgtcgcttccttccacccgagccgaaacagccgtggagcggggtagtcgacgccacaacatttcagtctgtctgttaccaatacgttgatacactgtaccctggcttcgaaggaactgaaatgtggaaccctaatagagaactgtccgaggactgtctctaccttaacgtgtggaccccatatccgaggcccacttcgccaacaccggttcttgtgtggatttatgggggaggcttctacagcggcgcaagttcccttgatgtgtacgatgggagatttctggttcaagctgaacgaacagtgctagtatcgatgaattacagggtcggggctttcggattcctcgccctccccggttcgagggaggctccaggcaacgtaggtttgctggaccaacggctggccctgcagtgggtgcaagagaatgtggcggcatttgggggagatccaacttccgtcacattgtttggtgaatcggcaggcgcagcatccgtcgggatgcacctgttgtcgccccctagccgagggttattccaccgcgctgtgttgcaatccggagcccctaatggaccttgggccaccgtgggcatgggggaggcgaggcggagggccacccagctggctcaccttgtgggttgcccgccaggaggcacgggtggaaacgatactgagttagtcgcttgtttgcggacacgccctgcgcaggtgctggtgaatcacgaatggcatgtgttgccacaggagtccgtgttccggttttctttcgtgcccgtggtagatggcgatttcctctctgatacacctgaagcactgatcaatgctggagacttccatgggctgcaggtgctagttggcgtcgtcaaggatgagggatcttactttctcgtttacggcgctcccggattttcgaaggataatgagtctctcatcagtagagccgaatttcttgcaggagttcgggtgggagtccctcaggtgtctgatctggcagctgaggctgtggtgttgcactacaccgactggcttcaccctgaggatcccgctcgcctacgcgaagcattgtccgacgtggtcggggatcataatgtggtgtgcccagtcgcacagttggctgggagactggcagcccagggtgcacgggtttatgcgtatgtgtttgagcatagggcctccaccctgtcgtggcctctatggatgggggtgcctcatggctacgagatcgagttcatcttcggtattcctttggatcctagcaggaattatacagccgaagagaaaatatttgcacagagactgatgcgctactgggcgaattttgcaagaaccggcgatccaaatgagccacgggatccaaaagcaccccagtggcctccctacaccgccggagctcaacaatacgtctcccttgatctgcgcccattagaggtccggcgaggcttgagagcacaggcgtgcgccttctggaacaggtttcttccaaagctactctcagccacagacaccttggacgaggcagagagacagtggaaagcagaatttcaccggtggtcctcatatatggtgcattggaagaatcagtttgaccattactcgaaacaagatcggtgcagcgacttgtag

SEQ ID NO: 212987 - DNA, 480 bp, synthetic construct
  misc_feature 1..480: note = Description of Artificial Sequence: Synthetic coding sequence
  source 1..480: mol_type = other DNA
atgcgtccacctcagtgtctgctgcacactccctcgctcgcttcacccctacttcttctcctgctgtggttgctcgggggaggagtgggggcagaaggaagagaggacgcagagctgcttgtcacagtgaggggcggtcggctccggggtatccgcctgaagactcccggtggacctgtgtccgcattcctgggtattcctttcgctgaacccccaatgggacctaggcgcttcctgcctccagagcccaaacagccctggtcaggagttgtggatgccacgacttttcagtctgtgtgttatcagtacgtggacacactttacccagggttcgaggggacagagatgtggaacccgaacagagagttgagtgaggattgcctgtatctcaacgtgtggactccctaccctcgacccacatcgccgacaccggtgttggtatggatttacgggggagggttttactctggcgcaagctag

SEQ ID NO: 212988 - DNA, 87 bp, synthetic construct
  misc_feature 1..87: note = Description of Artificial Sequence: Synthetic coding sequence
  source 1..87: mol_type = other DNA
atgcggcctcctcagtgcctgctgcacacaccctccctggcttcccccctactgttgctgctgctgtggctcctcggtggcggttag

SEQ ID NO: 212989 - DNA, 282 bp, synthetic construct
  misc_feature 1..282: note = Description of Artificial Sequence: Synthetic coding sequence
  source 1..282: mol_type = other DNA
atgttgggacttgtcatgagttgccccgaccggacactggtcaccaaggtgcgatctcatcctagcggtaaccagcacagacccacccgcggaggctctcgctcattccattgtaggagaggcgtgcctcgaccggcagccctgagagtcctgccccgatgccccgcattcagcgatgccgcttgcccggctgcgatgcgtccacctcagtgcctcttacacacgcctagcttggcctccccactgcttttgctcctgctttggctattagggggtggctag

SEQ ID NO: 212990 - DNA, 1284 bp, synthetic construct
  misc_feature 1..1284: note = Description of Artificial Sequence: Synthetic coding sequence
  source 1..1284: mol_type = other DNA
atggctgtcctggcagccttgctgcgatcaggggctcgcagtaggagtccccttctcagaagactggtgcaagagatacggtatgtggagcggagttacgtttcaaaacctacacttaaggaggtagtaatcgtttccgctactaggacaccgattgggtcgtttctgggcagtttatccctgctgccagccacaaaacttggcagcatcgcgatccagggagccatagagaaggctggcattccaaaggaggaagtgaaggaagcctatatgggaaatgtcctacagggtggggagggacaagccccaacccgccaggctgtgctgggcgctgggcttccaatttcaacaccttgtacaaccataaacaaggtatgtgcctctggaatgaaggcaataatgatggcctcacagagtctaatgtgcggccaccaggatgttatggtcgccggaggcatggaatcaatgtccaatgtaccatatgttatgaatcgcggatccactccctacggtggagtaaaacttgaggaccttatcgtgaaggatgggctcactgatgtctacaacaaaattcatatgggatcttgtgccgaaaataccgctaaaaagctcaacattgctcggaatgagcaggacgcttatgccatcaattcctatacaagatcgaaggcagcatgggaggctgggaaattcggcaatgaagtgatcccagtcaccgtgaccgtgaaaggtcagcccgacgtggtcgtgaaggaggatgaggaatataaacgggtcgacttcagtaaggtcccgaaactcaagaccgtcttccagaaggagaatggtacagtgacagctgccaacgcttccaccctgaacgatggcgctgccgcactggttctgatgaccgctgatgctgcgaagcgtttgaacgtaactcccctggccaggattgtggcgttcgccgacgctgctgtagagccaatcgactttccaatcgcaccagtgtatgcagccagcatggtgctgaaagatgtgggtctgaaaaaggaagacattgccatgtgggaagttaatgaggcattctcgctggttgttctggcaaacattaagatgctagaaattgacccccagaaagtaaatataaacggaggagccgtatctttgggccatcccattggaatgtctggggctaggatcgtcggccatcttacacacgcgctgaagcagggtgaatacggcctcgcttctatctgcaacggcggtggtggagcttcagctatgttaattcaaaaactgtag

SEQ ID NO: 212991 - DNA, 1194 bp, synthetic construct
  misc_feature 1..1194: note = Description of Artificial Sequence: Synthetic coding sequence
  source 1..1194: mol_type = other DNA
atgaatgcagggtctgacccagtggtcatcgtgagcgctgccagaacaatcatcgggtctttcaacggagcgctcgccgctgttccggtccaagatcttgggtctaccgtcattaaagaggtcctaaaaagagctactgttgcccctgaggatgtcagtgaggtgatctttggtcacgtcctcgcagccggatgtggccagaaccccgtgcgtcaggccagcgtcggagctggcatcccttacagcgtcccagcctggtcatgtcaaatgatttgcgggtccggcttgaaagcagtctgtctcgccgttcaaagtatcggtatcggggactcctcgatagtcgtggcaggcggaatggaaaacatgtctaaggcacctcatctggcttatctgcggacgggcgtcaaaatcggggaaatgccgcttaccgattcaatcctttgcgatggcctcacagatgcgtttcacaactgccatatggggattacagccgagaatgtagcaaaaaagtggcaggtgtcaagagaggatcaggacaaagtcgccgtgctttctcaaaaccggaccgaaaatgcgcagaaagcgggtcatttcgataaagagatcgtgccggtgctggtttccactcggaaaggtttgattgaagtcaagactgacgagttccccagacacggttccaacatcgaagcaatgtctaaactaaagccatattttctaaccgatggcaccgggaccgtcactcccgcaaatgcctccggcattaacgatggggctgccgctgtggtcctcatgaagaagagtgaagcggacaaaagggggctcacacccctggcacgaattgtgtcatggtcccaggtgggggtagaacctagtattatgggtattggccctattccagctataaagcaggctgtgacgaaggcagggtggtccctggaagacgtcgacattttcgaaatcaatgaggcctttgcagcggtgtctgctgcaatcgtgaaagaattgggcctcaatcctgagaaagtgaacattgagggtggggcaattgcgctgggccacccactgggcgctagtggttgccgaatccttgtcacgctactccataccctggagaggatggggagaagcaggggcgtcgccgctttatgtattggcggtggtatggggatcgcaatgtgcgtccaaagagagtag

SEQ ID NO: 212992 - DNA, 1281 bp, synthetic construct
  misc_feature 1..1281: note = Description of Artificial Sequence: Synthetic coding sequence
  source 1..1281: mol_type = other DNA
atgggttctcaccccgtcctgcgaatttggggaaatcgcagagctacagcggcttcactaggcagatctggcggtcgcttgagttcacctaggctgctgagggtggtggcccctaccctcacgttcgcccagacatcccgctgtagcttcaatggggctttggccgctgttccagtacaggacctgggatctactgtcataaaggaggtgctgaaaagggccaccgtggctcctgaggacgtgtcggaggtgatatttggccacgttcttgcagctggatgcggccagaatccagtgagacaggcaagtgtgggcgctgggataccctatagcgttcctgcctggtcttgccagatgatatgcgggtcaggtctgaaggcggtgtgtctggctgtccagtctattgggattggcgactcctccattgtggtggctggtggcatggagaacatgtcaaaggctccccacctcgcgtacttgcgcacaggagtgaagattggggagatgcccctgacagattccatactctgtgacgggctcacagatgcgtttcacaactgtcacatggggataactgccgaaaacgtagccaaaaaatggcaagtttcaagagaagaccaggacaaggttgctgtgttatcccagaacaggaccgagaatgcccagaaagcagggcatttcgataaagaaatcgtgcctgttttggtgtccacgcggaagggactgattgaggtgaaaactgatgaatttcctagacatgggagtaacatcgaagccatgtctaagcttaagccatacttcttgactgacggcaccggaacggtgactcctgctaacgcctcaggaatcaacgacggtgctgccgcagttgtactcatgaagaagagcgaagctgataagcgcggtctgacccccctggccagaattgtgtcctggtcccaggttggcgttgagcctagtatcatgggaatcggtccgatcccagccataaaacaggccgtcaccaaggccggatggtctctggaggatgtggacatttttgagatcaatgaagctttcgctgcggtttccgctgcaatagtgaaagagttgggcctaaacccagagaaagtgaatattgagggaggagccatcgcgcttggccatcctctgggagcctccgggtgtaggattttagtaaccctgcttcacaccctggagagaatgggtcgctccaggggggttgctgccctatgcatcggcggaggtatggggatcgccatgtgcgtccagcgcgaatag

SEQ ID NO: 212993 - DNA, 1275 bp, synthetic construct
  misc_feature 1..1275: note = Description of Artificial Sequence: Synthetic coding sequence
  source 1..1275: mol_type = other DNA
atgcagagactgcaggtcgtgttgggccacctgcggggacccgcagatagcggttggatgcctcaggccgctccctgtttgagtggggcaccacaggcatcagccgcagatgtagtcgttgtgcatggaagacgcacagccatatgtagggccggacgaggcggattcaaggacaccactcctgacgaactgctgtcagccgtgatgaccgcggtgttgaaggatgtgaacctgcgaccagagcagctaggcgatatatgcgttggaaatgtccttcagccgggtgctggcgctataatggccaggattgctcagtttctgtccgatatacccgaaaccgtgccattgtccacagtgaatcgccagtgcagttctgggctgcaggccgttgcgtcaatcgcgggtggcatccggaatggcagttacgacatagggatggcctgtggcgtagagtcaatgtccctagcggatcgtggcaaccctggcaacattactagtcgtctgatggaaaaggaaaaggccagggattgcctgatccccatgggcattacaagcgaaaatgtcgccgagagatttggtatctcacgcgagaaacaagatacctttgctctcgcctcgcagcagaaagctgcaagagcccagagcaagggttgtttccaggctgaaatagttcccgtgactacaactgtacacgatgataaagggacaaagaggtcaatcaccgtcacacaggacgagggaattaggccctcgacgactatggaaggcctggccaagctaaagccggcatttaaaaaagacggcagtaccactgccggtaattccagccaagtgtcagatggtgccgctgcaattttactcgctcggagatctaaagcagaagagctgggactccctatcctgggtgtgttgagatcttacgccgttgtgggcgttcctcccgacatcatgggaatcgggccagcttacgctattccagtcgctctgcagaaggctggtctgaccgtctcagacgttgacatatttgagatcaatgaggcttttgcctcccaggccgcatactgcgtggagaaattgcggttgcctccagaaaaggtaaaccccctcggtggagctgtcgccctagggcaccccttgggttgcactggggctagacaggtaataaccttgcttaatgaactaaaacgcaggggcaaaagagcatatggggtggtaagcatgtgcattggcacaggcatgggtgctgccgcagtattcgagtaccctggaaattag

SEQ ID NO: 212994 - DNA, 1071 bp, synthetic construct
  misc_feature 1..1071: note = Description of Artificial Sequence: Synthetic coding sequence
  source 1..1071: mol_type = other DNA
atgaccgccgtcctgaaggacgtaaacctgcggcctgagcagcttggggacatttgtgtgggcaacgtcctgcagcctggcgctggggctatcatggctcgtatcgcccagttcctgtccgatatccctgaaacagtgccgctgagtaccgtgaacagacaatgctcatctggcctccaggcagtagcatcaatcgccggaggtattagaaatgggagctatgatatcgggatggcctgtggtgtcgaaagcatgagcttggccgacaggggtaatcccggtaatattacaagccggttgatggagaaggagaaggcccgtgattgtctgatccctatggggatcacgtccgagaatgtcgcggagcgattcggcatcagtcgagaaaaacaggatacattcgcccttgcaagccaacaaaaagctgcgagggcacagagcaagggatgcttccaggccgaaatagtgccagtgactactaccgtgcacgacgataagggtaccaagagatccatcacagtgacacaggatgaggggatacgaccatccacgacaatggaaggtctggccaaactaaagcccgcatttaaaaaagatggctctaccaccgcgggtaattccagtcaggtgtctgacggcgctgctgcaatccttctggctcgcagaagcaaagcggaggaactagggctcccaatcttaggagtgctgaggagttacgccgttgtgggagtgccacccgacataatgggaataggtccagcctacgccatcccggttgctctgcagaaggccggattgaccgtcagcgacgtggacattttcgaaataaacgaagcctttgccagtcaagcagcatactgtgtggagaagctgcggctgcctcccgagaaggtgaacccactcggtggcgctgtcgccctaggtcacccactcggctgtaccggggctcggcaagtcattaccctgctgaatgagctgaaacgcagggggaaacgtgcctatggggtggtttccatgtgtattgggacgggcatgggcgcagccgctgtgtttgagtatccgggaaattag

SEQ ID NO: 212995 - DNA, 462 bp, synthetic construct
  misc_feature 1..462: note = Description of Artificial Sequence: Synthetic coding sequence
  source 1..462: mol_type = other DNA
atgcagagactgcaggttgtcctcgggcacttgcgaggccctgccgacagtgggtggatgccacaggcagccccttgtttgagcggagctccacaggcctcggccgctgatgttgtggtggtgcacggcaggcggaccgcgatatgcagagccggtaggggaggatttaaggatactactccagatgaactgctctccgccgtgatgacagcggtattgaaggatgtaaaccttagacccgagcagttgggggatatatgcgtggggaacgtgcttcagccaggcgcaggtgccattatggctaggattgcgcagttcctttctgatatccccgaaacagtcccgttatccacagttaatagacagtgcagttccgggctgcaggcagtggccagcattgctgggtggtcaccttgcccttggcttaccgaaggtaccctcgaaatccttctgcgggcatag

SEQ ID NO: 212996 - DNA, 381 bp, synthetic construct
  misc_feature 1..381: note = Description of Artificial Sequence: Synthetic coding sequence
  source 1..381: mol_type = other DNA
atgagcctcgcagacagaggcaaccccggtaatatcacctcccgacttatggaaaaggagaaggctagggactgcctcatcccaatgggcatcacatcagagaatgttgccgaaaggttcggaatttctagagagaagcaggataccttcgcactggccagccagcagaaagccgcacgggctcagtccaaaggctgcttccaagccgagatcgtcccagtaacgacgactgttcacgacgacaagggcacaaaacggtcaatcacagtaactcaggatgaaggaatccgacctagtaccacaatggaggggctagctaagttaaagcccgcatttaagaaagatggcagcacaaccgcgggtgagactgggccaggttag

SEQ ID NO: 212997 - DNA, 996 bp, synthetic construct
  misc_feature 1..996: note = Description of Artificial Sequence: Synthetic coding sequence
  source 1..996: mol_type = other DNA
atgcaacgactgcaagtggtcctcggtcatctgaggggccctgcagacagcggctggatgccccaggcagctccttgcctctcaggcgcaccgcaggccagcgccgctgatgtagtcgtggtgcacggcaggagaactgccatctgtagggccggtagaggaggattcaaggataccaccccggatgaactgctgtctgccgttatgactgccgtgctgaaggatgtaaacctcaggccagagcaattgggtgatatctgtgtgggtaatgtgctgcagcccggagctggtgctatcatggcgcgaatcgctcaatttctctccgacattcccgaaaccgtgcccctgtctacagtgaaccgtcagtgttcatccggccttcaagccgtcgcgagcatcgccggtggtatccgaaacgggagctacgatataggtatggcctgcggcatcacgagcgagaatgtcgctgagcgctttggtataagtcgtgaaaaacaggatacattcgctctcgccagccaacaaaaggccgcaagggcacaatcgaagggatgttttcaggcagagattgtgcccgtcacaaccacagtgcatgacgacaaaggtacaaaacgcagcatcactgttacccaggatgagggtatacggccatcaacaactatggaaggcttagccaaactgaagcccgcattcaaaaaggatggcagcacaaccgcagggcttacagtttccgatgtggacatatttgagattaacgaagctttcgcgagccaagcggcatattgtgtggagaaactccggctccctccagaaaaagtgaaccccttgggtggggctgtcgcattggggcaccctttggggtgcactggcgctagacaggtgataacactgcttaacgagctgaaacgcaggggcaaacgggcatacggggtggttagtatgtgtatcgggacaggaatgggagcagcagccgtcttcgagtaccctgggaactag

SEQ ID NO: 212998 - DNA, 7376 bp, synthetic construct
  misc_feature 1..7376: note = Description of Artificial Sequence: Synthetic coding sequence
  source 1..7376: mol_type = other DNA
atggttttactcctgtgtttgagctgcctgatcttcagttgccttacattttcttggctcaaaatttggggtaaaatgaccgacagtaaaccgataacgaagagcaaatccgaggccaacctcatacccagccaggagccttttcccgctagtgacaactctggtgagaccccccagcggaacggtgagggacacacgttacctaagacgccgagccaggccgagcctgcatcccacaaaggtccgaaggacgctggtagaaggcgcaactcattgccaccctcacatcagaagcctcctcgcaatcccctgagcagcagtgatgccgctccttctcctgaactgcaggcaaatggaaccggaacacaaggtcttgaagccacagacacaaatggcctaagcagctcagcccgaccccaggggcagcaggcaggcagtccatccaaagaagataagaagcaagcgaacataaagcgacagctcatgacaaatttcatactgggctctttcgacgactatagcagcgatgaggactcagttgctggtagctcccgagagtccacacgaaagggttccagagcttctcttggcgcactttccttggaagcctatctcacaaccggggaggcagagaccagggtcccaactatgagaccatcaatgagcggattacacctcgtgaaacgcggaagggagcataaaaaactagatctgcacagggatttcactgtagccagccccgcagaatttgtgacacggtttggcggagaccgcgttatcgagaaagtcctgatagcgaataatggcatcgctgcagtgaagtgtatgcgcagcattaggagatgggcttacgagatgttccggaacgaaagagccattaggtttgtggtgatggtgacccccgaagatctaaaagcgaacgccgagtacataaagatggcggatcattatgtgcctgtgcccggtggcccaaacaataacaattatgccaacgtcgaattaatcgttgacatcgcgaagaggatccccgttcaggcagtgtgggcgggatggggtcatgcatccgagaatcctaaactccctgagcttctgtgtaagaatggggtcgccttcctgggtcccccaagcgaggccatgtgggcactgggagataaaattgcgtctaccgtcgtggcccagacactgcaggttccgaccctgccctggtctggtagcggacttaccgtggagtggaccgaggacgatctgcagcaggggaaacgcatctccgtgccagaagatgtttatgacaagggatgcgttaaggacgtggacgaagggcttgaggccgctgaacgcatcggttttcccttgatgatcaaggccagcgaaggcggtggcggaaaggggatacgcaaagccgaaagcgccgaggactttccaatactgtttaggcaggtccaatcagaaatcccagggagtcccatatttttaatgaaactggcacaacacgccagacatctggaggttcagatactcgcagaccagtacggaaacgcagtgtcgctcttcggtagagactgttccatccagcgcaggcatcaaaagattgtcgaggaggcccctgctacgatagcgccattggcaatcttcgaattcatggagcagtgcgccatacggctggcaaagacggtgggttacgtctctgctggaaccgtagaatatctgtattcgcaggacggctctttccactttttggagctgaatcctcgcctacaggtcgaacatccatgtactgagatgattgctgacgtaaacctgccggcagcgcagctgcaaatagcgatgggggtgcccctgcacagactgaaagatatccggcttctgtacggcgagtcaccgtggggggtcacacccatcagctttgaaaccccaagtaatccacctctagcacggggacacgttattgccgctcgtatcacctccgagaacccagacgagggcttcaaaccgagctcaggaactgtacaggaactgaactttagaagttccaagaatgtgtgggggtatttttccgtggctgctactggcggtctgcatgagtttgccgacagtcaattcggacattgttttagctggggggaaaatagggaggaggcaatcagtaatatggtggtggccctgaaggaactgtcaatcaggggcgacttccgaactaccgttgaatacctcatcaacctgctggagaccgagagcttccagaataatgacatagacaccggttggctggattacctcattgctgagaaggttcaggcagaaaagcctgatataatgttgggcgttgtgtgtggcgctctcaacgtcgcagacgccatgtttaggacctgcatgaccgattttttacattctcttgaacggggacaggttttaccagccgactccctgctgaacctggtggatgtggagcttatttacggtggagttaagtatatcctgaaggtggcaaggcagtcacttacaatgtttgtcttgatcatgaatggttgccacatcgaaatcgacgcccaccgcctgaatgatggcggactgctcctgtcctacaatggaaattcctataccacctacatgaaggaggaggtggacagttatagaatcaccatcgggaataaaacatgcgttttcgaaaaagaaaatgaccctacagttctgcgttccccatcagcaggaaagctaacccagtacactgtcgaggatggagggcacgttgaagccggatcttcctatgcggagatggaggttatgaaaatgatcatgactctgaatgttcaggagcgcggaagggtgaagtatattaagcgcccaggcgcagtgctagaagccggatgtgttgtggccagactcgagttggacgatccctccaaggtgcaccctgccgaaccatttaccggcgaattgcccgctcaacagaccttaccgattcttggcgaaaagttgcatcaggtgtttcacagtgtactggaaaacctaacgaatgtgatgtccggcttttgcctgcccgagccagtctttagtattaaactgaaagagtgggttcagaaacttatgatgactctccggcatcctagccttccactgctggaactgcaggaaatcatgacgtcagttgccggaaggatacctgccccagtggaaaaatctgtgaggagggtgatggctcagtacgcctctaatattacttcagtgctgtgccagttcccgagccagcagattgctactatcctcgactgccatgctgcgactttgcaacgtaaagccgacagggaggtcttctttatcaatacccagagtattgtccaactcgtgcagcggtaccgatcagggattagaggttatatgaagacggtcgttcttgacctgctgagaaggtatctgcgagtggagcaccattttcaacaggcccactacgacaagtgtgtgattaacctgagagaacaattcaagccagacatgtcacaggtgctggactgtatcttctcacacgcccaagtcgccaaaaaaaaccagcttgtgattatgttgattgacgagttatgcggacccgatcccagtctgtccgacgagctcatctctatactgaacgagctgacacagctttctaagtccgagcactgtaaggtggctctccgggcacgtcagatcctcatcgcatcacacctgccttcttacgaactaagacataaccaggtggagtcaatcttcttatccgctatcgacatgtacgggcatcagttttgccccgaaaatctgaagaagttgatcctatcagagaccacaatttttgacgtcctgccaacttttttttaccatgcaaataaggtggtatgcatggcttctctggaagtgtatgtgcgcagggggtacatagcctacgagctaaactccctgcagcaccggcagcttcccgacggtacctgtgtggtggagttccagtttatgctaccttcatctcatcctaatcgcatgactgttccaataagtattactaacccagatctcctccgacactcaactgaattgtttatggatagtggctttagccctctgtgccagcgcatgggtgccatggtcgcctttcgacgcttcgaagactttacacggaactttgacgaagttatttcatgttttgccaatgttcctaaagatactcctttgtttagcgaggcgagaacttctttatacagcgaagacgactgtaaatcactcagggaggagcctatccacattttgaacgtgagcatccagtgcgcggaccacctcgaggacgaagccctggtgcctattctgcgcactttcgtgcaaagcaagaagaatattcttgtggattatggactgagacggatcacctttctgatcgcccaggagaaggaattccctaaattcttcacattccgcgctagggatgagtttgcagaggacaggatctatcgacatttggaacccgctctggcctttcagctcgaattgaacagaatgcgtaatttcgacctgaccgcggtgccttgcgcaaatcacaaaatgcacttatatctgggcgcagcaaaggtgaaggaaggggtggaagtcactgaccatcgtttttttatccgcgcaatcatcaggcatagcgacttgatcacgaaggaagccagctttgaatatttgcaaaacgaaggcgagcgtctccttctcgaggcaatggatgaactggaagtggcatttaacaatacttcggtccgaaccgactgcaatcacattttcttaaactttgtgcccaccgtgattatggatccctttaagattgaggagagtgtacggtatatggtgatgcgatacggttctaggctgtggaagctgagagtactgcaagcggaagtgaagattaacatccggcagacaacaactgggagcgccgtgcctatccgccttttcatcactaatgagagtggatactatctggatatatcactgtacaaagaggtgaccgactcccggagtggcaatatcatgttccactcctttggaaacaaacaggggccacagcacgggatgctgatcaacaccccctacgtcactaaggatctcctccaagcaaagaggtttcaggcacagacattgggaactacctatatctatgactttcctgaaatgttccgtcaagccctgtttaaactgtggggctctccagataagtacccaaaagatattctcacctacacggagttagtactggacagccaaggccaactagtagaaatgaatcgtctccctggcggaaacgaagtaggtatggttgcctttaagatgagatttaaaacacaagagtatccggaagggagggacgtgattgtcattggcaacgatatcaccttcaggattgggtcctttgggcctggggaggatctactctacttaagagcctcagaaatggccagggccgaggggatccctaagatttatgtagccgcaaacagtggtgctagaatagggatggctgaggagattaaacatatgtttcacgtggcatgggtcgaccccgaggacccacataaaggttttaagtacctgtacctgacaccccaggattatactaggatttcctcactcaacagtgtccactgcaagcacattgaagaaggcggtgagtcgcggtatatgattactgatatcatcggcaaggacgacgggcttggggtagaaaaccttcgtggcagtggtatgatcgccggagaaagttcgctggcctacgaagagattgtgacgatctctttggttacatgtagagctataggcattggagcttacctggtgaggctgggacagcgcgttatccaggtcgagaatagccacattattctgactggggcttcagccctgaacaaagtgctcggccgtgaagtctatacatccaacaatcaactagggggagtgcagattatgcactacaacggggtgagccacattactgtgcccgacgactttgagggcgtgtacacaatcctggaatggttgtcatacatgccgaaggataatcattctcctgtccctattattactccaacggatccaatcgaccgagagattgagttcctgccctctcgggcaccctatgatccgaggtggatgctggccggacgacctcatcccaccctgaaggggacctggcagagtggcttctttgatcacggctctttcaaagagatcatggccccatgggcccaaactgtggtcacaggcagggctcggctgggcggtatccctgtaggcgtgattgccgtggaaacgcgtactgtggaagtcgctgtccccgcagacccagctaatcttgattctgaagccaagattatccagcaggctgggcaggtatggtttcctgactcagcatataagacggcccaggccgtgaaggacttcaaccgagagaaacttccactcatgatctttgctaattggagagggttcagcgggggaatgaaagacatgtatgatcaggtcttaaagtttggggcttatatagtcgacggtctcagacagtacaagcagcccatcctgatatacattccgccttacgccgaattacgcggtgggtcctgggtggtgatcgacgcaaccatcaacccactttgcattgaaatgtacgccgataaggaaagccggggaggggtgttggagcccgaaggaacagtggagatcaaatttcgaaagaaggacctgataaagagtatgcgtcgcatcgatcctgcctataagaagctgatggaacagttgggcgaacctgacctatccgataaggacaggaaagatctggaagggaggcttaaagctcgggaggatttgctgctcccaatctaccatcaggtggctgtccagttcgcggatttccacgacactcccggacgcatgctggagaagggcgtgattagcgacattcttgagtggaaaacagcccgtacttttctctactggcgcttacgacgcctactgttggaagatcaagtgaaacaggaaatactccaggcgagtggggaacttagccacgtacatattcagtccatgctgaggcgttggtttgtggagaccgaaggcgcagtgaaagcatatttgtgggacaacaaccaggtcgtggtgcagtggttggaacaacattggcaggcaggcgatggccctcgtagcacaattcgcgagaacatcacatatttgaagcatgattctgttttaaaaactatccgcggtcttgtagaggaaaatcctgaagttgcagtcgactgcgttatatatttatcccagcatatttcccctgccgaaagggcccaggtggtgcaccttctcagtacaatggacagtcctgcatcgacata

SEQ ID NO: 212999 - DNA, 7376 bp, synthetic construct
  misc_feature 1..7376: note = Description of Artificial Sequence: Synthetic coding sequence
  source 1..7376: mol_type = other DNA
atggtcttgctcctgtgcctgtcatgtctcatatttagctgcctcaccttcagctggctgaagatctgggggaaaatgactgactccaagcccatcactaagtcaaagtctgaggccaatttgattccgtcccaggagccatttcctgcgagcgacaattccggggaaactccccagagaaatggggaggggcacacgttacctaaaaccccctctcaggcggaacccgctagtcacaagggccctaaggacgccggaagacgacgcaattccctcccacccagtcatcagaagccaccacggaaccctctgagctcttctgacgccgctcctagcccggaacttcaggcaaacggtaccgggactcaggggttggaggccaccgacactaacggcctttcctcctctgctcgtccccagggacagcaagcagggtcccccagcaaagaggacaaaaagcaggccaatatcaaacgccagttgatgaccaattttattctgggcagctttgacgattatagctcagacgaggattccgtggccggatcctctcgagagtcaacgcgaaaggggagtcgcgcaagcctaggggcactgtccttagaggcatacttaaccaccggagaggctgaaaccagagtaccaaccatgcggccatccatgagtgggcttcatctcgtcaagaggggtcgggagcataagaagttagatctccaccgagacttcaccgtggcaagtcccgctgagtttgttaccagatttggcggtgaccgagtaattgagaaggttcttattgcaaataatggcatcgcagccgtgaaatgcatgagaagtataagaaggtgggcatacgagatgtttaggaacgagagggctataagattcgtcgtcatggtgacgcctgaggaccttaaggcaaacgcagaatatattaagatggccgaccactacgtcccggtgccagggggtcctaacaacaacaattacgccaacgtggagctcattgtcgatattgcgaaacgtatccctgtccaagctgtttgggccggatggggccatgcctctgagaaccccaagttgcccgagctcctgtgcaagaacggggtggcgtttttggggccaccctccgaagctatgtgggccctgggtgataaaatcgcttctaccgttgtggcacaaactctgcaagttcctacactcccatggtccggatctggcttgactgttgagtggactgaagatgacctgcagcaaggcaagcgtatctccgtacccgaagacgtttacgacaaaggctgtgtaaaagatgtggacgaaggactcgaggccgctgagcggataggtttcccactaatgatcaaggcatctgaggggggtggtggcaagggaattcggaaagctgaaagcgccgaggattttcctattctgtttaggcaagtgcagtcggaaatccctggtagcccaatttttctgatgaagttagcacaacacgcccgacatctggaggtgcagatactcgcagaccagtatggaaacgcggtgagtctgttcggacgagactgctcgattcagaggcgccatcagaaaatcgtggaggaagcaccagctacaatagcccctttagccatcttcgaatttatggagcagtgtgctatccgtctcgccaaaaccgtgggttacgtctctgcgggtactgtggaatatctgtactcccaggatgggtcttttcatttcctggaactaaacccccgacttcaagtggaacacccgtgtactgaaatgattgcagacgttaatctgccggctgcccaactccaaatagcaatgggagttcctctgcatcgactgaaggatataagactcctctacggcgaatcaccatggggggtgacccccatcagcttcgagacgcccagcaacccccctctggcaagggggcacgtgatcgcagcccgaattacctccgagaatcccgacgaaggcttcaagccatctagcggcaccgtgcaggaattgaattttaggtcgtctaagaatgtctggggatacttttcagtggctgccacgggaggccttcacgagttcgcagacagccagtttgggcattgctttagttggggggaaaaccgggaagaggccatatcaaatatggtagtggccctgaaggagctgtctatccgcggagacttccgcacaactgtggaatacttgatcaacctcctcgagactgagtccttccagaataatgacattgacacagggtggcttgactacttaatagccgaaaaagtgcaggccgagaagcctgacatcatgctaggcgtcgtctgcggggcactaaacgtggccgacgctatgttcaggacatgtatgactgatttccttcacagcttagagcgcggacaagtcctgcccgcagacagccttctcaacctggtggatgtcgagttgatttacggaggcgttaagtatattctcaaggtggccaggcagagcctgacaatgttcgtgctgattatgaacggatgtcacatcgagatcgatgcacaccgactgaatgacggagggctcttactgtcatacaacggcaactcctacactacttatatgaaagaggaagttgatagctacagaatcactatcggtaacaagacatgcgtgttcgagaaagaaaacgatcccacggttctgagatcaccttctgctgggaagctgacacagtatactgtcgaggatggcggacatgtcgaagcaggatcctcctatgctgaaatggaggttatgaagatgataatgacactgaacgtgcaggagagagggagggtgaagtacataaagaggcctggggctgtgttggaggcgggttgtgtcgttgccaggctcgagctggacgatccatcaaaggttcatcctgctgaacctttcacaggggagttgcccgctcaacagaccttgccaattctcggcgagaagctgcatcaagtgttccatagtgtgctggagaacctcaccaacgtgatgtccggcttctgtctccctgaaccagtattcagtattaagttgaaggagtgggttcaaaagttaatgatgacactaaggcatccctccctgcccctgctggaactccaggagatcatgacatccgtggctggtaggatacccgcaccagtggaaaaaagcgtgagacgggtgatggcgcagtacgcgagcaatatcacttcggtcttgtgtcagttccctagccagcagattgcaactattctggactgccacgccgctacgttgcagaggaaggctgatagagaagtcttcttcatcaatacccagtccatcgtgcagttagtgcagcggtaccgctcaggaatccgaggttacatgaaaaccgtggtgctggaccttctccgcagatatctgcgggtggagcatcatttccagcaggcccattatgataagtgtgtgattaatctgagagaacagtttaaacctgatatgagtcaagttctcgattgcatattcagccacgcacaggtcgctaaaaagaaccagctggttatcatgctgatcgacgaactgtgcgggccagatccatcgctcagtgatgagttaatctctatcctcaatgaattgacgcagctgagtaaatctgagcattgtaaggtcgccttaagggcacgacagatcttgatcgcatctcacctgccctcctacgagctacgccacaatcaggttgagtccattttcctctccgccattgacatgtatggacaccaattttgcccagagaatctgaaaaaactgattctgagtgaaaccaccatctttgatgttctccccacctttttctaccatgccaataaggtggtgtgcatggcaagcctcgaagtctacgtgaggcggggatacatagcctacgagctcaattctcttcaacatcggcagttgcccgatggcacgtgcgtggtcgagtttcagtttatgctgccttcttcccatcccaatcgaatgacggtgccaataagcattaccaacccagatctgctcaggcatagcactgagctgtttatggatagtggtttcagtccactctgccaaaggatgggcgcaatggtggcatttagacgctttgaggacttcacacgcaacttcgacgaggtaattagctgcttcgccaacgtaccaaaggatactcccctattttctgaggccaggacttccctgtattccgaggacgactgcaagagcttgagagaggagccaatccacattttgaatgtgtcgatccagtgtgccgatcatctcgaggacgaggccttggtgcccatcctgagaacctttgtccagagcaaaaagaacattctggttgactatggacttcgcagaattaccttcctgattgcccaagagaaagaatttccaaaattttttaccttcagagccagggatgagttcgcggaagacaggatatatagacatctggagccagccctcgccttccagctcgaattgaaccgcatgagaaatttcgacctgactgcagtaccctgcgcgaaccataagatgcacctttacctgggagcagccaaggttaaggagggcgtggaggtgactgatcaccggttttttatcagagcgataatccgacattctgacctgatcaccaaagaggctagcttcgaatacctgcaaaatgagggggaacgcctgctacttgaggccatggacgaactcgaggtcgcctttaacaataccagcgtgaggaccgactgcaaccacatattcctgaacttcgtccctacagtcattatggatccctttaagatcgaagagtctgttagatatatggttatgcggtatggttctcgactttggaagcttcgggtgctacaagcagaggttaagattaatatcagacaaactaccacaggttccgcagtgccaatccgtctgtttattacaaacgagtcaggctattacctagacatctcgctctataaagaggtcaccgattcacggtctggcaacattatgtttcactcctttggaaacaaacaaggcccacagcatggcatgctcatcaatactccttatgtgacaaaggatttacttcaagctaagcggtttcaagcccagacactgggcaccacctacatctatgattttccagagatgtttaggcaagcattgttcaaactgtggggcagccccgataaatatccaaaggacatactgacatacactgaactggtgctagatagccaaggtcaattagtggagatgaaccgtctgccgggaggcaacgaggtggggatggtcgcttttaagatgaggttcaagacacaggaatacccagaaggcagggatgttatagtgatcgggaatgatatcacatttcgcatcgggagttttggccctggcgaggacttactctacttgagagcaagtgagatggcacgcgctgagggcataccgaaaatctatgtggccgctaactccggtgcacgtatcggaatggcagaggagatcaagcacatgttccatgtggcttgggtcgaccctgaggatccacacaaagggtttaagtatctgtacctcactcctcaggactacactaggatcagcagcctgaatagcgtccactgcaagcacatcgaagagggaggggaatcacgatacatgatcacagacattatcggaaaagatgatggtttaggcgtggaaaacctaaggggttccggaatgattgctggcgagagtagcctggcctacgaagagattgtcaccatctctctggtcacgtgtcgggctatcggcattggcgcatacctcgtgcgcctcggccagcgtgtgattcaggtcgagaactcgcatattattctcactggtgcctctgccctaaacaaggtcctgggccgagaggtgtacacctccaataaccaattagggggagtgcagataatgcattacaatggcgtgagtcatattacagttccagacgatttcgagggcgtttacacaatcctcgaatggctgagctacatgccgaaggataatcactcccctgtcccaatcattacgccgacagacccaatagatcgggagattgagtttttgcccagccgtgctccctacgatccacgatggatgctggccggtaggccacatcccacgttgaaaggcacttggcagagcggcttttttgatcacgggagctttaaggagataatggccccatgggctcagactgttgtcacaggcagggccaggctcggcggtattcccgtgggtgtcattgccgtggagacacggactgtggaggtggcagtacctgccgatccagcaaatctggatagcgaagctaaaatcatccagcaggccggacaggtctggttccctgacagcgcatacaagactgctcaggccgttaaggatttcaaccgtgagaaactgccgctgatgatatttgctaactggcgaggattctctggcggaatgaaggatatgtatgaccaagttctgaagtttggagcatacatcgtggacggactgcggcagtataaacagcctatccttatatacatcccaccgtacgctgagttgagaggcggatcctgggtggtgatcgatgctactatcaatcccttgtgcatcgagatgtatgcagacaaagagtccagggggggagttctcgagcctgaaggcactgttgaaatcaaatttaggaaaaaagatctcatcaaaagtatgcggaggattgatccagcttataagaaattgatggagcagctcggggaacccgacttgagtgataaggaccgcaaagacctggagggaagactcaaagcacgggaggacctgcttttacccatctaccaccaagtagccgtccagtttgccgactttcacgacaccccaggacgaatgcttgagaagggtgttatctcagatatcctggagtggaagacagcacgcactttcctgtactggaggctgaggcggctacttctcgaggaccaggtcaaacaggagatcttgcaggcatcaggggagctgtcacacgtgcatattcagtccatgctgaggcggtggttcgtggagacagaaggcgcagtcaaagcctatctgtgggacaataatcaggtggtggtacagtggttggagcaacactggcaagccggtgacgggccacgaagtacaatcagggaaaatattacctatctcaaacacgatagtgtattgaagaccatacggggtcttgtcgaggaaaaccccgaagtcgccgtggactgcgtgatctacctgtcgcagcacatatcccccgcagaaagggctcaggtggtccatctgctgtctactatggacagcccggcatcaacata

SEQ ID NO: 213000 - DNA, 7166 bp, synthetic construct
  misc_feature 1..7166: note = Description of Artificial Sequence: Synthetic coding sequence
  source 1..7166: mol_type = other DNA
atggtgctgctactgtgcctaagttgtcttattttctcatgcttgaccttttcatggctcaagatatggggcaaaatgaccgatagtaagcccatcaccaagtctaaaagcgaggccaatctgatcccatctcaggagccgtttcctgctagtgacaacagcggggagactcctcagcgcaatggggaaggacacacattaccgaaaacccctagccaagcagagcctgcctcacataaggggcctaaagacgccggaagacggagaaactccctcccaccaagtcatcagaaaccaccaaggaaccctctgtcatcctcagatgctgctccctccccggaacttcaagccaatgggactgggacacagggcctggaagccacagataccaacggactgtcctccagtgcaagacctcaggggcaacaggccggttcaccaagcaaagaggataaaaagcaggccaacattaagaggcagctgatgactaacttcatcttgggctcctttgacgattactcaagtgatgaggacagcgtcgccggatcgagcagggagtcaaccagaaagggttctagggccagtttaggcgctttgtctctggaggcctatctcaccaccggcgaggcagaaacccgggtgcctacaatgcggccaagcatgagcgggctgcacctcgtcaagcgaggtagggaacacaagaaattggacttacatagagacttcacggtggcttccccagctgaatttgttacacggtttggtggcgaccgcgtcatagagaaggttctgatcgctaacaatggcatagcggcagtcaaatgcatgcgaagcatcaggaggtgggcatacgaaatgttccggaatgagagggccataagatttgtggttatggtgacacctgaggatctgaaggccaatgcagagtatattaagatggccgatcactacgtgccagtgcctggcggaccgaacaacaacaattacgccaacgtggaactcatagtggatattgctaaacggatcccagtgcaggccgtgtgggccggatggggccacgcctctgaaaaccccaagctgcctgaactgctctgcaaaaatggcgtggcattcctgggcccaccatcagaggccatgtgggcacttggcgataaaatcgcatctacggtggttgcccagacattgcaggtaccgacattgccctggtcaggcagtggcctgaccgtcgaatggacagaagacgatctgcagcaggggaagaggatttccgtccctgaggatgtgtacgataaaggatgcgtgaaggacgtggacgaaggtctcgaggccgctgagcgtatcgggtttcctttaatgatcaaggcatcggagggaggaggtggtaaaggaatcaggaaggccgagtccgcagaagatttcccaatcttgttccgtcaggtccagtctgagatccctggaagtcccattttcctgatgaaattagcccagcatgcgagacatctggaagtgcagatcttggcggaccaatacggcaacgccgtctcactcttcggccgagactgctctattcaaagaagacaccagaagattgttgaggaagcacccgctacaatcgctccccttgcaattttcgagttcatggagcagtgtgctattagacttgccaagaccgtcggctatgtttccgcgggaaccgtggagtacctctactcgcaggatgggagcttccactttctcgaattgaatcctagattgcaggtcgagcatccgtgcaccgaaatgatcgcagacgtgaacctgcccgcagcccagctgcagatagcaatgggcgttcccctgcatagactcaaggatatacggctgctgtatggcgaaagtccgtggggggtgacaccgattagtttcgagacaccaagtaatcccccactggcgaggggtcacgtgatcgccgcacggatcaccagcgaaaaccctgatgaggggtttaagccatctagtgggaccgtgcaggagttgaacttccggtctagcaagaatgtttgggggtatttcagtgtagcagccaccggaggtctgcacgagttcgcagattcgcagttcggccattgcttcagttggggagagaatcgtgaggaagctatcagcaacatggtcgtcgctcttaaagagctgtccattaggggagatttcaggacaacagtggaatacctgatcaacctgcttgagacagagtcatttcagaataacgatattgacaccgggtggcttgactatttgattgcagaaaaggtgcaggctgagaagcccgatatcatgctgggcgttgtatgtggggcacttaatgttgccgacgcaatgttcagaacatgtatgacggactttttgcacagcctggagagggggcaggtgcttcccgctgacagtctgcttaacctggtcgacgttgaacttatatatggcggtgtcaaatatattctgaaggtagccagacagtcattgactatgttcgtcctgatcatgaacgggtgccacatcgaaattgacgcccacagactcaacgatggagggcttctgttgtcttacaatggtaattcatacacaacctacatgaaagaggaggtggattcttaccggatcaccatcggcaataaaacgtgcgtttttgagaaggagaacgatcccacagtgctgagatccccttctgcaggtaaacttacccagtatacagtagaagacggcggtcacgtcgaggcgggatcctcctatgccgaaatggaagttatgaaaatgattatgacactcaatgtgcaggagcgtggaagggtgaagtatattaaaagaccaggcgctgtgttggaagcaggatgcgttgttgccagactggagctggacgacccttcaaaggttcatcccgcagagcctttcacaggcgagctgcctgctcagcagacactgcctatcctcggtgaaaaactgcaccaggtcttccacagtgttctggaaaacttgacaaatgtgatgtccggtttttgcctgccggagccagtgttttccattaaactcaaggagtgggttcagaaactgatgatgaccttgcggcacccttcgcttcctctgctggagctgcaggaaatcatgacaagtgtggctggcagaattccagccccagttgaaaaatcagtcaggcgagtgatggcacagtatgccagcaacatcactagcgtgctgtgccagtttcctagtcaacagatcgcgacaattttggactgccacgccgctactctgcaacggaaggccgaccgagaggtgttttttataaacacgcagtctattgtccagcttgtccagagtaaagacgaattgtgtggcccagacccttcactcagcgacgaacttattagtattttaaatgaattgactcagctttccaagtccgagcactgcaaggtggcactccgagctagacaaatcctgattgctagccacttaccatcctacgaacttcgccataatcaagtagaatcgattttcctctctgccattgatatgtatgggcaccagttctgccccgagaacctaaagaaacttattctgtctgaaacgacaatcttcgacgtgctcccaactttcttttaccacgctaacaaggtggtgtgtatggcatctctcgaagtgtatgtccgtagaggatacatcgcttacgagctcaacagtctccaacatcgccagctgcccgacggaacgtgtgtcgtcgaattccagtttatgctacctagctctcacccaaacagaatgactgttcctatatctatcactaaccctgacctactgcggcactcaacagagctatttatggactcgggcttctccccactctgccagcggatgggggcaatggtggcatttcgccgatttgaggatttcacacgaaatttcgacgaggtgatcagctgctttgcgaacgtcccgaaagataccccccttttttcagaagccaggacatcactctacagcgaagacgactgcaagagcctgagagaagagccgattcatatcttaaacgtgagcattcaatgcgcggatcatctcgaggacgaggccctggtccccatcctgcgaacgtttgtgcagagcaagaaaaacattctggttgactatgggttgaggagaatcacattcctcatcgcacaggagaaggaatttccaaaattcttcactttccgggctagggacgaattcgccgaggacagaatttatcggcatctggaacccgctcttgcgttccagctggagctgaacaggatgcgcaacttcgacctcaccgctgtcccatgcgccaatcacaaaatgcacctttacctgggagcagcaaaagtgaaagagggcgtggaggttaccgatcatcgattcttcattagagccattattaggcatagcgacttaattactaaggaagcgtctttcgaataccttcagaacgagggtgagcgcctccttcttgaagccatggacgagcttgaagtggccttcaataataccagtgtgagaaccgactgcaatcatatctttctcaattttgtccccactgtcattatggaccctttcaaaatcgaggagagtgtacgttacatggtcatgagatatggttcgcggctgtggaaacttcgggtgctacaggctgaggttaagatcaatataagacaaacaaccacaggatcggcggtaccaattcgcttattcattactaacgagagcgggtactatctggatatctcactctacaaggaggtgacagactcacgcagcggtaacataatgttccactctttcggaaacaaacaggggccacagcatggaatgctaataaataccccgtatgttacaaaggacttgttacaagcaaagagattccaggcacagactctcggaacaacatacatttacgatttccctgagatgttccggcaggctttgtttaagctctgggggagtccagacaagtatccaaaggatattcttacatataccgagctggtgctggactcccaaggtcagcttgtggagatgaaccggctccccggaggaaatgaagtagggatggttgcctttaagatgcggttcaagacacaggagtacccagagggaagagacgtcatagtcatcggaaacgacatcacatttcggatcgggtcgtttggacccggagaggaccttttgtatctgagagctagcgaaatggctcgggctgaaggcattcctaaaatatacgtcgctgcaaattcaggcgctagaataggcatggccgaggagattaagcacatgttccatgttgcttgggttgatcctgaagacccacataaaggtttcaaatacctttaccttacacctcaggactacacaagaatttcgtctttaaacagcgtccattgcaagcacatcgaagaaggtggcgagtcacggtatatgatcaccgatatcatcggaaaggatgatggtctgggtgtggagaatttgcgaggctcgggcatgattgccggtgagtcctccctcgcctatgaagagattgtgactatctctctggtgacctgtcgggctatcgggattggggcttatttagttcgactcgggcagcgtgtgatccaggtcgagaactcccacatcatcctgactggtgctagcgcgctgaataaggtcctaggacgcgaggtgtacacctcaaacaaccagctggggggtgtacagattatgcattataacggtgtgtctcacattactgtgcctgatgacttcgaaggcgtgtacactatcctggagtggctatcttatatgccaaaggataatcacagtcccgtgccgatcattacacccactgacccaattgaccgagagattgaattcctaccaagccgcgctccttacgatcccagatggatgctggctggcaggccacaccctaccttgaaaggaacctggcaaagcggattctttgatcacggtagcttcaaagagattatggcgccatgggctcagacagttgtgaccggtagggcccgactcggaggcatccccgtcggagtcattgccgtcgaaactaggacagtggaagtggcagttccggcagaccccgcaaatctggattctgaggcaaaaatcatacagcaagcagggcaggtgtggttccccgacagcgcttacaaaaccgctcaggccgtgaaggactttaacagggaaaagctgcccctgatgatcttcgccaactggcggggttttagcgggggtatgaaagacatgtatgaccaggtactcaaatttggagcctatattgtggatggcctgcggcagtacaaacagcctatcctcatttatatcccgccatacgctgagcttaggggcggatcttgggtggtgatagatgccaccattaaccctctttgcatcgaaatgtatgccgataaagagagtcgcggtggcgtgctggagcccgaagggactgtggagattaaatttaggaaaaaagatcttattaagagcatgcgtcgcattgatcccgcttataagaagttaatggagcagctgggagagcccgatctctctgataaggatagaaaagatcttgagggtcggttgaaagcacgcgaagatctactgctgcctatataccatcaggttgccgtgcagtttgctgatttccacgacacaccgggtcgcatgctcgagaagggggttatctccgacatccttgaatggaaaacagcaagaaccttcctttactggagactccgacgactccttctcgaggaccaggtgaagcaggagatcttgcaggctagcggggagctgagccatgtccatattcaaagtatgttgagacgttggttcgttgagacagagggagcggtaaaagcctacctgtgggacaacaaccaggtggtggttcaatggctggaacagcactggcaagcaggcgatggcccaaggagtactatccgcgagaacataacttacctgaagcacgacagtgttcttaagacaatccgtgggctggtcgaggagaatcctgaggttgcagtagactgtgtcatttacctgtcacagcatatctcccccgcagagagggctcaggtggtccacctgttgtctaccatggacagtcctgcttcaactta

SEQ ID NO: 213001 - DNA, 5069 bp, synthetic construct
  misc_feature 1..5069: note = Description of Artificial Sequence: Synthetic coding sequence
  source 1..5069: mol_type = other DNA
ctgccctttctcctcaaacctccccaaacactgccttctccggacgctatgttcaggacctgcatgaccgactttctacactcccttgagcgtggacaggtgctgccagccgacagcctgctgaacctcgtcgatgtggaattgatttatggaggcgttaagtatatcctcaaggtggcaagacagagccttacaatgtttgtgctgattatgaacgggtgtcacattgagatagacgcgcaccgactcaacgacggaggcttactgctgagctacaacggcaattcttacacaacgtacatgaaagaagaggtagattcatatcggatcactatcggaaacaagacatgtgtgtttgagaaagagaatgatccaacggtgctgcgatctccttctgctggaaagctcacacagtacaccgtcgaagatggaggtcacgtagaagcgggaagtagctatgcagagatggaggtgatgaagatgatcatgaccctcaacgtgcaagagcgcggacgagtgaaatacattaagaggcccggagcagtgctcgaagcaggatgcgttgtagccagacttgaacttgacgacccatcaaaggtgcaccctgccgaaccattcacaggggagttgccagcccaacagaccctgccaatcctgggggagaagcttcaccaggtctttcacagtgtgctggagaaccttactaacgtcatgagcgggttctgccttccggagccagtattttcgatcaagctgaaggagtgggtccagaagctgatgatgacgctacggcacccttccctgcccttactcgaactccaagagattatgacctcggttgccggtagaattccagcgcctgtggaaaaatccgtacgacgcgtgatggcccaatacgcttccaacatcacatccgtcctatgtcaatttccgtcccagcagattgcaacgattttagactgccatgctgcaacactacagcggaaggctgatcgcgaggttttcttcatcaatactcagtccatagttcagctcgtgcagcgctaccgctcaggcatccggggttatatgaagacggtggtgctcgacctacttcggcgttaccttcgtgtggagcaccacttccagcaggcccactatgacaaatgtgtgataaatctccgcgaacaatttaagcctgatatgtcacaagtcctagactgtattttctcacatgcgcaggtggccaagaagaatcaactggtcatcatgctcatagatgaattgtgtggaccagacccctccctcagcgatgaattaatcagcatcctcaacgagctcacacagctgtcaaaatcggagcactgtaaggtcgcactgagggccaggcagattctcatcgccagccatctcccgagctatgaactgcggcataatcaagtcgaaagcattttcctgtccgctatcgacatgtatggtcatcagttctgcccggagaacctgaagaaactgatcctcagtgaaactacaatctttgacgtgttgcctacgtttttctaccacgctaacaaggtagtctgcatggcctctctggaggtgtacgtgcgcagaggctatatcgcctacgagctaaacagcctccagcatagacagttaccagatgggacatgcgtggtggagttccagtttatgttacctagctcacatccaaatcgcatgaccgtgccaattagcataacgaaccctgacctgctgcgacacagtacggagctattcatggatagcggtttttctccactttgccagagaatgggggctatggtggcctttaggaggtttgaggactttacccgaaacttcgatgaagtcattagttgttttgctaatgtgcctaaagacacccccctgttctcagaggccaggacatccctgtacagcgaggatgactgcaagagtctccgcgaggaaccaattcatattctcaacgtctcaatccagtgtgccgaccacctggaagacgaggcattagtcccaatcctcaggaccttcgttcaaagcaaaaagaacatcctggtggactacggcctgcgaaggattacatttctgatcgcccaggagaaagaattccctaagttctttacctttagggccagagacgagtttgccgaggataggatatatcgccacctcgagcctgcactagcttttcagttggaactgaatagaatgcggaattttgacctgacagccgtgccttgcgccaatcacaaaatgcacctgtatctaggcgctgccaaagttaaagagggcgtcgaggtaacggaccacagattctttattcgggctattataagacactcagatcttatcacaaaagaggcctcgttcgaatacctacagaacgagggagagcggctgctgctggaggccatggacgaactggaagtcgcttttaacaatacttcagtccgaaccgattgtaatcacattttcttaaatttcgtgcccacagttattatggatccgttcaagattgaggagtcggtgcgatacatggtcatgcgttatggtagtcgtttatggaaactgagggttctgcaggcagaagtgaagattaacattcgacagaccaccactggcagcgccgtgccaattagactctttatcaccaacgaatcgggctattaccttgacatttccctctacaaggaagtgactgactctagatctggtaacatcatgttccattcctttgggaacaagcagggccctcagcacgggatgctcatcaatactccttatgttaccaaagatctgctccaggccaagaggttccaggcacagacgttgggaacaacctatatctatgactttccagagatgttccggcaagccctgtttaaactgtggggcagcccagacaagtatccaaaggacatcctgacgtacaccgaattagtgctggattcacagggtcagctggttgagatgaataggcttcctggaggtaatgaggtgggaatggttgcttttaaaatgcggtttaaaacgcaggaataccctgagggcagggacgtgatcgtaattggcaatgacatcacctttagaataggatcctttgggccaggcgaggaccttttatacctccgagcttctgaaatggccagagccgaggggattcctaaaatctatgtggcggcaaactcgggtgcaaggattggtatggctgaggaaatcaagcacatgttccacgtcgcatgggtcgatcccgaggatcctcataagggattcaagtatctttacctcaccccacaagactacacgcgcatcagcagccttaattctgtgcattgcaagcatatcgaggaaggcggtgagagccggtatatgataacagatattataggaaaggacgacggcctaggcgtagaaaatctccgcggttctggcatgatagcaggggagtcgagtctcgcctatgaagagatcgttacaatatcactggtcacttgcagggctattgggatcggggcttacctggtgagacttggccaaagagtgattcaggtggagaactctcacatcatccttaccggtgccagcgccctgaacaaagtgctcggacgagaggtgtacacctccaacaaccagttgggaggggttcaaatcatgcactacaacggcgtcagccacattaccgttccggatgacttcgaaggcgtctacacaattctggagtggctctcatatatgcccaaggacaatcattccccagtccccattatcacccccaccgacccaatcgacagggaaatcgagtttctccccagcagggcgccatatgatccccgatggatgctggcaggcaggcctcaccctaccctgaaaggaacatggcaatcaggattttttgaccacggaagttttaaggaaataatggcaccttgggctcaaaccgtggtgaccggcagagccagattggggggtatcccagttggtgtgatcgctgtcgaaacccgtacggtcgaagtggcggttccagccgatcctgcgaacttagacagtgaagcaaagattatacagcaggctggacaagtttggttccccgatagcgcatacaagaccgctcaggcggttaaagatttcaacagagagaaactgccacttatgatattcgctaattggagaggctttagtggaggaatgaaggatatgtacgaccaggtgttgaagtttggcgcttatatcgtggacgggctgcggcagtataagcagccgatcctgatttacatcccaccctacgcggaacttcgcggtgggtcatgggtggtaattgacgctacgattaacccgttgtgtatcgagatgtatgccgataaggagtcccgtggaggcgtgctggaaccagagggaacagtggagatcaaattccggaaaaaggacttaattaagtcgatgcggaggattgatccagcctacaaaaaactcatggagcagttaggagaacctgaccttagcgacaaagatagaaaagacctggaaggacggctgaaagcacgagaagatcttctgctgccaatctatcatcaggtggctgtccaatttgccgactttcatgacacacccggtagaatgctagagaaaggtgtaatctccgatatactggagtggaagactgcccgaacatttctgtattggcggctcagacgccttttgctcgaggatcaggtgaaacaggaaattctgcaggctagtggcgaactgtcccatgtgcacatccagagcatgctgcggcgatggtttgtggaaacagagggagctgtgaaggcttacctgtgggataataaccaggtcgttgttcagtggctggagcagcactggcaggcaggcgatggtccgagaagcacaattagagagaacattacctatttgaaacacgactccgtactgaagaccatccgaggactcgtggaggagaaccccgaggtcgctgtcgattgtgtcatctacctgtcacaacatatctctccagcagagagagcacaggtggtgcaccttttatcaaccatggattcacctgcctccaccta

SEQ ID NO: 213002 - DNA, 432 bp, synthetic construct
  misc_feature 1..432: note = Description of Artificial Sequence: Synthetic coding sequence
  source 1..432: mol_type = other DNA
atgacggactctaagccgatcaccaaatcaaagtctgaggctaatcttatccctagtcaagaaccctttcctgcatcagacaactccggcgagacaccccagaggaacggcgagggtcacactctcccaaagacgccttcccaggctgaacctgcctcccacaaaggaccaaaagacgccggaagaaggagaaattccttgcctccttcacaccaaaaacccccaaggaacccactttctagttctgacgccgcaccatcaccagagctccaggcaaatgggactggtactcaaggactggaggccactgacaccaacggactctcaagcagcgcacgaccccagggtcagcaggcagggagtccctccaaagaagataaaaaacaggcaaacatcaagcgccaactcatgacaaactttatcctgggctag

SEQ ID NO: 213003 - DNA, 2577 bp, synthetic construct
  misc_feature 1..2577: note = Description of Artificial Sequence: Synthetic coding sequence
  source 1..2577: mol_type = other DNA
atgacagtgccgatttctatcaccaaccccgatttactgcgccactccaccgagctctttatggattccgggttctcaccattatgccagcgaatgggcgctatggtcgctttccggcgatttgaagacttcacaaggaattttgacgaagtcatttcttgttttgctaatgtcccaaaagacacgcccctgttctccgaggctagaaccagtctctatagtgaggatgattgcaagtccctccgcgaggaacctatccatatcctcaacgtgagcattcagtgcgccgaccatcttgaagatgaggccttggtgccaattttacggaccttcgttcaatcaaagaaaaacatcttggtggattatggacttcggagaattacattcctgattgcgcaggagaaagagtttccgaagtttttcacattccgtgccagagatgagtttgcagaagatcgaatctaccgccaccttgagccagctctagcattccagctcgagttgaatcgtatgcgcaacttcgacctgactgccgtgccctgcgctaaccacaagatgcatctttacctgggcgctgctaaggttaaagaaggtgtggaggtgacagatcacagattctttataagggctatcattcggcactctgacctcatcacaaaggaggcctcatttgagtatttacagaacgaaggtgagagacttcttctggaggctatggatgagttggaggtggcattcaataacacgagtgtcaggacagactgcaaccatatttttctgaattttgtgccaaccgttatcatggatcccttcaaaatagaggaatctgtgagatatatggtgatgaggtacggatcccggttatggaagctcagagtgctgcaagcagaggttaaaattaacatccgccaaacaaccacaggcagtgctgtacctatacggctctttatcaccaacgagtccggttactatctcgacataagcctctacaaagaggtgactgacagcagatccggaaacatcatgtttcattcttttggtaacaaacagggcccacagcatggaatgctgatcaacacaccttacgtgactaaggatcttttacaggctaagcggtttcaggctcagactttgggaactacctatatctacgactttcccgagatgtttagacaagccctattcaaactgtggggatcccccgacaaataccccaaggatatcttaacatataccgaactggtgctggacagtcaggggcagctcgttgagatgaaccggcttccaggcggaaacgaagttggaatggtggcgttcaaaatgaggtttaaaacgcaggagtacccagagggcagagatgttattgtgataggcaacgacattacctttcgtattggctcctttgggccaggcgaggacctgctgtacttgcgtgcgtcggagatggccagggcggaaggtatccccaagatttatgtggccgcaaattccggggctcgaatagggatggctgaggaaattaaacatatgttccacgttgcgtgggtagaccctgaggatcctcataagggtttcaagtatctttacctgaccccccaggactatactcggatcagctcattaaattccgtgcactgtaagcacatcgaagagggaggagaaagccgatacatgataaccgacattatcggtaaagatgatgggctgggcgtggagaaccttcggggaagtggcatgattgccggagaaagttctttagcatatgaagagatcgttacgataagcctggtcacctgccgggcaatagggatcggtgcatatctggttcgtctggggcagcgcgtaatccaagtggaaaattcacatatcattctgactggagcatcagcactgaataaggtgctgggacgggaggtgtacaccagcaacaaccaactcgggggagtgcaaatcatgcactataacggagtaagccatatcaccgttcccgacgatttcgaaggagtctacaccattctggaatggttgtcctacatgccaaaggataaccatagcccagtgcccatcattacccccacagatcccatcgatagagagatcgagttcctccccagtcgcgctccttacgatccgaggtggatgctggctgggagacctcaccccacgctgaagggtacatggcaatctggcttttttgaccatggcagcttcaaggagattatggctccctgggcacagactgtggtcactggacgagcgaggctggggggtattcccgtcggcgtgattgccgtggagacaaggaccgtcgaggttgcggtgcccgcagacccagcaaatttagactctgaggctaagataatacaacaggcgggacaggtgtggtttcccgacagtgcatacaagactgcgcaggctgtcaaagatttcaacagagagaaactccccctgatgatttttgccaattggcgcggttttagcggcggaatgaaaggatgtctcggtacttggagagacgtctcttggtggaagataagggccatgctgcctatgcacatcggcgaagggagcgtgtag

SEQ ID NO: 213004 - DNA, 1038 bp, synthetic construct
  misc_feature 1..1038: note = Description of Artificial Sequence: Synthetic coding sequence
  source 1..1038: mol_type = other DNA
atgggctcttccgaggaccaggcctacagattactcaatgactatgccaacgggttcatggtgtcacaggttctgtttgctgcgtgtgagctaggcgtttttgatctgctggcagaggccccagggcctctagatgtcgcagcagttgccgcaggcgtgcgggcatccgcacacgggacagaattgctgctggatatctgcgtctcactgaagttactgaaggtggagacgaggggcggaaaggcattctaccgaaacacggagctctcttcagattatttaacaaccgtgtcccctacatcacagtgttctatgctgaagtacatgggtagaacatcctatcgatgctggggccacctcgctgatgccgtgagagaagggcgaaaccaatacctggaaacattcggcgtccccgcagaggagctgttcaccgccatctaccgcagtgaaggcgagcggctgcagtttatgcaggctttacaagaagtgtggagcgttaacggcagatcggtactcactgccttcgacctttccgtgttccctctgatgtgcgaccttggaggcggagcaggggcactggctaaggagtgtatgtccctgtaccccggatgcaagatcacagtatttgatattcccgaagtcgtgtggaccgccaaacaacactttagcttccaggaggaggagcagatcgacttccaggaaggagactttttcaaagaccccttgccagaggctgatctttacatcctggccagggtgctccacgactgggccgatggtaagtgctcacacttgctggagaggatctaccatacctgcaaacctggcggaggcatcctggtcattgaatcactcctggacgaggaccgacgtggccctttgctcactcaactgtactcactcaatatgttagttcagacagaaggtcaggagagaactcctacccattaccacatgctccttagctctgccggattccgggacttccagtttaagaagaccggagctatctacgatgctattctggcgaggaaatag

SEQ ID NO: 213005 - DNA, 897 bp, synthetic construct
  misc_feature 1..897: note = Description of Artificial Sequence: Synthetic coding sequence
  source 1..897: mol_type = other DNA
atgggtagctcagaagatcaggcctaccgcctcttgaacgattacgccaacggatttatggtctcccaggtactgttcgcagcatgcgaactgggggtgtttgatttacttgcagaagcccctggcccactggatgtcgctgctgtagctgcaggggtgcgagcctccgcccatggtacagaattgttactcgacatctgcgtgtctttgaaactcctgaaagttgaaacaagaggaggaaaggccttctaccgcaacaccgaactctctagtgactacttgactacagtctcccctacttcacaatgtagcatgctgaagtacatgggaagaacttcctatcgctgttggggtcatctggccgacgctgtaagagagggacggaatcagtacctggagacctttggcgttcccgcagaagagttgtttaccgcaatctacagaagcgagggggaaaggctccaatttatgcaggccttgcaggaagtgtggagcgtgaatggccgatccgtgctaaccgcctttgacctctcagtgttcccactgatgtgcgatctcggaggcgacttcttcaaagatccgttacctgaggcggacctttacattctcgctagggtcctgcacgactgggccgacggtaaatgcagccatctgctcgagagaatctaccatacctgcaaacccggtggcggaattctggtgatcgagtccctactggacgaggataggcggggacctctgcttactcaactttatagtctgaatatgctggttcagaccgaagggcaagagcgcaccccgacgcactaccacatgctcctcagctcagcaggcttccgcgacttccaattcaagaagacaggtgccatttacgatgccattttggccagaaagtag

SEQ ID NO: 213006 - DNA, 1122 bp, synthetic construct
  misc_feature 1..1122: note = Description of Artificial Sequence: Synthetic coding sequence
  source 1..1122: mol_type = other DNA
atgggcagctccgaagatcaagcctaccgtctcttaaatgactacgccaacggcttcatggtgtctcaggtgctgtttgccgcatgcgagctcggcgtgtttgacctcttggctgaggctccgggacctcttgatgtggccgcagtcgccgctggtgtccgggctagcgcgcacggtacggagctccttctagacatctgcgtgtccctgaaactgcttaaggtggagacccgtgggggtaaggcattttatcggaacaccgagctaagttccgactacctcactacggtatcacccacctcacagtgctctatgcttaagtacatggggaggaccagctacagatgctggggccacctggccgatgctgtgcgggagggcaggaatcagtatctcgaaacctttggcgtgccagccgaggagttgttcaccgcgatctataggagcgagggagaaagacttcagttcatgcaggcgctccaggaggtgtggtctgttaatggccgttctgttctcaccgcatttgacctcagcgtgttcccgctgatgtgtgacttgggtggaacctggattaaattagaaacaatcattctgtcaaagctgtcccaggggcagaagactaaacatagggtgttttccctgattggaggagctggtgccttagctaaggagtgtatgtcactgtatccgggttgcaagattaccgttttcgatatccctgaggtggtatggaccgcaaagcagcactttagcttccaggaggaagagcagatcgattttcaggagggtgatttctttaaggaccccctgccggaagccgacctatacatcttagccagagtgctgcacgattgggcggacgggaagtgttcgcacctcctggaaagaatttatcacacctgtaagccaggtggagggatcttggtaatagagtccttactagacgaagatcggagaggacctctcctaacgcagttatatagcctcaacatgcttgtgcagacagagggccaggagaggaccccaacacactaccatatgctactgtcatccgccggattcagagatttccagttcaaaaagaccggcgctatctatgacgcaatccttgcgcgaaagtag

SEQ ID NO: 213007 - DNA, 375 bp, synthetic construct
  misc_feature 1..375: note = Description of Artificial Sequence: Synthetic coding sequence
  source 1..375: mol_type = other DNA
gattgcagactgacatccgtatgcttaccctgtgtacctggtgattttttcaaggatccactacccgaagccgacttgtatatccttgcacgcgtgctccatgactgggccgatggcaagtgtagtcatctgctcgaacgaatttatcacacttgtaagcccggaggcggtatattagtgatcgagtccctgctagatgaagatcgaaggggccctctgcttactcagttgtacagcctcaatatgctcgtccagacagagggacaagagcgaacaccgacccattaccacatgctcttatcctccgccggattcagagactttcagttcaagaagactggagccatttatgacgctattcttgcccgtaagtag

SEQ ID NO: 213008 - DNA, 711 bp, synthetic construct
  misc_feature 1..711: note = Description of Artificial Sequence: Synthetic coding sequence
  source 1..711: mol_type = other DNA
atggagagctcagccaagatggagtcgggtggcgcaggacaacagcctcagccccagccacagcagccttttcttcccccagccgcttgcttcttcgctactgccgcagccgctgcagctgctgcagctgccgcagccgctcaaagtgcacagcagcagcagcagcagcagcagcagcaacagcaagctccgcagcttcgaccggctgccgatggccagccgagcggtggtggtcataaatcggcacccaagcaggttaaacgtcagcgatcatcctcccctgagctgatgaggtgtaaaagaagactgaatttctctggcttcggctatagcctgccccagcaacagcctgccgcagtggctagaaggaacgagcgcgagcgaaatcgggtgaagctcgtcaacttgggcttcgctacgcttagggagcacgtaccaaatggcgctgctaataagaagatgtccaaagtggagactctgcgtagcgcggtggagtatatccgagccctgcagcagctcctggacgagcacgatgctgtttcagcggctttccaagctggagtcctgtcgcccaccatatctccaaattactctaatgatctcaacagtatggccggatcaccagtgtcatcgtatagcagtgatgaaggatcttacgacccactgagcccagaggagcaggagctgctcgacttcacaaattggttttag

SEQ ID NO: 213009 - DNA, 582 bp, synthetic construct
  misc_feature 1..582: note = Description of Artificial Sequence: Synthetic coding sequence
  source 1..582: mol_type = other DNA
atggacggtggcactctgccgaggagcgcccctccggcacctcccgttccagtggggtgtgccgctagaagacgacccgcttctcctgaacttcttaggtgctctcggagacgtagacctgccacggccgagacagggggtggggctgctgccgtcgcaagacgcaatgagagagagaggaaccgcgtgaaactggtgaatttggggtttcaggctctacggcagcacgtgccccacggcggagcttccaagaagctcagcaaagtagaaactctgcgaagcgctgtggaatacatcagggcccttcaaagattgctggccgaacacgacgcagtaagaaatgccctggccggtggacttaggccacaggctgtgaggccttccgcccctaggggaccaccgggtactactcctgtggcagcctctccatcccgtgcttccagcagtcctggtcgtggcggatcatctgagccaggatccccacgctcggcgtactcatctgatgacagcggctgtgaaggagcactgagcccagccgagcgagaactgctcgatttcagttcctggctgggcggatattag

SEQ ID NO: 213010 - DNA, 1542 bp, synthetic construct
  misc_feature 1..1542: note = Description of Artificial Sequence: Synthetic coding sequence
  source 1..1542: mol_type = other DNA
atgtgttctctcgggctgtttccccctccccctccacggggacaggttaccttatacgaacacaacaacgaactcgtgactggctcgtcctacgaaagcccgcctccagactttcggggacagtggatcaatctgccggtactgcagctgaccaaagatccattaaaaactcccggacgacttgatcatggcacacggacagcctttatacaccatcgggagcaggtgtggaaaaggtgcatcaatatctggcgtgacgttggcctattcggcgtgctcaacgagatagctaactctgaggaggaagtgttcgagtgggtaaagaccgccagtggatgggctctggcgttatgtcgctgggcatcctccctacacggctcccttttcccccacttgtcattgcggtccgaggatctgatcgcagagttcgcacaggtgacaaactgcacaattgtcccatctctaaagcaccggcttcagcgcaatgtggcttccctggcctggaaaccactcagcgcaagcgtgctcgcggtcgcctgccagtcatgcatcctcatctggaccctggatccaacgagcctgtcaaccaggccatcttcagggtgcgcccaggttttatcccatcctggccatactccagtcacctcacttgcttgggccccttctggaggcaggcttctttcagccagccctgtcgacgcggctattagagtgtgggacgtaagcactgagacatgcgtcccacttccctggttccggggtggcggagtgacgaacctgctctggtcccccgacgggagcaagatcctggctacgacaccctccgccgtcttcagggtgtgggaggcgcagatgtggacttgtgagcgttggccgacattaagcggtagatgccagactggatgttggagtcctgatggcagtcgcctgctgtttactgtcctgggcgagcccctgatttacagcctgtcatttcctgaaaggtgtggagaagggaaggggtgcgtcggcggagctaaaagcgcgaccatcgtggcagatttgtctgagaccacaatccagaccccagacggagaggaacggctcggaggcgaggcacattcaatggtctgggaccccagcggagaacgactggccgtcttgatgaagggtaaacccagggtgcaggatggaaagccggtgatactgctctttcgaacacggaatagcccagtgttcgagttgctaccttgcgggattattcagggagagcctggcgctcagccccagctgattaccttccacccaagctttaacaagggagccttgctcagcgttggctggtctacagggaggatcgcccatatccctctctattttgtaaatgctcagttccctcgcttcagtcccgtgctgggacgggctcaagagccacctgccggtggcggtggctcgattcatgacctacctctttttaccgagactagtcccaccagcgcaccatgggatcccctgccgggtcctccccctgtgctccctcactctccacacagccacctatag

SEQ ID NO: 213011 - DNA, 1683 bp, synthetic construct
  misc_feature 1..1683: note = Description of Artificial Sequence: Synthetic coding sequence
  source 1..1683: mol_type = other DNA
atgccccagacccggtcccaagcccaggccactatatcattccctaagcgcaagctgagcagggctctaaataaagccaagaattcctccgacgccaaattagaaccaaccaatgtgcagacggtcacatgctctccaagagtaaaagctcttccattgtctcccagaaagaggcttggtgacgacaatctgtgcaacacgccacacctgccaccttgttcaccgcctaagcagggtaagaaagaaaatggaccaccgcactcacatacattgaagggccgaaggttggtgtttgataaccagctgaccattaaatctccctctaaacgagaattggctaaggttcatcagaataaaatcctctcaagcgttcgaaagtcccaggagattactactaacagcgaacagcgctgtccactgaaaaaagagtcggcctgtgtaagactgtttaaacaggagggaacttgttatcagcaagcaaagttagtgctgaacaccgctgtgcctgatagattgcccgctagggagcgcgagatggacgtaattcgaaatttccttagagaacatatctgtgggaagaaggcaggcagcctgtacctgagcggtgctcccggaactggaaagactgcctgcctttccaggatcctccaagacttgaaaaaagagcttaaggggtttaagactatcatgttgaattgcatgtctctcagaaccgcccaagccgtctttcctgccatcgctcaggagatttgccaggaggaagtaagtagaccggctggcaaagatatgatgcggaagctggaaaagcacatgaccgctgagaaggggccaatgatcgttctcgtgctcgacgagatggaccagctggattccaaaggccaggatgttctctatacactgtttgaatggccctggctgtccaattcacatctcgtgctcattgggatcgccaacactctggatctcaccgatcgcatcctgccacggctgcaggcccgagaaaagtgtaaaccacagctgttgaactttcccccatatacaaggaatcagattgtgacaattttacaagacagattgaaccaggtttctagagaccaggtgttagacaatgcagctgttcagttttgcgccaggaaggtttccgctgtctccggagatgtacgtaaagcgctggatgtgtgccggagagctatcgaaattgtggagtccgatgttaaaagtcagacaatcctcaagccactcagtgaatgcaagtctccgtctgagcccctgattcctaaacgtgtcgggctgatacatatcagccaggttattagcgaagtggatgggaaccgcatgacgctttcccaagaaggagcgcaggatagctttcctctccaacagaaaatcttggtctgttctcttatgctgctgatcagacagctgaagattaaggaggtgacactcggtaaactgtacgaggcttactcaaaggtgtgtcgtaagcagcaggtggctgctgtcgaccagtcagaatgcctaagcctgagcggtctactcgaggctcggggtatcctcggactaaagcgcaataaagaaacacgcttaaccaaagtgttcttcaaaatagaggagaaagaaatcgagcatgcccttaaggataaagcactgatcggaaacatccttgccaccgggctcccctag

SEQ ID NO: 213012 - DNA, 339 bp, synthetic construct
  misc_feature 1..339: note = Description of Artificial Sequence: Synthetic coding sequence
  source 1..339: mol_type = other DNA
atggctgagcaggccacgaaatctgtgctgttcgtctgtctgggcaatatttgcaggagtcccattgccgaggccgtttttaggaaactcgtaactgaccagaacataagtgagaactggcgggtggactccgcagctacctctgggtacgaaatcggaaaccctcccgattatcgcggtcagtcgtgcatgaaacgacacggtattccaatgtcacacgtggccaggcaggtgccttcgctcgaccttaaactctgtgtgctgtgcttttcaggatctctcaccgctgtactctttctcactgggacttgggcaggaccccaaactcaggagttgtag

SEQ ID NO: 213013 - DNA, 477 bp, synthetic construct
  misc_feature 1..477: note = Description of Artificial Sequence: Synthetic coding sequence
  source 1..477: mol_type = other DNA
atggccgagcaggcaaccaaatccgttttattcgtttgtttaggcaatatctgcaggtctcctatcgcagaggccgtgtttcggaagctagtaactgaccagaacatcagcgaaaattggcgcgtcgactccgccgcaacgagtggctacgagatcggaaaccctcctgactaccgcggtcagtcatgcatgaagcgccacggtatccccatgagtcatgttgcccgtcagattacgaaagaggattttgctacgttcgactacattttgtgtatggacgagtccaatctgcgagatctgaacaggaagagcaatcaagtcaagacctgtaaagcaaagatcgaactcctgggtagctacgacccacaaaagcaactgattatcgaggacccatattacggcaatgactcggactttgagactgtgtaccagcaatgtgtaagatgctgccgcgcatttctggaaaaagcacactag

SEQ ID NO: 213014 - DNA, 477 bp, synthetic construct
  misc_feature 1..477: note = Description of Artificial Sequence: Synthetic coding sequence
  source 1..477: mol_type = other DNA
atggcagaacaagctacaaagtcggtgctgttcgtctgtctgggaaatatctgtcgcagccccattgctgaggctgtgttcagaaagctcgtgaccgaccagaacatcagcgaaaactgggtcatcgatagcggcgctgtgagcgactggaacgtcgggagaagccccgaccctcgagctgtcagctgcctaaggaaccacgggattcataccgcccataaggcccgacagattactaaggaggacttcgccaccttcgactatatcttgtgcatggacgaatcgaatttgagagatctaaatcggaagagcaatcaggtaaagacctgtaaggcaaagatcgagctgctaggtagctatgacccccagaagcaactgatcattgaagacccttactatggaaatgatagcgattttgagacggtgtatcagcagtgcgtgcgttgctgtagggccttcctggaaaaggcacattag

SEQ ID NO: 213015 - DNA, 219 bp, synthetic construct
  misc_feature 1..219: note = Description of Artificial Sequence: Synthetic coding sequence
  source 1..219: mol_type = other DNA
atggcggaacaagctactaagagtgttttatttgtttgtcttggaaacatttgtagaagccccatcgccgaggccgtgttcaggaagctggtgactgatcagaacatttcggagaattggcgtgtcgactcagcggctacctctggcggtagcctgactgccgttttgtttcttacagggacctgggctgggccacagaccaaatcttgcgctgcttag

SEQ ID NO: 213016 - DNA, 483 bp, synthetic construct
  misc_feature 1..483: note = Description of Artificial Sequence: Synthetic coding sequence
  source 1..483: mol_type = other DNA
atggcagggaaaaggagtggttggagccgcgctgcgttgctacaactgctcctgggtgttaatctggttgtcatgcccccaacccgagccaggagcctgcgatttgtcactctattgtatcggcatggtgatagatcccctgtaaaaacctacccgaaggacccatatcaggaggaggaatggccccaagggtttggccaactgactaaggaggggatgctgcaacactgggaactgggccaggcgctgcgccagagataccatggatttttgaacacctcgtaccatcgccaggaggtgtacgtccggtcaaccgacttcgataggacgctgatgagcgccgaggcgaatttagccggactgttccctccaaacggaatgcagcggttcaatccaaatatctcctggcaacctatccctgttcataccgtgcctataacagaggaccgggtgcgcgtggctagccccagcctgggatggtag

SEQ ID NO: 213017 - DNA, 1272 bp, synthetic construct
  misc_feature 1..1272: note = Description of Artificial Sequence: Synthetic coding sequence
  source 1..1272: mol_type = other DNA
atggccggaaagagaagcgggtggtcccgggcagctctgttgcagctactactaggcgttaacttggtagtcatgccacctacaagggccagatctttaagatttgtgactctgttgtatcgacacggcgaccgaagccccgtgaaaacctatcctaaagacccttaccaggaagaagagtggccccagggattcggacaactcacgaaagaaggtatgctgcaacattgggagctggggcaggccctcaggcagcgctaccacggctttctcaatacctcatatcatcgccaagaagtctatgtgcgcagcaccgacttcgatcgcactctcatgagcgccgaggctaatctcgcaggcttgttcccacccaacggcatgcagcgatttaacccaaatatcagttggcaaccaattccagttcatacagtgcctatcaccgaggaccgcctcctgaagttcccactgggcccttgtcccaggtacgagcagctccaaaacgagacccggcagacccccgaataccagaacgagtcatctcgcaacgctcagtttctggatatggtggcaaacgagaccggcctcacagacctgaccttagaaaccgtttggaacgtgtacgataccttgttttgcgagcagacccacggactgcgcctacccccatgggccagtccgcagaccatgcaaaggctatcccgattaaaggacttctcttttcggtttctgtttgggatctatcagcaggccgagaaagctcgactgcagggcggagtcttgttggcccagatcaggaaaaatctcacgctgatggctacaaccagccaactgcccaagctactcgtgtatagcgcccatgatactaccctcgtggctcttcagatggctctggacgtttacaacggggaacaggccccttacgcttcttgccacattttcgaactctatcaggaggattccggaaacttttctgtcgaaatgtactttagaaacgagtccgataaggcgccatggcccctttccttgccaggctgtccccataggtgcccactccaggactttctgcgcctcactgagcctgtcgtgccaaaggattggcagcaggagtgtcaactggcatctggcccagcggataccgaggttatagttgctctcgctgtgtgcgggagtatcttatttctgcttattgttctcctcttgacggtgttgtttcgaatgcaggcacaaccccctggatacagacatgtggcagacggagaagaccatgcctag

SEQ ID NO: 213018 - DNA, 1176 bp, synthetic construct
  misc_feature 1..1176: note = Description of Artificial Sequence: Synthetic coding sequence
  source 1..1176: mol_type = other DNA
atggccggaaagaggagcgggtggtctcgcgcagcactcctccagctgctcctgggagtgaaccttgtagtcatgccacccacccgcgctcggagtttgagattcgtcacccttgagggaatgctgcagcattgggaactcgggcaggctctacggcagcgctatcacggcttccttaacacttcttatcaccggcaagaagtttacgttcgttccactgatttcgaccgcactctcatgtccgccgaagctaacctcgctggtttgttcccccctaacgggatgcaacggtttaacccgaacattagttggcagcctatacccgtgcatacagtacctatcacggaagaccgcttactcaagtttccgcttggcccatgtcctcggtacgaacaactccagaacgagactaggcagaccccagagtatcaaaacgaatcaagcagaaacgcccagtttcttgacatggtggctaatgaaacaggactgacagatctgactttggagactgtgtggaatgtgtatgacacacttttctgcgaacagacccacggacttcgcttacctccgtgggctagccctcagactatgcagaggctaagccgactgaaagatttttcattccgctttttatttggaatctaccagcaggccgagaaagccagattacaaggaggcgtgctgctggctcaaatccggaaaaatcttacgttgatggccacaacatcccagcttcctaaattgctcgtatacagtgcacatgataccacactggttgctttgcagatggctcttgatgtctacaatggcgagcaggcaccatatgcctcctgtcatatctttgagctttatcaggaagacagcggtaacttctctgtggaaatgtacttccgtaatgagtccgacaaggctccctggccactaagcctacccggttgtccccaccgttgtccgctgcaggacttcctgcgcctgaccgaacccgtagtaccaaaggactggcagcaggaatgccagcttgccagcggacccgcagacacagaggtgatcgtggctctggccgtgtgtggctccatcctctttctccttattgtcttactcctcaccgtgctgttcaggatgcaggcacaaccaccaggttaccgacacgtggcagatggcgaggatcacgcctag

SEQ ID NO: 213019 - DNA, 711 bp, synthetic construct
  misc_feature 1..711: note = Description of Artificial Sequence: Synthetic coding sequence
  source 1..711: mol_type = other DNA
atggtggcaaacgagacgggcctaaccgacctaacattagaaacagtctggaatgtgtacgataccctgttttgcgagcagactcatggccttaggttgcccccatgggcctcaccccagacaatgcagaggctttcaaggctgaaggactttagttttcggttcctgttcggaatctatcagcaggccgagaaagcacgtctgcagggtggcgtgcttctagcacagatacggaagaacctaacacttatggcaactacctctcagctgcctaagctcctggtgtattccgcacatgacacaacactggtagcgcttcaaatggcgttggatgtctacaatggtgagcaggctccttacgcttcatgccacatctttgagttataccaggaagacagcggcaacttctccgtggagatgtacttccgcaatgaatcagacaaagccccttggccattgtcactgccaggatgcccccatagatgtccgctccaggacttcctgcgcttaacagaacccgtggttcccaaggattggcagcaggagtgtcagctcgcttcaggtccagccgatacagaggtcatcgtggcacttgcagtatgtggtagtatcctgttcctgttgattgtcctactcctcactgtgctcttccggatgcaggctcaacctccaggctatagacacgttgctgacggggaggaccacgcctag

SEQ ID NO: 213020 - DNA, 1242 bp, synthetic construct
  misc_feature 1..1242: note = Description of Artificial Sequence: Synthetic coding sequence
  source 1..1242: mol_type = other DNA
atggctggaaaaagatccggatggtcacgcgcagctctactgcagctcctccttggcgtgaatctcgtcgtcatgccacctactcgggctcggtctctccgcttcgtgacgctgctgtatcgacatggtgatcgttcccctgtgaagacctatccgaaagatccataccaggaagaagagtggccacagggattcggtcagctcacaaaggaaggcatgctgcagaggtatcacggattcctgaacacatcctatcaccgtcaagaagtgtacgtgagatctacagattttgatcgcacactaatgtctgccgaagcaaacctcgcgggattattcccaccaaacggaatgcagaggtttaaccctaacatcagctggcagcccatcccagtgcacacagtccccattaccgaagatcgcttactgaaattcccacttggaccgtgtccaaggtacgagcagctgcagaacgagaccaggcagacccccgaatatcagaacgagagctctagaaacgctcaattcttggatatggttgcaaacgaaaccggacttaccgatctgacgctggagacagtgtggaatgtttatgatacccttttctgcgaacaaactcatggcttgcggcttcccccatgggccagcccacagacaatgcagcgattgtcccgcttaaaagacttttcatttcggttcctcttcggcatttaccagcaggccgagaaagcgagactgcaggggggagtgctgctagcccagattaggaaaaatttgactctcatggcgactacctctcagctgcccaagctcctggtgtattcagctcacgataccactctcgtggcgcttcagatggccttagacgtgtacaatggtgagcaggccccatatgcatcttgccacatctttgaactgtatcaagaggactcagggaacttctcggtcgagatgtattttagaaatgagagcgataaggctccctggccattaagtctgccgggttgccctcaccggtgtccattgcaagatttcttacggcttaccgagcctgtggtgcctaaggactggcagcaggagtgccagttggcttctggcccagctgacactgaagtgattgtggcattggctgtctgtggtagtatattgtttctgctgattgttctcctgcttacggtcctgttcaggatgcaggctcagccacctgggtatcggcatgtggccgacggcgaagaccacgcctag

SEQ ID NO: 213021 - DNA, 978 bp, synthetic construct
  misc_feature 1..978: note = Description of Artificial Sequence: Synthetic coding sequence
  source 1..978: mol_type = other DNA
atggacatgtggacggcattgcttatattacaggccctgctactgccctcgctggctgatggagctaccccagcattgaggttcgtggctgtgggtgactggggcggagttcccaatgcccctttccataccgctagagagatggcaaacgcgaaagaaatcgcgagaactgttcaaatactgggggctgatttcatactgtcgctgggggataacttctattttaccggggtgcaggatatcaacgataaacgctttcaggagacctttgaggatgtcttctctgaccgatctctgcgtaaggtaccctggtacgttttggccggaaaccacgaccacctagggaacgttagcgcacagattgcatattcaaagatcagcaagaggtggaactttccttcaccgttttatcgcttgcattttaagataccacagactaatgtgtcagtggctatatttatgctggatacggtaacactgtgtggtaattcagacgacttcctttcacagcaacctgagcgaccaagggatgttaagctcgctaggacccagctctcctggttgaagaagcagttggctgcagcccgtgaggattacgtgttggttgctggacactaccctgtgtggtcaatcgccgagcacggaccaacgcattgcctggtgaagcagctgcgcccattactggctacctatggggtcaccgcctatctgtgcggccatgaccacaatctgcagtatctgcaggatgagaacggcgtcggatacgtattaagcggggctggcaatttcatggaccctagcaaaagacaccaacgcaaggtccccaacggctaccttcgcttccactacggcacggaggacagcctgggcggtttcgcatacgtggagatcagcagcaaggaaatgactgtgacgtatatcgaggcctcaggtaagtcactgtttaagactagattgccaaggcgggcacggccttag

SEQ ID NO: 213022 - DNA, 1239 bp, synthetic construct
  misc_feature 1..1239: note = Description of Artificial Sequence: Synthetic coding sequence
  source 1..1239: mol_type = other DNA
atgggcagtccctggaatgggtccgacggtcctgaaggggctagggaacccccttggcctgctctgcccccttgcgatgaacgcaggtgctccccatttccactgggcgctctggtgcctgtcaccgctgtgtgtctgtgtctcttcgttgtcggcgtttccggcaacgttgtgaccgtcatgctgatcggaagatatagggatatgcggactacaacgaatttgtatcttgggagtatggcagtctcagacttgttgatcctgctcgggctgccattcgatctctacaggctctggcggagccggccttgggtgttcgggccactcctttgtaggctgagcctgtacgtgggagaagggtgcacatatgcgactttgttgcacatgaccgcattatccgtcgaacggtacctggccatttgcaggccgttaagggcacgcgtgttggtgacgcgacggagggtcagagccttaattgccgttctgtgggccgtcgccctgttgtctgctggccctttcctttttcttgtgggagtggaacaggaccccggaatttcagttgttcctggccttaatggaacagcaagaatcgcttctagtcccctagcttcctctcccccactatggctctcaagggctcctccacctagcccccctagcggacctgaaacggctgaggcggcagccctgttctcgagagagtgtcggccttcccctgcgcagctgggcgcactgcgagtgatgttatgggtcacaactgcatacttcttcttgcctttcctctgtctgtcaatcctctacggtctgataggtagagagctgtggtcctcacggagaccattaagaggacctgctgcttccggccgtgaaaggggccaccggcagacagtgcgggtccttctggtggtcgtacttgccttcataatttgttggctgccctttcatgttgggagaatcatttatattaacacagaagattcccggatgatgtatttctcacaatacttcaacattgttgcactgcagctgttttatctctcagcatcgattaaccctatactttacaacctcatatctaagaagtacagggccgcagccttcaaactgctactggcacggaagtcccgccctcggggatttcacagaagccgggataccgctggggaggtcgccggagacaccggtggagacaccgttgggtataccgagacctctgctaacgtgaaaactatggggtag

SEQ ID NO: 213023 - DNA, 978 bp, synthetic construct
  misc_feature 1..978: note = Description of Artificial Sequence: Synthetic coding sequence
  source 1..978: mol_type = other DNA
atggacatgtggaccgctcttctcatactccaggcgctactactaccgagcctggctgacggcgcaacccccgctcttaggttcgtcgcggtgggtgactggggcggagtgcctaatgccccatttcacaccgcaagggagatggccaatgccaaggagatcgccaggaccgtgcagatcctgggggcagactttatattatcccttggagacaacttctactttaccggcgttcaggacatcaatgacaagcgctttcaagaaaccttcgaggatgtgttttctgataggtccctcagaaaagtgccgtggtacgtcctcgccggaaatcatgaccatctcggaaatgtgagcgcgcagattgcttactctaaaattagcaaacggtggaacttcccttcccccttctatagactgcactttaagattccccagactaatgtctcagtggccattttcatgttagataccgtgacgctgtgcggcaactcagacgactttctgagccagcagcccgagcgccctagagacgtgaaattggctcggacacagctgtcctggcttaaaaagcaactggcggctgctagggaggactatgtcctcgttgccggtcactatcccgtgtggtccattgccgaacacggaccaacgcactgcttggtgaaacagttacggcctctgctcgccacctacggggtcacagcatatctgtgtgggcacgatcacaacctgcagtatctccaggacgaaaatggagtgggatacgtgctctccggcgctggtaacttcatggacccttctaaacgacatcaacgtaaggttcccaatggatatctgcggttccactatggcactgaagattctctgggcggattcgcctacgttgaaataagctcaaaggagatgacagtaacatacatcgaagccagcgggaagagtctgtttaagacacgactccccagacgcgcacgcccatag

SEQ ID NO: 213024 - DNA, 978 bp, synthetic construct
  misc_feature 1..978: note = Description of Artificial Sequence: Synthetic coding sequence
  source 1..978: mol_type = other DNA
atggacatgtggaccgcattactgatcttacaagctttgttactgccaagtttggccgacggagccaccccagcccttcggtttgtggcagtcggggattgggggggtgtcccaaacgcacccttccacaccgctcgtgagatggccaacgctaaggagattgcccgaaccgtccagattctaggggctgactttattctctcccttggggacaacttctacttcaccggagtgcaggacatcaacgacaagcgatttcaggaaacatttgaggatgtgttttccgataggagcctgcgaaaggtcccatggtatgtgcttgcagggaaccatgaccacttggggaacgtctctgctcaaatcgcctattccaaaatcagcaagaggtggaattttccctcacccttctatcggctccactttaaaatcccccaaacaaatgtcagcgttgctattttcatgctggacacggtaacactctgtgggaatagcgacgactttctcagccagcagcctgagcgaccccgagacgttaaactggcgcgtactcagctgtcctggctaaagaagcagctcgctgcggcaagggaggactacgtgcttgtggccggtcactaccccgtttggtctatcgccgaacacggcccaacgcattgtctggtaaagcagctgcggccattgctggcgacgtacggagtgactgcctacctgtgcggacatgatcacaacctccagtatctgcaagacgagaacggcgtgggttatgttctcagcggggctggcaactttatggatccatcaaagagacaccagcggaaagtgccaaatggctatctcaggttccattatggcacagaagattcgctgggtggtttcgcttatgtggaaatctcatcaaaagaaatgaccgtgacatatatcgaggccagcggtaagagtcttttcaagactcgcctgccacgccgagctcgaccttag

SEQ ID NO: 213025 - DNA, 1161 bp, synthetic construct
  misc_feature 1..1161: note = Description of Artificial Sequence: Synthetic coding sequence
  source 1..1161: mol_type = other DNA
atgagggccgcaccccttctcctggcaagggcagcctccctgagcctggggtttctgtttctgctgtttttctggctggataggtcggttctggcaaaagagctcaagtttgtgacccttgtgttccgccacggcgaccgtagccctattgacacatttccaactgacccaataaaggaaagctcttggcctcagggcttcggccagctgacacagctggggatggagcaacattacgagctgggagagtatatcaggaagcgttatcgcaaattcctgaatgagagctataaacatgaacaggtctacattcggtctacagacgtcgaccggacactgatgtccgcaatgactaatcttgctgcgttatttccgccagaaggcgtcagcatctggaatcccatcctgttgtggcagcccattcctgtgcataccgtgcctctcagtgaagatcagctactctacctcccctttcgcaactgtccaaggttccaagagctggaaagtgagacgctgaagagcgaagagttccagaagcgcctccacccttacaaggatttcatagcaaccctcgggaaactgagtggcctgcatggccaagacttgttcggcatctggtcaaaggtgtatgaccctctgtactgcgagagtgtacataacttcacacttccaagttgggcaacggaggacacaatgacaaagctcagagaactgtctgagctatctttgttatcactgtacggcatccacaaacaaaaggagaaaagtcggctacaggggggtgtccttgtaaacgagatcctgaatcacatgaagcgtgcgacccagataccttcttacaagaagttgatcatgtactcagctcatgacacaaccgtgagcggtctccagatggcattggacgtgtataacggactgctgccaccatatgcttcatgccacttaacagaattgtactttgagaagggcgagtattttgtcgaaatgtattatcgcaacgaaacccagcacgagccttaccccctcatgctgcctggctgcagccccagttgccctttagaaaggttcgccgagctggtgggtccagtgatcccccaggactggtctactgaatgcatgacaaccaattcacatcaaggaacggaagactctactgattag

SEQ ID NO: 213026 - DNA, 1257 bp, synthetic construct
  misc_feature 1..1257: note = Description of Artificial Sequence: Synthetic coding sequence
  source 1..1257: mol_type = other DNA
atgcgcgcagcccctttgctccttgcacgagctgcctctttgtctttgggtttcctcttcctcctgtttttttggcttgatagatccgtcctcgccaaagaactaaaattcgtgaccctcgtctttcgccatggagatagatcccctatcgacacattccccaccgatcccattaaagagagctcctggccacagggttttgggcaacttacacagttgggcatggagcaacattacgagttgggcgagtatattcgcaaaagataccgcaaattcctcaatgaaagttacaagcacgaacaagtctacatccggtcaacagatgtcgatagaactctcatgagcgccatgaccaatctagctgcactgtttccccctgaaggcgtgagtatctggaacccaatcctcttatggcagccaattcccgtgcacacagtgcccctcagtgaggaccagctcctctacttgcctttcagaaactgcccacgttttcaggaactggagtccgagactctgaagtcagaggagtttcaaaaacgcttacatccatacaaagactttatcgccactctggggaagttatcgggtctacacggccaggacttgtttggtatttggagcaaggtttacgaccctctttactgcgaatctgtacataatttcacgctgccttcctgggctacggaagacacaatgaccaaactccgtgaattgtccgaactgagtctgttgtccttgtacggtatccacaaacagaaggagaaaagtagacttcaggggggagtgttggttaacgagatcctgaatcacatgaagcgcgctactcaaattccatcttataagaaactgattatgtacagtgcccacgacactactgtctctgggttgcagatggccctcgatgtatataacggactcctccccccatacgctagttgccacctgacagagctgtactttgagaagggtgagtactttgttgagatgtattataggaatgagacacagcacgaaccttaccccctaatgctgccagggtgttccccctcctgcccgctcgagcgatttgcagagttagtgggccctgttatccctcaagattggagcaccgagtgcatgacaaccaatagccaccaggtgcttaaggtaatctttgcggtagcattctgcttaatcagcgctgtgcttatggttctcctgttcattcatatccgcagaggcctgtgctggcagagagagagctacggcaatatctag

SEQ ID NO: 213027 - DNA, 1281 bp, synthetic construct
  misc_feature 1..1281: note = Description of Artificial Sequence: Synthetic coding sequence
  source 1..1281: mol_type = other DNA
atggctggcctgggtttctggggacatcccgctgggccacttcttctgttattgctcttggtcctgcctccaagggcactgcccgagggccctctggtcttcgtggctctggtgttcagacacggcgacagggctcctctggcgtcctaccccatggacccccataaggaagtggcctctaccttgtggcctaggggtctcggccagcttaccaccgaaggcgtgagacagcagctagagctcgggagatttcttcggtcccgctacgaagcatttttatctccagagtatcgcagagaggaagtctatatccgctcgaccgattttgaccgcacattggaatccgcccaggccaacctcgctggactctttccggaggccgctcccggttctccagaggctcgatggcggccaatccccgtgcacacagtgcccgtcgccgaggacaaactcttgaggtttccgatgcgaagttgcccccgataccatgagctgctgcgcgaggcaacagaagcagccgagtaccaggaggccctcgagggatggactggtttcttgagccggctggaaaattttacggggttatcacttgtaggagagccactcaggagagcctggaaagtactggatacactcatgtgccagcaagcccatgggcttcctctacctgcttgggcatctcctgacgtgctgagaactttagctcagattagcgccttggatataggtgctcacgtaggtccccctagggctgcagaaaaagcacagctaaccggcggaatcctactcaacgcaatcctggctaacttcagccgggtgcagaggcttggtctgcccctcaagatggtgatgtacagcgctcatgactctaccctgctagcgttgcagggggctctcggcctgtatgatggacataccccaccctacgcagcgtgcttgggctttgagtttagaaagcatttgggaaacccggctaaggacgggggaaatgtcaccgtgagcctgttctatagaaatgactcggcacacctgcccttgcccctgtcccttccagggtgtcccgctccttgccccctcggaaggttttatcagctgaccgcgccagcacgaccacctgcccacggcgtgagctgtcacggcccttatgaagctgctattccacccgcacctgttgtgccgctgcttgccggagcagtcgctgtacttgtagctctgtctctggggttgggcctgctggcctggcggccagggtgtttgcgggctctgggcggacccgtgtag

SEQ ID NO: 213028 - DNA, 1002 bp, synthetic construct
  misc_feature 1..1002: note = Description of Artificial Sequence: Synthetic coding sequence
  source 1..1002: mol_type = other DNA
atggccggacttgggttctggggtcatccagcaggacctttgctgctccttttgctgcttgtgctgccccctcgagctctacccgaagggcctctggtatttgtcgctctggtcttcaggcatggggacagggcaccactggcctcctaccctatggatccacataaagaggttgcgtctaccctttggccacgaggcctggggcagctgaccacagagggtgtaagacagcaactggaactcgggaggttccttcgaagccggtacgagggatttctgtcacggctagagaactttactgggttgagcctggttggcgagcctctgcgcagggcttggaaagttctggataccctcatgtgtcagcaggcacatgggttgccactgcccgcttgggcttccccagacgtgctacggacacttgctcagatttcggctctggacataggggctcacgtcggcccaccacgcgctgcagagaaagcacagttgaccggcggaattctgcttaacgcgatcctagctaacttcagcagagtgcagagactggggttgccactcaagatggtgatgtatagcgcccacgatagtaccctactggcgctccaaggagcacttgggctctacgatgggcacacccccccttatgctgcatgtctggggttcgaattcaggaaacacttgggtaatcccgcaaaggatggcggaaacgttaccgtgagtctcttttacagaaacgacagcgcgcatcttccattaccgttgtcactgccagggtgccccgcaccatgcccccttggaaggttctatcagctcaccgcccctgccagaccccctgcacatggagtctcctgtcacggaccatacgaagctgctattccacccgcacctgtggtacccctgttggccggagctgtggccgtgctggtcgctctgagcctcggcctggggttattggcatggcgcccagggtgcttgagggcactaggagggccagtttag

SEQ ID NO: 213029 - DNA, 633 bp, synthetic construct
  misc_feature 1..633: note = Description of Artificial Sequence: Synthetic coding sequence
  source 1..633: mol_type = other DNA
atggagatgggaagaagaatacatctggaactccggaataggaccccgtcagacgtaaaggaactagtgctcgataattcaaggagcaacgaagggaagcttgaaggccttaccgatgagtttgaagaattggaattcctcagtacaatcaatgtaggcctgacatctatcgcgaatctccccaaactcaacaaactcaagaaactcgagttatcagacaatcgcgtcagtggcggactggaagttcttgctgaaaagtgcccgaacctcacacaccttaacttatccggcaataagataaaagacctctcaacgatcgagccccttaaaaaactcgagaacctcaagtctctggacctgttcaattgcgaggtcactaatttgaacgactaccgggagaatgtgtttaagcttcttcctcagctcacttacctggatgggtacgaccgtgatgataaagaggctcctgattctgatgccgagggctatgtcgagggcctggatgatgaagaggaggacgaggacgaggaggagtacgatgatgaggaaggatataatgacggcgaagtcgacgatgaagaggacaagaaaaaaaaaaagaaaaagaaaaaaaagaagaaaaagaagaagtag

SEQ ID NO: 213030 - DNA, 750 bp, synthetic construct
  misc_feature 1..750: note = Description of Artificial Sequence: Synthetic coding sequence
  source 1..750: mol_type = other DNA
atggagatgggacggagaatccacctggaactacgaaacagaacacctagcgatgtgaaagaactcgtcttggataactctaggagcaacgaaggcaagttggagggactgacagacgaattcgaggagcttgaattcctctctaccattaacgtcggccttactagcatcgcaaatttgccaaaactaaataagctgaagaaattagaattgagcgacaatagagtctcagggggacttgaggtcttggcagagaagtgcccaaatttgacacatctgaatctgtctggaaacaagattaaggatttaagtactattgaacccctgaagaagctcgaaaatctcaagtctctcgacctcttcaactgtgaagttactaacctaaatgactatcgtgagaatgttttcaagctgctgcctcaactgacataccttgatggctatgatcgcgacgacaaagaagcccctgactccgatgccgaggggtacgtagaagggctcgatgacgaggaggaggacgaggacgaagaggagtacgacgaggacgcccaagtggtggaagatgaggaagatgaggatgaagaggaagagggtgaagaggaagatgtctctggcgaagaggaggaggatgaagaaggttataatgatggtgaggtcgacgatgaggaagacgaagaggagttaggagaagaagaacgcggtcagaagaggaaaagagagcccgaagatgagggtgaagacgacgattag

SEQ ID NO: 213031 - DNA, 396 bp, synthetic construct
  misc_feature 1..396: note = Description of Artificial Sequence: Synthetic coding sequence
  source 1..396: mol_type = other DNA
atggagatggggaaatggattcacctggagttacgcaaccgtaccccctcagatgtgaaagagctcttcttagataactcccagtccaatgagggcaaactggaaggattaactgatgagtttgaggaactcgagttgcttaacacaatcaatatcggtttgacaagtatcgccaacctgcctaagctgaacaaactcaaaaagttagagctctcatcaaacagagccagcgtgggcctggaggtcctggcagaaaagtgtcccaatctaatccacctcaacctgtccgggaataagattaaagacctatctaccatcgaacctctgaaaaagctggaaaatctcgagtcactggatttgtttacctgtgaagtgactaatcttaacaactattag

SEQ ID NO: 213032 - DNA, 807 bp, synthetic construct
  misc_feature 1..807: note = Description of Artificial Sequence: Synthetic coding sequence
  source 1..807: mol_type = other DNA
atggagatgaagaagaagatcaatcttgagctacggaatcgctcaccggaggaagtcaccgagctggtgctcgataattgcctctgcgtgaacggagaaattgaagggttgaatgatacatttaaggaattagaatttctcagtatggcaaacgtggaactgtccagcctggcgaggctccccagtctgaacaaattgaggaagctggagctctcagacaacattatctcgggaggcctggaggtcctcgcagaaaagtgccccaatttgacatacttgaaccttagcggaaataaaatcaaggacctaagcactgtagaggctctgcaaaacctgaagaatctgaaatccttggatctgtttaattgcgaaatcaccaacctagaagactaccgcgagagcatctttgaactgctgcaacaaatcacatatctggacggtttcgaccaggaggacaacgaagctccagattccgaagaggaagatgacgaagacggtgacgaggatgacgaggaggaagaggagaatgaagctggccctccagagggctatgaggaagaggaggaggaggaggaagaggaagatgaggatgaggacgaagatgaggatgaggctggtagtgagctcggcgaaggtgaggaggaagttgggctgagttacctcatgaaggaggagattcaggatgaagaggacgacgatgactatgtggaggaaggggaagaagaggaagaggaggaagaaggcggattacgcggagaaaagaggaagagggatgccgaggatgatggagaggaggaggacgattag

SEQ ID NO: 213033 - DNA, 411 bp, synthetic construct
  misc_feature 1..411: note = Description of Artificial Sequence: Synthetic coding sequence
  source 1..411: mol_type = other DNA
atggaaatgaagaaaaaaatcaatctggaacttagaaatcggtcccctgaagaagaggacaatgaggcaccagattctgaggaagaggatgacgaggatggggacgaggacgatgaggaagaagaggaaaacgaagccggtccacccgagggctacgaagaggaagaagaagaagaagaggaagaagacgaggacgaagacgaagatgaggatgaggccggatccgagctgggagaaggggaggaggaggtgggcctctcctatttaatgaaggaggagatccaggatgaggaggacgacgatgactacgttgaggagggtgaggaggaggaggaggaggaagaaggaggtctacgtggtgagaagcggaagcgggatgctgaggacgacggtgaggaagaggatgattag

SEQ ID NO: 213034 - DNA, 663 bp, synthetic construct
  misc_feature 1..663: note = Description of Artificial Sequence: Synthetic coding sequence
  source 1..663: mol_type = other DNA
atggccaatgtagaactgtccagtctggctaggctgccatcactaaacaagctgagaaaattggaacttagtgacaatataattagcggagggctggaagtgttggccgagaagtgccctaatctgacgtacctgaacctcagcgggaataagataaaggatctgtccactgtggaggcgctgcagaatctgaagaacctgaagagcctcgacctttttaactgcgagatcacgaaccttgaagactatcgggagtccatcttcgaattgctgcagcaaatcacttatctggatgggttcgatcaagaggataacgaggctcccgacagcgaagaggaggacgacgaagatggcgacgaggacgatgaagaagaggaagagaacgaggcgggtccccctgaaggttacgaggaggaagaggaagaggaagaggaggaggatgaagacgaggatgaggatgaagacgaagccggatccgagctgggtgagggcgaagaggaggtcggtttgagctacctcatgaaagaggaaatccaagatgaggaagatgatgatgactatgtcgaggaaggtgaagaagaggaggaggaagaggaagggggactgagaggcgagaagcgcaagagggacgcagaggacgatggcgaagaggaggacgactag

SEQ ID NO: 213035 - DNA, 684 bp, synthetic construct
  misc_feature 1..684: note = Description of Artificial Sequence: Synthetic coding sequence
  source 1..684: mol_type = other DNA
atggagatgaagaagaagatcaatcttgaacttagaaatcgtagcccggaggaggtcacggagctcgtcctggacaactgcttatgcgttaacggtgagattgaagggctgaatgatactttcaaggagctggagtttctttcaatggctaacgtggagttatcatcgctcgcgcgactcccgtctttaaacaagttgagaaaacagaatctgaaaaatctaaagagtctcgacctgttcaattgtgagatcaccaatctcgaagactatagagagtctatcttcgaactcctgcagcaaataacctatctagacggcttcgatcaggaagacaatgaagcacccgattcggaggaggaagacgatgaagatggcgatgaggacgatgaagaggaagaagaaaatgaggctggacctccagaagggtacgaagaggaggaagaagaggaggaggaggaggacgaggatgaagacgaggacgaggatgaggcaggtagcgagctcggggagggcgaagaggaggtgggactcagctacctgatgaaggaagagatccaggatgaagaagatgatgacgattacgtggaggagggcgaagaggaggaggaagaggaggaggggggtctcagaggagagaagcgcaagcgggacgccgaagacgacggcgaggaggaggacgattag

SEQ ID NO: 213036 - DNA, 2076 bp, synthetic construct
  misc_feature 1..2076: note = Description of Artificial Sequence: Synthetic coding sequence
  source 1..2076: mol_type = other DNA
atggacgggtgtaaaaaggagctaccgcgacttcaggaaccagaagaagacgaggattgttacattctgaatgtgcagagttcatccgacgatactagcggatcctcagttgccagacgggctccaaagcggcaggcaagctgtatcctgaacgtgcaaagtaggtccggagataccagtggatcaagcgttgctaggcgtgcccctaaaagacaggcgagcagcgtggtagttattgattctgatagcgacgaggaatgccacactcacgaagagaaaaaagccaaactgctggagatcaatagcgatgatgaatcccccgaatgctgtcacgtgaagcccgctattcaagagcctcctatcgtgatctcagacgacgataatgacgatgacaacggtaacgatctggaagtacccgatgataactccgacgattccgaagctcctgatgataattccgacgactctgaggctcctgacgacaattccgacgactccgaagcccctgacgacaattcagacgactccgaggctcctgacgacaatagcgatgattccgatgttcctgacgacaattccgacgattcaagcgatgacaatagcgatgacagttctgacgacaactccgatgattccgatgtccccgatgataagagtgacgactctgacgtccctgatgatagctccgacgattccgacgtgccagatgatagctctgacgacagcgaagctcctgacgattccagcgatgacagcgaggcacctgacgactcgtctgatgacagcgaggcacctgacgacagctcagatgactccgaagcacctgacgattcttctgatgacagcgaggctagtgatgattcctcggatgattctgaggcgagcgacgacagctcagacgatagtgaggcacccgacgacaaatcagatgactctgacgtgcccgaggataaaagcgatgacagcgatgtccccgatgacaattcagatgacttggaggtccctgttcccgctgaggacttgtgcaacgaagggcagatcgcctccgatgaggaggagctcgtggaggccgctgccgcagtctctcaacacgactcttctgacgacgccggagagcaggacctcggagaaaacctgtctaagcccccaagcgatcccgaggccaatcccgaggtgtctgaacggaagctccctacagaggaggagcctgctccagtagtcgaacaatcagggaaacgcaaaagcaagactaaaactatagtggagccacctaggaaacgccagaccaagactaagaacatagtggagccaccacggaaaaggcagaccaaaacaaagaatatcgtggaaccactgaggaagcggaaggctaagactaagaacgtaagcgtgactccagggcacaagaagcggggtccgtcaaagaagaaacccggtgctgcgaaagttgaaaagcggaagactcgaacccctaagtgcaaggtgccaggctgtttcttgcaggacctggaaaaatcaaagaaatattcaggcaagaatctgaagcgcaacaaagacgaactggttcagcggatctacgatcttttcaatagatccgtctgcgataagaaattgccggagaaacttcgaattggctggaacaataaaatggtgaagactgccggtctgtgcagcaccggcgagatgtggtaccccaaatggcgcagatttgccaagattcaaattggactgaaggtctgcgactcagcagacaggattagagataccctcattcacgaaatgtgccatgctgcaagctggctcattgatggtatccacgacagtcacggtgatgcctggaaatattacgccagaaagtctaatcgtatccatccagagcttcccagggttactcggtgccacaattacaagataaactataaagtgcactatgagtgtactggctgcaagacccgcataggatgttatacaaagtcactggatacatcccgctttatctgtgccaaatgtaaaggcagcttggtgatggtgccactgacacagaaggatgggacgcggatcgttccgcatgtttag

SEQ ID NO: 213037 - DNA, 2076 bp, synthetic construct
  misc_feature 1..2076: note = Description of Artificial Sequence: Synthetic coding sequence
  source 1..2076: mol_type = other DNA
atggacggttgtaagaaagagctgcccaggctacaggagcctgaggaggatgaagattgttacattctcaatgttcagagttctagcgatgacacctcaggcagctctgtagcacgacgggctcccaagcgccaggcttcctgcattttgaatgtgcagagccgctccggcgacactagtggatcaagcgtggcccgacgggctccaaagcggcaggcctcctctgttgtcgtgattgactccgatagtgatgaggagtgccacactcacgaggaaaagaaggcaaaactgttggaaattaactcggatgacgagtcacccgagtgctgccatgtcaagcccgctattcaggagccacccatcgtgataagtgatgatgacaacgatgacgacaatggcaatgatctggaggttcctgatgataattcagatgactcggaagctccggatgataatagtgatgattcagaagctcctgacgacaatagcgacgacagtgaggctcctgacgataactccgacgacagcgaagcaccagatgacaactctgacgattccgatgtacccgacgataattccgacgactcgtcagatgataattccgatgactcgtctgatgacaattctgacgactctgacgtcccagacgacaaatccgatgacagtgatgttccagacgacagctctgacgattccgatgtccccgatgattcttcagatgattccgaggctcccgacgactcctcagacgacagtgaggcaccggacgactccagcgacgattcagaggcacccgacgactctagtgacgacagcgaagcccctgacgacagctcagacgattccgaggcctccgacgacagctcagacgactcagaagcttctgatgattcctctgacgactcagaagcccctgatgacaaaagtgatgatagtgacgttcccgaggacaagtcagatgattctgatgtccccgacgataatagtgacgacctggaggttccagtccctgcagaagacttgtgcaatgaaggtcagattgcttccgacgaggaagagctggttgaagctgccgctgctgtatcccagcacgactcctcagatgatgctggagagcaggacctgggcgagaatctgagcaaacctccaagtgatccggaggctaatcctgaggtctccgagcgcaagcttcctacagaggaggagcctgcaccagttgttgaacagagcggcaaacgcaaatccaagacaaaaacgatagtagaaccacccaggaagagacagacaaagactaagaacatcgtagagccccctcgaaaacgacagacaaagacaaagaacatcgttgagcctctgaggaagcgcaaggctaaaactaaaaatgtatcagtcacacctgggcacaagaagcgcggaccttccaaaaagaaacctggcgctgctaaggtggagaagcgaaagacccggacacctaagtgtaaagtgccaggctgctttttacaagacctcgagaagtctaaaaagtatagcgggaagaacctcaagcggaataaagacgaactggtccaaagaatatacgacctgtttaacagatctgtgtgtgataagaagctccctgaaaagcttcgaattgggtggaataataagatggtgaaaacagcagggttgtgctcaacaggcgagatgtggtatccaaagtggcgcaggttcgctaagattcagattggattgaaagtgtgcgacagcgcggatcgaattcgcgacactcttatccatgagatgtgtcatgctgcaagttggctgattgatggcatccacgatagtcacggagatgcatggaagtattatgcaaggaaatcgaatagaatccaccccgaactgccgagggtgacaaggtgtcacaactataagatcaactacaaagtgcactacgaatgtacgggctgtaaaacccgcatcggatgctacacaaagtcgcttgataccagtcgatttatttgcgcgaagtgcaagggaagtctggtgatggtgcctttaacacaaaaagacggtactaggatcgttccgcacgtgtag

SEQ ID NO: 213038 - DNA, 540 bp, synthetic construct
  misc_feature 1..540: note = Description of Artificial Sequence: Synthetic coding sequence
  source 1..540: mol_type = other DNA
atggtgcaggcctggtacatggacgacgccccaggcgatccacgccaaccccaccggcctgacccaggcagaccggttggcttggagcagctgaggagattgggagttttatattggaaactcgatgcagacaagtacgagaatgacccagagctcgaaaagatccgacgagaacggaattatagctggatggacatcattacaatttgcaaggacaaactgccgaactatgaggaaaaaataaagatgttctacgaagagcatctacacctcgacgatgagattagatacatcttggacggctctggatattttgatgttcgcgataaggaggatcaatggatccgaatttttatggagaaaggcgatatggtcacactcccagccggaatctatcacagatttaccgtcgacgagaagaattacacaaaagccatgagactgtttgtcggcgaaccggtctggaccgcctacaatagaccagcagatcatttcgaggcacgcggacaatatgtaaagttcctggctcagactgcttag

SEQ ID NO: 213039 - DNA, 2670 bp, synthetic construct
  misc_feature 1..2670: note = Description of Artificial Sequence: Synthetic coding sequence
  source 1..2670: mol_type = other DNA
atgtctaacccttttgctcacttagccgaacccctagaccctgtccagcccggaaagaagtttttcaacctgaacaagctggaagattctcgctacgggcgtctaccgttctccatacgcgtcctattggaggccgctatccgtaattgcgacgagtttttggtaaagaaacaagatatcgagaacatcttacactggaatgtgactcagcataaaaacatagaagtcccctttaagcctgctcgagtgattctgcaagactttactggcgttcctgccgtggtcgattttgccgcaatgagggatgctgtgaaaaaattaggcggagatcccgaaaaaataaaccccgtctgccctgccgacctggtgatcgaccacagtattcaggtcgacttcaaccggcgtgctgatagcctgcagaaaaaccaggacctggagtttgaaaggaatcgggagcgctttgagttccttaagtggggctcgcaagcattccataacatgcgcattattcccccaggaagtggcattatccaccaggtgaatctggaatatctggcccgagtggtgtttgaccaggacggatactactatccagactcactggtgggtacagactcccacacaacaatgatcgacggattgggtattctggggtggggggtgggaggcattgaggccgaggctgtcatgcttggacagccaatcagtatggtgttgccccaggtgatcggttacaggctaatgggtaaacctcacccgctggtgacttctactgacattgtgctgacaatcacaaaacacttacggcaagtgggcgtggtaggaaaatttgttgagttcttcggccctggggtcgcccagctctctatcgctgatcgcgcaacgattgctaacatgtgtcctgaatacggcgctaccgctgctttctttcccgtagacgaggtctccattacatatctcgtgcagacaggtcgagacgaggaaaagttgaagtacattaagaaatacctgcaggccgtgggcatgtttcgcgatttcaatgatccttctcaggatcctgattttacccaggtagtagagttggacctcaagactgtcgtgccttgttgttccgggcctaagcggccacaggacaaagtggccgtaagcgacatgaaaaaagatttcgagagttgcttgggcgctaagcaaggcttcaaagggtttcaggtcgctccagaacaccacaatgatcacaaaacattcatctatgataacaccgagtttaccctggcccacgggtccgtcgtgattgccgctatcacctcttgtactaatacatccaatcctagtgttatgctgggagctggcctgctggccaagaaggcagtcgatgctgggctgaacgtcatgccctatataaaaacaagtctcagcccgggtagtggcgtggtcacctattatctacaggagagcggcgttatgccttatctctcacagctagggtttgacgtggttggctatgggtgtatgacatgcattggcaattccggtcccctcccggagccagtggtggaagccattactcagggagatctggtggccgtcggagtgctcagcggaaataggaacttcgaaggcagagttcaccccaacacgagggcaaactacctcgccagtccaccactcgtgatcgcatacgcaatcgcagggactattcgaattgattttgaaaaggagccactaggtgtgaatgccaaggggcagcaggtctttctgaaggatatctggccaacgcgggacgagatccaggccgtcgagaggcagtacgtgataccgggaatgtttaaggaggtttatcagaagattgagacagttaacgaatcctggaatgctctcgctacaccctctgacaagttatttttttggaatagtaaatctacgtacatcaagtcccccccattcttcgaaaatctgactttagacttacaaccgcctaagtccattgtggatgcttatgtgctcctcaacctaggtgatagcgtcactaccgatcatatatctcctgcaggtaacatagctcgcaacagccctgcagcaaggtacctgactaatcgcggactgacacctcgtgagttcaactcttacgggagccgtagagggaatgacgccgtgatggctcgcggtaccttcgccaatatccgactgctgaatagatttctcaacaagcaggctcctcagacaattcacttgccctcgggcgaaatactcgacgtctttgatgccgcagagcgctaccaacaggcgggtctgccactcattgtgctggctggaaaagagtatggagccggttcttctagagattgggcagccaagggcccatttctgcttggaatcaaggccgtgctggctgaatcatacgagcggattcatcgttcaaaccttgtaggtatgggggtgatacccctggagtacctgcctggtgagaacgccgacgccttgggactcacaggacaagagaggtacacaattattatacccgagaaccttaaaccacagatgaaagtgcaggtgaagttggacacaggcaagactttccaggcagtgatgcgcttcgataccgatgtcgagctgacgtacttcctgaatggcggaatactgaactacatgattcgaaaaatggcgaaatag

SEQ ID NO: 213040 - DNA, 1305 bp, synthetic construct
  misc_feature 1..1305: note = Description of Artificial Sequence: Synthetic coding sequence
  source 1..1305: mol_type = other DNA
atgagcaatcccttcgcccatctggccgagcctctggatcccgtccagcctgggaagaaattcttcaacttaaacaaactggaggactctaggtacggccgactccctttttcaattcgtgttctcctcgaggctgccattcgtaactgtgatgagtttctggtaaaaaagcaggatatcgaaaacatcctccactggaacgtgactcagcataaaaatatcgaagtaccgtttaagccggctcgagtaatcttacaagattttacaggggtgccagccgtcgtggactttgcagctatgagagacgccgttaagaagctcggaggtgaccctgaaaagattaatcccgtatgtcccgcagatcttgtgatagaccattcaatacaggtggatttcaatcggagagccgactccctgcaaaagaaccaagatcttgagttcgaacgaaacagagaacgctttgaattcttgaagtgggggtcgcaggccttccacaatatgcggattatccccccagggtcaggcatcattcatcaggtgaatctcgagtacctggcaagggtcgttttcgaccaagacggctactattatcccgattcactggttgggactgacagccacacaacaatgattgatggcctcggcatattgggatggggcgttgggggaattgaagctgaagctgtgatgctggggcagccaatttccatggtactgccacaggtaattggctataggctgatgggaaaaccacatcccctggttacaagcacagacatcgttcttaccatcacgaagcatctgcgccaagtgggagttgtgggaaaatttgtggagtttttcggcccaggggtggcacaactaagtattgcagatagggctactatagcaaacatgtgtccagagtatggggctacggctgccttcttccccgtcgacgaagtcagcatcacttatttagtgcagacgggcagagacgaagaaaagttaaagtatataaaaaaataccttcaggccgtgggaatgttccgggactttaacgacccttcccaggacccagatttcacacaggtggttgagttagatttgaagacagtggtaccatgttgttctggacccaaacggccacaggataaagtagccgtgagtgatatgaagaaagacttcgagtcttgcctgggggctaaacaggggtttaaggggtttcaggtggccccagagcaccataacgatcataagacctttatttacgataacactgagttcactctggctcatggctctgttgtgattgctgctctctag

SEQ ID NO: 213041 - DNA, 2670 bp, synthetic construct
  misc_feature 1..2670: note = Description of Artificial Sequence: Synthetic coding sequence
  source 1..2670: mol_type = other DNA
atgtccaacccattcgcacatctggccgaaccccttgacccggtgcagcctggaaagaaatttttcaacctgaacaagctcgaggactcccgatatgggaggcttcccttctctataagggtgctgttggaagccgctatcaggaactgtgatgagttcttggtcaagaaacaggatatcgaaaacatactccattggaatgtgacccagcacaaaaatatcgaggtgccctttaagcctgcacgcgtaattctgcaggacttcaccggtgtgcccgctgttgtcgacttcgctgcaatgagagatgcagtgaaaaagctcggcggagatcctgagaagatcaaccccgtctgccccgctgatttggtgattgaccactctatacaggtagattttaacagaagggccgactcgctgcagaaaaatcaggatctggagttcgagaggaaccgggaaagatttgagttccttaaatggggttcacaggccttccataacatgaggatcataccacccggatcaggcatcattcaccaggtcaacctggagtacctggcccgtgtggtttttgatcaggacggatactattatccggattctctcgtgggaaccgattctcatactacgatgatagacgggctcggtatcctaggatggggagtcggcggaatcgaggctgaagccgttatgttaggccagcccatttctatggtcctgccacaggtgatcggctacaggttgatgggtaaaccacatccgctggttaccagcacagatattgtgttgacgattactaagcatttacggcaggtcggggttgtgggcaaattcgtcgaattttttgggcctggagtggcgcaactgtcaatagctgatcgggctacaatcgccaatatgtgcccagagtacggggcaactgccgcattcttccccgttgacgaggtgtccattacctatctggtacaaacaggacgggatgaggagaagcttaagtatattaagaaatatcttcaggccgtgggaatgtttagagatttcaacgacccctcgcaggaccctgacttcactcaagtggtcgagctggacctgaaaacggttgtcccatgctgtagcggacccaagcgaccccaagacaaggttgccgtctcagatatgaagaaggatttcgagagttgtctgggcgctaagcaggggtttaagggcttccaagttgccccagagcaccacaacgatcacaagactttcatatatgacaacaccgaattcacccttgcccatggcagcgtagtgatcgcggcaatcacaagctgtacaaacacctctaatcccagcgtcatgctcggagctggcctgctggctaagaaggctgtggacgccggacttaatgtgatgccatatattaaaacatccctcagtccgggaagcggtgtcgtcacttactacctccaagagtctggagtaatgccgtacctcagtcaactggggttcgacgtagtgggctatgggtgtatgacatgtatcggtaactcaggacccctccctgagcctgttgtggaggctataactcagggtgatttggtggctgtaggcgtcctgtcgggtaatcgcaactttgaaggcagagtgcaccctaacactagagcgaattacttggccagcccccctttggtcatcgcttatgctatcgcagggactattcgtattgatttcgagaaggaacccctaggcgttaatgcaaagggacagcaggtttttttaaaagatatatggcctacgagggacgagattcaggcagtcgagcgccagtatgttattccaggcatgttcaaggaggtttaccaaaaaattgagaccgtgaacgagtcgtggaatgctctggcaacaccatcggataagctgttcttttggaactcaaagtccacttatatcaaatctccgcctttcttcgagaacctcacgctggatttgcaacctccgaagtctatcgtcgatgcatacgtcctgctgaacttaggcgacagcgtgaccactgatcacatctcccccgctggcaacattgccagaaactcacctgcggcaaggtatctcaccaatagaggtttaacacccagagagtttaactcttatgggagccgcagaggaaacgacgcagttatggccaggggcaccttcgccaacatacgcctgcttaaccggtttctgaataagcaggccccacagaccattcatctgcccagtggggaaattctggatgtgtttgacgctgcggaaagataccagcaggccggtctgcccctaatagtgctggccggaaaggagtacggggctggttctagtcgtgattgggcagccaaaggcccttttcttctcggcattaaggcagtgctcgctgagagctatgagagaatccatagatcgaacctggtggggatgggagtcattccgttggaatacttgccaggcgagaatgccgacgcactcggcttaactggccaggagaggtacacaatcattatcccagaaaacctcaaaccccagatgaaagtccaggtgaagctggacactggaaagacctttcaggcagtcatgcggttcgatacagacgtggagctgacttattttttgaatggaggcatcctgaactacatgattagaaaaatggccaagtag

SEQ ID NO: 213042 - DNA, 2346 bp, synthetic construct
  misc_feature 1..2346: note = Description of Artificial Sequence: Synthetic coding sequence
  source 1..2346: mol_type = other DNA
cagctcgagcccagatccgctcgggagcgcgtgcccctgctcggctcaggcagcccggtcgccggagctccaccctgtagcaggaggaacacatggccctctgtgataatgtccaatccattcgctcatctggccgaacctttggatcctgtccagccaggcaaaaagttttttaatcttaataagctcgaggatagccggtatggtcgcctaccctttagtatcagagttctgctggaggccgctatacggaactgcgatgagttcttagtgaaaaagcaggatattgagaatatcttgcattggaacgttacacaacacaaaaatatcgaggtgcccttcaagccagcaagagtcatcttgcaggatttcacaggagtccctgctgtcgtcgattttgccgcaatgcgagacgcggtcaaaaagctaggtggagatccagagaagataaaccccgtctgtcctgcagatctggtcattgatcattcgatccaggtggacttcaacagacgcgctgactcactccagaagaatcaagatttggaattcgaaaggaatagagagaggttcgaatttctcaaatgggggagtcaggccttccataacatgcgcatcattcctccaggatccgggattatacatcaggtcaacttagaatacctggctcgggttgtatttgaccaagacgggtattattatcctgatagcctggtaggcacagatagtcatacaacaatgatagatggattgggaattctcggttggggggttggcggaatcgaggcggaggccgtgatgctggggcaacctattagcatggtactgcctcaggtgatcggataccggctgatggggaaaccccaccccttagttactagcactgacatcgtgctgaccattaccaaacacctccgtcaggtgggcgtggtcggtaagttcgtagagttcttcgggccaggggtcgcgcaactgagcatcgccgacagggccactatagcaaatatgtgccctgaatacggggctacagctgcctttttccctgttgatgaggttagcataacctaccttgtgcaaacaggcagagatgaagagaagctgaagtacatcaagaagtacctgcaggccgtgggcatgttcagggactttaacgacccttcgcaagatcccgactttacacaggtagtcgagctggatctcaaaaccgttgtgccatgctgctccgggcctaagcgccctcaagacaaggtggctgtctctgatatgaagaaggattttgaatcctgccttggagccaagcaggggttcaaaggctttcaggtggctcccgaacaccacaatgaccacaaaacatttatttatgataatactgaatttacattagctcacggttcagtggtgattgccgctatcaccagttgcactaatacttcgaatcccagtgtgatgcttggcgctggcctgctcgcgaagaaggcggtcgacgcgggactcaatgtgatgccatacataaagacttctctgtcacctggatctggggtcgtaacctattacctgcaggagtctggcgtgatgccgtatctcagtcagctgggattcgacgtcgtgggatacggatgcatgacatgcatcgggaacagtggccctttgcctgagcctgtagtggaggctatcacgcagggagacctggttgcagtgggtgtactcagtggaaacagaaattttgagggcagggtccacccaaatactagagccaactatttggccagtccaccactggttatagcttatgctattgctggcactatcagaattgatttcgaaaaggaacctctaggagtcaatgccaagggacaacaggtattccttaaagacatctggccaacgcgggatgaaattcaagccgtcgaacgccaatacgtgatcccgggaatgttcaaggaggtgtaccagaaaatcgagacggtaaacgaaagctggaacgcactcgccactccttcagataaactgtttttttggaattccaaatcaacatacattaaatccccaccatttttcgaaaatttgactctggatctgcagccgccaaaaagcattgtggacgcctatgtgctgctcaacctgggcgactctgttactactgaccacatcagtcctgctggcaacatcgcacgaaacagcccagctgcgaggtacttgaccaacagaggttttgagcgccagcttacacaggagaacacagatctctgcctcagcccacccttgttgacctctttaagttcccccctgaaactgtgggggcagctcttctgccacggtgagcagtgcctaggcgatctggaaaaatag

SEQ ID NO: 213043 - DNA, 2373 bp, synthetic construct
  misc_feature 1..2373: note = Description of Artificial Sequence: Synthetic coding sequence
  source 1..2373: mol_type = other DNA
atgcgagatgctgtgaagaaactgggaggcgatccagagaagattaaccctgtgtgtcctgctgacctcgtaatcgatcattcaattcaagtggacttcaacagaagagccgattcactgcagaaaaaccaggatctcgagtttgaaagaaatagggagcgatttgaatttctcaagtgggggtcacaagcgttccataacatgaggataatcccgccaggcagcggcatcatccatcaagtgaaccttgaataccttgccagggtggtttttgaccaagacggttactattacccagactcactggtgggcaccgactctcacactactatgatcgacggcctgggcatactgggttggggggtggggggaatcgaggccgaagccgtgatgctgggacagccgatctcaatggtgcttccccaagtgattggctacaggctaatgggtaaaccgcatcctctagttacgtcaaccgacatcgttctcacaatcactaagcaccttcgccaggtcggcgtggtagggaagtttgttgagttcttcggccctggcgttgcccagttatcaattgccgaccgcgcaacgatcgcaaacatgtgtcccgaatacggagctacagcagcctttttccctgtagatgaggtgtcaatcacgtatttggtgcagaccgggagggacgaagaaaagttaaagtacataaagaagtacctacaggctgtgggaatgtttagggacttcaatgatcccagtcaggacccagactttacgcaggtggtggagcttgatctcaaaacagtggtgccctgttgttccgggccaaagcggccacaggacaaggtggccgtttctgatatgaagaaggacttcgagtcttgtcttggcgctaagcagggcttcaaaggcttccaggttgctcctgaacatcataacgaccacaagacctttatctatgacaataccgagtttactttggcccatggctctgtagtcatcgccgctataacctcctgtacgaatacaagcaaccctagcgtcatgctgggtgcaggtctgctcgccaagaaggccgttgatgccggacttaacgttatgccctacatcaaaacaagtttgagtccagggagtggtgtggtgacctactacttgcaggagtcgggcgtgatgccatatctgtcccagcttggcttcgatgtcgtaggatatgggtgcatgacctgcatcggaaactccggccctctgcccgagcctgtggtggaggctattacacaaggcgacctcgttgctgtaggggtgttgtccggaaacaggaactttgaaggcagggttcatcccaatactagggccaattatttggcctccccaccgctcgtcatagcttatgcaatcgcaggcaccatccgaatcgactttgaaaaagaacccctcggtgttaatgctaaaggtcagcaggtctttctgaaggatatttggccaaccagagacgaaatccaggcagtggaaagacagtacgtgatcccagggatgtttaaagaagtgtaccaaaagatcgaaaccgtcaatgaaagctggaacgccctagcaacaccttctgataagctattcttctggaatagtaagtctacttatatcaagagccctcctttcttcgagaatctcactctcgatctgcagccaccaaaaagtatcgtcgacgcatacgtcttactgaatctgggcgatagcgtcacgactgatcacattagtcccgcaggcaatatcgctagaaattctccggctgccaggtacctcaccaatagaggcctcacaccgagggagtttaacagctacggctcccggaggggaaatgatgcagttatggcgcgtggcacgttcgctaacatccgcctgctgaatcgcttcctgaacaaacaggcgccacagaccatacacttgccttcgggcgagatcttggacgtgttcgacgccgctgaacgataccaacaggctggtcttcccctaattgtcctggcaggtaaggaatatggagccggttcatctagagattgggctgcaaaggggccatttctgctgggaatcaaggccgttctggcggagtcctatgaaaggatccacagatctaacctcgtggggatgggtgtaatccctttagagtatctccccggagagaacgcagatgccctgggattgaccgggcaggaacgttataccatcatcattccagaaaatctaaaacctcagatgaaagttcaggtgaaactggacaccggcaagacatttcaggctgtgatgagatttgacaccgatgtggaactcacttacttcctgaacggcggtatcctaaactatatgattcggaagatggccaaatag

SEQ ID NO: 213044 - DNA, 333 bp, synthetic construct
  misc_feature 1..333: note = Description of Artificial Sequence: Synthetic coding sequence
  source 1..333: mol_type = other DNA
atggcaaagcaccaccccgacctgatcttttgtaggaagcaggccggtgtcgcaatcgggcgattgtgtgaaaagtgcgatgggaagtgcgtgatctgtgacagctatgtgagaccctgcactctggtgcgtatctgtgacgagtgcaattatgggtcgtatcaaggcaggtgtgtcatctgtgggggaccaggcgtgtctgatgcatactactgcaaagagtgcaccattcaggagaaggatcgggatggttgtccaaagatcgtcaatttgggctccagcaaaaccgacctcttttatgagcgtaaaaagtatggctttaaaaagcggtag

SEQ ID NO: 213045 - DNA, 2418 bp, synthetic construct
  misc_feature 1..2418: note = Description of Artificial Sequence: Synthetic coding sequence
  source 1..2418: mol_type = other DNA
atggcaccttattccttgcttgttactagactgcagaaagcactgggagttagacagtatcacgtggcatcagtgttgtgtcagcgcgcaaaggtcgcaatgtcccactttgagcctaatgagtacatacactatgatcttctggagaaaaacatcaacattgtgagaaagagactgaaccgccctctcacgctgtccgagaagatcgtttacggccatcttgacgaccctgcttctcaggaaatcgagaggggtaaatcttatctgaggctgcgcccagacagggtggcgatgcaggacgcgacggcacaaatggcaatgctgcaattcataagcagcggtctctcaaaagtcgccgttcccagcactatccactgcgaccatctcattgaggcacaggtgggaggcgaaaaagacctgagacgagctaaagatatcaaccaagaggtgtacaatttcctggctaccgccggagccaaatacggagtagggttttggaagccaggatcaggtattattcaccagatcatcctggaaaactatgcatacccaggcgtgctcctcatcggcacagattcacacacccccaatggtggcggtctgggaggcatctgcataggcgtggggggagccgacgccgtggacgtcatggccggaataccttgggagcttaagtgtccaaaggtcatcggggtgaagctgacgggctccctatccgggtggagttctccaaaagacgtaatcctgaaggtagcgggaatcctaactgtcaaaggtggcacaggggcaattgtggagtaccatggtccaggcgtggacagcatcagttgcaccggtgaggaggggggacaggccacttggccactgccatgtgcgggaccggatggatctcccgtcggctcaagatccgggatggctaccatatgtaatatgggcgctgagataggcgctaccaccagtgtgttcccctacaaccacagaatgaaaaaatatctgtctaagactggaagggaagacatcgcaaacttagccgatgagttcaaggatcacctggtccctgaccctggctgccactatgatcaacttattgagattaacctgtcggaactgaagccccacatcaacggaccttttactcctgaccttgcacatccagtggccgaggtcggaaaggtcgctgagaaggagggctggccacttgacatacgcgtcggactcattggttcctgtacaaatagctcttacgaggatatgggacgatcagctgcggtggcaaagcaggcgctggcacacgggctgaagtgcaagagtcagtttaccatcacccccggttccgaacaaattagggctacaatcgaacgcgatggttacgcccagattctgagggatctgggtggtattgtcttggctaatgcatgtggaccctgcattggacagtgggatagaaaggacatcaagaagggagagaaaaataccattgtgacaagctataatagaaacttcacgggtcgaaacgatgccaaccccgaaacacacgccttcgtgacatcccctgagattgtgaccgcactggctattgctggcacgcttaaatttaatcctgagaccgattatctgacaggaactgatgggaaaaaatttagactggaggcgccagatgccgacgaactcccgaaaggggagtttgatcccggacaggacacctatcaacacccacctaaagactcctcaggacagcacgtggatgtgagcccaacctcccaacgactgcagctgttggaacctttcgacaaatgggatggaaaagacctggaggatctgcaaattctcatcaaagtgaagggcaaatgtaccaccgaccacatctcagccgctggtccgtggctgaaattccggggtcacctagacaacatctctaacaatcttttgatcggggctatcaatattgagaatgggaaagcgaactccgtaaggaacgctgtcacccaggagtttggcccagtaccggacacagcaaggtactataagaaacatggaatacggtgggttgtgataggcgatgaaaattacggggaagggtcctctcgggaacatgccgctctggaaccacggcatctgggcggtcgcgctatcattacaaagtctttcgcaaggatccatgaaacaaaccttaagaagcagggcctgttgcctcttacattcgctgaccctgccgactacaacaaaatccacccagtggataagctcactatccaaggcctcaaagactttactccaggcaagcctttgaagtgcatcatcaagcaccctaacggtacccaggagactattctgttgaaccatacgtttaatgaaacacagatcgaatggttccgtgcaggatccgctctgaacagaatgaaggaactacaacagtag

SEQ ID NO: 213046 - DNA, 1506 bp, synthetic construct
  misc_feature 1..1506: note = Description of Artificial Sequence: Synthetic coding sequence
  source 1..1506: mol_type = other DNA
atggcaaccatctgtaacatgggagccgagattggagccaccaccagtgtattcccctacaaccatcgcatgaaaaaatacttatccaagacaggccgagaggatattgcgaatttagccgatgagtttaaggaccatctcgttccagacccaggctgccactacgaccagttgattgagattaacctgagcgaactcaaaccacacatcaacggcccattcacccctgatcttgcccaccccgtcgccgaggtgggaaaagtggcagagaaagaaggctggccactggacatccgcgtcggtctgatcggttcttgcactaacagctcatacgaggacatgggaagatcagccgcagtggcaaagcaggcacttgctcacggtttgaagtgtaaaagccaatttaccattacgccaggctccgagcagataagagctacaatcgaacgcgatggctatgctcaaatcctgcgcgatcttgggggtattgtccttgccaacgcttgtggcccttgtatcggtcagtgggataggaaggacattaagaagggcgagaagaataccattgtcacttcctacaacaggaattttactgggagaaatgatgccaatcctgagacacatgcgtttgtcacgagtccagagattgtcactgctctcgcaatcgcgggaacactcaaatttaacccagaaactgattatcttacaggaactgacggcaagaaattccggctcgaggccccagacgcagatgaactgcccaaaggggagtttgaccccggacaagacacatatcaacaccctcctaaggatagctccgggcagcatgtagatgttagtcccacttctcaacgcttacaactactggaaccttttgacaagtgggacggcaaggacctggaggacctccagattcttatcaaggtcaagggaaagtgcacgacggaccacatatctgccgctggcccttggttaaagtttcggggacacttagataatatcagtaataacttgctaatcggagccattaatatcgaaaatgggaaggccaatagcgtccgaaatgccgtgacccaggagtttggacctgttcctgacactgcgaggtactataaaaagcacggcattcgctgggtggtaatcggcgacgaaaactacggagaaggttcctcccgggaacacgcagcacttgagccgaggcatctggggggaagagccataattactaagtccttcgctcggatccatgagacaaacctgaagaaacagggtctcctgccactgacttttgccgacccggctgactacaataagatccatccagttgacaaattgacaatccaagggctcaaagatttcacccccggtaagcccttgaaatgcattattaagcaccccaacggaactcaggagactattctgttaaatcatacttttaatgagacacaaattgaatggtttcgagccggttcggccctgaaccggatgaaagagttgcagcagtag

SEQ ID NO: 213047 - DNA, 2286 bp, synthetic construct
  misc_feature 1..2286: note = Description of Artificial Sequence: Synthetic coding sequence
  source 1..2286: mol_type = other DNA
atggctccctacagtcttctggtcacaagactccagaaagcattaggtgttcgccagtaccatgtggcctcagtgctgtgccagagggccaaagtggccatgagccattttgaacctaatgagtacatccactacgacctcttggagaagaacatcaacattgttcgcaagaggctgaatcgccctctcacgctatcggagaagatcgtgtacgggcacctggatgaccctgcaagccaggagattgaacgcggtaaaagttatctgagactccgacccgacagagtggccatggttgctgtgccatccaccatccactgcgaccatctgatcgaggcccaggttgggggtgagaaagacctcaggcgagctaaggacatcaaccaggaggtttacaatttccttgccaccgcaggtgccaagtatggcgtgggtttctggaaaccaggcagtggcataatacaccagataatcctggagaactatgcatatccaggggttttactgattggcacagactcacacacgcctaatggagggggacttggcggtatttgtatcggggtggggggagcagacgccgtggacgtgatggcgggaatcccttgggaactgaagtgccctaaggtcattggagttaagctgactggctccttgtctggatggagctcccccaaggacgtgatccttaaggtggccggtatcctcactgtgaagggtggcactggcgctatagtggagtaccatggccctggcgtggatagcatcagttgcacggggatggctaccatttgtaacatgggggcagagataggtgctacaacaagtgtgttcccttacaaccaccggatgaagaagtatctgtcgaagaccgggcgagaagacatcgctaatctagccgacgaatttaaagatcatctggtgcctgatccgggatgccactatgatcaactcatcgagatcaacctgagtgaactcaaacctcatatcaacgggcctttcacacccgacctagcacaccccgtggccgaggtcggtaaagtggccgagaaggaggggtggcctttggatatacgggtgggcctcatcgggtcatgtactaatagcagttatgaggatatgggtcggtccgctgccgttgcaaaacaggcacttgcacatgggctgaaatgcaagagtcagttcaccattacccccggtagtgagcagattagggccactatagagcgggatggttacgctcaaatcttgagggatctcggaggcattgtcctggccaacgcctgtgggccatgcatcggtcagtgggaccggaaagatattaagaaaggggagaaaaataccatcgtaacatcctacaaccgaaactttacaggccgtaatgacgcgaaccctgagacccacgccttcgtgacaagtcccgaaatcgtcactgccctcgctattgccggaaccttaaaatttaaccctgaaactgattatttaactggcacagatggtaaaaagttccggttagaggcaccggatgctgacgaacttccgaagggcgaatttgaccctgggcaggatacatatcagcaccctcccaaggatagttctgggcaacatgtggacgtcagtccaaccagtcagagactacagttactagaaccatttgataagtgggacgggaaagacctcgaagatctacaaattttaatcaaagttaagggcaagtgcaccacggaccatattagcgccgcaggcccatggctcaagttccggggtcacctggataatataagtaacaaccttctcatcggtgctattaatatcgaaaatggcaaggccaactccgttaggaacgccgtgacccaggagtttggccctgtcccggatacagctcgctattacaaaaaacacggaattcgttgggtggtcatcggagacgagaattatggcgaagggtcgagcagggagcacgccgctctcgagcctcgacatttgggcggaagggctattatcacgaagagctttgccaggatccacgagactaatctcaagaagcaaggcctgctcccacttacatttgccgatcccgctgactataataaaattcatccagtggacaaattgaccattcagggacttaaagatttcacccctgggaaacctctgaaatgtattattaagcaccccaatggcactcaggagacaattctactgaaccatacctttaacgaaacccagatagaatggttccgggctggaagtgcactcaatcgcatgaaggagctgcaacagtag

SEQ ID NO: 213048 - DNA, 756 bp, synthetic construct
  misc_feature 1..756: note = Description of Artificial Sequence: Synthetic coding sequence
  source 1..756: mol_type = other DNA
atggaacttagcgcaattggcgaacaggtgtttgctgtagagtcaatcagaaaaaagcgggtgagaaagggaaaagtggaatatctcgtgaaatggaagggctggcccccaaaatattctacatgggaacccgaagagcacattctggacccgaggttggtgatggcctatgaagagaaagaggagcgagatcgggcaagcggatacagaaaaagaggacccaaacccaagcgactgctgctgcagcggctgtactcaatggacttacgctcttctcacaaagcaaaaggcaaggaaaaactgtgttttagcctcacctgtccactcggttcaggatcccccgaaggggtggtcaaagcgggagcccctgaactggtggataagggtcccctggtgccaactcttcccttccctctgcgcaagccacgaaaagcccataagtatctcagactctcacggaagaagtttccacccagggggcctaacctcgaatctcacagccataggagagaactctttcttcaggaaccacctgcccctgacgtgctgcaggctgccggagaatgggagcctgcagcccagccccctgaggaggaagcagacgcagatctggccgaaggaccgccaccttggactcccgcactcccgtcctccgaggtcaccgttactgacatcaccgccaactctattacggtcacctttcgggaagctcaggccgctgagggctttttccgagatcgtagcggcaaattctag

SEQ ID NO: 213049 - DNA, 633 bp, synthetic construct
  misc_feature 1..633: note = Description of Artificial Sequence: Synthetic coding sequence
  source 1..633: mol_type = other DNA
atgaatcggttcttattacttatgtcgctctaccttctgggcagtgccaggggcacctccagccagccaaacgagctgtcaggatcgatagatcaccagacttctgtccagcagctccccggagaacctgccgctaccgagcatgcagagggcgagcatactgtcggagaacagccatccggagagcaaccctccggtgagcatctttctggggaacaacccctctcagaactggaatcaggtgaacagccgtctgacgagcagccgagtggagagcacgggtctggagaacagcccagcggcgagcaggcttccggggaacagccctccggagagcacgcctctggcgaacaggcctccggggcacctataagttcaacatccactggtaccatcttgaattgctacacttgcgcctatatgaacgatcaaggaaagtgcttgaggggagaaggcacatgcataactcaaaactctcagcaatgcatgctgaagaaaattttcgagggcggaaaactccaattcatggtacagggatgcgagaatatgtgcccctcaatgaacctcttctctcacggcacccgaatgcagataatctgttgcaggaatcagtctttctgtaacaagatttag

SEQ ID NO: 213050 - DNA, 741 bp, synthetic construct
  misc_feature 1..741: note = Description of Artificial Sequence: Synthetic coding sequence
  source 1..741: mol_type = other DNA
atgaaccggtttctcttactgatgtccctctatcttctcggatctgctcgtggcacttcctcacagccaaatgagctgagcggcagtattgatcaccagacatctgtgcagcagttgccgggagagttcttttcattagagaatccctctgatgccgaagcactttatgagacttctagcggcctcaataccctgtccgagcacggttcctctgaacacggttcaagtaagcacacagtggctgagcatacaagcggggagcacgccgaatcggagcacgccagtggcgaacccgctgctactgagcacgcagaaggggagcacaccgttggagagcagcccagtggcgagcagccgtctggggaacacttgagcggcgagcagccactcagcgagctggagagtggtgagcagcctagtgacgagcaaccgtctggggagcatggtagtggagaacagccatcgggtgaacaggccagtggcgaacagcccagcgggactatccttaattgctacacctgtgcctacatgaacgatcaaggtaaatgcttgcggggagaaggcacctgtataacccagaactcccagcagtgcatgttgaagaagatatttgaaggcggaaagctgcagttcatggtgcaagggtgtgaaaacatgtgtcccagcatgaacctcttctcccacgggaccagaatgcaaataatctgttgccgtaaccaatctttttgcaacaagatttag

SEQ ID NO: 213051 - DNA, 468 bp, synthetic construct
  misc_feature 1..468: note = Description of Artificial Sequence: Synthetic coding sequence
  source 1..468: mol_type = other DNA
atgaataggtttctcctattaatgtctctgtatttgctcggctcagcacgcggaacttcttctcagccaaatgagttatcaggcagtattgatcaccagacttctgtgcagcaattgccgggtgaacagccgagcggagaacagccaagcggggaacacctatccggcgagcagcctttatcggagttggagagtggagagcagccatccgacgagcagcctagtggcgaacatggaagtggagagcagccatctggcgagcaagcaagcggtgagcagccctctggggaacacgcttctggagaacaagctagcggagctcctataagctccacgtctacaggaggcaagctgcaatttatggtccagggctgcgaaaacatgtgtccttctatgaacctcttttcgcacggaacccgcatgcaaattatttgttgcagaaatcagtctttttgcaataaaatctag

SEQ ID NO: 213052 - DNA, 498 bp, synthetic construct
  misc_feature 1..498: note = Description of Artificial Sequence: Synthetic coding sequence
  source 1..498: mol_type = other DNA
atgaataggtttttgctgctaatgtcgctttacctcctagggagcgctagaggcacgagttcacagcccaacgaactctccggttccattgatcatcaaacctctgtgcagcagttaccaggggagcctgcggcaaccgaacacgcagaaggtgagcacacagtcggcgagcagccctccggcgagcaaccgtctggcgagcacgcctctggggaacaagcttcaggcgcacccattagcagcacttccacaggcaccatcctgaattgctacacctgcgcgtacatgaatgatcagggaaagtgccttcgcggtgaaggcacgtgtatcactcagaactcgcagcagtgtatgctgaagaaaattttcgaggggggtaaactgcagtttatggtgcaaggctgtgagaacatgtgcccctccatgaatcttttttcccatggcacgcggatgcagatcatttgctgcagaaaccagagcttctgcaataaaatctag

SEQ ID NO: 213053 - DNA, 246 bp, synthetic construct
  misc_feature 1..246: note = Description of Artificial Sequence: Synthetic coding sequence
  source 1..246: mol_type = other DNA
atgaatcgcttcctgctgctaatgtcactctacctcctcgggtctgcaagaggaaccagtagtcagcctaatgagctgtctggttctatcgaccatcaaacgtctgtgcagcaactgcccggaggcaaactccagttcatggtgcagggttgcgaaaatatgtgtccttccatgaatttattctctcacggaactagaatgcagataatttgctgtaggaatcaatccttctgtaacaaaatctag

SEQ ID NO: 213054 - DNA, 366 bp, synthetic construct
  misc_feature 1..366: note = Description of Artificial Sequence: Synthetic coding sequence
  source 1..366: mol_type = other DNA
atgaaccggttcctgctcctcatgagtctttatttactggggagcgcacgaggaacctcctcccagcctaacgaactctcaggctctattgaccatcaaacatctgttcagcaactccccggtacaatcctcaattgctacacctgtgcctatatgaacgaccagggtaagtgtttgcgcggtgaaggtacctgtataactcagaattcacagcagtgcatgctcaaaaaaatcttcgaagggggaaagctacagtttatggtccaggggtgcgaaaacatgtgtccctcaatgaacttgttctcccatgggacacggatgcagattatctgttgtcgaaatcagtcattttgtaacaagatttag

SEQ ID NO: 213055 - DNA, 588 bp, synthetic construct
  misc_feature 1..588: note = Description of Artificial Sequence: Synthetic coding sequence
  source 1..588: mol_type = other DNA
atgaatcgcttcctgctgcttatgagcctgtacctgctgggcagcgctagaggcacttcatcgcagccgaacgagctaagtgggagtatcgatcaccagacctccgtacagcagctgcccggtgagcaaccttcaggtgagcaacctagtggcgagcacctctcaggggaacagcctctgagtgagctggagagtggcgaacagccatccgatgagcaaccctccggagaacacggctccggggaacagcctagcggagaacaagcgtccggagagcagccctctggtgagcacgccagcggagagcaggccagtggggctcccatttctagcacctctactggcacgatcttgaactgctacacatgtgcttacatgaacgaccagggaaagtgtttgcggggagagggaacatgtatcactcagaacagccagcagtgtatgctaaagaagatctttgagggtggaaagttacagtttatggtgcagggctgcgaaaatatgtgtccttccatgaacttgttcagccacggtaccagaatgcagataatttgctgtcgaaatcaatccttctgcaataaaatctag

SEQ ID NO: 213056 - DNA, 741 bp, synthetic construct
  misc_feature 1..741: note = Description of Artificial Sequence: Synthetic coding sequence
  source 1..741: mol_type = other DNA
atgaacaggttcctcctgctgatgagcttgtatcttctggggtcagcccgagggacaagcagccagccaaatgagctgtctggatcgatcgaccaccagacttccgttcagcagctacctggggagttcttctcattggaaaacccttcagatgcagaggccctctacgaaacaagcagcggcctgaataccctcagcgagcatggaagctcggaacatggcagcagtaaacacacagtcgctgaacacacctccggagagcatgcagagtccgaacacgcctccggcgaacccgctgccacagaacacgcagagggggagcacacagttggtgaacagccaagcggtgagcagccctcgggagagcatctctcaggggaacagcctttgagcgaattagagtcgggtgaacagccttctgacgaacaacctagcggcgagcatggctctggcgaacagccctccggggagcaggcgagtggagagcaaccaagcggtactatcttgaactgctacacatgcgcctatatgaacgaccaggggaagtgtctcagaggcgaaggcacatgtatcacccaaaatagtcagcaatgcatgctaaagaagatttttgaaggcggaaagttgcagttcatggttcaaggatgtgagaatatgtgcccctccatgaatctgttctcgcatggcacacggatgcaaataatttgctgtaggaaccagagcttttgcaataaaatctag

SEQ ID NO: 213057 - DNA, 513 bp, synthetic construct
  misc_feature 1..513: note = Description of Artificial Sequence: Synthetic coding sequence
  source 1..513: mol_type = other DNA
atgaaccgatttctcctgctgatgtctttgtatctgttgggaagtgcacgaggtacaagctctcaacccaacgagctctctggaagtatcgaccaccagacctcagttcagcaactccccggtgagcaaccctccgatgagcagccttctggtgagcatgggtctggggagcagcctagtggagagcaggcatctggggagcagccctctggagagcacgctagtggcgaacaggccagcggtgcacctattagctccaccagtacaggcacaattttgaactgctatacatgcgcttatatgaatgatcagggcaagtgtctgagaggcgagggcacctgcataacgcagaattcacagcagtgtatgctgaagaaaatattcgagggaggcaagctacaattcatggttcaaggttgcgagaatatgtgccccagcatgaacctgttctcccatgggacgcgaatgcagatcatttgctgtcggaatcagtccttttgcaacaagatatag

SEQ ID NO: 213058 - DNA, 531 bp, synthetic construct
  misc_feature 1..531: note = Description of Artificial Sequence: Synthetic coding sequence
  source 1..531: mol_type = other DNA
atgaatagatttctgcttttgatgagcctgtacttacttggctccgccaggggcaccagctcccagcccaacgagctcagcggctccatcgaccatcaaacaagcgtccaacaactcccaggagagcaaccgtcgggcgaacaacctagcggtgagcacttgtctggcgaacaacctcttagcgaattagaatctggagagcagccgagcgacgaacaaccatccggagaacatggctccggcgaacagccgtctggcgagcaggccagcggcgagcagcccagtggaacaatcttgaactgttacacgtgtgcctacatgaatgatcaggggaagtgtttacgtggggagggtacatgtatcacgcagaattcgcagcagtgcatgctgaaaaagattttcgagggtggcaaattgcagttcatggtgcaaggctgcgaaaacatgtgtccatcgatgaacctgttttcccacggtactcgtatgcagatcatatgctgtcgtaaccagtcattttgtaataagatctag

SEQ ID NO: 213059 - DNA, 588 bp, synthetic construct
  misc_feature 1..588: note = Description of Artificial Sequence: Synthetic coding sequence
  source 1..588: mol_type = other DNA
atgaacagattcctcctgctgatgtccctgtatctcctcggcagtgctcggggtaccagtagccagcctaatgaactgtctggctccattgatcaccaaacctctgtgcagcaattgcctggcgaacaacccagcggcgaacagccttccggcgagcacttaagtggtgagcagcccctctccgaattggagagcggcgagcagccctccgatgaacagccctctggcgagcatgggagtggcgaacaaccaagcggagaacaggcaagcggcgagcagccatctggcgagcacgcaagtggagagcaagcctccggggcacctataagttcaactagcacaggcacaatactgaattgttatacttgcgcatacatgaacgatcaggggaagtgtctgcggggtgagggcacatgtattacccaaaactcccagcagtgtatgctcaagaagatttttgaaggaggaaagctgcagtttatggtccaaggctgcgagaacatgtgcccttccatgaatttattcagccacggcacccggatgcaaatcatctgctgccgcaaccagtccttttgcaataagatctag

SEQ ID NO: 213060 - DNA, 633 bp, synthetic construct
  misc_feature 1..633: note = Description of Artificial Sequence: Synthetic coding sequence
  source 1..633: mol_type = other DNA
atgaacaggtttttgctcttgatgagtctgtatctcctggggagtgccaggggtactagctctcagcctaatgagttaagtggctcaatcgaccaccagacgagcgtccagcagctcccaggggaacccgctgccaccgagcatgccgagggcgagcacaccgttggggagcagcccagtggcgagcaaccatcaggggagcatctctctggggaacagcctcttagcgaacttgagtcaggggaacagccatcggacgaacagccaagtggggagcacggatcaggtgaacagcctagcggcgagcaggcctcaggcgaacagccctccggtgagcacgcctccggtgaacaagctagcggagcaccaatttcaagcacatcaactgggacgatcttaaactgttacacctgcgcctatatgaacgatcagggaaagtgcttaagaggggagggaacctgcattactcagaacagccaacagtgcatgctaaaaaaaatcttcgagggcggtaagttgcagtttatggtacagggctgtgaaaatatgtgtccaagcatgaatctgttctcccacggcacgcggatgcagatcatctgttgtagaaaccaatctttttgcaacaaaatctag

SEQ ID NO: 213061 - DNA, 798 bp, synthetic construct
  misc_feature 1..798: note = Description of Artificial Sequence: Synthetic coding sequence
  source 1..798: mol_type = other DNA
atgaatcggttcctattgctcatgtccctctaccttctcggtagcgcacgtggtaccagcagtcaacctaatgagttgtctggtagtattgaccaccaaacgtccgtccaacagcttcccggtgaattctttagtctcgaaaatccctcagacgcggaggccctctatgagacatccagcggcctaaatacactgtcagaacacggcagtagcgaacacggatcttcgaagcacacagttgctgagcatacatcgggagaacatgctgaaagcgagcacgctagcggagagcccgctgccactgagcacgcagaaggcgaacataccgtgggcgagcagcccagcggtgagcagccctccggtgagcacctatctggtgagcagccactgtccgaattagaatcgggagaacagcccagcgatgaacaaccttccggcgagcatggtagcggcgaacagcctagcggagaacaagcttcaggcgagcagccatctggtgagcatgcttcaggcgaacaggcatctggagccccaatatcctccacctctaccggcaccattctgaactgttatacctgcgcctacatgaatgaccaggggaagtgcctgcggggagaagggacgtgcatcacccagaattctcagcaatgtatgttaaagaagatctttgaggggggaaaactgcagtttatggtgcaaggctgcgagaacatgtgcccctccatgaatttgttctcccatgggacacggatgcagatcatttgctgcaggaatcagtcgttctgtaacaagatttag

SEQ ID NO: 213062 - DNA, 1722 bp, synthetic construct
  misc_feature 1..1722: note = Description of Artificial Sequence: Synthetic coding sequence
  source 1..1722: mol_type = other DNA
atgagtgctgtgagtcagcctcaagccgctcccagccccctggaaaagagcccatccactgctattctgtgtaatacttgcgggaatgtctgtaaaggtgaagtgctgcgagtgcaggataagtattttcatatcaaatgtttcgtctgtaaggcttgtggatgcgatctggcagaaggaggctttttcgttaggcagggtgagtatatctgcacgttggattatcagagactatacggtaccagatgtttctcctgtgaccagttcatcgaaggcgaggtggtgagtgcactggggaagacataccaccctgactgttttgtgtgcgccgtctgccgcctgccctttcccccaggcgatcgggtgacttttaatgggaaagaatgtatgtgtcagaaatgctcgctccctgtatcagtggggtcctctgcccacctgagtcagggcctgcggagctgcggtgggtgtgggactgagatcaagaacggtcaggccttggtggcccttgataagcattggcacttaggctgcttcaagtgcaaatcgtgcggcaaactactgaacgccgaatatatctccaaggatggattgccatattgtgaggctgattaccatgccaagttcggaatccgttgtgactcttgtgagaaatatatcacaggtagggttcttgaagccggtgaaaaacactaccacccctcctgtgccttgtgtgtgcgatgcggacagatgtttgcagagggggaggaaatgtacctgcaaggcagctctatctggcatccagcctgccgccaggctgctaggaccgaagaccgaaacaaggagacaaggaccagttccgagagtattatctccgtgcctgctagcagtacatcaggctctccttctagagtcatctacgccaagctcggaggagagatattggattatcgtgacctggccgcactccccaagtcaaaagccatctacgatatcgacaggcccgatatgattagttatagtccttacattagtcactctgcaggtgatcggcagtcctatggagaaggagatcaggacgatcgatcctataaacaatgtagaacgagttcgccatctagtacagggtctgtcagtctcgggagatataccccgacaagccggtccccccaacattattccagaccgggttctgagagcggacgatcgactccatccctgtccgttctcagcgatagtaagccccctccaagcacataccagcaggcacccaggcacttccacgtgcccgacaccggcgtcaaggacaacatctatcgaaagcccccaatttatcgacagcatgcggcaaggcgatctgatggggaggatggttctctcgatcaggacaataggaagcagaaatcctcttggctcatgctcaaaggagacgccgatactaggaccaactcacccgacctggacacccagtccctgtcccactcatctggcaccgatcgggacccgctgcaaagaatggcaggcgattcctttcatagtcgcgagaagatttacccctatgattcattaattgtaaccaataggataagagttaagctccccaaggacgttgatcgcactcgactggagcgacacttgtctcctgaggagtttcaggaagtgttcggcatgtctatcgaagaatttgaccgcttggcactatggaaaaggaacgacttaaaaaagaaggcactgctgttttag

SEQ ID NO: 213063 - DNA, 1041 bp, synthetic construct
  misc_feature 1..1041: note = Description of Artificial Sequence: Synthetic coding sequence
  source 1..1041: mol_type = other DNA
atgttcgcagagggggaggaaatgtatctgcaggggtccagcatctggcaccccgcttgccgccaggcagcacggacagaggacaggaacaaggaaaccaggacctcaagcgagagcattatttctgtcccagcttcctcgacctccggctcaccgagtcgcgtgatttatgctaagctgggcggtgaaatactggattaccgggatctggcagccctgcccaagtctaaagcgatctacgatattgacagacccgatatgattagctacagtccttatatctcacacagcgcaggggatcgccagtcctatggagaatcgccccaattactttcacctactccaacagagggcgaccaagatgaccggtcttataaacagtgccgaacttctagcccctcaagcaccgggtccgttagtctaggtcgatacacacccacttcccggagcccccagcactattctaggcctgacacaggcgttaaagataatatttatagaaaaccaccaatctaccgccagcacgcagccagacgatccgacggcgaggacggatcattggaccaggacaacagaaagcaaaagagctcgtggctaatgctgaagggcgacgctgacacccgtactaattcacccgatctcgacacccagagcttgtctcactcatctggaactgaccgggatccccttcagagaatggcaggagattcctttcacagtcgcttcccatatagcaagagcgacccgctgccaggccacggtaagaacggccttgaccagcgaaacgcaaatcttgcgccatgcggcgcagaccccgacgcttcctggggcatgcgcgaatataaaatttatccatatgattctctgattgtgacaaatagaattcgagtcaagcttccaaaggacgtggaccgtaccaggctcgagagacatctgtcaccagaggagtttcaagaagttttcggaatgagcattgaggagttcgatcgcctggccttatggaagaggaacgatttaaagaagaaagcactcctgttctag

SEQ ID NO: 213064 - DNA, 1836 bp, synthetic construct
  misc_feature 1..1836: note = Description of Artificial Sequence: Synthetic coding sequence
  source 1..1836: mol_type = other DNA
atgtccgccgtttcacagcctcaggcagcaccgtctccactggaaaaatctccctccacggccatcttgtgcaacacctgcggcaacgtatgcaagggcgaggtcttgagggtgcaggataaatactttcatatcaagtgctttgtctgcaaggcatgcggatgcgatttagccgagggtggctttttcgttcggcaaggagagtacatctgcacgttggactaccagcgactgtacgggacccgctgtttctcatgtgaccagttcattgagggtgaagtagtcagtgctctgggcaagacctatcacccggactgttttgtgtgcgccgtgtgtaggcttcctttccccccaggcgatcgcgttaccttcaacgggaaagagtgcatgtgccagaagtgcagtctgccggtgtccgtagggagctcagctcatctcagccagggcttgaggtcctgcggcggatgtggcactgaaatcaagaatggccaggctctggtggccttagataaacactggcatttgggttgcttcaagtgtaaatcctgtgggaagctcctcaacgccgagtatattagtaaggatgggttaccttactgtgaggcagactaccatgctaaatttggcattagatgcgacagctgtgaaaaatatataaccggcagagtcttggaagccggtgaaaaacattatcacccctcgtgcgcgttatgcgttaggtgcggacaaatgttcgccgagggggaggagatgtatctgcaggggtcctccatatggcacccggcatgtagacaggcagccagaacagaagaccgcaataaggaaacccggacaagtagtgaatcaatcatttccgttccggcatctagcacatccggctctccatctagagtcatctatgcaaagctaggaggagagatcttggattaccgcgatctggccgcactgcccaagagcaaggccatctacgacatagaccggcctgatatgatatcctactccccatacatctctcatagtgcaggcgaccgccagagctatggagaaggcgatcaggacgaccgatcatacaagcaatgccgcacaagtagtccttcaagcaccggatcagtttctctcggaagatatacccctacctcgcgctcaccccagcactattcacggccaggctcggagagcggacggagcacaccatccctctccgtgctgtctgattctaaacctccaccaagcacatatcagcaagcccctaggcacttccatgtgcccgataccggcgtgaaggataatatctatcgcaaacccccaatctatagacagcatgctgccagaaggagcgacggcgaagacggcagtcttgaccaggataatcgtaaaaaatcatcctggctgatgttaaagggtgatgcagacactaggacaaactctccagatctcgatacgcaatcgttgagtcatagttctggtaccgatagagatcccctgcaacggatggcaggagatagcttccactccaggttcccctactctaagtctgatcccctccccggacacggaaaaaacgggttagaccaaagaaacgcaaacctcgccccatgcggcgcagaccccgacgcttcctgggggatgcgggaatacaagatctatccttacgactcacttattgttacaaaccggatccgagtgaagctgccaaaggatgtcgatcgaacgcggcttgaacggcatctcagtcctgaggaatttcaggaagtctttggcatgtccatagaggagtttgataggctggcactgtggaaaaggaacgacctgaaaaagaaagctctactcttctag

SEQ ID NO: 213065 - DNA, 1719 bp, synthetic construct
  misc_feature 1..1719: note = Description of Artificial Sequence: Synthetic coding sequence
  source 1..1719: mol_type = other DNA
atgagtgcggttagtcaaccgcaagctgcacctagccctctggagaagagcccaagcaccgcgattctttgtaatacttgcggcaatgtgtgcaagggagaagtgttgagggtccaggacaagtatttccacatcaagtgttttgtgtgtaaggcatgcggttgcgatcttgccgaagggggattctttgtgcggcagggagagtatatatgcaccctcgactatcaacgactttatggaactcgctgctttagctgtgatcaattcatcgaaggggaggtagtttcagcccttggcaaaacataccacccagactgtttcgtgtgcgccgtttgccgactgccatttcccccaggagatcgggtcacattcaacggtaaggaatgcatgtgccagaagtgctcactcccagtgtccgtcggttcctccgcacacctgagtcaaggcctgcgttcatgcgggggatgtggtacggagattaaaaacggtcaggccctagtagccctggacaaacactggcaccttggctgcttcaagtgcaaatcctgtggcaaactgcttaacgctgaatatatcagcaaagacgggctaccttactgtgaagctgactaccatgccaaatttggcattaggtgcgactcctgtgaaaagtatatcaccggccgagttctcgaagccggtgaaaagcattatcatccctcatgcgccttgtgcgtgaggtgcggtcagatgttcgcagagggcgaggagatgtacctgcagggctcgagtatctggcatcccgcatgcagacaagccgctagaaccgaagataggaacaaggagacaagaacctcatccgagtctatcataagtgtgcccgctagcagtacctcagggtcccccagccgggtcatttatgccaaactaggaggggagattcttgattatcgcgatctggccgctcttccaaagtctaaggctatttacgatatcgaccgtccggatatgatttcctactcaccctacatatctcattctgctggggatcgccagtcatatggcgaaggtgaccaggatgacaggtcttataagcaatgtagaactagctcaccctcttcgaccggctcagtgagcctggggagatacacccccacttctcgctctccacagcattactcacggcctggcagcgagtctgggcgtagcactccatctctctccgtactctccgatagtaaacctccccctagcacctaccagcaagcaccacggcacttccatgtgcctgacacaggcgtcaaggataacatctatcggaagcctccgatttacagacaacacgctgcgaggcggagtgatggagaagacgggagcctggaccaagacaatcggaaaaaatcgagctggttgatgttgaagggcgacgcggatacacggactaacagcccggacctagacacccaaagcctgagccactctagcgggactgaccgcgatcctctgcagagaatggccggtgattcctttcattcacaatacaagatctatccgtatgattcccttatcgtaaccaaccgtatccgcgtgaagctgcctaaggacgtggacaggacccgattggagaggcacttaagccccgaagaattccaagaagtgttcggaatgtcaatcgaggagtttgaccgactggccctctggaaacggaacgatctaaaaaagaaggcccttctgttttag

SEQ ID NO: 213066 - DNA, 1596 bp, synthetic construct
  misc_feature 1..1596: note = Description of Artificial Sequence: Synthetic coding sequence
  source 1..1596: mol_type = other DNA
atgtctgcagtttcacagccccaggctgctccctcacctctggagaaatcccctagcacggctatcttatgtaatacctgcggcaacgtgtgcaagggcgaggtgcttcgcgttcaggacaaatacttccatatcaagtgcttcgtctgtaaggcctgcgggtgcgacctggctgaaggcggtttttttgtgcgtcagggcgagtacatctgcactctcgactatcaaagactctatggaacgcgctgtttctcctgcgaccagttcatcgaaggagaagtggtcagcgccctggggaaaacctatcaccccgattgctttgtgtgtgccgtctgccgcctgccgtttccgcctggagatagagtgacatttaacgggaaagagtgtatgtgccagaagtgttctttgcctgtgagcgtaggaagttcagcccacttaagccaggggttgagatcatgcgggggatgcggcactgagatcaagaacggccaagctctagtggcattagacaaacattggcatctggggtgctttaagtgcaagagctgcggcaagttgttaaatgcagaatatatcagcaaagacgggcttccatactgcgaggccgactatcacgcgaagttcggaattaggtgtgacagctgtgaaaagtacatcacaggtcgagtgctggaggccggtgagaagcactatcaccctagctgcgccctctgcgtaaggtgcgggcagatgttcgccgagggcgaagaaatgtatctccaggggtcatccatctggcatcctgcttgtagacaggcggcacggactgaagaccgtaacaaagaaacacgcaccagcagcgaatccatcattagcgtgccagcttcatccaccagcggcagcccgtcacgcgtaatctacgcaaagctgggcggagagattctagattacagggacttggctgctctccccaaatctaaggctatctatgatattgatcggccagatatgatcagctacagtccatatatttcccattcagccggtgatcgacagagctacggcgaaagtccccagttactcagtccaactcccaccgagggggatcaagatgaccgttcttataagcagtgcagaactagctcaccgagctctacagggagcgtgtcactgggaagatatacgccgacatcaaggtccccacagcactacagtaggcctgcagcgaggcgttcagatggagaggatggctcacttgatcaggataatcgcaagaaatcctcatggctgatgcttaagggggatgctgatacccgcaccaacagcccggatctggatacgcagtcactcagccactcatccgggactgacagagaccccctccagcgcatggcaggagactcttttcacagtcagtataagatctacccttatgacagtctgattgttaccaataggatcagagtgaagctgccaaaggacgtcgatcggaccagactagagagacatctgagccctgaagagtttcaagaggtctttggaatgtctattgaagagttcgaccgtctcgccctctggaaacggaatgatctgaagaagaaagctctcctgttttag

SEQ ID NO: 213067 - DNA, 1935 bp, synthetic construct
  misc_feature 1..1935: note = Description of Artificial Sequence: Synthetic coding sequence
  source 1..1935: mol_type = other DNA
atgagcgccgtttcccagccccaagccgcaccctcgccgctggaaaagtctccaagcactgctattctgtgcaatacgtgtggtaatgtgtgcaagggcgaggtgctgagggtgcaggacaagtattttcacatcaaatgtttcgtgtgtaaggcttgcggatgtgacctagccgagggaggtttcttcgttcgccaaggggagtacatctgtacgctggattatcagcggttgtatggtacgcgttgctttagctgcgaccaattcattgagggcgaggtggtaagtgcattgggcaaaacctatcaccccgattgcttcgtgtgcgctgtgtgcagactcccattccccccaggcgatagagtgacattcaatggaaaagagtgtatgtgtcaaaagtgcagcctgccggtgtcggtggggtcatcagcccatctgagccaaggacttcgttcttgtggcggatgtgggactgagatcaaaaatggccaggcattggtggctctggacaaacactggcacctggggtgctttaaatgcaagtcatgtggcaagctcctgaacgccgagtacatttcaaaagacgggttgccgtactgcgaagccgattaccatgccaagtttggcatccgctgtgacagctgcgagaagtatatcacgggacgggtgctcgaagcaggggagaaacattaccacccaagctgcgctctgtgcgtgcgatgcggtcagatgttcgccgaaggtgaggaaatgtatctgcagggatcctccatttggcacccagcctgcagacaagcagcacgcacagaagatcgtaacaaggaaactaggacatcgtcggaatctatcattagtgtgccggcttccagtaccagtggttctccctctcgcgtcatttatgctaaacttggcggagaaattttagattatcgcgacctcgccgctcttccgaagagcaaggccatatacgacattgataggccggatatgatctcctatagcccgtacatcagccattctgctggagaccgacagtcatacggggagggggatcaggatgaccgttcctacaaacagtgccgcacctcctcacctagctcaaccggaagcgtaagtctgggcaggtacacgcccacaagtaggagcccacagcattatagccgcccagcaggcaccgtctcagttggaacaagcagttgcctcagtctcagtcaacatccctcccctaccagcgtgtttaggcaccattatatcccctatttccggggatccgagagtggaagatccactccgtcactcagtgtgctctctgactccaaacctccaccaccacctacctcgaggcatctggctacccacgtgcccgatactggcgtgaaggacaacatttatcgtaaacctccgatctataggcagcatgccgctagaaggagtgatggcgaagacggcagccttgatcaggataaccgcaagcagaagagttcatggctcatgctgaaaggagacgccgataccagaactaacagtcccgatctggacactcagtctctttcacattccagtggaactgatcgcgaccctctgcaacggatggctggggactcatttcatagccgattcccttactctaagtccgacccgctgcccggtcatggtaaaaacggtcttgatcagcggaacgccaacctggctccttgtggtgcggatcctgacgcatcatggggcatgagggagtataaaatttatccctatgattcactgatcgtgaccaatcgtattcgcgtaaaactacccaaagacgttgaccgcacacggcttgagcgacacttgagccctgaggagtttcaggaagtattcggcatgagcatcgaagagttcgacaggctggccctgtggaagcggaatgacctcaagaagaaggccctgctgttttag

SEQ ID NO: 213068 - DNA, 1566 bp, synthetic construct
  misc_feature 1..1566: note = Description of Artificial Sequence: Synthetic coding sequence
  source 1..1566: mol_type = other DNA
atgagcgccgtttcccagcctcaggccgctcctagccctttggagaagtcccccagcacagcgatcctctgtaatacatgtggaaatgtgtgtaagggtgaagtactacgggttcaggacaagtatttccacattaaatgcttcgtgtgcaaggcttgtggctgcgacctcgcggaagggggattcttcgtgagacagggagaatatatatgcacgttggactaccaacgattatatggcaccaggtgcttctcatgtgatcagttcattgagggagaagtcgtttcagccctgggcaagacgtatcaccctgattgctttgtttgtgctgtatgccggttacccttcccccctggtgacagggtgacattcaatggcaaggagtgtatgtgtcagaagtgctccctgcctgttagtgtgggctcctcggcgcatctgtcacagggcctgaggagctgcggcggatgcggaactgagataaaaaacggacaggccttggtggcactcgataaacactggcacctgggctgttttaaatgcaagtcatgtggcaagcttctgaatgctgagtatatttccaaggacggcttgccctactgcgaagctgactatcacgccaagttcggaattagatgtgacagctgtgagaaatatatcaccggaagagtgcttgaagcaggtgagaaacactaccacccgtcctgcgccctgtgcgtccgatgtgggcaaatgttcgccgagggggaggagatgtacctacaaggatctagcatctggcacccggcttgcaggcaggcagccagaacggaggaccggaacaaagagacaaggactagcagcgaatcaatcatctcagtccccgcttcctctactagtgggtcccccagtcgggtaatctatgccaagctgggtggtgagattcttgactaccgggatctggcagctctgccaaagtctaaggccatatatgatatcgacagaccagacatgatatcctattccccctatatttcccattctgccggtgatcgtcagagctatggggagggagatcaggacgacaggagctataaacaatgtcggaccagtagccctagcagtacgggatccgtttctctgggacgttatactcctacatcaaggagcccccaacactacagtcgcccagcagcacggagatccgatggggaagatggaagcttagatcaggataacagaaaacagaaatctagctggctgatgttaaaaggcgacgccgatacacgcacaaattctcctgacctagacacccagtccctatcccacagctcagggaccgaccgggatccactgcagcgcatggccggagatagcttccattcccaatataagatatatccttacgactctctgatagtgaccaaccgcatacgagttaaactgccaaaggacgtagaccggactagactcgaacgccacttatcacccgaggagtttcaggaagtgttcggcatgagcattgaggaattcgatcggcttgctctctggaagcgaaacgacttaaagaaaaaggcattactgttctag

SEQ ID NO: 213069 - DNA, 1413 bp, synthetic construct
  misc_feature 1..1413: note = Description of Artificial Sequence: Synthetic coding sequence
  source 1..1413: mol_type = other DNA
atgagtgctgtgtctcagccacaggcagccccttcaccactggagaagagccctagcaccgccattctctgtaatacatgcgggaatgtctgtaagggcgaagtcttacgtgtccaggataaatacttccatattaaatgcttcgtatgtaaagcttgtggctgtgacctggccgaaggcggatttttcgtgagacaaggtgagtatatttgcaccctggactaccagagactttacggcacccggtgcttcagctgtgatcagtttatcgagggcgaagtggtgtccgcactgggcaagacctatcaccctgactgcttcgtatgcgctgtctgcagattgccgttccctcctggcgacagagtcacatttaacgggaaggaatgcatgtgccaaaagtgcagcttgcctgtgagtgtgggcagctctgcccacttatcacagggcttgcgtagctgcggcggttgcgggacagagatcaagaatgggcaggccctggttgctctggataaacattggcatcttggttgcttcaaatgcaaatcttgcgggaaactgctcaatgccgagtacatcagtaaagatggacttccttattgtgaggctgactaccacgctaagttcggtatcagatgtgatagctgcgaaaagtacatcaccgggcgtgtactcgaagccggagagaagcactaccacccctcctgtgctctgtgcgttagatgcggccaaatgttcgccgagggtgaagaaatgtatctgcaaggatcatcaatctggcatcctgcatgccggcaggctgcccgaaccgaggaccggaacaaagagacaaggaccagctccgagagtataatctcagtgccggcttcttcgacaagcggctcaccctcccgggttatttatgctaagctcgggggagaaattctcgactatagagatctagccgcactccccaaatccaaagcgatttatgatatcgataggcccgatatgattagttacagtccttacatttctcactccgcgggagaccggcagtcctacggagaatcccctcagctgctctcgccaacccccaccgagggggaccaggacgatcggagttacaaacagtgccgtacgagctccccctccagtaccggctcagtgtcccttggcaggtatacgcccacatcaagatccccgcaacattattcgagacctgcagccaggcgaagcgacggagaggacggaagtttggaccaggataataggaaacagaaatccagttggctgatgttgaagggcgacgctgacaccaggacaaacagtccagatctagatactcaatccctgtcccatagttcaggtaccgacagggacccacttcagagaatggccggagactcttttcacagccgagagtggttcttctag

SEQ ID NO: 213070 - DNA, 1938 bp, synthetic construct
  misc_feature 1..1938: note = Description of Artificial Sequence: Synthetic coding sequence
  source 1..1938: mol_type = other DNA
atgtctgccgtatctcagcctcaggctgcaccaagccctctggagaagagcccttctactgccatcctgtgtaatacatgcgggaatgtctgcaaaggcgaggttctccgtgtgcaagacaagtacttccacattaagtgttttgtttgtaaggcttgcggctgcgaccttgccgagggcggtttttttgtgaggcagggtgagtacatttgtaccctcgactatcaacgcctctacggcacccgatgcttctcttgcgatcagttcattgaaggcgaagtggtgtctgctctcggcaagacctatcatcctgattgtttcgtttgcgctgtctgccggttgcccttccctccaggggacagggtgacgttcaacggcaaggaatgtatgtgccaaaaatgtagtctgcccgttagcgtgggctcgtctgcacacctcagccagggacttcgcagttgtggcggatgcggcaccgagatcaaaaatggacaggcactggtcgctctggacaagcactggcacttgggctgctttaagtgcaagtcttgcggcaagttactgaacgctgagtacattagcaaagatggactgccatattgtgaagctgattatcacgccaagttcgggatacggtgtgattcatgcgaaaagtacatcacaggaagagttctggaggcaggggaaaagcactatcatccctcttgtgccctgtgcgttagatgtggacaaatgttcgccgagggcgaagaaatgtacttacaaggctcttcaatttggcaccctgcctgcaggcaggctgcaagaactgaagatcggaataaggagactagaactagtagcgagagtatcatctccgtgcccgcaagctctaccagcggcagtccctctagggtgatctacgccaagctgggtggtgagatcctggattatagggacctcgccgctctgcccaagagcaaggcaatctatgatattgataggccagacatgatatcctactccccttatatctcacactccgcgggtgataggcagtcctatggagagggagaccaggatgatcgctcatataagcagtgccggactagcagcccatcctctacgggatccgttagccttggacgctatacgcctaccagccgctctccacagcattattctcggccagccggtacagtgagcgtgggcactagttcttgtctgtccctcagccagcacccctctccgacatcagtgtttagacatcattacataccatactttagggggagcgagtcaggccgttctacaccctctctttcagttttgagcgacagcaagcccccaccctcaacctaccagcaggccccacggcattttcatgttcctgacactggggttaaagacaatatctatcggaaacccccaatttacagacagcacgccgctcggaggtccgatggcgaggatgggtcccttgaccaggacaacagaaaacagaaatcctcctggctgatgctcaagggggacgctgacacacgcacaaacagtcctgatttggacacccagtctctctctcattctagcgggacagaccgagacccccttcagcgcatggctggcgactccttccactcaaggttcccctattctaagtccgatccattgcccggacacgggaaaaacggcctcgatcagcgaaacgcaaatctggcaccctgtggcgcagaccctgacgctagctgggggatgagagagtacaaaatttacccttatgacagcctcatagtgaccaacagaattcgggtcaaattacccaaggacgtggataggacaagactcgagcggcacctgtctcctgaggagttccaggaggtatttgggatgtcaatcgaggagtttgaccgtctagcactctggaaacgcaatgacctcaagaagaaagccctgctgttctag

SEQ ID NO: 213071 - DNA, 1680 bp, synthetic construct
  misc_feature 1..1680: note = Description of Artificial Sequence: Synthetic coding sequence
  source 1..1680: mol_type = other DNA
atgtctgccgtgtcccagccccaggctgctccatcgcccctcgagaaaagtcctagcaccgcaatactgtgtaatacttgcggaaacgtgtgcaagggcgaggtgttgcgcgtgcaggacaagtatttccacattaaatgcttcgtttgcaaagcgtgtggttgtgacttagctgaaggtggctttttcgttagacaaggcgagtacatatgtaccctggactatcagcgtttgtacgggacgagatgtttctcatgtgaccagttcattgaaggcgaggtcgtttcggcactggggaagacctatcatcccgactgctttgtctgtgcagtgtgtcgattacctttcccgcctggtgaccgtgttactttcaacggcaaagaatgtatgtgtcaaaaatgctctttacctgtgtccgttggaagcagcgcacatctgtcccagggactgaggtcctgtggcggatgcgggacagagatcaagaatggacaagctcttgtggcgctggacaagcactggcatctcgggtgctttaagtgtaagtcttgcggcaaacttctgaacgctgaatatatctcaaaagacggcttgccatactgtgaggccgactaccacgccaagttcggaatacgctgtgacagttgcgagaaatatattacaggacgcgtgctggaggcaggggaaaaacattaccacccgtcttgcgccttgtgtgtgagatgtggccagatgtttgctgaaggcgaagaaatgtatctccagggatccagtatctggcacccagcctgtcgacaggcagctcgcacagaagacagaaataaggagaccagaacatccagcgagtccattatctctgtgccagcgagcagcacatccggtagtcctagtagagtcatctatgccaaactggggggagaaatcctcgactaccgagatctggctgccctgccaaaatccaaagccatctatgatattgaccgtccggatatgatcagttatagtccctacatctcccacagcgcaggagatcgccagagttacggggaaggagaccaggacgatagatcttacaaacagtgtcgtactagctcaccatcaagcacagggagcgtcagtttgggtcgctacacgcctacatcccggtccccacagcactattcacgaccagcagcacggcgtagcgacggcgaggatggttctctcgaccaagacaatcggaagaaatcttcctggctcatgctcaaaggggatgcggatacacggacaaatagccctgacttggatacacaatccctgagtcactctagtggcacggatcgagacccactgcagaggatggcaggagacagttttcacagccgattcccatattccaaaagcgacccactgcctggacatggaaagaacgggctggaccagaggaacgccaatctcgccccatgtggggcagatcccgatgcaagctgggggatgcgcgagtacaaaatctatccatacgacagcctgattgttactaatcgtatccgcgtcaagttgccgaaggacgttgacaggacacggctggaacgccacttgtcacccgaagaatttcaagaagtattcggtatgtctatagaagagttcgatcggttggctctttggaagcggaacgaccttaaaaagaaggcactgctgttctag

SEQ ID NO: 213072 - DNA, 1041 bp, synthetic construct
  misc_feature 1..1041: note = Description of Artificial Sequence: Synthetic coding sequence
  source 1..1041: mol_type = other DNA
atgtttgccgaaggcgaggaaatgtatttacaaggaagctctatctggcatccagcttgccggcaggcagcccgtactgaagaccgcaataaagagacgcgcaccagcagcgagagcattatcagtgttcctgcctcttcaacatccggttctccaagcagggtgatctatgctaaattaggcggtgagatactggactacagggatctcgctgctctacccaaatcgaaagcaatatatgatattgatcgtccagatatgatctcctatagcccgtacatatcacactccgccggagaccggcagtcctacggtgaatccccccagcttctgtcgccaacaccgactgagggcgaccaagacgatcggagctacaaacagtgtcggactagctcgccctcatcgacaggctcagtctctctcggacgttatacccctaccagcagatccccccaacattacagtagaccagacactggagttaaggataatatctatcggaaaccaccaatctaccggcagcacgcagcacgcagatccgatggcgaagacggcagcctggatcaggataatcgaaaacaaaaatcctcatggctgatgctgaaaggtgatgcggacacacggaccaattctccggacctggacacacagtcgctgagtcatagttctggaactgacagggatccgctccagaggatggcgggagactcttttcactctagattcccgtattcaaagagcgatcccttaccaggacacgggaagaacggtctggatcagcggaatgcaaacctggcaccatgtggcgctgatcccgacgcctcttggggaatgcgagagtacaagatctacccctacgactccctcatcgtgactaaccgcatccgggtgaagctgccaaaagacgtagatcgtacgagactggaacggcacctatcacctgaagaatttcaggaagtgttcggcatgagcatagaagagttcgatcgcctcgctttgtggaaacggaatgatctgaagaaaaaggcgttactcttttag

SEQ ID NO: 213073 - DNA, 1716 bp, synthetic construct
  misc_feature 1..1716: note = Description of Artificial Sequence: Synthetic coding sequence
  source 1..1716: mol_type = other DNA
atgtctgccgtctcacagccacaggcggctccatcacccctagagaagagtccatctactgccatactctgcaatacctgcggtaatgtatgtaaaggagaggtcctccgggtgcaggataagtacttccatattaagtgctttgtatgtaaagcttgcggctgtgatttggccgagggcggattcttcgtccgccagggggaatatatttgcactttggactatcagaggctgtacggaacccggtgctttagctgcgatcaatttatcgaaggagaagtggtatcggccttgggcaaaacatatcatcctgactgttttgtgtgcgctgtttgccggcttcccttcccgccaggcgatcgagtgacttttaacggcaaggagtgcatgtgccagaagtgcagccttcctgtaagcgtgggtagtagcgcacacctttcccagggcctgagaagttgtggagggtgcgggaccgaaataaaaaacgggcaggcgctcgtagccctcgacaagcattggcatttgggctgcttcaagtgcaaatcatgcgggaagctgctaaacgctgagtacatttctaaggatggcctgccctattgcgaagcggattaccacgctaagtttgggattagatgcgattcatgtgaaaagtatatcaccggtagggtgctcgaggcgggagaaaaacattatcacccctcctgtgccctctgcgtgaggtgtggccaaatgttcgccgagggcgaggagatgtaccttcagggctccagcatctggcacccagcctgtaggcaggcagccagaacagaggacagaaataaagagaccaggacatcatcggaatcgatcatttcagtgcccgcatcctctactagcggttcacctagtcgtgtgatatacgccaaactgggtggggagatcctagactatcgagatttggccgctcttccgaaatctaaagccatttatgacattgatcgcccagatatgatctcatattccccctatattagccacagcgccggagaccgacagtcatacggcgagggcgaccaggatgacagaagttacaaacagtgccgtacttcttcaccttcatcgactggatccgtatcactgggccgttatactcccactagccgctctccccagcactacagtcggcctggttcagagagcggcagaagtaccccctctttaagcgtgctctctgactctaaaccccctccttccacctaccagcaggctcctaggcatttccacgtacccgacaccggcgtaaaggacaacatataccgaaagccccctatttaccgacagcacgcggctcgaaggtctgatggcgaggacggaagcctggaccaggataaccgtaaaaaatcctcttggctgatgctcaagggcgacgcagatacccgcaccaacagccctgatcttgatacacagtctctcagtcatagctctggcaccgatagggaccctcttcagagaatggctggagattcattccacagccaacagatctatccctacgacagtctcattgtgactaataggatccgcgtgaaactgcccaaggatgttgacagaaccaggctggaacggcatctatctcctgaggagttccaggaagtatttggtatgagcatcgaggagttcgataggctagcactttggaagagaaacgacttgaagaagaaggcactcctcttctag

SEQ ID NO: 213074 - DNA, 1596 bp, synthetic construct
  misc_feature 1..1596: note = Description of Artificial Sequence: Synthetic coding sequence
  source 1..1596: mol_type = other DNA
atgagcgccgttagtcagcctcaggcggcaccctctccactggagaaatcccccagcaccgcgatcctgtgcaatacctgtggtaacgtctgcaagggagaggtcctgcgggtgcaggacaaatacttccacataaagtgctttgtgtgcaaggcttgcggctgtgacctggcagagggagggttttttgtccggcagggagagtatatctgcacgctggattatcagcggctgtacgggacacgatgcttctcgtgcgatcagttcatcgaaggagaagttgtcagcgccctcgggaaaacttatcatccagactgctttgtgtgcgctgtgtgtaggctgccatttcctcccggtgacagagtcacgtttaacggaaaagaatgcatgtgccagaagtgttcgctgcctgtgagcgtaggatccagtgctcatctctctcaaggcctgcgctcttgtggagggtgcggcacggagattaagaacggacaagctctggtggccctcgataaacactggcatctcgggtgcttcaagtgcaagagctgcgggaaactgttgaatgccgagtacatcagtaaagatgggctgccctactgcgaggctgattatcacgccaagttcggaataaggtgcgattcgtgtgagaagtacatcacagggagagtgcttgaggccggtgagaaacattatcacccctcttgtgccctgtgtgttcgttgtggacagatgttcgccgagggcgaagaaatgtacctgcagggaagctcaatttggcaccccgcatgtcggcaggctgcgagaactgaggaccggaacaaagagacaaggacttccagtgaatccataatctccgtgcctgccagcagcaccagtggatcacccagcagggtaatctatgccaaactggggggtgaaattcttgactaccgagacctcgccgctcttcctaaaagcaaggctatttatgacatcgatcggccagacatgatctcttacagcccgtatatctcccactcagctggcgacagacagagttatggtgagtcaccccaactgctgagccccacaccaaccgagggggaccaagatgacaggtcctacaaacagtgccgtacctccagccccagttctacggggtcagtgtcccttggcaggtacacacccacatctagaagtcctcagcactactcacgaccagctgccagaaggtctgacggtgaggacggctcattggaccaagataacaggaaaaaaagctcatggctaatgttgaagggcgatgcagatacgcggaccaactcacctgatttagacacacaatccctgagtcattcaagcggaaccgaccgagacccactccagcgcatggcaggagactcatttcacagccgcgagcagatatatccctacgactcgctcattgtgactaacaggatccgcgttaaactgcctaaggacgtggaccgcactcgactagagaggcacctcagcccagaggaattccaagaagtctttgggatgtcaattgaggaattcgaccggctggcgctgtggaagcggaacgatctcaagaagaaggctctgttgttctag

SEQ ID NO: 213075 - DNA, 2193 bp, synthetic construct
  misc_feature 1..2193: note = Description of Artificial Sequence: Synthetic coding sequence
  source 1..2193: mol_type = other DNA
atggaagagttgatagttgaactcaggctttttctcgagctgctggaccatgaataccttaccagcactgtgagagaaaaaaaggctgttatcactaacatcctcctaagaatccaaagtagtaagggttttgatgtgaaagaccatgcgcaaaagcaggagactgcgaacagcctaccagcgcctccacagatgcctctgccagagatacctcagccttggctgcctccggacagtgggcctccacccctgccgacctcatcgcttccggaaggctactatgaagaggccgtgcctttgtccccaggcaaagcccctgagtacattaccagtaactacgactctgacgctatgtcaagctcatacgaaagttatgacgaggaggaggaggacggcaaggggaaaaaaactaggcaccaatggccttcagaggaagcttcaatggatctcgtgaaggatgccaagatctgtgccttcctgcttagaaagaaacggttcggacagtggaccaagttgttatgcgtcataaaggataccaaattgttatgttacaaatcttccaaagatcagcagccacaaatggaactgccattgcaggggtgtaatattacctacatccctaaggatagtaagaagaaaaagcacgaattaaaaattactcagcaggggactgaccccttagttctggcagtccagtccaaggaacaagctgaacagtggctaaaggtgatcaaagaagcctattctggctgtagcggccctgtggactcagagtgtcccccacctcctagctctcccgttcataaagcggaactcgaaaaaaagttaagcagtgagagaccttcttccgacggggagggggtggtggagaatgggattaccacttgtaacggcaaagagcaggtgaagagaaagaaatcctctaagtcggaggcgaagggaaccgtcagtaaggtgactggaaagaagattactaaaattatctccctcggcaagaaaaagccaagcacggatgagcagacctccagtgctgaggaggatgtccccacatgtggctatttgaacgtattaagcaattcacggtggcgagagaggtggtgtcgagttaaagataacaaactcatttttcataaagaccgcacagatcttaaaacacatatcgtcagcatcccgctgcgtggctgcgaagtgatcccgggactcgattctaagcatcctctgactttcagactgttgcgcaatggccaggaggttgcagtgttagaagcctccagtagcgaagatatgggtcgttggatcgggattttgttagcggaaaccgggagcagcacagatcctgaggctttacactatgactacattgacgtggagatgtctgcctccgttattcaaacggcgaagcagacattttgcttcatgaacaggcgagtaatctctgcgaacccctatctgggcggaactagtaacggttacgctcatccttctggcacagccctccattatgatgatgttccttgtatcaacggttcgctgaaaggaaagaagcccccagtcgcaagtaatggggtcaccgggaagggaaagacgctgagcagtcagcccaagaaggcagaccctgccgcagtggtgaagcgtaccggttccaacgcagctcagtacaaatatgggaagaatcgggtagaggccgatgcaaagcgactgcagacaaaggaagaagagcttctcaagcgaaaagaagcactccgcaatagactggcccagctacgaaaagagagaaaagacttacgtgcagcaatcgaggttaatgctgggcgtaagccccaagctattctcgaggaaaagcttaagcaacttgaggaagagtgtcggcagaaggaagctgaaagagtaagcttggaactggaattgacagaagtgaaggaatccctgaaaaaagccctggccggaggtgttactctaggacttgcaatcgaacctaagtctggtacaagttcgccccagagccctgtctttaggcatagaacgcttgagaattctccaatctccagctgtgacacatctgatacagagggtcccgtgccggtgaacagtgcagccgtgctgaaaaaatctcaggctgcacccggaagtagcccttgtagggggcatgttctgcgtaaggcaaaagagtgggagctaaagaacggtacctag

SEQ ID NO: 213076 - DNA, 2193 bp, synthetic construct
  misc_feature 1..2193: note = Description of Artificial Sequence: Synthetic coding sequence
  source 1..2193: mol_type = other DNA
atggaggagctcattgtggagctacgcctgttccttgagctgctggatcacgaatatctgacctctacagtaagagaaaaaaaggctgtcattaccaatatcctcctgcggatccagtcctccaaagggtttgatgtaaaagaccacgcacagaagcaggaaaccgccaactcacttcccgctccgccacagatgccgctgcccgaaattcctcagccctggctgccacccgactctgggcctcccccactccctacttcctccttgccagaaggctactacgaagaagccgtaccactcagccctggcaaagccccagagtatatcacaagcaactatgacagcgatgctatgtccagcagctacgagtcttacgatgaggaggaggaagatggaaagggaaaaaagacacgacatcagtggccctccgaggaagcttctatggatctggtcaaggacgctaagatctgcgcatttctgctccgtaaaaaaagatttgggcaatggaccaaactgttatgcgtgattaaagacacaaagctgctttgttacaaaagtagcaaagatcagcaacctcaaatggaattgccccttcagggctgtaatatcacttatattccaaaggatagcaagaaaaaaaagcatgaactcaaaattacccagcagggaactgatccacttgtgttggccgtacagagcaaagagcaggcagaacagtggttaaaagtgatcaaggaggcttactccggctgtagtgggcctgtggattcggaatgtccaccccctccgagtagccccgttcataaggccgaacttgaaaagaaattgtcttcagagcgcccttcgagtgacggggaaggcgttgttgagaatggaattaccacatgtaatggcaaggagcaggtgaagcgaaagaagtcatcaaagtcggaagcaaaggggactgtgtccaaggtgactgggaaaaagatcacaaagatcatttcactggggaagaaaaaacctagcaccgacgagcagactagctctgccgaagaagacgtccctacatgtgggtacttaaacgtgctgtctaattccagatggcgcgagcggtggtgtcgggtcaaggacaacaaactcatctttcacaaggatagaaccgacttaaagacgcatattgtgtcaatccctctccgcggttgcgaagtcataccagggctggactctaagcaccccctcactttccgactactgagaaatggccaggaggtcgctgtcctagaggctagcagtagcgaagatatgggacggtggatcgggatcctcctggccgaaactgggtcatcaacagaccccgaggccctgcactacgactacattgacgtcgagatgtcagctagcgttatccagacggcaaagcagactttctgtttcatgaatagaagggtgatctccgccaacccgtacttggggggtacctccaacggatacgcccaccctagtggaactgccctgcactacgatgatgtaccatgcatcaatgggtccttaaagggtaaaaaaccaccagtggcctctaacggcgtcactggtaagggaaaaactctgtcatctcagccaaagaaggctgatcccgcagccgtggtgaagcggactggcagtaatgccgctcagtataagtacggaaaaaacagggttgaggccgacgctaaaaggcttcaaaccaaggaagaagagctgcttaagagaaaagaggcccttaggaatcgcctggcccagcttaggaaagaacggaaagacctgagagctgcaatagaagtaaacgccggacgtaagcctcaagccatacttgaggagaaactcaagcagctggaagaggaatgcagacaaaaggaggctgagcgggtaagcctggaattggagctgactgaagtcaaggagtcccttaagaaggcactggctggtggcgtgactctggggttggccatcgaacctaagtccggtacttctagccctcaaagccccgttttccgacatcgaaccctggagaattcgcctatttctagctgcgacaccagcgacacagagggcccagtgcccgtgaactcagcagcagtgttaaaaaagagccaagccgctccaggctcgtccccctgtaggggtcacgttctccggaaagcgaaggaatgggagctcaagaatggtacgtag

SEQ ID NO: 213077 - DNA, 2445 bp, synthetic construct
  misc_feature 1..2445: note = Description of Artificial Sequence: Synthetic coding sequence
  source 1..2445: mol_type = other DNA
atggaagagttgattgtggaattgcgactgtttctggagcttctcgatcacgaatatttgacttcaacagtacgcgagaagaaggctgtgataaccaatattctgttgaggattcaaagtagtaagggcttcgatgttaaggaccatgcccaaaagcaggagacagccaactccctaccagctccacctcaaatgccgctcccagaaattccacagccctggctcccaccggacagcggaccaccgcctctgcctacgagttcactgcctgaggggtactatgaggaggccgtacctctatcaccaggcaaagcaccagaatatatcacctctaattatgattctgacgccatgagcagcagctacgagtcatatgacgaagaggaggaagatggtaagggcaaaaaaacccgacaccagtggccatccgaagaggcttctatggacttggtcaaggatgccaaaatttgcgctttccttctgaggaagaagcgttttggacaatggactaagctactgtgtgttatcaaagacacaaaattgctgtgctacaaatccagcaaagaccagcagccgcaaatggagctccctctgcaggggtgcaacattacctacattccaaaagactctaagaagaaaaaacacgagctaaaaattacacagcagggaacagatccgctggtgctggctgtccagtctaaagagcaggccgagcaatggttaaaggtgataaaagaggcctactccggttgctcaggcccagtggatagcgagtgccctcccccaccatcaagccctgtgcacaaagccgagctcgagaagaaactaagcagcgagcgaccaagtagcgatggggaaggcgtggtggaaaatggaataacaacgtgcaacgggaaggaacaggtgaaaaggaaaaagtcgagcaaatctgaggctaagggaactgtcagtaaagttaccggaaaaaagataactaagatcatttcactggggaagaagaagccctcaacagacgagcagacgagcagcgcagaagaagacgttccaacctgtgggtatctcaacgttctgtcaaactcacggtggcgagaacgctggtgtcgcgttaaagataacaaactgatcttccataaggatagaaccgatcttaaaacacacattgttagcattcctcttcggggatgcgaggtaatcccgggacttgattctaaacaccccctaacattcagactcttaaggaatgggcaggaggtggcagtcctggaggcaagcagctcagaagacatggggcgatggatcggcattctgctcgctgagactggcagttcaaccgacccagaggctttgcactacgactacattgatgttgagatgtcagcgtctgttattcagacagccaaacagaccttctgctttatgaaccgccgagtcatttctgcgaatccataccttggagggacaagcaatggttacgcccatccctccggtaccgcattgcactatgatgatgtcccatgtatcaatgggagctgggaacccgaagacggatttccagcttcctgctctagaggactgggtgaggaggtgctatacgataacgccggactctatgacaacctgccccctcctcacatttttgcccgatacagccctgcagacaggaaggcttcccggctctctgccgataagctgtcttctaatcattacaaatacccagcatctgcccagtccgttacaaatactagctcagtgggaagagcatctctcgggttgaattcccaactcaaggggaaaaagccacctgtggcttcgaacggtgtcaccggaaagggaaaaacattaagctcccaaccaaagaaagcagacccggcagctgtggtcaaaaggaccggcagtaatgcggctcagtacaagtatggaaagaatcgggttgaggctgatgccaagagattgcaaactaaggaagaggagctcctgaaacgcaaggaagctctgagaaatcgccttgctcagttacgaaaggagcgtaaagatcttagggccgctatcgaagtcaacgcgggacgcaagccccaggcaattctggaggagaaattaaagcaactggaagaggaatgcaggcagaaggaggccgaacgcgtgtcccttgagctggaactgacggaagttaaggagtctctcaaaaaggccctcgccggaggagttactttagggcttgcaatagaacccaagagcggaacgtcttcacctcagtctccggtgtttcgccaccgtactctggaaaattcaccaatctcaagctgtgatacttctgacaccgagggtccagtgcctgtgaactcggccgctgtgctgaagaaatcccaggccgctcccggaagctcgccatgtcggggtcatgtgcttcgaaaagcaaaggagtgggaattaaagaacggcacctag

SEQ ID NO: 213078 - DNA, 2307 bp, synthetic construct
  misc_feature 1..2307: note = Description of Artificial Sequence: Synthetic coding sequence
  source 1..2307: mol_type = other DNA
atggaccgagggcaggtgttggaacagttgctgcctgaattaactggtctgctgtcactgctcgatcacgagtatctcagtgacactacactggaaaagaagatggctgttgccagcattctgcagagcctgcaacccttgccagccaaggaggtctcgtatctgtacgtgaacactgccgatttacattccggcccatccttcgtggaatccttatttgaggaatttgattgcgatctgtccgaccttcgggacatgcctgaagatgacggcgagccttccaagggcgcatcgccggagttggcgaagtcccctaggttgcgcaatgccgctgatctgccgccacctctacctaacaagcctcccccagaagattactacgaagaagctctgcctctgggtccaggcaagtcgcccgaatatatatcatctcacaatgggtgttcaccttctcattccattgtggacggttactatgaagatgctgatagctcgtacccagccacacgggttaacggggaactgaaatcctcctataacgactctgatgcaatgtctagcagctatgagtcttatgacgaggaagaagaggaaggtaagagtccgcagccacggcaccagtggccttctgaggaggccagtatgcaccttgtccgcgaatgccgaatttgcgcctttctgctccgcaaaaagcggtttgggcagtgggcaaagcagctaactgtgatcagagaagatcagttactgtgctataagagcagcaaagaccgccagccacacttacgtctggccctggatacttgctccatcatttacgtgcctaaagacagccgacacaagaggcacgagctgaggtttacccagggcgcaactgaggtgctggttctagcattgcagagtagggaacaggctgaggagtggttaaaggtgatacgggaagtgtcaaagcctgtaggtggagcagagggagtggaggtgcccaggtcccccgtcttgctgtgcaagttagacctggacaagaggctgagtcaggagaaacagacatctgatagcgattctgtgggagtcggagataactgctctacactgggcagacgtgagacctgcgaccacggtaaaggcaagaagtctagcctggcggagctgaaagggagcatgagcagagccgcaggcaggaagattacacgcataattggattcagcaagaaaaaaaccctcgccgacgacttacagacttcctccaccgaagaagaagtcccctgctgtggatatctaaacgtcctcgtgaatcaggggtggaaggaacgttggtgccgtctcaaatgcaacaccctttattttcataaagatcatatggacctgcggacccatgtgaatgcgattgcactccagggatgtgaagtcgctccgggttttggaccacggcacccttttgctttccgtattctccgcaatcgccaagaggtggcgatcttggaggcctcctgttccgaagatatggggagatggctgggtctgcttcttgtagaaatgggttctcgagtcactccagaagccctgcactacgattacgtggacgtcgagacactaactagtatagtgtctgctggcaggaactcgtttttatatgcaaggagctgccaaaatcagtggcccgagccacgggtgtatgacgatgtgccctatgaaaaaatgcaagacgaggaacctgagagaccaactggcgctcaggtaaaaaggcatgcttctagttgttcggagaaatcccatcgcgtggatcctcaagtgaaggtcaagaggcatgccagctccgctaaccagtataaatacggcaagaatagggctgaggaagatgccaggagatacctggttgaaaaggagaagctcgagaaggaaaaggagacgatccgaacagaattgatcgctctgcgtcaggaaaagagggaactgaaggaagcaattcggagttcacccggtgccaagctgaaagccctggaagaagcagtcgcaacgctcgaggcccagtgtcgcgctaaagaggagcgacgaatcgatttggagctcaaacttgtggccgtgaaagagcggttgcagcaatcacttgccggtggtccggcactggggttaagcgtatcctccaagcccaaatccggagaaacggccaacaaaccgcaaaactcggtgcctgagcaaccccttccagtaaattgtgtttctgagctgcggaagagaagcccgtctattgtagcctcgaaccaaggcagagtccttcagaaggctaaagaatgggagatgaagaagacctag

SEQ ID NO: 213079 - DNA, 2178 bp, synthetic construct
  misc_feature 1..2178: note = Description of Artificial Sequence: Synthetic coding sequence
  source 1..2178: mol_type = other DNA
atggatcggggacaggttctcgagcagcttctgcctgaacttaccggcctcctctctctgctggatcacgagtacctttctgacacaactcttgagaagaagatggctgtggccagcattctacagagcctccagcctctgccggcaaaggaggtgtcttacctatacgttaacaccgccgacctgcacagtggcccatctttcgtggagtccctcttcgaggagttcgattgtgatctgtcagacctaagggatatgccagaggacgacggtgaaccctctaagggtgcctccccggaacttgccaagtctcctaggctccgtaacgcagctgatttgccaccaccactgccaaataagccacctccagaggattattatgaggaagctctcccactcgggccagggaagagtcccgaatacatctccagtcataatggatgctcgccttctcatagcatcgtggacggctattacgaggatgcggactcctcctacccagctactcgggtcaacggcgagctaaaatcaagttataacgactccgatgccatgagttcctcgtatgagagttatgatgaggaagaagaggagggcaaatccccacagccgagacaccagtggccaagcgaggaagcaagcatgcacctggtccgagaatgccggatatgtgcgttcttgctccgcaagaagcggttcggccagtgggcaaagcagctgacagtcatccgagaagatcagctgctttgttacaagagcagcaaagaccgccagccccacctgaggcttgcacttgacacgtgctcaatcatatatgtgcccaaggacagcagacataaaagacatgagctcaggttcacgcaaggcgctacagaggtgctggtgttggccctgcaaagcagagagcaggcagaggagtggctgaaggtaatcagggaagtgtccaaaccagtggggggtgcagagggagtcgaggttccacgtagtcctgtcctgctgtgcaagctggatctcgacaagagactctctcaggaaaaacagacatccgattccgatagcgtgggagtcggcgacaattgtagcacactgggtcgacgagagacctgtgaccacggaaaaggtaaaaaatctagcctagccgaactgaagggctccatgtctagggcagccggtaggaagattactcgtatcatcggcttctcaaaaaaaaaaaccctcgctgacgatctccaaacatcatctacggaggaggaagtcccctgctgcggctacctgaacgtactggtcaaccaggggtggaaggagcggtggtgtcggcttaagtgtaatactctctatttccacaaggaccatatggacctcaggacacacgttaacgctattgctcttcaggggtgtgaggtggctcccggttttggacccagacatcccttcgctttcagaatactgcgcaatcggcaagaagttgctatcctggaggcttcatgctccgaagatatgggcagatggctgggcttactcttagtggaaatggggtcacgggtcacccctgaggcactacactacgattatgttgatgtggagactcttacttcaatcgtaagtgctgggcgaaattcgtttctgtatgcacgtagctgtcaaaatcagtggccagagccgcgagtgtacgatgatgtcccatacgagaaaatgcaagatgaggagcccgaacggccaaccggagcacaggtaaaacgtcatgcatcttcatgctctgagaaatcccacagagtggacccacaggttaaggtgaagagacacgcctcaagcgctaaccaatacaagtacggcaagaacagggccgaggaggatgcgaggaggtacctggtggagaaggagaagttggaaaaggagaaagagacaatacgcacagagctgatcgcgctgagacaggaaaaacgcgagctgaaggaagctattaggtcttccccaggggcaaagctgaaggctcttgaggaagcagtagccactttggaggcacagtgccgtgccaaagaggagagacggattgatctggagttaaagctagtagccgtgaaggagcgcttgcaacagagcctggcaggcggacccgctctgggcttgtccgtcagctccaagccaaagtctggggaatgggagatgaagaaaacgtag

SEQ ID NO: 213080 - DNA, 2457 bp, synthetic construct
  misc_feature 1..2457: note = Description of Artificial Sequence: Synthetic coding sequence
  source 1..2457: mol_type = other DNA
atggaaaggtataaagctttggagcaattactcacagaattagacgacttcctgaaaattctcgatcaggagaatttgtcctccacagcattggtgaaaaaaagctgtctcgctgaactgttaaggctgtacacaaaatcctcatctagcgacgaagagtacatttacatgaacaaagtgaccataaacaagcagcaaaacgcggagagccagggtaaggcaccagaagaacagggactgttgcctaacggtgaaccaagtcaacactcctccgcaccacaaaaaagcctccctgacctcccgccaccaaaaatgatccctgagagaaagcagctcgccattcctaaaactgagagcccagagggctattacgaagaggctgaaccttatgacacaagtctgaacgaggatggcgaggctgtgagcagtagctacgaaagttacgatgaggaagacggatcaaagggcaagtctgcaccctaccagtggccctctcccgaggccggtatcgagttgatgagggatgcccgaatctgtgccttcttgtggaggaagaaatggctgggccaatgggcgaaacagctgtgtgtcattaaggataatcggctcctgtgctataaatcctctaaagatcattccccacagctggatgtcaatctgctcggcagtagcgtgatacacaaggaaaagcaagtgcggaagaaggaacataaattgaagatcacccctatgaatgccgatgtgattgtgctggggctccagtcaaaggaccaggctgaacagtggttgagagttatccaggaggtatctgggcttccaagtgagggcgcttcagaggggaaccagtacacacccgatgcacagagatttaactgccagaaaccggacatcgccgaaaaatatctttctgcgagtgagtacggaagttctgtagacggtcaccctgaagtccctgaaacgaaagacgtgaaaaagaagtgcagtgccggactgaaattgtcaaatctcatgaacctggggaggaagaaatcgacgtcattagagccggtcgagcgatccctcgaaacatcttcttatctgaatgtgttggtgaacagccagtggaagtcgcgatggtgctctgtacgagacaaccatctgcatttttaccaggacagaaaccgatcaaaggtggcccagcagccactgtccctcgtcggttgcgaagttgtgcctgacccttcaccagaccacctgtatagcttcaggatccttcacaaaggcgaagagctggccaaactcgaagccaagtctagtgaggagatgggccattggcttggtctgctgctgagcgaatctgggagtaagaccgaccccgaggaattcacgtatgattacgtggacgctgatcgggtctcctgtatcgtgagcgctgcaaagaattcgctgctactgatgcaaagaaagttcagcgagcccaacacatacatcgacgggctgccatctcaggatcgccaggaggagctgtacgatgatgtagacctttctgagctgacagccgcagttgaaccaaccgaggaagcgactccagtggcggacgacccgaacgagcgagaaagtgatcgcgtgtatttggacctgacacccgtgaagagctttctgcacggtccatcgtccgcccaggctcaagcctccagtccaaccctcagctgcctggacaatgcaacagaggcactgcccgcagactctgggcctgggccaactcccgacgaaccatgtatcaagtgccccgaaaatcttggcgagcagcagcttgagtccctagaacccgaggatccctcgctgagaattacaaccgtgaagattcaaacagaacaacaacgtatctcttttccacctagctgccctgacgcagtcgttgctacaccaccgggtgcttcaccccctgtcaaagacagactacgggtgactagtgccgaaatcaaactcgggaaaaatagaacagaggcagaagttaaacgctacacagaagagaaagaaaggctcgagaagaagaaggaggagattaggggacacttggcgcagcttcggaaagagaaacgggaactcaaggaaaccctattgaagtgcaccgataaggaagtgctggcgtcactcgaacaaaaacttaaggaaatagacgaagaatgtcggggagaagaaagtagacgcgttgatcttgagttgtctatcatggaagtgaaagacaatctgaagaaggcggaggcaggacctgttacattggggacaaccgttgatacaactcacctagagaacgtgtctccaagacccaaggcagtgaccccagcttctgcacctgattgtacccctgttaactccgcaacaaccttgaaaaataggccactgagtgtggtggtgacaggcaagggcaccgtgctgcaaaaggctaaagaatgggagaagaagggtgcgagctag

SEQ ID NO: 213081 - DNA, 2445 bp, synthetic construct
  misc_feature 1..2445: note = Description of Artificial Sequence: Synthetic coding sequence
  source 1..2445: mol_type = other DNA
atggaacggtacaaggccctggaacagctgctgaccgaattggatgacttcctgaagattctggaccaggaaaatctctctagcacagcattggtaaagaagtcctgcctcgctgagttgctccgattgtatacgaaaagtagttctagtgacgaagagtacatctatatgaataaggtgactattaataaacagcagaacgcggagagtcagggtaaggcaccagaggagcaaggtttgctaccaaacggggagccctcccaacactccagtgctccccaaaaatctctgccagacctaccacctcccaagatgattcctgagaggaaacagctggcaattcctaaaaccgaatcccctgaagggtactatgaggaggccgagccttacgacacgagtcttaatgaggatggtgaggccgtaagttcctcctacgaatcctatgacgaggaggatggctctaaagggaaaagcgcaccataccagtggccttctcctgaagctggcatcgagctcatgcgagacgccagaatctgcgccttcctttggagaaaaaaatggctggggcagtgggcaaagcagttgtgcgtcatcaaagataaccgccttctgtgttataagtcatctaaggatcatagcccgcagcttgacgtgaatctgctaggttcatctgtgatccacaaggaaaaacaggtgcgaaagaaggagcataaactaaagataactcctatgaatgccgacgtaattgtcctcggattacagtccaaggatcaagctgagcagtggctccgggtcatccaggaagtgagcgggttgccatctgagggtgccagcgagggcaatcagtacaccccagacgctcagcgcttcaactgccagaagcctgacattgccgaaaagtacctgtcagcctctgagtatgggtcatctgttgatggccacccagaagttccagaaactaaggacgttaagaagaaatgcagcgctggcctgaaactctctaatctcatgaaccttgggaggaagaaatctacaagcctggagcccgtcgaaagatcactggaaacatcctcctacttgaatgttttggtgaattcgcagtggaagagccgatggtgcagtgtcagggacaaccacctgcacttctaccaggacagaaatagaagtaaagtagctcaacagcccttatcgctggtgggatgtgaggtggtccctgatccctcccctgatcatctctatagtttccgcattcttcataaaggagaggaacttgccaagcttgaagccaagtccagcgaggaaatggggcactggttgggtctcctgttgagcgaaagcgggtcaaaaaccgatcctgaggagtttacttacgactatgtcgacgccgacagggtgagctgtatcgtgtcggcagcaaagaacagcctgctcctcatgcagaggaagttctcagaaccgaacacttacatcgatggactgcccagccaggacaggcaagaggaactttacgatgatgtggatctctccgagttgacggcagccgtggagcctaccgaggaggctacacccgttgccgatgaccccaatgagcgggagtcagacagagtgtatcttgacctgactcccgttaagtccttcctgcacggcccatcttcggcccaagcccaggcctcgagcccgacactcagctgcctggacaacgctacagaggcactgcccgctgacagcgggccaggccctactcccgacgagccatgcatcaaatgccccgagaatctcggcgaacaacagctggaatcccttgagcccgaggatcctagtcttagaatcacaacggttaagattcagaccgagcagcagcgtatctcatttcccccttcctgtccagacgccgtcgtggcaaccccccctggtgctagtcccccagtgaaagatcgtctgcgtgtgacctctgctgaaatcaaattaggtaaaaatcgcacagaggcggaagttaaaagatacaccgaggagaaggagcgcctggaaaagaaaaaagaagagattaggggccatctggcgcagctgcggaaagaaaagagagagctcaaggagacactcctcaagtgcaccgataaagaggtgctcgccagtctcgaacagaaactcaaagaaatcgatgaggaatgtcgtggcgaggaatctagacgggtcgacctggagctctccattatggaggtcaaggacaatcttaagaaggccgaagccggacccgtgacccttgggaccactgtggacactactcatttggagaacccgaaggcagtcacccctgcatcagccccagattgcacacccgtgaacagtgcaaccacgctaaaaaatagaccgctaagcgtggtggtcacagggaaaggcactgtcctacagaaggcaaaagagtgggagaaaaagggggcttcctag

SEQ ID NO: 213082 - DNA, 2526 bp, synthetic construct
  misc_feature 1..2526: note = Description of Artificial Sequence: Synthetic coding sequence
  source 1..2526: mol_type = other DNA
cagcgggtaagggcactggagcaattgctcacagaactggacgacttcttgaagattctggaccaggaaaatctatcttctaccgctctggtgaaaaagtcctgtctcgcggagctgttgcggctgtataccaaaagttcttccagcgatgaagagtacatatacatgaataaggtcaccattaataaacagcagaatgccgagagtcaaggaaaagcgcctgaagaacagggactgctgcctaacggggaaccaagccagcacagtagcgctcctcaaaaaagcctgcctgacctcccgccacccaagatgatccctgaaagaaaacaactcgctattcctaaaactgaatccccggagggctactacgaggaagccgagccctacgacacctcccttaacggccactccggaggatttctcccaaccggggtgccacgctgggttcaggtccctgaaggggtgatatatgccaccatcacactcgaagatggggaggcagtgtcaagttcatatgagtcttacgacgaagaggatggctcaaaagggaagtccgctccatatcagtggccttctcctgaagctggaatcgagctgatgagagacgcccgtatttgcgccttcttgtggcggaagaagtggcttgggcaatgggccaaacagctttgtgttattaaggacaatcgcctgctatgctataagtcctcaaaagaccatagtccccaattggatgtaaaccttttgggcagcagtgtaatccacaaagagaaacaggtgaggaaaaaagagcacaagctgaagattactcccatgaacgcagatgtaatcgtacttggtctgcagtccaaagatcaggctgagcagtggcttcgggtgatacaagaggtgtctgggttgccatccgagggggcatctgagggaaaccagtacactccagacgcacagagatttaattgtcagaagccggatatcgcagagaagtacctgtctgccagtgagtacggaagcagcgtcgacggacaccccgaggtaccagagaccaaggatgtcaagaagaaatgtagcgcgggtttgaagctttctaatctgatgaatctcggtagaaaaaaatccactagtctcgaacccgtagaacggagcctcgagacaagtagctatctgaatgtccttgtgaattcccagtggaagtctaggtggtgctccgtgagggataatcacctccacttttatcaggaccggaatcgttcaaaggtggctcagcaaccacttagtttggtcggatgcgaagtggtgcctgacccaagtcccgatcatctttactcctttcgaatcctgcacaagggtgaagaactcgccaaacttgaagccaagtcgagtgaggaaatgggccattggctgggactgctcctgagcgaaagtggcagtaagactgaccccgaggaatttacctatgactatgtggacgctgatcgagtctcttgcattgtgtccgcagccaaaaactccctgctccttatgcagcgaaagttcagtgaaccaaacacttatattgacgggctcccatcacaggacaggcaagaggagttgtacgatgatgtggatctctcagagttgactgcagccgtagagccgacagaggaggccacacctgtggccgatgaccccaacgagcgagaatcggatcgggtgtacctagacctcaccccagtgaaaagttttcttcacgggccaagcagcgcccaggcccaggcctcttcacccaccttgtcctgccttgacaatgctaccgaagccttacctgccgactccggaccgggaccaacacccgatgagccgtgcataaagtgccccgaaaaccttggagaacaacagttggagtctctggaaccagaagaccccagccttaggatcaccaccgtgaaaatccagactgagcagcagagaatttcgtttccacctagttgtcctgacgcagtggtggcgacccctccaggagcctctcctccagtcaaggaccgccttagagtaacctcagctgagatcaagttgggtaaaaaccggactgaagccgaagtgaaaagatacactgaagagaaggaacgcttggagaaaaaaaaggaagaaatcagaggacatctagcccaactgcgaaaagaaaaaagggaactgaaagagacactcttaaagtgcactgataaggaagtgcttgcaagcctagaacagaaactcaaggagatcgacgaagagtgtcggggagaggagtcacgcagagttgatctggagctgtctattatggaggtcaaagataacttgaagaaagccgaggctgggcctgtcacccttgggaccaccgttgacaccacccatctggaaaacccaaaggcagttactcccgctagtgcacccgattgcaccccagttaattcagctactaccctgaagaaccgcccactctccgttgttgtcaccggcaaggggactgtcctgcagaaagcaaaagagtgggagaagaaaggcgctagctag

SEQ ID NO: 213083 - DNA, 939 bp, synthetic construct
  misc_feature 1..939: note = Description of Artificial Sequence: Synthetic coding sequence
  source 1..939: mol_type = other DNA
atggagcggtacaaggcacaagggtgctgttgtctggtcgttcagagacgtatcagacaagtctccgccagcttggaacagctgctgactgagctagacgatttcctcaaaatattagatcaggaaaatctgtcctccaccgccctggtgaagaagtcttgtctagccgaactcctgcgattatacaccaagtcaagttctagcgacgaggagtacatctacatgaacaaggtgactataaacaaacagcagaacgctgagagccaagggaaagccccagaagagcagggactattgccaaacggagaaccctcccagcattcgagcgctccccaaaaatctttgcccgatctccccccacctaaaatgatccccgaacgcaagcaactggctattcccaagacagagagcccagaaggctattacgaggaagcggaaccctacgatacctctctgaatgaggacggcgaagccgtttcctcttcgtatgaaagttacgacgaggaggatgggtctaagggaaagagcgccccttatcagtggccttcccccgaagccggaatcgagctgatgcgagatgcccgtatctgcgcatttctctggcgaaagaagtggcttggtcaatgggcgaagcaactttgtgtcataaaggacaaccggttgctatgctacaagagttccaaagatcactctcctcagcttgacgtcaatctgcttggctcatccgtcattcacaaggaaaaacaggtccggaaaaaagagcacaagctaaagattacaccgatgaacgcggacgttattgttcttggcctgcaatccaaggaccaggccgaacagtggctgagggtaattcaggaggtttcagggctgcctagcgagggcgctagcgagggcaatcagtacacgcctgacgctcagcgctttaattgccagaagtag

SEQ ID NO: 213084 - DNA, 939 bp, synthetic construct
  misc_feature 1..939: note = Description of Artificial Sequence: Synthetic coding sequence
  source 1..939: mol_type = other DNA
atggaaagatacaaggcccagggctgttgctgcctggtagtgcagagaaggatcagacaggtgagtgccagccttgaacagcttctgactgagcttgacgactttctgaagatcttggaccaggagaatcttagtagcacggcccttgtcaaaaaatcatgcttggctgagctgttgagactgtacactaaatcttcttcctcagacgaagagtacatttatatgaataaggttaccattaacaaacagcaaaatgccgaaagccaggggaaagcgccagaggagcaaggtctcctgccaaatggcgaaccgagccaacattcatccgccccacagaagtcactgcccgacctgccacctcccaagatgatcccggaacgcaaacagctggccatccccaagacggagagtcctgagggatactatgaagaggctgaaccatacgatacatccctgaatgaagacggcgaggccgtgtcatccagttacgaatcatatgatgaggaggacgggtccaaggggaagagtgcaccatatcagtggccaagcccggaagccggtatcgaactgatgcgggatgccagaatttgtgcattcctctggaggaagaaatggttgggccagtgggccaagcaactgtgcgtcatcaaggacaatcgattgttatgttacaaatccagcaaagatcactcccctcagctggacgtgaatctactcggctccagtgttatccacaaagagaagcaggtgagaaaaaaagagcataagctgaaaatcacaccgatgaatgccgacgttatcgtgcttggactgcagtccaaggaccaggcagagcagtggttgcgggtgatccaggaggtgtcgggactgcctagcgagggcgcatctgaaggcaaccaatatactccagacgcccagaggttcaattgccagaagtag

SEQ ID NO: 213085 - DNA, 2616 bp, synthetic construct
  misc_feature 1..2616: note = Description of Artificial Sequence: Synthetic coding sequence
  source 1..2616: mol_type = other DNA
atggaaaggtacaaggccctggaacagctactgactgagctggacgacttcttaaaaatcctagatcaggagaacctgtcctcgacggccctcgtcaaaaagagctgcctggctgaactgctgcgcctctacaccaaaagctcctcgtcagacgaagaatatatctacatgaataaagtgaccataaataaacagcagaacgccgagtctcaagggaaggcccctgaggaacaaggactgctcccaaacggagaaccttctcagcacagcagcgcgccacaaaaaagcctccctgatcttccccctcctaagatgaggattctaacccttggacagatctcaggcgctcagtccttctcaccagacggaacccatttgaccggtactgagttcctaggcggatggtcatggcggccaagccaaatccgcttgatgtccccaggaacccattggggggatttgacagctactgaaattccagaaagaaagcagctggctatccccaagaccgagagtccggaagggtattacgaggaggctgaaccctacgatacctcactgaacgaggatggtgaagccgtcagcagctcctacgagagttacgacgaggaggatggaagcaagggtaaatctgctccctatcaatggccctcgcccgaggcgggtatcgagttgatgcgggatgcacgaatatgtgcattcctctggcggaaaaaatggctgggccagtgggcgaaacagctgtgtgtgattaaggataatcgcctgctctgctacaagagtagcaaggatcactctccccaactcgacgtgaatctgctgggttcatccgtcatccacaaggaaaaacaggtgaggaaaaaagagcacaaattaaaaattactcccatgaatgccgatgttatcgtgcttgggcttcagtctaaagatcaggctgaacagtggttgcgcgtaatccaggaggtaagtggtctcccatctgagggggcttctgaggggaatcagtacacaccagatgcacagcggttcaactgtcagaaacccgacattgcggaaaagtatctgtctgcgtccgagtatggctctagcgtcgacggccaccccgaagtgccagagaccaaggacgtgaagaaaaaatgtagcgctggtctaaagctttcaaacctgatgaatctgggtagaaagaagtccactagtctggagccagtggagaggtccctggaaacgtcctcctatctgaacgtgctggtgaattctcaatggaaatctcgttggtgtagcgtgcgggataatcacttgcacttttaccaggatcgtaaccgtagcaaagtcgcccagcaacccctgtccctggtcggatgtgaagtggtcccagatccctcaccagaccacttgtatagttttcgcattttgcataaaggagaggaactggctaagctcgaagctaaaagctccgaagagatgggccattggctcgggctgttgctctccgagtcaggcagcaaaactgaccctgaggagttcacttacgactacgtggatgccgacagagtgtcctgcattgtgagtgccgctaagaactcgctgctactgatgcaacggaagttctccgaaccaaatacctatatagatggcttgcccagccaagatcgccaggaggaactctacgacgacgtggatttgtcagagcttactgcagccgtggagcctactgaggaggccacgcccgtagcagatgaccccaacgaaagagaatctgacagggtgtatttggacctcacaccggtgaagtcttttctgcatggcccttccagtgcccaagcccaggcctcaagtcctacacttagttgcctggataacgctaccgaagcactgcccgcagattccggtcctggtcccacacccgatgagccctgtatcaaatgccccgagaacctgggcgaacagcagttggagagtctggagcccgaggatccctctctgcgtatcactacagtgaaaatccaaaccgaacagcagagaatttccttccctccttcttgcccagatgctgtcgtggcaactcctccaggggcttcacctcctgtgaaagatcgcctcagagttacaagtgcagagattaaactcggcaaaaacagaacagaggcagaggtcaagcgttacaccgaagagaaagagagactggaaaagaagaaggaagagattagaggccacttggcacagcttcgaaaggaaaagcgtgagttaaaggaaacattgctgaagtgcacagacaaagaggttctggcaagtctagagcagaagctcaaggaaattgacgaggagtgtcggggagaagagtcccggagagtcgacctggaactgtccattatggaggtgaaagataacctgaaaaaagccgaagcaggacccgtcacgttagggacaacagtggatacaacccaccttgaaaatgtctcaccccgtcctaaggcagtgactcctgcgagcgccccagactgcacacctgttaattctgctacaaccttgaagaatcgacccctctcagtcgtggtgacaggaaagggaaccgttctgcagaaggccaaggaatgggaaaaaaagggggcaagttag

SEQ ID NO: 213086 - DNA, 1002 bp, synthetic construct
  misc_feature 1..1002: note = Description of Artificial Sequence: Synthetic coding sequence
  source 1..1002: mol_type = other DNA
atgtgtgaagaggagacgacggccttggtttgcgacaacggctctggattatgcaaggcaggattcgccggtgacgatgccccacgagctgtgttcccttctatcgtcggacgaccccgacatcagatttggcaccattctttctacaatgagctgcgagtggctcccgaggaacacccaactctcttgaccgaagcccctctgaaccctaaggccaatcgcgagaaaatgacccagattatgttcgagacatttaacgtgcccgctatgtacgttgccatccaagcagtcttaagcctatacgccagtggcagaacaacaggtatcgtcctcgactccggagatggtgtaacccataatgtccccatctatgaaggctacgcgctgccacatgcgattatgaggctggatctggccggtcgggatctgacggactacctaatgaaaattctgacagaacgcggatattccttcgttaccacagcagaacgggagattgtgagagacataaaagagaaattatgctacgttgctttggatttcgagaatgaaatggccaccgccgcaagtagcagtagcctggaaaagtcttacgagctgccagacggacaggtgattaccattggtaatgaacgatttcgatgccccgagacgctgttccaaccctctttcattggtatggagtctgctgggattcatgagactacgtataattctatcatgaagtgcgatatcgatattcgtaaagatttatacgcaaacaacgtgctgtctggaggaacaaccatgtaccccggaattgctgacagaatgcaaaaggaaataaccgccttagcgccttccactatgaagatcaaaatcattgccccaccagaacgcaaatactctgtttggataggtggctctatcctggcatctctgagcacatttcagcaaatgtggatatctaaacctgagtatgatgaggccggaccctcaatcgtccatagaaaatgcttttag

SEQ ID NO: 213087 - DNA, 1113 bp, synthetic construct
  misc_feature 1..1113: note = Description of Artificial Sequence: Synthetic coding sequence
  source 1..1113: mol_type = other DNA
atgtctctgcaccaatttttactggaacctatcacttgccatgcctggaacagggaccgcacgcagattgccttgtctccaaataaccacgaggttcatatttacaaaaagaacggcagccaatgggtaaaagcgcatgaactgaaggagcataacggtcacatcaccggaatcgattgggcacctaaatcagatagaatcgttacttgtggagccgacagaaatgcttacgtctggtcccagaaggatggtgtctggaaacctacgttggttattctgcggataaatagagccgctaccttcgtgaaatggagcccactggaaaataagtttgctgtggggagcggagccaggctgataagtgtttgttacttcgaaagcgaaaacgattggtgggtgtctaaacacattaaaaagcccatccgcagcacagtcctgtcattggattggcacccaaataacgttctcctcgctgcgggaagctgcgacttcaagtgcagggtgttttctgcctacataaaggaggtcgacgaaaaaccggcttccaccccctggggcagtaaaatgccattcggccagctaatgtcggagtttggcggttctggaacagggggttgggtgcatggtgtttccttttcagcttcagggagtcggctggcctgggtgagccatgactctaccgtaagtgtcgctgacgcctctaagagtgtgcaggtatccacactgaagacagaatttttgcctctgctgtcggtgagctttgtgagcgaaaattctgtggtggcagcgggacacgattgctgccccatgctttttaactacgacgaccgcggatgtctcacctttgtgtctaagctggatattcccaaacagtcaatccagcgcaacatgtcagccatggagagattcagaaatatggataaaagggcgactacagaggataggaataccgcacttgaaactctgcaccaaaatagtatcacacaggtgtcgatctacgaagtggacaaacaggactgtagaaagttttgcactactggtatagacggtgctatgaccatttgggattttaagacactcgagtcgtccatacagggtcttcgtattatgtag

SEQ ID NO: 213088 - DNA, 1038 bp, synthetic construct
  misc_feature 1..1038: note = Description of Artificial Sequence: Synthetic coding sequence
  source 1..1038: mol_type = other DNA
atgcacgagcggttcattcattgtttctgtatcgattgggcccctaagagcgaccgcattgttacttgcggcgctgacagaaatgcatatgtgtggtcccagaaagatggtgtgtggaaaccgacactggtcattcttagaattaacagggccgcaacctttgtgaagtggtccccactggaaaataagttcgccgtcggtagcggggcacgcctgatctccgtttgctattttgaaagcgagaacgattggtgggtctcaaagcatatcaagaagcccattaggagcactgtgcttagcctggattggcacccaaataacgttctgctggccgcaggcagctgcgactttaaatgtagagtcttctctgcttacatcaaggaagtcgacgagaaacccgcatcgacaccatggggaagtaagatgcccttcgggcaactcatgtcggagtttggagggagcggcactggcggttgggtgcacggcgtgtcattcagcgcctccggcagccgcctcgcctgggtgtcacacgatagcactgtgtcagttgccgacgcatcaaagagcgtgcaggtgtctaccctgaaaacggagtttctcccattactgagcgtgtctttcgtgtcagaaaacagcgtcgtcgcagcaggccatgattgttgtccgatgttgtttaattatgacgacaggggatgtctcaccttcgtaagcaagttggacatccctaagcaaagtattcagcgaaatatgagcgccatggaacgcttcaggaatatggataagcgggctacgaccgaggacaggaatactgcactcgagacactgcatcagaatagtatcactcaggtctcaatttacgaggtggataaacaagactgtcggaaattctgcacgacgggaattgacggcgctatgaccatctgggatttcaaggagccttccagacatgggctaccacagttgccaggtggggcacaccagctcccacgcctcgagcagggtccacaccccgactgtcatttaccacaacagccttag

SEQ ID NO: 213089 - DNA, 1119 bp, synthetic construct
  misc_feature 1..1119: note = Description of Artificial Sequence: Synthetic coding sequence
  source 1..1119: mol_type = other DNA
atggcataccacagttttttagttgaacctatctcttgtcatgcctggaacaaggaccgtacccagatcgctatttgtccaaataaccacgaggtccacatttacgagaaaagcggagctaaatggactaaggtccacgaactgaaggagcataatggccaggttaccgggatcgactgggctcctgagtctaatcggatcgtaacctgtgggacggacaggaacgcctatgtatggactcttaagggtcgcacctggaagcccaccctggtgattctgaggatcaacagagccgctaggtgtgtgagatgggcacctaacgaaaacaagttcgcggtgggatccggcagccgggtgatctcaatctgttacttcgaacaggaaaatgactggtgggtctgtaagcacataaaaaagcctatccgcagcacggtcctcagtcttgactggcatcctaacaacgtcctgttggctgcaggctcatgcgatttcaaatgtcgcatattcagcgcttacatcaaagaagtggaggaaaggcctgcccctacaccttggggtagcaagatgccttttggggaattaatgtttgaaagcagtagctcttgcggctgggtgcacggagtctgcttcagcgcctcgggctctagagtagcttgggtgtctcatgatagcacggtgtgcctggccgatgctgataaaaaaatggccgtggcaacactggctagtgagaccctacctcttcttgccctcacgttcattaccgacaactctcttgtcgccgctggacacgactgcttccccgtgctgtttacttacgacgccgctgccggtatgctgtcctttgggggaaggctcgatgtgccaaagcagtcaagccagcgaggtctcaccgcgagagagaggtttcagaacctggataaaaaggctagttccgaaggaggtaccgccgctggtgcaggtctggatagcctgcataagaacagcgtctcccaaatctccgtcctgtcaggtggcaaagccaagtgctctcagttctgtacgactggaatggatggcggtatgagtatatgggatgtgaagtccctcgagtcagccctgaaggacctgaaaattaaatag

SEQ ID NO: 213090 - DNA, 309 bp, synthetic construct
  misc_feature 1..309: note = Description of Artificial Sequence: Synthetic coding sequence
  source 1..309: mol_type = other DNA
atggcatatcacagtttcctggtggaaccaatctcatgccatgcatggaacaaggatagaacacaaatcgcaatttgccctaataatcacgaagttcatatttacgaaaagagtggcgctaagtggaccaaggtgcacgagttgaaggaacacaacgggcaagtcaccgggatcgactgggccccagagtcgaatcgaatcgtgacatgcggcactgatagaaatgcatatgtgtggacattaaagggccgtacctggaaacccacgctggtcatacttcggataaaccgtgcggctaggtgcgtgtag

SEQ ID NO: 213091 - DNA, 393 bp, synthetic construct
  misc_feature 1..393: note = Description of Artificial Sequence: Synthetic coding sequence
  source 1..393: mol_type = other DNA
atggcttatcactcctttctagtcgagcccatctcgtgccatgcatggaataaggaccgcactcaaatcgccatttgcccgaataaccatgaggtccacatttatgagaagtccggcgctaaatggaccaaggtgcacgaactcaaggaacacaatggacaggtaacagggattgattgggctcctgaatcgaataggatcgtcacctgtggaactgatcggaacgcctatgtgtggacactcaaaggtagaacctggaagcccacactcgtgattctgcgaattaacagggcggctaggtgtgttcggtgggctcctaacgagaataagtttgcagttggctccggctcccgggtgatatccatttgctactttgagcaagagaacgactag

SEQ ID NO: 213092 - DNA, 252 bp, synthetic construct
  misc_feature 1..252: note = Description of Artificial Sequence: Synthetic coding sequence
  source 1..252: mol_type = other DNA
atggcctatcacagttttctggttgaacctataagttgccatgcctggaacaaagaccggacccagatcgctatctgccctaacaaccatgaagtgcacatttacgaaaaatcaggtgctaagtggaccaaggttcatgagctcaaagagcataatggacaggtgacgggaatcgattgggccccagagtcgaatcgtatcgttacctgtggtacagatagaaacgcatacgtctggactcttaaaggctag

SEQ ID NO: 213093 - DNA, 402 bp, synthetic construct
  misc_feature 1..402: note = Description of Artificial Sequence: Synthetic coding sequence
  source 1..402: mol_type = other DNA
atggcataccattcattccttgtggaacccatctcctgtcatgcctggaataaggatagaactcagattgccatctgtcccaataaccacgaggttcatatctatgaaaaaagtggggctaaatggaccaaagttcatgagctgaaggaacacaatggccaggtgaccggaatcgactgggcccctgagtctaataggattgtgacatgtggcactgatcgtaacgcctacgtctggacccttaaggggagaacatggaagcccacccttgtaattctccgcatcaatcgcgctgccagatgcgtccgatgggccccaaatgaaaacaaattcgctgtgggcagcggctctagggtcatttccatctgctactttgagcaagagaacgactggtgggtatag

SEQ ID NO: 213094 - DNA, 66 bp, synthetic construct
  misc_feature 1..66: note = Description of Artificial Sequence: Synthetic coding sequence
  source 1..66: mol_type = other DNA
atggcataccatagctttctggtcgagccaatcagttgtcacgcctggaataaagacagaacttag

SEQ ID NO: 213095 - DNA, 402 bp, synthetic construct
  misc_feature 1..402: note = Description of Artificial Sequence: Synthetic coding sequence
  source 1..402: mol_type = other DNA
atggcgtaccacagctttctagtggagcccatatcttgccatgcttggaataaggacagaacacaaatcgctatctgtcccaataaccacgaggtccatatttatgagaagtcaggggctaagtggacaaaagtgcatgaacttaaagagcacaatggtcaggttactgggatcgactgggcgcctgaaagcaatcgaatagtgacctgcgggaccgatcggaatgcttatgtatggactcttaaggggagaacatggaagcctactcttgttatcctccgaatcaatagggcggcacggtgcgttcgctgggccccaaacgagaacaaattcgccgtcgggtctggctccagggtgatctcgatctgctactttgagcaggagaacgactggtgggtctag

SEQ ID NO: 213096 - DNA, 327 bp, synthetic construct
  misc_feature 1..327: note = Description of Artificial Sequence: Synthetic coding sequence
  source 1..327: mol_type = other DNA
atggcatatcactcatttctagtcgaacccatttcatgccatgcatggaataaagaccggactcagatcgcaatttgcccgaataatcatgaagtccacatctacgagaagtcaggcgctaaatggaccaaagtgcacgagctaaaggagcataacgggcaggtgacaggcatcgattgggcacctgagagcaaccgaatagtgacttgcggcacagaccgcaacgcttacgtctggactctgaaagggaggacatggaaacccacactggtgatattgcgcataaatagagccgcacgttgcgtccgctgggctcccaatgagtag

SEQ ID NO: 213097 - DNA, 1119 bp, synthetic construct
  misc_feature 1..1119: note = Description of Artificial Sequence: Synthetic coding sequence
  source 1..1119: mol_type = other DNA
atggcttatcatagcttcctggttgaaccgatctcctgtcacgcgtggaataaagaccggacacagatcgctatttgccctaataaccacgaagtgcatatctacgagaaaagtggtgccaagtggactaaggtgcacgagctgaaggagcacaacggccaggtcactggcatcgattgggcacctgaatctaaccggatagttacatgcggtaccgatagaaacgcttacgtctggacccttaagggtaggacctggaagccaacactggttattctgcgcatcaatagggctgcgcgatgtgtgagatgggcccctaatgagaacaagttcgccgtcgggtcaggcagtcgggtaatcagcatatgctatttcgaacaggaaaacgactggtgggtgtgcaaacacataaagaagcccatcagatctacagtgctctctctcgactggcaccccaataatgttcttctagccgcaggttcatgcgactttaaatgccgcattttctctgcatacatcaaagaagtcgaggaacgacccgcacctacaccttggggcagcaagatgcctttcggggagctgatgttcgagagcagtagcagttgtggatgggtgcacggggtttgctttagtgccagcggcagtagagtggcttgggttagccacgattctaccgtgtgccttgccgacgctgataagaagatggctgttgcaacgctagccagcgagactttaccactgcttgccttgacttttatcaccgacaatagccttgtcgccgcaggtcacgactgtttcccagtgctatttacctacgatgccgctgccggaatgctgagtttcggagggaggctggacgtgccgaagcaaagctcccaaagaggtctcaccgcgcgagagcggtttcagaacctcgacaaaaaggctagcagcgagggcggtaccgctgctggagccggacttgattccctgcataaaaactcagtgagccagatatccgtgctaagcgggggtaaggcaaagtgtagtcaattctgtaccaccggcatggatgggggaatgtccatctgggacgttaaaagtctagagtcagcgcttaaagatctgaaaattaagtag

SEQ ID NO: 213098 - DNA, 387 bp, synthetic construct
  misc_feature 1..387: note = Description of Artificial Sequence: Synthetic coding sequence
  source 1..387: mol_type = other DNA
atggcttatcatagttttttggtggaacctatctcctgccacgcctggaacaaagaccgaacgcaaattgcaatttgcccaaacaaccacgaggtccatatatatgaaaaatctggagcaaagtggaccaaagtgcacgagttaaaagaacataatggtcaagtgactgggatcgactgggccccagaaagtaacaggattgtgacttgcggcaccgatcgcaacgcctacgtctggaccctcaaaggccgaacctggaagcccaccctggttatccttcgcattaaccgcgcagccaggtgtgtgcgctgggctcccaatgaaaacaagttcgccgtgggctctggtagtcgggtcatcagcatctgttacttcgagcaggagtag

SEQ ID NO: 213099 - DNA, 402 bp, synthetic construct
  misc_feature 1..402: note = Description of Artificial Sequence: Synthetic coding sequence
  source 1..402: mol_type = other DNA
atggcataccactcgttcctcgtggaacctattagttgccacgcatggaacaaggaccggactcagatcgcaatctgcccaaataatcatgaggtgcacatttacgaaaagtcaggggctaagtggactaaagtgcacgagctgaaagaacataacgggcaggtgactggtattgactgggcgcctgagtccaatcggattgtgacttgtggtacagatcgtaacgcttacgtctggaccctcaagggcagaacgtggaaacctacgcttgtgatcctgcggattaaccgcgctgcgcgttgcgtgcggtgggcaccgaacgagaataagttcgctgttggatctggctcacgggtgatttcaatctgttacttcgagcaggagaatgactggtgggtgtag

SEQ ID NO: 213100 - DNA, 903 bp, synthetic construct
  misc_feature 1..903: note = Description of Artificial Sequence: Synthetic coding sequence
  source 1..903: mol_type = other DNA
atgatcctcctcgaggtgaacaataggattatcgaagagacgctagccctgaagtttgagaatgcggcagccggtaataagccggaggctgtggaggtgaccttcgcagatttcgatggggttttataccacatttccaatcctaacggagacaagacaaaggtcatggtgagtatttctctgaaattctataaggagctccaggcacacggtgctgacgagctcttgaaacgggtatacggaagctttctggtaaatcctgaaagtgggtacaatgtgtcacttctctacgaccttgagaatctccccgcaagcaaggatagtattgtgcaccaggcaggtatgctaaaaagaaactgttttgcctcagtatttgagaagtactttcagttccaggaagaaggcaaagaaggcgagaatcgggctgtcatccattacagagacgacgagaccatgtacgtcgagagcaaaaaagaccgggttaccgtggtcttcagtacggtttttaaggatgatgacgacgtggtgatcggaaaggtattcatgcaggagttcaaggaggggagaagagcctcgcataccgctccccaggttctgttctcacaccgtgagccacctctggagcttaaagacaccgacgccgctgtgggcgataatatcggctacattacatttgtcttattcccaaggcacacgaacgcaagcgcacgggacaatacaataaacctgattcacacctttagggactatttacactatcacattaaatgctctaaagcctacatccacacaaggatgcgggcaaagactagcgatttccttaaggtgctaaatcgggcaaggccagacgccgaaaaaaaagaaatgaagacaattacaggaaaaacctttagcagcagatag

SEQ ID NO: 213101 - DNA, 903 bp, synthetic construct
  misc_feature 1..903: note = Description of Artificial Sequence: Synthetic coding sequence
  source 1..903: mol_type = other DNA
atgattctcttagaggtcaacaataggataatcgaagaaacccttgcattgaagttcgagaatgcggctgccggtaataagcctgaagccgtagaggtgacctttgcggattttgatggtgtgttataccacatatccaatcctaacggcgacaagacgaaggttatggttagtataagtctcaaattctataaggagctgcaggcacacggtgcagatgagcttttgaagagagtatatggcagctttttagtcaaccctgagtctgggtataatgtaagtcttttgtacgacctggaaaatctaccagctagtaaagactcgatcgttcaccaagctggtatgctgaagaggaactgctttgcatcagtgttcgagaagtacttccagttccaggaagagggaaaggagggggaaaatcgcgctgtgatccattaccgcgatgacgagaccatgtatgtggagagcaagaaagatcgggtcacagtcgtcttttctactgttttcaaggacgatgatgacgtggtaatcggaaaagtttttatgcaggaattcaaagaggggagaagagctagccacactgcacctcaagtgctatttagccaccgtgagcctccactggagctcaaagacacagacgctgctgttggcgacaatattgggtacattacttttgttctctttcctagacatacaaacgccagcgcccgagacaacactatcaatcttatccacacgtttcgcgattacctccactaccacattaaatgcagtaaggcgtacatccacacaaggatgcgtgctaaaacctctgattttcttaaggtacttaatagagccagaccagatgccgagaaaaaagaaatgaaaacaattaccggcaagaccttcagtagtcgatag

SEQ ID NO: 213102 - DNA, 273 bp, synthetic construct
  misc_feature 1..273: note = Description of Artificial Sequence: Synthetic coding sequence
  source 1..273: mol_type = other DNA
atgatattgctggaggtcaacaaccgcataattgaagaaacactggcactgaaattcgagaacgccgctgctgggaacaagcccgaagcagtcgaggtgacattcgctgactttgacggcgtgctgtaccacatctcaaaccccaatggcgacaaaacaaaggtgatggtgagcattagtctgaagttttacaaggaactgcaggcccatggggcagatgaattacttaaaagagtgtatggatcctttctggtgaaccccgaaagcggctag

SEQ ID NO: 213103 - DNA, 864 bp, synthetic construct
  misc_feature 1..864: note = Description of Artificial Sequence: Synthetic coding sequence
  source 1..864: mol_type = other DNA
atgtgcgatgaagacgagactaccgccctggtgtgtgacaacggcagtgggctggtgaaagcaggtttcgctggggatgatgctccacgcgcagtgttcccatcaattgtgggaaggcccagacaccagggcgttatggtgggcatgggccaaaaagatagctacgtgggggatgaggcccagagtaaacgagggatccttacattaaaatacccaatcgagcacggtattattaccaactgggatgatatggagaagatttggcatcacacattctacaacgagcttagggtcgctccagaagagcacccaacgttactgaccgaagcaccacttaaccctaaggcaaatagggagatagtacgtgatattaaggagaagctgtgctatgtggcgctcgatttcgagaatgagatggctaccgccgcttcatcgagtagtctcgagaaatcgtatgaactgcctgatggccaggtgattactattgggaacgagcgctttcggtgtcccgaaaccctcttccaaccctctttcattgggatggaaagcgctggaattcacgaaactacttataattccatcatgaaatgtgacatagacatccggaaggatttgtacgccaacaatgttatgagtggcggtactacgatgtaccctggtattgccgaccggatgcagaaagagataacggctcttgcccctagcaccatgaaaattaaaatcattgctcccccagagcgcaagtactcagtctggatcggcggttcaatactggcctccctaagtaccttccaacagatgtggattacaaagcaggagtacgacgaagcaggaccttctatagttcataggaaatgtttttag

SEQ ID NO: 213104 - DNA, 765 bp, synthetic construct
  misc_feature 1..765: note = Description of Artificial Sequence: Synthetic coding sequence
  source 1..765: mol_type = other DNA
atgtgcgatgaggacgagactacagcactggtgtgtgataacggaagcggactggtcaaagctggattcgcaggcgacgacgctcccagggccgtttttccatctattgtagggaggcccaggcatcaaggcgtgatggtggggatgggccagaaggactcatacgttggggatgaagcccaatctaaacgcggaatcctgacattgaagtatcctatcgagcatgggattattaccaattgggacgatatggagaaaatttggcaccacacattttacaacgagctgagggttgcaccagaggaacatccaacactgctcaccgaggcacccttaaatcccaaagccaacagggaaaaaatgactcaaatcatgttcgagacgtttaatgtgcccgcaatgtacgttgctatccaagccgttctttcactctacgcgtccggacgcacgacagggattgtcctggactccggcgatggcattatgaagtgcgatatcgatattaggaaggacttgtatgctaacaacgttatgagtgggggaacaacaatgtatcccggaatcgccgaccggatgcagaaagagattaccgctctggctccctcaacaatgaagattaagattattgcccctccagaacggaaatacagcgtttggattggaggatcaatcctcgctagtctttccacattccagcaaatgtggatcaccaagcaagaatacgatgaagccggtcctagcattgtgcaccggaaatgcttctag

SEQ ID NO: 213105 - DNA, 1029 bp, synthetic construct
  misc_feature 1..1029: note = Description of Artificial Sequence: Synthetic coding sequence
  source 1..1029: mol_type = other DNA
atgtgcgatgaggatgagactacagctcttgtgtgtgataacggatctggactcgtgaaagccggatttgccggagatgacgcacccagagctgtgtttccatcgatcgtggggcgtccccgacaccagggggttatggtggggatgggccagaaagactcatatgttggagacgaagctcagtccaaacgcggaattctcacccttaaatatcccatagaacacgggattattacgaaagccaacagggaaaaaatgacgcagataatgtttgagacattcaatgtgccggctatgtatgtagcaatacaggcggtgctgagtctgtatgcttcagggcgaacgactgggattgtcctggattccggagatggtgtgacacataacgttcctatttacgaaggctacgcgctgccgcatgcaattatgaggcttgacctggccggtagagacctgacagactatctgatgaagatccttaccgagagagggtacagttttgtgacaaccgcggaacgggagattgttcgcgacatcaaagagaagctgtgttacgtggctctggattttgagaatgaaatggccacagctgccagctcatcgagcctcgagaagtcttatgagctgccagacggacaggtgataacaattggtaatgaaaggtttcggtgtcctgaaacactgttccagcctagcttcattggaatggaatccgccggaatccatgagactacatacaacagcattatgaagtgcgatatagatatcaggaaagacctctacgcgaacaatgtcatgagtgggggaaccactatgtaccccggaatcgccgataggatgcagaaagagattaccgcactggccccttctactatgaagatcaagattattgcgccacccgagcgcaagtacagcgtttggatcggcggaagtatcttagcaagcttatctacgttccagcagatgtggatcaccaaacaagaatatgacgaggctgggccttccattgtacatcgaaagtgcttctag

SEQ ID NO: 213106 - DNA, 870 bp, synthetic construct
  misc_feature 1..870: note = Description of Artificial Sequence: Synthetic coding sequence
  source 1..870: mol_type = other DNA
atgtgtgatgaggatgaaactaccgccttggtctgtgacaacggctctggcttggtgaaggccggattcgcaggcgatgatgcgcctcgcgctgtgttcccctcaatcgtaggcagaccccgacatcagggagtgatggtggggatgggtcagaaagacagttacgtaggagacgaagcccaaagtaagcggggaattctcactcttaagtatccgattgagcatggtattattaccaactgggacgacatggaaaaaatttggcaccacaccttttacaatgagttgagagtcgcccctgaagagcacccaacactgctgacagaagctccactgaatccaaaggccaaccccgagcgcgagattgtgagggatatcaaagagaagctgtgctacgtggccttggatttcgagaacgaaatggccaccgccgcttcatcatcctctctagagaagagttacgaattgccagatgggcaagttatcacaatcgggaacgagcgttttcggtgccctgagacgctctttcagccctcattcatcggtatggaaagtgcaggcatccacgaaaccacctacaatagcattatgaagtgcgatattgacatacgaaaggatttatacgcaaataatgtgatgtctggcggtaccaccatgtaccctgggattgctgataggatgcagaaggaaattacggccctcgcgcctagcacaatgaagattaagattatcgcccctcctgagcggaaatatagcgtctggattggcggatctattctggcttcactgtccacatttcagcaaatgtggatcactaaacaggaatacgacgaggctggcccatctatcgtacatagaaaatgcttctag

SEQ ID NO: 213107 - DNA, 1134 bp, synthetic construct
  misc_feature 1..1134: note = Description of Artificial Sequence: Synthetic coding sequence
  source 1..1134: mol_type = other DNA
atgtgtgacgaggacgagacgaccgcgctggtttgcgataatggatccggcctcgtcaaagccggtttcgccggtgacgatgcccctagggcggtgtttcctagcatcgtcggaaggccgcgacaccagggagtcatggtgggcatgggccaaaaagacagctatgtaggggatgaagcccaaagtaaacggggaatactcactttgaaataccccatagaacacggtatcattacaaactgggacgacatggagaaaatttggcaccacacattctacaatgaactgcgggtcgctcccgaggagcatcctaccttgctcactgaagcaccgctcaatccaaaagcaaaccgggaaaaaatgacccagatcatgtttgagactttcaacgtccccgctatgtacgtagctattcaggccgttctctccctgtacgcttcaggacggacaaccggcatcgttctggactccggcgacggcgtgacccacaacgtccccatttatgagggatatgcactgccacatgccattatgagactggatctcgcgggacgagacttgacagattatttgatgaaaatattgacagaaaggggctactctttcgtgacgaccgccgagcgggagattgtgagggatatcaaggagaagctgtgctacgtggctctggactttgaaaacgaaatggctactgctgccagcagctctagcctggagaaaagctacgaactgccagatggccaggtgattactatcgggaacgagcggttccggtgcccagaaactttattccaacctagtttcattggcatggaaagcgccggaatccatgaaaccacatataactctattatgaagtgcgacatcgacatcaggaaagacctatacgctaacaatgtgatgtccggcggtactacgatgtaccccggaatcgctgacaggatgcaaaaggagatcactgcgctagccccaagcacaatgaagatcaaaataatagcgcctcccgaaagaaagtatagcgtatggatcggcggatcgatattggcctccctctctactttccaacagatgtggattaccaaacaggagtacgacgaggccggtcccagcattgtccataggaagtgcttttag

SEQ ID NO: 213108 - DNA, 1146 bp, synthetic construct
  misc_feature 1..1146: note = Description of Artificial Sequence: Synthetic coding sequence
  source 1..1146: mol_type = other DNA
atggccccaggtgagaaggaaagcggagaagggccagcaaaaagtgccctacggaagattcgaaccgcaacgcttgtgatctcactcgctcggggatggcagcagtgggctaacgagaacagcattcggcaagcacaagaacctacggggtggctgccagggggtactcaagactctccccaagccccaaaacctatcaccccccctacgtctcaccagaaggcacagtccgcaccgaagagtcctcctaggctgccagaagggcacggcgatggccagagttctgagaaggcccctgaggtatcacacattaaaaaaaaggaagtcagtaagacagtggtgagtaagacctacgagaggggtggcgatgtctcacatctatcgcacagatatgagagggacgccggagtgctcgagcccggtcagccagagaatgatatcgaccgaatcttgcactcacacggtagccccactaggcgcagaaaatgtgctaacctggtgtccgaattgaccaagggatggcgtgtgatggaacaagaggaacccacttggcggtcagatagtgtcgacactgaggactctggctatggaggcgaagccgaagagcggccagagcaggacggtgtacaggtggccgtggttcggattaagcggcctcttccctcacaggtgaatcgatttacagagaagctgaattgcaaggctcagcaaaaatactcccctgtgggaaatctcaagggtcggtggcagcaatgggccgacgagcatatccaaagccagaaattaaacccctttagtgaggaattcgactacgagttagccatgagtacacggctccacaagggggacgaaggatacgggagaccaaaggaggggactaaaacagcagagcgagctaagcgtgccgaagagcacatctatagagaaatgatggatatgtgtttcattatatgtacaatggcacgacaccggcgtgacgggaagattcaggtaacatttggtgatctattcgaccgctatgtacgtatcagcgataaagtagttggcatactaatgcgggcacgtaagcatggtctggttgattttgagggggaaatgttgtggcagggcagagacgaccacgttgttatcacactcctaaagtag

SEQ ID NO: 213109 - DNA, 2685 bp, synthetic construct
  misc_feature 1..2685: note = Description of Artificial Sequence: Synthetic coding sequence
  source 1..2685: mol_type = other DNA
atgaatcagatagagcctggggttcagtataattatgtatacgacgaagacgaatacatgatccaggaggaagagtgggatagagacttactgcttgaccctgcctgggagaagcagcagagaaagacctttaccgcctggtgtaacagtcacctgcgaaaggcaggcactcaaatcgagaatattgaggaagacttccggaatgggctgaaactcatgctgctccttgaagttatatctggagagaggttacccaaacccgacaggggaaagatgaggttccacaaaattgctaacgtgaacaaagccttggattacattgcatccaaaggcgttaaactggtgagtattggagcagaggaaattgttgacggcaatgttaagatgacgttggggatgatctggacaatcattcttcgcttcgctatccaagacatctccgtggaggaaaccagcgctaaggagggactactgctgtggtgtcagcgaaagaccgcgccataccgcaacgtcaacatccagaactttcatacctcctggaaggacggccttgggttgtgcgccctgatacaccgtcatcgcccagacctgatcgactattcgaagctaaacaaggatgatccgataggcaacatcaacctggctatggaaatcgctgagaaacacctcgacataccgaaaatgctcgacgccgaagatattgtgaatacacccaaacctgacgagcgcgcaatcatgacctacgtgtcatgcttctatcacgcctttgctggagccgaacaggcagagaccgcggctaacaggatctgtaaagtgttggctgttaaccaggagaacgaacggctgatggaggagtacgaacgactcgcctctgaacttttggaatggattcgacgcacgattccatggttagaaaaccgcacgccagagaagaccatgcaagccatgcagaagaaactcgaggattttcgggactatcgtcggaagcacaaaccaccaaaagtacaggaaaagtgccagctcgagatcaacttcaataccctccagacgaagttacggatctccaatagaccggctttcatgccaagtgaggggaagatggtgagcgatatcgcgggtgcatggcagcgtttggagcaggcagaaaaaggttacgaggagtggctgctgaacgagatccggaggttggagcggctggagcacctggccgagaaatttagacagaaagccagtacacacgaaacatgggcctacggcaaagagcagatcctgctgcaaaaagactacgaaagcgcttccttgacggaggttagagccttactccgtaaacatgaggcattcgaatctgatctggctgcccatcaggaccgcgtggaacaaattgctgctatagcccaggagctgaacgagctggattaccatgacgctgtgaatgtcaatgatcgctgccaaaagatctgcgaccagtgggatcggctaggaacactgactcaaaagaggcgggaagctcttgaacgaatggagaaactgctcgagactatcgaccagctacatctagagttcgccaaacgggcagctccttttaataactggatggaaggagcaatggaagacctgcaggatatgtttatcgtgcattcgatcgaggagatacagagcttaatcactgcgcatgagcagttcaaagcaacactcccggaggccgacggggagagacaatccattatggccatacagaacgaggttgagaaagtcattcagtcttataacatccggattagctcttccaatccatacagcacagttaccatggacgagttacgcactaagtgggataaagtgaagcagcttgtgcctattcgcgatcaatcactgcaggaggaactagctcgccaacatgcgaatgagcgcctgaggcgtcagtttgcagctcaggcaaacgccatcggcccatggatacagaataaaatggaagagattgcaagaagctccattcagataaccggggcactggaagatcaaatgaatcagcttaaacaatacgaacataacatcataaattataaaaacaacatcgacaagctggaaggtgatcaccagctcatccaggaagcgctggtttttgacaataaacataccaattatacaatggagcacatccgagttggctgggagctcctcctcaccactatcgcccgaaccatcaatgaggtagagacacaaatacttacacgcgacgccaaggggatcacgcaggaacaaatgaacgaattcagggcgagtttcaatcatttcgacaggcggaaaaacgggctgatggaccacgaagattttagggcgtgcttgatctctatgggctacgacctgggagaggcagagtttgctcgcatcatgacactcgtcgacccaaacggacaagggacggtaacttttcaatcatttatcgattttatgaccagggagaccgcagacacagataccgccgaacaggtcattgccagtttccgaatcctggcctctgacaagccttatatcttggctgaggaactccgcagggagcttccacccgatcaggcacagtactgtattaagcggatgccagcctattccggcccaggttccgtgcccggagcactggattatgccgcttttagctcggccctgtatggtgagtctgatctgtag

SEQ ID NO: 213110 - DNA, 2685 bp, synthetic construct
  misc_feature 1..2685: note = Description of Artificial Sequence: Synthetic coding sequence
  source 1..2685: mol_type = other DNA
atgaatcaaatcgaaccaggagtccaatataactatgtgtacgatgaggatgaatacatgattcaggaagaggagtgggatcgagatctgctcctcgaccccgcatgggaaaaacagcaacggaaaacattcacagcctggtgcaattcccacttaagaaaagccggtacccagattgaaaatattgaggaggatttcagaaacgggcttaagctcatgctcttactggaggttatcagcggcgagcgtctgcccaagccggatcggggaaagatgagatttcataagattgcaaacgtgaataaagcattagattatattgcttctaagggagtgaagctggtatctatcggcgcagaggagattgtggatggaaacgtgaaaatgacccttggaatgatttggacaattatcctccggttcgccatccaggatatttccgtggaggagaccagtgcaaaagaaggtttgttgctttggtgccagcgcaaaactgctccctatagaaatgtgaatatccagaactttcatacttcatggaaagacgggctaggcctatgcgcattaatccaccgccaccgtcctgatttaattgactactcaaagttaaacaaggacgatcctatcggaaatattaacctagctatggagatagctgagaaacacctcgacattccgaagatgcttgacgcggaggacttagtgtacacagcacggcctgatgaaagagcgattatgacttacgtgagctgttactatcatgcctttgccggtgcccagaaagctgaaacggctgccaatagaatttgtaaggtgctcgccgtaaatcaagagaacgagcgactcatggaggaatatgagcgtctcgccagcgaactccttgagtggatccggagaaccatcccatggctagagaacagaacgccagagaaaaccatgcaagcaatgcagaaaaagttagaagactttagagactacaggagaaagcacaagccgccaaaagtacaagagaagtgtcagttagaaattaactttaatactttgcagaccaagttgcggatatccaaccgtcccgctttcatgccatcagagggcaagatggtcagtgacatagccggagcatggcagcgcttggaacaagcagaaaaggggtacgaggaatggctgctgaatgagatccgcaggttggagagattagagcacctcgctgaaaagttcaggcagaaggctagcactcacgaaacatgggcttacggcaaagaacagattcttcttcagaaggattatgagtcagccagtctgacagaggtccgggctctgctcaggaagcatgaagcgttcgagtccgacctggccgcacatcaggaccgagtggagcagatcgcggctatcgctcaggagctcaacgaactggattaccatgatgctgtcaacgtaaatgatcggtgccagaagatttgcgatcagtgggacaggttgggtaccctgactcagaagaggcgcgaagctctcgagaggatggaaaagctactcgaaacaattgatcagcttcatcttgagtttgccaagcgcgcagccccatttaataactggatggagggagccatggaggacctgcaggacatgttcatcgtgcattctatcgaggagatccagtcgttgataaccgctcatgaacaattcaaggccacattacccgaagcggacggtgagcgccagtcaattatggctatccagaacgaagtagaaaaagtcattcaatcatacaacatccgaatttcgtcaagcaatccgtatagcactgtaactatggacgagctccgcacaaagtgggacaaggttaaacagctggtcccaatccgtgatcagtccttgcaggaggagctcgctaggcagcacgccaacgagagactgaggcgacagttcgccgctcaggccaatgccatcggcccatggattcagaacaagatggaggagatcgctcgctcatccattcaaatcacgggggctctagaagaccaaatgaaccagttgaagcaatatgagcacaacatcattaactataagaacaacatagataaactcgaaggcgaccaccagcttattcaggaagctctggtattcgacaataagcataccaattatactatggagcacattagggtgggctgggagctgttactgacaactatcgccaggaccataaatgaagtcgaaacgcagatcctcacgagagatgcaaaaggaatcacacaggagcagatgaatgaatttcgtgcctcttttaatcacttcgacagaaggaaaaatggtctgatggaccacgaggattttagggcatgcctgatctctatggggtacgacctgggcgaagccgagtttgcccgtatcatgacattggtggaccctaatggccaggggactgtgacatttcagtccttcattgactttatgacacgcgagaccgcagacaccgacacggcagaacaggttattgccagtttcagaattcttgcgtcagataagccatacatacttgctgaagaattgcggcgagaattacccccagatcaggcacagtattgcattaagagaatgcccgcatatagcggcccaggatctgtcccaggggcacttgactatgccgctttctcctccgccctgtacggggaaagcgatctttag

SEQ ID NO: 213111 - DNA, 1992 bp, synthetic construct
  misc_feature 1..1992: note = Description of Artificial Sequence: Synthetic coding sequence
  source 1..1992: mol_type = other DNA
tcgaccctctcaagtgttgaagggcctccggaatcctctacctgctcttatcaggagatgcgtcggtcttccgtgaacagttccgcaatggccgagactgctgccaacaggatctgcaaggttctggccgtgaatcaggagaacgagcgcttgatggaagaatacgagaggcttgccagcgagctgctcgagtggatccggaggaccattccttggctggagaacagaacacctgagaagacaatgcaggctatgcagaagaagctggaggatttcagggactaccgcaggaaacataaaccaccgaaggtgcaggaaaagtgccagctggagatcaactttaacacgcttcaaactaaattgaggataagtaataggcccgcttttatgccctctgaggggaagatggtcagcgacatcgcaggggcttggcaacgattagagcaggctgagaaaggatacgaagaatggcttcttaacgagatacgtcggcttgagcgactggaacatctggcagagaagttcagacagaaagccagcacccacgaaacttgggcctatggtaaggagcagatcctgttacaaaaggactatgagagcgcttcactcaccgaagtgcgcgcacttcttagaaagcatgaagcctttgaatcagacctggcggcacatcaggacagggtggagcagattgctgcaatcgcacaggagctgaatgagctcgactaccacgacgcagtaaacgtgaacgatcggtgtcaaaagatctgtgaccaatgggaccggctgggaactctaacacagaagcgcagggaagcgctggagcgaatggaaaaattgcttgagaccatcgaccagctgcatctagaattcgccaaaagagcagcgccattcaacaactggatggaaggtgctatggaggaccttcaggatatgtttatcgtccattcaatcgaagagatccagtcccttatcacagcacacgaacagttcaaggccactctccctgaagctgacggagaaagacagagtattatggcaatccagaatgaagtcgaaaaagttatacaaagctacaacatccggattagtagttctaatccatattcaactgtaacaatggacgaactgaggactaaatgggataaggtcaaacagttggtgcctattcgtgatcagtctcttcaagaagaactcgcaagacagcacgctaacgaaaggcttcgcaggcagtttgccgctcaggccaatgccatcggaccatggattcaaaacaaaatggaagaaatagcacgttcttctatccagatcacaggagctttagaagaccagatgaatcagttgaaacagtacgagcataacattattaactacaagaacaacatcgataagctcgagggtgaccatcaactgattcaggaagccctggtctttgataacaagcacacaaactacacaatggagcatatccgcgtggggtgggagctgctccttacgactattgcacggaccatcaacgaggtggaaacccagatcctgacgagagatgccaaaggaattacccaggaacagatgaatgagttccgggcaagttttaatcactttgatcgaaggaaaaacggtttaatggaccatgaagattttcgggcttgcttgattagcatgggctacgacctcggagaagctgagtttgcgaggataatgacattggtcgatcctaacggacagggcacagttacatttcaaagcttcatcgacttcatgacccgcgaaactgcggacacggacacagccgagcaggtgattgcatctttccgcattttggcgtctgacaagccttacattctggcggaggagttaagaagggaattaccaccagaccaggcccaatactgtatcaagaggatgcccgcatactctggccctggttccgtgccaggagctttggattacgcggctttttcttcagcgctctacggcgagagcgacctgtag

SEQ ID NO: 213112 - DNA, 1167 bp, synthetic construct
  misc_feature 1..1167: note = Description of Artificial Sequence: Synthetic coding sequence
  source 1..1167: mol_type = other DNA
atggagaagctgctggagacaattgaccagctgcacctggaatttgccaagagggcggctccttttaacaattggatggagggcgctatggaggatctgcaggatatgtttatcgtccactctattgaggagatccaatctctgattacagcacacgaacagtttaaagcaacactgcccgaagcggacggcgaacgccagtctatcatggccatccaaaacgaggtagaaaaggtaattcagtcctataatataagaatatccagcagcaacccttactcgacggtcacaatggatgaattaaggacgaagtgggacaaagtaaaacaattggttccaatcagagatcagtcactgcaggaagagttggcccgtcagcacgctaatgagagactccgcaggcaattcgctgcccaagccaacgccatcgggccatggatccagaacaagatggaagaaatagcgagaagcagtatccaaatcaccggggctcttgaagatcagatgaaccagctcaaacagtacgagcacaacatcatcaattataagaataacatagacaaactcgagggcgatcatcagttgatacaagaagctctagtctttgacaacaagcataccaattacactatggagcatataagggtggggtgggagcttctgctgacgacaattgcccgtacaatcaacgaagtcgaaacgcaaattctgactcgggatgccaaaggaattacccaagagcagatgaacgaatttcgcgcatcatttaaccactttgaccgtcggaaaaacggtcttatggaccatgaggatttccgtgcttgtctaattagtatgggatatgatctcggagaagccgagtttgccaggatcatgacactggtggatcctaacggacaaggcaccgtcactttccagtcatttattgatttcatgacacgagaaactgctgacactgatacagcggagcaggtcattgcaagctttcggatccttgctagtgataagccatatatcctggctgaggagctccgccgtgagctgccacccgatcaggcacagtactgcatcaagaggatgcctgcgtattctggccctggcagcgtccctggggcattggattatgctgctttctctagcgctctgtatggagagagcgatctgtag

SEQ ID NO: 213113 - DNA, 1131 bp, synthetic construct
  misc_feature 1..1131: note = Description of Artificial Sequence: Synthetic coding sequence
  source 1..1131: mol_type = other DNA
atgttcaacccccacgccctagacgtccctgccgtgatatttgataatggaagtggactgtgtaaagccggactaagtggggagattggtccccgacacgtgatttcatctgtactcggacattgtaaatttaacgtgccactggctcgattgaaccaaaagtactttgtgggtcaggaggcgctgtacaagtatgaagccctgcatctgcactaccctatagagcgagggttggtgaccggctgggacgatatggaaaagctgtggaaacacctgtttgaacgggagcttggggttaaaccatctcagcagccagtcctcatgactgagccaagtctgaatccccgagagatccgcgaaaaactcgcggaaatgatgtttgagacctttagcgtcccaggattctatcttagcaaccacgccgttgctgctttatatgcctctgcttgcgtgaccggactggtagtagactcaggcgatggagtcacgtgtaccgtgcctatcttcgaaggttacagcttaccccatgcagtcaccaagctgtgcatggcgggtcgcgacatcactgagcacctgacacgcctcctgttcgctagtggctttaactttccttgcatcctgaataaagctgtggtgaataatatcaaggaaaaactctgctacatagctcttgagccagagaaggaactgagaaaaagtcgaggcgaggttctgggtgcatatcgactgccggacgggcacgtcattcacttcggggatgagctgtaccaggttccagaggtactctttgcaccagaccaattaggcatacacagcccaggactttccaagatggtgtccagcagcattatgaagtgcgatacagacattcagaataagctgtacgctgacattgtgctgtcaggaggcaccaccttattacccggacttgaggagaggcttatgaaagaggttgaacaattggcctccaaaggcacccctataaaaatcaccgcttcccccgatcgctgcttcagcgcttggataggagcgagcatcatgacatcaatgagctcctttaaacagatgtgggtgacctccgcagatttcaaggaatacggcacatctgttgtgcagcggaggtgcttttag

SEQ ID NO: 213114 - DNA, 1134 bp, synthetic construct
  misc_feature 1..1134: note = Description of Artificial Sequence: Synthetic coding sequence
  source 1..1134: mol_type = other DNA
atgttcaacccccacgctctggacagtcccgcagtgattttcgacaacggatcaggcttctgtaaggccggactttccggagagttcggcccaaggcacatggtttcgtccatcgttggccatctgaagttccaagctccctccgctgaagctaatcagaagaagtactttgtcggggaggaagcgctgtataaacaagaggcactccaacttcattccccttttgaacgcggactgataacaggatgggacgacgtggagaggctatggaaacacctgtttgagtgggagctcggcgtaaagcccagcgatcagcctttactggctaccgagcctagcctgaatccgagggagaatagggagaagatggctgaagtgatgttcgagaactttggtgtgccagccttttatctatctgatcaggccgtcttagctctttacgcatcagcctgcgttacaggcctggtagtcgattcaggtgacgctgtcacctgtactgtacccatctttgaagggtactctttgccccatgcagttactaagctacacgtcgcaggtcgggacatcaccgagctgctaatgcagctcctactcgcctcaggtcatacgttcccctgccagctggacaagggactggtggatgacataaagaagaaattgtgttacgtggcactggagccagagaaggaactgtcacgacgccctgaagaagtgcttcgagaatataagttgcctgatggtaatatcatcagcctgggtgatccactgcatcaggcaccagaagctctcttcgtgccacagcaactgggctcccaaagtcccggactgtctaacatggtgagcagttcaatcaccaaatgcgacaccgacatacagaagatactgttcggcgaaatagtcctatctggcggtaccactctgtttcacggcctcgacgaccgcctgttgaaagaacttgaacagctggcatcgaaggatactcccatcaaaattacggctccgcctgacagatggttctctacttggattggagcctcgattgttacatccctgagtagctttaagcagatgtgggttactgctgcggacttcaaagaatttggcacatctgttgtccagcggaggtgtttctag

SEQ ID NO: 213115 - DNA, 987 bp, synthetic construct
  misc_feature 1..987: note = Description of Artificial Sequence: Synthetic coding sequence
  source 1..987: mol_type = other DNA
atgttcaacccccatgccctggactccccagcagtcatattcgacaacgggagcggtttttgcaaggccggactgtctggagaattcgggcctagacacatggtttcctccatcgtggggcatctgaaatttcaggctccgagtgcggaagctaaccagaagaaatatttcgtgggcgaggaagcgctgtacaagcaggaggcactacagctgcacagcccattcgaaagaggtctcataaccggctgggatgacgttgaacgcctctggaaacacctattcgaatgggaattgggagtcaaaccctctgaccagcccctcctcgcaaccgagccttcacttaaccccagagagaatagagaaaagatggctgaggtgatgttcgaaaattttggcgttcccgcattttatctcagtgatcaggcagttttggcactctatgccagcgcatgtgtgactggactggtggtcgactccggcgacgctgtaacttgcacagtcccaatttttgaaggctattcactgcctcatgctgtgacaaaacttcacgtggcaggacgtgacattaccgagctgttgatgcagttgcttctcgctagcggacacaccttcccctgccagttggacaaggggttggtcgacgatattaagaaaaagctgtgttatgtcgccctggagcccgagaaggagctgtctagaaggcccgaggaggtcctcagagaatacaaattacccgatggcaacattatctctctcggggacccgctccaccaggcccctgaggctttattcgtgccccagcaactgggctctcaaagtccagggctgtcaaatatggtatcatccagcatcaccaagtgtgacaccgacattcagaaaattctgttcggagagatcgtcctgtccgggggaactactctgttccatggactggacgacagactgctgcacttggactggagcctgcatagacatctgagcgagtag

SEQ ID NO: 213116 - DNA, 1752 bp, synthetic construct
  misc_feature 1..1752: note = Description of Artificial Sequence: Synthetic coding sequence
  source 1..1752: mol_type = other DNA
atggagagcaaaggtgcctcaagctgcaggttgctgttttgtctgctaatctctgcaactgtgtttcggccaggcctggggtggtacactgtgaattccgcttacggcgatacgattatcatcccatgtagactcgatgtccctcagaacttaatgtttgggaagtggaaatacgagaaacctgatgggtcacccgtgttcatcgcgttcagatcttcaaccaagaaatcagtgcagtatgatgacgtcccagagtacaaggatcggcttaacctctctgaaaattacacgctgtcgatcagtaatgcgaggattagcgatgaaaaaaggtttgtttgcatgctggtcactgaggacaatgtctttgaggcccctaccatcgttaaggtgtttaagcagcctagcaagccagaaatcgtatctaaagcactgtttttggagacagaacaacttaaaaagttgggcgattgtatatcagaagatagttacccagacgggaatattacctggtacagaaatggcaaggtcttgcacccgctagagggcgcagtggtgataatattcaagaaagagatggaccccgtcacccagctatacaccatgacgtcaacgctggagtacaagacaaccaaggcagatatccagatgccgtttacctgctctgtcacgtactatggcccatccggacagaagactatccatagtgagcaggccgtgttcgacatctactaccctactgagcaggtgactatccaggtgcttccgcctaaaaacgcaattaaagagggcgataacattacattaaaatgcctgggaaacggaaacccaccccctgaagaatttctgttctatctgcccggtcagccagaggggattcggagcagcaatacctatacacttactgatgtcagacgaaatgctaccggagactacaaatgttccctcatcgacaaaaagtcaatgattgcttctaccgcgataactgtgcattatctcgacctgtcactcaatccatctggtgaggtcactcggcaaattggagacgccctcccagtgagctgcacaataagtgcatcccgcaatgccactgttgtgtggatgaaggacaacatcaggttgcgctcttcgccatccttctcttctctccactaccaggacgccggaaattatgtgtgcgaaactgctctacaagaagttgaaggcttaaaaaagcgagagtctcttacactcatcgtggagggcaaaccccaaatcaagatgacgaaaaagaccgacccgagcggactctcaaagactataatctgtcacgtggagggctttccgaagccagccattcagtggactattaccggctcaggtagcgtcattaaccaaacggaagagtctccatatattaatggcaggtactatagcaaaatcatcatcagtccagaggaaaacgtgacactgacctgtacggccgagaaccagctggaacgaacggtgaatagcctgaacgtgtctgccatctccatccccgagcacgatgaagccgacgagattagtgacgagaatagagagaaggttaacgaccaggcaaagcttatcgtgggcatcgtggtggggcttttgcttgcagctctcgtggctggtgtggtatactggctgtatatgaagaagtccaagacagcttccaagcacgttaacaaggatctaggcaacatggaggagaataaaaaactcgaggaaaacaaccacaagacggaggcatag

SEQ ID NO: 213117 - DNA, 918 bp, synthetic construct
  misc_feature 1..918: note = Description of Artificial Sequence: Synthetic coding sequence
  source 1..918: mol_type = other DNA
atggacccggtaactcagctctataccatgacatctactcttgaatacaagactactaaagcagatatccaaatgccgtttacctgtagcgtgacatactatggtccctctggacagaagacaatccatagcgagcaggctgtttttgacatctattatttagacctatcgcttaaccctagtggcgaggttaccagacagattggggacgccctgccagtcagttgcacaatctccgcttcacggaatgccactgtggtgtggatgaaggacaacattcgtctcagatccagcccatccttttctagtttgcattatcaggacgcaggtaactacgtgtgtgagaccgcgctccaagaggtcgaggggctcaaaaaacgagaatcactgaccctcatcgttgagggcaagccacagatcaagatgacaaaaaagactgacccatccggcctgtctaagaccatcatttgtcacgtggagggcttcccgaagccagccattcaatggaccattacaggcagcggctctgtaatcaaccagacagaggagtccccttacatcaatggccgttattactcaaaaataattattagccctgaggagaatgtcacactgacatgcaccgctgaaaatcagcttgagaggaccgtgaattccctgaacgtgtctgccatttccatcccagagcacgacgaggcagatgagatttccgatgaaaacagagaaaaggtcaacgaccaggcaaaactgatcgtagggatcgtcgtcggattgctgctggccgctctggttgcaggagttgtgtactggctgtacatgaagaagtccaagacagccagtaaacacgtgaataaggatctggggaacatggaagaaaacaagaagttagaagagaacaatcacaagactgaggcatag

SEQ ID NO: 213118 - DNA, 1035 bp, synthetic construct
  misc_feature 1..1035: note = Description of Artificial Sequence: Synthetic coding sequence
  source 1..1035: mol_type = other DNA
tgattaggggactgtatttcagaagatagctatccagacggtaacatcacctggtaccgaaacggaaaagtgctccacccgctcgaaggagctgttgtcatcatattcaagaaagaaatggaccctgtgacacagctttatactatgacaagcaccctggagtacaagacaaccaaggccgatattcagatgccttttacatgtagtgtgacctattacggccctagtgggcagaaaacaatacacagcgaacaagccgtgtttgacatctactatttggatcttagcctcaacccgtccggggaggtaacccgccaaattggagatgccctacctgtgtcctgcaccatttccgcctcccggaacgccaccgtggtgtggatgaaagataatataagattgagaagctctccgagcttcagtagcctgcattatcaggacgctgggaactatgtgtgcgaaacagccctccaggaggtggaggggttgaagaagagagagtccttgactctaatagtggagggaaaacctcaaattaaaatgacaaagaaaaccgacccgagcgggctgtccaagacaatcatctgccacgtggaagggtttcctaagccggcaatccagtggactataaccggaagcgggtcagtaatcaaccagaccgaggagagcccttatattaatggacgctactacagtaaaatcatcatttcgccagaggaaaacgttacattaacctgtactgcagagaaccagttggaacgcacagtaaattcgttgaacgtgagcgccatctccataccggaacacgacgaagccgacgagatctcagacgagaaccgcgagaaagtcaatgatcaggccaaacttattgtgggtatcgtcgtgggcctcctcctggctgctctggttgccggagtggtatactggctctatatgaagaagtccaaaacggcctccaaacacgtgaacaaggatttggggaacatggaggaaaataaaaaactggaggagaataaccataagacagaagcgtag

SEQ ID NO: 213119 - DNA, 1713 bp, synthetic construct
  misc_feature 1..1713: note = Description of Artificial Sequence: Synthetic coding sequence
  source 1..1713: mol_type = other DNA
atggaaagcaaaggcgcttcatcgtgtcgactgttgttctgtttgctcatatccgcaacagtctttcgacccggtctgggctggtatacagtgaatagcgcctatggcgatacaataatcatcccatgtagactagacgtccctcagaacctcatgtttggcaagtggaaatacgaaaagccggatggaagtccagtgttcatagcctttcgctccagcactaaaaagtctgtgcaatacgacgacgtccccgagtataaagatcgcttaaacctctctgagaactacactctttcaatttctaacgctaggatctctgacgaaaagagattcgtttgtatgcttgttaccgaggataacgtgtttgaggcaccaaccatagtgaaggtgttcaaacagcccagcaaaccggagattgtctccaaagccctctttctcgaaaccgagcagcttaagaaactgggcgattgcatttctgaggactcctacccagatgggaatattacctggtacagaaacggtaaggttctgcatcctctggagggtgccgtggtgatcatcttcaagaaggagatggatcctgttacacaactctatactatgacctccactttggaatataagaccaccaaggccgacatccagatgccgtttacctgctccgtcacctactacggtccttcagggcaaaaaaccattcacagcgagcaagctgtcttcgacatctactacccaaccgaacaggtgaccatccaggtgttaccccctaagaatgctataaaggaaggagacaatatcacgttgaagtgcttaggcaacggaaatcccccacctgaagagtttttgttttacttacctggtcaacccgaaggcatcaggtcttcaaatacttacacgcttactgatgtgcggaggaatgccactggcgattataagtgctctctaattgacaaaaagtctatgatcgcgagcaccgcgatcactgttcattacttggacctctcacttaatccctcaggagaggtgacacggcagattggcgacgcactgcccgtcagctgcactattagcgctagtcggaacgctacagtcgtttggatgaaagataacatcagactccgcagtagcccctctttcagttccctccattaccaggatgccggaaactatgtgtgtgaaaccgcgcttcaagaggtcgagggattgaagaagcgtgaaagtctgaccctcatagttgagggaaaaccccaaatcaaaatgacgaaaaagactgacccatccggactgtcaaagacaatcatatgccacgtggagggattcccgaagcccgctattcagtggaccataaccggttccggttccgtgattaatcagacagaggagagtccttatattaatggtcgctactactctaagattatcatctccccagaagagaatgttaccctcacatgtaccgcagaaaatcagttagagaggacagtcaactccctgaacgtgtcagctaatgaaaatcgggaaaaagttaacgatcaggcaaaactcatcgtgggcattgtcgtcggactcctcttggctgctcttgtcgccggagtggtgtattggctgtatatgaaaaaatctaagaccgcttccaagcacgtgaataaagatctgggcaacatggaggaaaataaaaaacttgaagagaataaccacaagactgaagcttag

SEQ ID NO: 213120 - DNA, 1074 bp, synthetic construct
  misc_feature 1..1074: note = Description of Artificial Sequence: Synthetic coding sequence
  source 1..1074: mol_type = other DNA
atggaggtgctgcggccacagctgatccgaatcgacggacggaactaccgcaagaatccagtgcaggaacagacctatcagcacgaagaagatgaggaagacttttaccaggggtcaatggagtgcgccgacgagccttgtgatgcctacgaggttgagcagacacctcagggatttagaagcactctaagggctccatcactcttgtacaagcatatcgtgggaaaaagaggagacaccagaaagaaaatagaaatggaaacgaagaccagcatcagtatccccaaacccggtcaggacggggaaatcgtgatcacaggccagcacagaaacggggttatttcagctcgcacaagaatagatgtcttactggataccttcaggcgcaagcagccatttactcatttcctggccttcttcctaaatgaagtggaagtacaggagggttttttgcggttccaggaagaggtgttggcaaagtgctccatggaccatggtgtggatagctctatctttcagaatcccaaaaagctgcatttaaccatcgggatgcttgtgttactgtcagaagaagagatccagcagacatgcgaaatgttacagcagtgtaaagaagaatttattaatgacattagcggaggtaaaccactggaagtcgaaatggccggaatcgaatacatgaatgatgacccagggatggttgacgtgctgtatgctaaggtgcacatgaaggatggatcaaatagactgcaggaactggttgaccgcgtcttggaaagatttcaagcctcgggattgatcgtgaaggagtggaactcagtgaagctccatgccacagtcatgaatactctgttccgaaaggaccccaacgcagagggacggtataatctgtataccgccgagggtaaatacatattcaaggagagggagagctttgatggaagaaacatacttaagctgttcgaaaatttttacttcggcagcctgaaactcaacagcatacacatctcgcagaggtttaccgttgatagctttggcaactacgccagctgcggccagatcgacttctcttag

SEQ ID NO: 213121 - DNA, 1074 bp, synthetic construct
  misc_feature 1..1074: note = Description of Artificial Sequence: Synthetic coding sequence
  source 1..1074: mol_type = other DNA
atggaagtcctgagacctcaattgatcagaatcgacggcaggaactacaggaagaatcccgtccaagagcagacatatcagcatgaggaggacgaggaagacttctaccagggatccatggaatgtgcagatgagccttgcgatgcttacgaggtggaacagacaccgcagggctttcggtcaacccttcgcgctccttcactgctatacaagcacatagtgggcaaacggggagacacacggaagaagattgagatggaaactaagacatctatttctatccccaaacctgggcaggacggtgagattgtcataaccggacaacacagaaacggtgtcatctctgcaaggacgagaattgacgtgctcttagatacattccgtcgcaagcaacccttcactcacttcctcgcattcttcctcaatgaggtggaggttcaggagggtttcctcaggttccaggaggaggtgcttgcgaaatgtagcatggaccacggtgtcgacagcagcatattccagaatccaaagaagttgcatctgacaataggcatgcttgtgcttctctcagaggaggagattcaacagacatgcgaaatgttacagcagtgtaaggaggaattcattaacgatatctcggggggtaaaccactggaggtcgaaatggctggaatcgagtatatgaacgacgatcctgggatggtggacgtgttgtatgccaaggtgcatatgaaggatgggtctaataggctgcaagaattggtggatagagtcctggagcgcttccaggcctccggcctgatagtgaaagagtggaatagcgtaaaactccacgccaccgtgatgaacaccctgttccgcaaagaccccaatgctgagggcagatacaatctttatacagcagagggtaagtatatctttaaggagagagagtcttttgacggtcggaacattctcaaactgttcgagaacttctactttggctcgcttaaacttaactctatccacatctcccagcgttttacggtggactccttcggtaattacgcttcttgcggacagattgatttctcctag

SEQ ID NO: 213122 - DNA, 1203 bp, synthetic construct
  misc_feature 1..1203: note = Description of Artificial Sequence: Synthetic coding sequence
  source 1..1203: mol_type = other DNA
atggaggtcctgcggcctcagttgataaggattgacggtcgcaactatcggaagaaccccgtgcaggagcagacataccaacacgaggaggacgaggaggatttttaccaggggagcatggaatgtgctgatgagccgtgcgacgcgtatgaggttgagcagacaccccaggggttccgaagcacactgcgagcgccaagtctgttatacaacttaattcatcttaatacttccaatgattgtggattccaaaaaattacccttgattgccagaatatctacacttggaagtcgcgtcatattgtcggaaagaggggggacacccgaaagaagatcgagatggaaaccaagaccagtattagcattccaaagcccggtcaggatggtgagattgtcataactggccagcatcgcaacggcgttatctctgccagaacacgaatagacgttttacttgacacttttagaagaaagcagccttttacccacttcctagctttcttcttaaatgaggtagaggtgcaggaggggtttttgcggtttcaagaagaagtcttggcgaaatgcagcatggatcacggagttgatagtagtatttttcagaatcctaagaaattacacctgacgatcggcatgttggtgctcctgtccgaagaggagattcagcagacatgtgaaatgctccagcagtgtaaagaggagtttatcaatgacatcagcgggggtaagcccctggaggtggagatggcaggtatagagtacatgaacgacgatccaggaatggtagatgtgctctacgctaaggtacatatgaaggacggatctaaccggctgcaggagctcgtagacagggtgctcgagcggttccaggcgagcggcttgatcgtgaaggaatggaattccgtgaagcttcacgccaccgtcatgaacaccctgttccggaaagaccccaatgctgagggtagatacaacctttacactgccgaggggaagtacatattcaaggagagggagagctttgacggtcgaaatatcttgaagtctttcgcactacttcccaggctcgaatacaatgatgcgataagtgcccactgtaacctgtgcttgcccggtagtagcgatagcccggcttccgcttcccaggttgccggaataacaggggtttctgacgcctactcccaaagcttaccagggaaaagttag

SEQ ID NO: 213123 - DNA, 1074 bp, synthetic construct
  misc_feature 1..1074: note = Description of Artificial Sequence: Synthetic coding sequence
  source 1..1074: mol_type = other DNA
atggaagtgcttcggcctcagctgatccgaatcgacggccgtaattaccgcaagaatcctgtgcaggagcagacataccagcacgaggaggacgaggaggatttctaccagggatcgatggaatgcgctgatgagccttgcgatgcatacgaggtggaacagacaccacaaggctttcgctctactctcagggcgccttctcttctgtacaagcatattgtcggaaagcggggagacactcggaaaaagatcgagatggagaccaagactagtatttcaattccgaaacccggacaagacggtgaaatcgtaatcacagggcaacatcgtaacggagttatttcagccaggactagaattgacgtcctgctggatacgtttcgccgaaagcaaccatttactcacttcttagccttttttctgaacgaggtcgaagtccaggagggattcctgagatttcaggaggaggtgctggccaagtgcagtatggatcacggcgtggatagctcaattttccagaatcccaagaaactgcacctcaccattggcatgttggtgctgctgtcggaagaagaaatccagcagacctgtgagatgttacaacagtgtaaggaagagttcatcaacgatattagcggtgggaagcccctagaggtcgaaatggccggtatagagtacatgaacgatgacccaggcatggttgacgtattgtacgcaaaggtccacatgaaggatggttcaaataggctgcaagagctggttgacagagtcctagagcgtttccaagcttctgggctgatcgtcaaggagtggaatagtgtcaaactgcatgccaccgtcatgaacaccctctttaggaaagaccccaatgcagaaggtcgttacaatctgtacacagcagagggcaaatacatttttaaggaacgcgagtcctttgatggacgaaacattctgaaactgttcgaaaatttctacttcggatcgctcaagctaaattcaattcatatttcccagagattcacagtggactcctttggcaattacgcctcctgcgggcaaatcgacttctcctag

SEQ ID NO: 213124 - DNA, 1203 bp, synthetic construct
  misc_feature 1..1203: note = Description of Artificial Sequence: Synthetic coding sequence
  source 1..1203: mol_type = other DNA
atggaagtgcttagacctcagttgatcaggatcgatggaaggaactataggaagaacccagtccaggaacaaacgtatcagcacgaggaagacgaggaagacttttatcagggctccatggagtgtgcagatgaaccatgcgacgcctacgaagtagagcaaacaccacagggctttaggtcgaccctgagggccccaagcctcctatataatctcatccacctgaatacatccaacgactgcggctttcagaaaatcaccctcgactgtcagaatatatatacctggaagtctcgccacattgtaggcaagaggggcgataccagaaagaagattgaaatggagaccaaaacatccatctcaatcccaaagcccggtcaggacggggaaattgtgataacaggccagcacagaaacggggtcatttcggcccgaactagaatagacgtcctgctcgataccttccggagaaagcagccgtttacgcattttctcgcgttctttctcaatgaggttgaggtccaggagggttttctgaggttccaggaagaggtccttgccaagtgttctatggaccatggcgtggatagcagtatctttcagaatccgaaaaaactgcatctaacgatcggcatgttagtcctactgagcgaagaggaaattcaacagacatgtgaaatgttgcagcagtgtaaggaagagttcatcaatgatatctcaggtggaaaacccctggaggtggaaatggccggtatcgagtacatgaatgacgatccagggatggtcgacgtgttgtacgccaaagtccatatgaaagatggatccaatcgcttgcaggagcttgtagatagagtattggagcgctttcaggctagcgggctgatagtgaaggaatggaatagcgtgaaattacatgccaccgtgatgaacacgctcttcaggaaggacccgaacgccgaggggagatacaatctctacacagccgagggtaagtatattttcaaggagcgcgagagcttcgatggtagaaacatcctgaaatctttcgccctgctgccaaggcttgagtacaatgacgctatttctgcacattgcaacctctgcttgcccggttcatcagactcccctgcttctgcctcacaggtggctggaattacaggagtgagcgacgcttactctcaaagtctgccgggaaagtcatag

SEQ ID NO: 213125 - DNA, 1074 bp, synthetic construct
  misc_feature 1..1074: note = Description of Artificial Sequence: Synthetic coding sequence
  source 1..1074: mol_type = other DNA
atggaggtgcttcggccacagctgattagaattgacggtaggaactaccggaaaaatccggtgcaggagcagacctaccagcacgaagaggacgaggaggatttctaccagggtagtatggaatgcgccgatgagccttgtgacgcttatgaagtagaacaaaccccacagggattccggtcaactctccgcgctccctctctactctataagcacatcgtgggcaaaaggggcgatactaggaagaagatagaaatggagactaaaacaagcattagcatccccaaaccgggacaggatggggaaatcgtgatcactgggcagcataggaatggggtcatctccgcccgtaccaggatcgacgtgttgttagatacgtttcgtcgcaaacaacccttcacacatttcctagccttcttcctgaatgaggttgaagtgcaggagggctttctgagattccaggaggaggtactagccaagtgctctatggaccacggtgtagacagctctatttttcaaaatcctaagaagctgcatctgactattggtatgctggtgttactctcagaggaggagatccagcagacctgcgagatgcttcagcagtgtaaggaggagttcattaacgacatctctggcggaaaaccactggaggtagagatggccggtatcgaatatatgaacgacgacccaggcatggtggacgtgctgtatgctaaggtgcatatgaaggatggttcaaataggttacaggagttggtggatagggtgctggaacgcttccaggccagcggactcattgttaaagagtggaacagcgtgaaactgcatgcaactgtgatgaacactttgttccgaaaagacccaaacgcagaagggagatacaatctttatacggcagagggaaaatacatatttaaggagcgagagagcttcgatggccgaaacatcttgaaattgtttgagaatttttactttgggagtctgaagctgaatagcattcacatctcccagagatttaccgttgatagcttcggcaactatgcatcctgcgggcagatagactttagctag

SEQ ID NO: 213126 - DNA, 879 bp, synthetic construct
  misc_feature 1..879: note = Description of Artificial Sequence: Synthetic coding sequence
  source 1..879: mol_type = other DNA
tgatacaaacacattgtcggcaaacggggtgacaccagaaaaaaaattgagatggaaacaaaaaccagtatttccatccctaagcccggtcaggatggggaaatcgtgattaccgggcagcaccgcaacggtgtgatatccgcccgaactcgaatcgatgtgctgttggatactttccgccgaaaacagccgttcacccactttctcgcattctttctcaatgaggtcgaggtccaggagggcttcctccggtttcaggaagaagtcctggctaagtgttcgatggaccatggagtggactcctctatctttcagaaccctaagaagctccatctcaccatagggatgctggtgctcctgagtgaagaggaaatccaacagacctgcgaaatgctgcagcagtgcaaggaggagttcataaacgacatcagcggaggcaaaccactagaggtagagatggcagggattgaatacatgaatgatgaccctggcatggtcgacgtgctgtatgcaaaggttcacatgaaggatggaagcaatcggttgcaggagctggtggatcgggtgctcgagagatttcaggcctctggacttatagttaaggaatggaactcagttaagctgcacgccacagtcatgaataccctatttaggaaggaccccaatgccgagggtcggtacaacctatatacagccgaaggcaagtatattttcaaggagagagagagcttcgatgggagaaatatattaaaaagtttcgcactgctgcctcgactggaatacaatgacgccatatctgctcactgtaacctgtgcttgcctggatctagtgacagtccagcttcagcatcccaggttgccggtatcacggtggtgtag

SEQ ID NO: 213127 - DNA, 828 bp, synthetic construct
  misc_feature 1..828: note = Description of Artificial Sequence: Synthetic coding sequence
  source 1..828: mol_type = other DNA
atggaaaccaaaacttccatctccatcccaaagccaggccaggacggagagattgtaattacgggccagcatcgaaatggagttatttctgccagaacacgaatcgacgtgctgctggacaccttccgacgtaaacagccgtttacacacttccttgccttttttctgaacgaagtggaggttcaagagggctttcttaggtttcaagaggaggtgctggccaaatgtagcatggaccatggagtggattcatccatttttcaaaacccaaaaaagctccatctcaccatcgggatgctggtgcttctctccgaagaagagatccagcagacttgcgagatgttgcagcaatgtaaggaggagttcatcaacgacatcagtggaggcaaaccactagaagtcgagatggccggaattgagtacatgaacgatgatcctggtatggtcgacgtgttatacgccaaagtgcacatgaaagacggcagtaacagacttcaggaactcgttgaccgggtcttagagcgtttccaggcctccggtctgatcgtaaaggaatggaacagtgtgaaactgcatgccactgtaatgaacaccctcttccggaaagaccccaatgccgagggcagatataacctgtacacggccgagggcaaatatatctttaaagagcgggagagcttcgacggcaggaacatacttaaatctttcgccctgttacctaggctggagtataacgatgccattagcgctcattgcaacctctgcctgcccggatcctccgattcaccggcatctgccagccaggtcgcaggaattacagttgtgtag

SEQ ID NO: 213128 - DNA, 372 bp, synthetic construct
  misc_feature 1..372: note = Description of Artificial Sequence: Synthetic coding sequence
  source 1..372: mol_type = other DNA
atggaggtgctacgacctcagcttattcgcatagacgggagaaattatagaaagaaccccgtccaggagcagacttatcagcacgaagaggatgaggaagacttctaccagggctctatggagtgtgcagatgagccttgtgacgcctatgaggtggagcagacccctcaggggttccgatctaccctaagggctccatccctgctctataagcacatagttggcaagaggggagatactcgcaaaaaaattgagatggagacaaagacatctatctccattcctaaacccggacaggatggtgaaatcgtgattacgggtcagcaccggaacggagtgattagcgctcggacgagaattgacgtactgtag

SEQ ID NO: 213129 - DNA, 312 bp, synthetic construct
  misc_feature 1..312: note = Description of Artificial Sequence: Synthetic coding sequence
  source 1..312: mol_type = other DNA
atggaggtcctgagaccacagctgattcggattgacggaaggaattatcgtaagaaccctgttcaggaacagacctatcaacatgaggaagacgaagaagacttctaccagggatctatggagtgcgcagatgagccctgcgacgcttacgaggtcgaacagactccacagggcttccggagcacgttgcgtgcacccagtctgctgtacaagcatatcgtgggaaagcggggagatactcgcaaaaaaattgagatggaaacaaaaacctccatttccatcccaaagccagggcaggacggcgaaatctag

SEQ ID NO: 213130 - DNA, 459 bp, synthetic construct
  misc_feature 1..459: note = Description of Artificial Sequence: Synthetic coding sequence
  source 1..459: mol_type = other DNA
atggaggtgcttcgccctcagctcatccggattgatggccgaaattacagaaaaaaccccgtgcaggaacagacctaccagcacgaggaggacgaggaagatttctaccaagggagcatggaatgcgctgatgaaccctgtgacgcatacgaagtcgaacagacaccgcaggggttcaggagcacattgagggcgccttccctgctgtacaaacacatcgtaggtaaaagaggtgacactcgaaagaagatagagatggaaaccaagaccagtattagcatcccgaaacctggtcaggacggggagattgttattactggccagcacagaaacggcgtgatttccgctaggactcggattgacgtactactcgacaccttcaggcgaaagcagccattcactcacttcctcgcattctttctcaatgaagtggaagttcaggaggggtttctgcggtag

SEQ ID NO: 213131 - DNA, 171 bp, synthetic construct
  misc_feature 1..171: note = Description of Artificial Sequence: Synthetic coding sequence
  source 1..171: mol_type = other DNA
atggaagtgctacgccctcaactgattcggatagatgggaggaattatcgcaaaaaccccgtgcaggaacagacgtaccagcacgaggaggatgaggaagatttctatcagggttctatggaatgtgctgacgaaccatgcgacgcctatgaggtcgaacagaccccttag

SEQ ID NO: 213132 - DNA, 1140 bp, synthetic construct
  misc_feature 1..1140: note = Description of Artificial Sequence: Synthetic coding sequence
  source 1..1140: mol_type = other DNA
atgatgaaataccccggaacatggccctgtcaaggaatcattggaataagctttggcgagagcgtaatggaggtgctcagacctcagctgatcagaatcgatggccgaaattatcgaaaaaatccagttcaagagcagacctatcaacatgaggaagatgaagaagacttttaccagggatccatggagtgtgctgatgagccatgcgacgcttacgaggtggagcagacaccgcaaggttttcgttccaccttgagagctccctcgcttctttacaagcacattgttggcaagcgtggggacacccggaaaaagattgagatggagaccaaaacatccatctctatccccaagccagggcaggatggggagatagtgatcaccggacagcatcgaaacggggtgatctcagcaagaacacggattgatgtgctgctagatacgtttcggcgtaaacagccattcacgcactttctggccttcttcctaaatgaagtggaagtccaggaagggtttctcaggtttcaggaggaggtgctggccaaatgctctatggaccatggagtggacagctccattttccagaacccaaagaaacttcacctgaccatcgggatgttagttctgctgtctgaggaggaaatccagcagacttgcgaaatgctccagcaatgcaaagaagaatttattaatgacatttcgggagggaaaccactggaggtagagatggccggaattgagtacatgaacgacgatcctggaatggtcgacgtcttatatgcaaaagttcatatgaaagacggctccaacaggctgcaggagctggtggaccgggtgctggaaagatttcaggcctcgggactcatcgtcaaggagtggaactcagtcaaactacacgcaacggtgatgaacacacttttcaggaaggatcctaacgcagaaggtcgatataatctttacactgccgaaggcaagtacatatttaaggagcgagagtctttcgacggacggaacatcctgaagctgtttgaaaacttctactttggcagtctgaaacttaactcaatccatattagtcagcggttcaccgtggattccttcgggaattacgcctcctgcggccaaattgactttagctag

SEQ ID NO: 213133 - DNA, 2274 bp, synthetic construct
  misc_feature 1..2274: note = Description of Artificial Sequence: Synthetic coding sequence
  source 1..2274: mol_type = other DNA
atgcccgcactcccccttgaccaacttcagattacacataaggaccccaagacaggaaagttgcgcaccagtcccgctctgcaccctgagcaaaaagcagataggtactttgtgctatacaagccccctcccaaagacaatatcccagccctagttgaggaatatttggagcgagctactttcgtggcgaatgacttagactggctgctggccttgcctcacgataagttttggtgccaggtgatctttgatgagaccctgcaaaagtgtcttgatagctacttgcgctatgttccccgtaagtttgatgaaggcgttgcatctgctccggaggtagttgacatgcagaaacggctgcataggtctgtgttcttgacattcctccgtatgtctacccacaaagaaagcaaggaccacttcatatctcccagcgcatttggcgagattctgtacaacaatttcctgtttgacattcctaagatattagatctgtgcgtcctgtttggtaaaggcaactccccccttctgcagaagatgattggcaatatctttacacaacagcctagttactatagtgatttggatgaaactctgcccacaattctgcaagttttttcaaatatccttcagcactgcggcctccagggagacggcgctaatacaacaccacagaaattggaagagcgtggaagactgacccccagcgacatgccactcttggagctgaaagatatcgtactctatctatgcgacacttgcacaaccctgtgggccttcctggatatttttcccttggcctgccaaaccttccagaagcacgatttctgctatcgacttgcctctttttacgaagccgcaatacctgagatggaatctgctatcaagaagcggaggctggaagactcgaaacttttaggggacttgtggcagcgactgagtcactctcgcaagaaactgatggaaatcttccatattatactgaaccagatttgcctcctgcccatcctagagtccagttgcgacaacatacaagggtttatcgaggaattcctgcaaatattctcctccctgctccaggaaaagcggttcttgcgggattacgacgccctgttccccgtcgccgaggatatcagtctgttgcagcaggcctcttcagtgcttgacgagacaaggacagcttatatactacaagccgttgagagtgcctgggaaggcgtggaccgacgtaaggccacggacgctaaagacccatctgtgatagaagagcctaatggggagcccaatggggtcacagttaccgcagaggcagtcagtcaggcatcatctcaccccgagaactccgaagaggaagaatgcatgggcgctgcagccgcagtgggtccagctatgtgcggggtagagcttgattcattaataagccaagtgaaggatcttctgccggacctgggtgaaggcttcatcttggcctgtctcgagtattaccactacgacccagagcaggtgattaataacatattagaggagcgactggctcctactctcagtcaactggacagaaatctggaccgcgaaatgaaacctgacccaactcccctgcttaccagtcggcataacgtctttcaaaatgatgaattcgatgtgttttcacgtgattctgtcgacctgagccgtgtgcataagggcaaaagtacaaggaaggaggaaaatacacggtcgctactcaacgacaaacgcgctgtcgcagcgcagaggcagcgatatgagcagtactccgtcgttgtcgaggaggtccctctccagcctggagagagtttgccataccactctgtttactacgaggacgagtatgacgacacctacgacggcaatcaggttggcgcaaatgacgccgatagtgatgatgaattaatcagccgacgtcctttcaccatcccacaggtgctgaggaccaaggtgccccgagaaggacaggaggaggacgacgacgacgaggaggatgatgctgacgaagaggctcctaagcccgaccatttcgttcaagacccagctgttttaagggagaaagccgaagctagacggatggcattcctggccaaaaaggggtatcgacacgactcgtccacagccgtggcaggaagcccccgtggtcacgggcagtccagggaaactactcaggagcgccgtaaaaaggaagcaaacaaagctaccagagctaatcacaatcgtaggacaatggctgataggaagcggtccaaggggatgatcccttcatag

SEQ ID NO: 213134 - DNA, 2274 bp, synthetic construct
  misc_feature 1..2274: note = Description of Artificial Sequence: Synthetic coding sequence
  source 1..2274: mol_type = other DNA
atgcccgctttgcccctggaccagctgcagattacacataaagatccgaagaccgggaagctccgtaccagtcccgcactacacccagaacaaaaggccgatcgatactttgtgctgtataaaccccctccaaaagataacatccctgccctggtggaagagtacctcgaaagagccactttcgtggccaatgatttggactggctcctggccctccctcacgacaaattctggtgtcaagtaatcttcgacgaaactttgcagaaatgcctggattcgtatctcagatatgtacccagaaagtttgacgagggggtggcctcagctcccgaggtcgtggatatgcaaaagagactgcaccggagcgtctttcttactttcctgcgtatgtcaacgcacaaggagagcaaggatcatttcatcagtccgtctgcatttggggagattctgtataacaatttcctattcgatatcccgaaaattctggatctgtgtgtgctgttcggcaagggcaactctccactattacagaaaatgattggcaacatctttacccagcagccttcatattactctgatctggatgagaccttgcctactattctgcaggtattcagcaacatcctgcagcactgtggcttgcagggggacggtgcaaatactacaccccagaagttagaggaaagaggacggttaacgcctagtgacatgcccttactcgagctgaaggacattgttctttacctctgcgatacttgtaccaccctgtgggcttttctggacatatttcccttggcctgtcaaacttttcagaagcacgatttctgttatagacttgcttcattttatgaagccgcaattcccgaaatggaatcagcgatcaaaaaacgcagacttgaagatagcaaactgctgggagacctctggcagcggctgagtcacagcaggaagaaactgatggaaatcttccatattatcctgaatcaaatctgtctacttcccattctggagtcctcttgcgataacatccagggatttattgaggagttcctccagatcttctcctccctgttacaagaaaaaagattcttgagggactacgacgccctattcccagtggccgaggacatttcactcctgcagcaggcatccagtgtgttagacgagactaggacagcttatatcctgcaggctgtggaatccgcttgggagggggtcgaccgtaggaaagccaccgacgccaaggatccctccgtgattgaggaacccaacggtgagcctaacggagttacggtgaccgccgaagccgtcagccaggctagctcccatcctgaaaacagcgaggaagaagagtgcatgggggctgctgctgcagtgggccctgctatgtgcggagtcgagctggattccttgatcagtcaggtcaaggacctgctgcccgatctgggggaggggttcattttggcttgtctggagtactaccactacgatccagaacaggtcattaacaacatcctagaagagcgcctggctccgaccttgtcacaattggaccggaacctggacagagaaatgaagccagatcccacacccctgctgacaagcaggcacaacgtattccagaatgacgagtttgacgtcttctcgagggactcagttgacctcagccgtgtacacaaaggaaaaagtactcggaaggaggagaatacacggtccctgctgaatgacaagcgtgcagtggcagcccagagacagaggtacgagcagtattccgtcgtcgtggaagaagtgcctcttcagccgggtgagtccctgccttatcactctgtgtattatgaagacgagtacgacgacacatatgacgggaaccaggtgggggcaaacgacgctgactccgatgacgaattgatttcccggaggccattcacgattccacaggtgctgcggactaaagttcctcgagagggtcaggaagaggacgacgacgacgaggaggatgatgctgacgaagaagcacccaaacccgaccatttcgttcaggatccggctgtgctccgtgagaaagccgaggccaggcgcatggcatttctggctaagaagggatacaggcacgactcgtcaaccgcagtcgccggttctcctaggggacacgggcagagtcgggaaactacccaagaaagacgtaaaaaagaagccaataaagctacccgagctaaccataacagacggactatggctgatcggaagcgtagcaaggggatgatcccatcttag

SEQ ID NO: 213135 - DNA, 723 bp, synthetic construct
  misc_feature 1..723: note = Description of Artificial Sequence: Synthetic coding sequence
  source 1..723: mol_type = other DNA
atgcctgctctccctctcgaccaactccaaatcacacacaaggatcctaaaacagggaagttgcgaacttcccccgctctgcatcctgagcagaaggccgacaggtacttcgtcctttacaagccaccacccaaggataacattcctgcactggtcgaggagtacctagagcgtgctacattcgtggcgaatgatctagattggctgctcgcactcccccatgacaaattttggtgccaggttatcttcgatgagactttacagaagtgcctggatagttacttgcgttatgtcccacgaaaatttgatgagggggtagcctccgcccctgaggtcgtcgatatgcagaaacgacttcatcgaagtgttttcctgacttttctgaggatgtctactcacaaggaatccaaagaccacttcattagcccttcggcatttggtgaaatcctgtacaataactttttgtttgatattccaaagatactggatttgtgcgttctcttcgggaaggggaacagcccactcttacagaaaatgataggcaatattttcactcagcagccttcatactatagcgatcttgatgagactttacctactatcctgcaggtgttctctaacatactgcaacactgcgggctccagggcgatggggcaaacaccacacctcaaaagctagaggagagaggcaggctcactccctcggatatgccactgctatag

SEQ ID NO: 213136 - DNA, 2046 bp, synthetic construct
  misc_feature 1..2046: note = Description of Artificial Sequence: Synthetic coding sequence
  source 1..2046: mol_type = other DNA
atgcccgctttgccccttgatcagttacagatcactcataaggatcctaaaactggaaagctgcgcacgtctcccgcactggtaattttcgacgagacgctacagaagtgtctcgactcatacttacggtatgtgcctagaaaatttgatgaaggcgtcgcatctgctcccgaagtggtggacatgcagaaaagattgcaccgttctgtgttcctgactttcctgcggatgagcacccacaaggaaagcaaaatccttgacctttgcgtactttttgggaaaggtaatagccccctgctgcaaaagatgattggtaacatcttcacccaacagccatcctattacagtgatctggatgagacactccccacaatcctgcaggtcttctctaacattctacagcattgtggcctccagggggacggcgctaacaccacccctcaaaagctggaagaacggggtcgcctgacaccctctgatatgccccttttggaactaaaggacatcgttctgtacctgtgcgatacctgcacaacattgtgggccttcctcgatattttccctctcgcctgccaaaccttccaaaagcacgatttttgttacaggctcgcttccttctatgaggcggctatcccagagatggaaagtgcaatcaagaagcgtaggctcgaggattccaaactgttaggcgatttgtggcagcggttgagccacagccgcaagaaacttatggaaattttccatattatccttaaccagatctgtttgctgccaatcctggagagttcctgcgacaacatccagggctttatcgaggagttcctccagatttttagctcactgcttcaggagaagaggttcctccgcgactacgacgcccttttcccggtggcggaggacatcagtctgcttcaacaggcttcatctgtgctggacgaaaccaggacagcctacattctgcaagccgtagagtccgcttgggagggggtggacagacgaaaggcgacagacgccaaagatcccagcgtcatcgaggagcctaacggcgagcccaacggagtcactgtcacagcagaggctgtgagccaagcttcttcccaccccgaaaatagtgaggaagaggagtgtatgggcgctgccgctgctgtcgggccagctatgtgtggcgtcgagctggacagtttaattagtcaggtcaaagatctgttaccagatttaggcgaagggtttatcctcgcttgcctggaatattaccactatgatcctgaacaggtgataaataacattcttgaagagcggctggctcccaccctgtctcagctggaccgaaatctcgacagggagatgaagcccgacccaactccactcctcacctcccggcacaatgttttccagaacgacgaatttgacgttttcagccgggatagtgtggacctatcaagagtacacaaagggaagagcacaagaaaggaggaaaatacacgatcactgttgaacgacaaacgcgctgtggcagctcagaggcagcgctacgagcagtacagcgttgttgtggaggaagtgccattacagcctggcgaaagtcttccctaccacagtgtttattatgaggacgagtacgatgacacctacgacggcaaccaggtgggggcaaatgacgcagactctgacgatgagcttatttcgcggaggccttttaccataccgcaggtgcttcgaactaaggtgcctcgcgagggacaggaggaagatgatgacgatgaggaagacgacgctgatgaggaggctcccaagcctgatcacttcgtgcaggaccccgcagtcctgcgcgaaaaggccgaagcgcgtagaatggccttcctcgcaaaaaaaggatatagacatgactctagtacagcagttgccggatcacccagaggacatggacaatccagggagaccacccaagaacgacgcaagaaggaggccaacaaagccacacgtgcaaaccacaataggcgaaccatggccgaccgaaagagaagtaagggaatgatccccagctag

SEQ ID NO: 213137 - DNA, 531 bp, synthetic construct
  misc_feature 1..531: note = Description of Artificial Sequence: Synthetic coding sequence
  source 1..531: mol_type = other DNA
atggcgctcccccgtcttaccggcgctctgaggtccttttccaacgtgactaagcaggacaactataacgaggaggtcgcagacctaaaaatcaagagatctaagcttcacgaacaagtgctcgacttaggcctgacgtggaagaaaataattaagtttcttaatgagaaactggaaaaatcaaagatgcagtccattaacgaagatctgaaagatatactgcacgctgctaagcagatcgttggcactgataacggaagagaagccattgaatctggtgcagctttcttattcatgacatttcacctgaaggacagcgtgggacacaaagagacaaaggcgataaagcagatgttcggcccattcccgtcatccagcgctacagccgcatgcaatgccacaaacagaataatatctcatttctcacaggatgatttgaccgcgctggtgcagatgacagagaaagagcacggcgacagggtgttcttcggcaagaatttggcctttagcttcgacatgcacgatctgtag

SEQ ID NO: 213138 - DNA, 336 bp, synthetic construct
  misc_feature 1..336: note = Description of Artificial Sequence: Synthetic coding sequence
  source 1..336: mol_type = other DNA
atggcattgcctcggctcacaggcgctctgcgttcgttcagtaatgtcaccaagcaagacaactataacgaggaggtggctgacttaaagatcaagaggtccaaactccacgaacaggtgcttgatctgggcctcacgtggaagaagatcattaagttcctgaatgaaaaactggagaaaagcaaaatgcagagcatcaatgaggaccttaaggacatcctccacgccgctaaacagatcgaggtgaattgtccattccagaaaaggaggctcgacggcaaggaagaagatgaaaagatgagtagggcctcagatcgttttcgaggattgcggtag

SEQ ID NO: 213139 - DNA, 6608 bp, synthetic construct
  misc_feature 1..6608: note = Description of Artificial Sequence: Synthetic coding sequence
  source 1..6608: mol_type = other DNA
atggcactgccccgattaactggcgctcttaggtccttcagtaatgtgactaagcaggacaactacaacgaggaagttgcggatctaaagattaaaaggtccaaactgcatgaacaggtgctggatttgggcctcacttggaagaaaataatcaaattccttaacgaaaagctggaaaagtcaaagatgcaatccattaacgaagacctaaaggacattctgcacgcagccaagcagattgtcggtaccgacaacggacgagaggccatcgagagcggggcagccttcctctttatgacgttccatctcaaggattctgtgggacacaaggaaaccaaagccatcaagcagatgttcggccctttcccttcctcgtcagcgaccgctgcttgtaacgctacaaacagaatcataagtcatttttctcaagacgaccttacagctctagtccagatgactgaaaaagagcatggagatagggtcttttttggaaagaacctcgccttcagcttcgatatgcacgatctggaccattttgacgaactccccatcaacggcgagacccaaaagaccatctcgctggattacaagaaatttctgaacgagcatctgcaggaagcctgcacacccgagcttaaacctgtcgaaaaaaccaatggtagttttctctggtgcgaagtggagaaatatcttaacagtacattgaaggagatgaccgaggtacctcgagtggaggatctctgttgcacactgtacgacatgttagcctcgataaaatctggggacgagctgcaggacgagcttttcgaattactagggccagagggactggagctgatagagaaactccttcagaacagaattaccatagtcgatagatttttgaacagctcaaacgaccatcgctttcaggcattacaggataactgtaaaaaaattctgggagaaaacgctaaacctaattacgggtgccaggttacaatccaatccgagcaggagaaacagctcatgaagcagtaccgacgagaggaaaagcgcattgctcgtcgcgagaaaaaggcaggagaggatttagaggtaagcgagggtctgatgtgctttgatccaaaggagctgagaatccagagggagcaggccctgctaaacgcccgatcagtacccattttaagtcggcaacgtgacgccgacgttgagaaaatacactatccccatgtttacgactcccaagcagaagcaatgaaaaccagcgcgtttattgctggtgccaaaatgattttgcctgaaggaatacaacgcgaaaacaataagctgtacgaggaggtgcgaattccttacagtgagccaatgccgctgagtttcgaggagaagcctgtgtatatacaagatctggatgagatcggccagctggcctttaaaggcatgaagagactgaacaggatccagagcatagtgttcgaaaccgcatataacaccaacgaaaacatgttgatctgcgcccctacaggtgccggaaagaccaatatcgcaatgctaactgtgcttcatgagattaggcagcactttcagcagggcgtaattaagaaaaatgagtttaaaatcgtatacgtggcccctatgaaggctcttgccgcagagatgacggactatttctccagacggctagaaccactgggcataatagtgaaagaacttacaggagatatgcagttgagtaagagtgagattctgaggacccagatgcttgtaacaacccccgaaaaatgggacgtggtaacaagaaagtcggtaggagacgtcgccctctcccagatagtgcgcctgttgattctggatgaggtccatctgctccacgaggatagggggcctgtgttggaaagcattgttgctcggactctcagacaggtcgagagtacccaatccatgattcgaatcttaggcctgagcgcgactctgcccaattatttggatgtggctacgttcctgcatgtcaatccctatattgggcttttctttttcgacggacgctttcgaccagttcccctgggccaaacgttcctgggcattaagtgcgctaacaagatgcagcaacttaacaacatggacgaagtgtgctatgaaaacgttctgaagcaggtcaaggccggacaccaggtaatggtgttcgtgcacgcgcgaaacgccaccgtgagaactgcaatgtcactgattgaaagagcaaagaattgcggacacatccccttcttttttccgacacagggccacgactatgtgctcgcagaaaagcaggtacagcgaagtagaaataagcaagtcagggaactgttccccgatggcttttctatccaccatgcaggcatgctccggcaggatagaaatctggtcgagaacttgtttagcaacggtcatattaaagtgttggtttgtacggccacacttgcctggggggttaacctgccagcccacgctgtcatcatcaaggggacccagatctacgccgctaagaggggctcctttgtcgacctgggaatcctcgatgttatgcagatcttcggtcgagcgggtcgccctcagttcgacaaatttggcgaagggatcatcattacaacccatgataaactgtcacactatctgaccctgctcactcagcgaaaccctatcgagagccagtttctggagtccctggcagacaatctcaatgccgaaattgcacttgggactgtcaccaacgtggaggaggcggttaaatggatatcctatacttacctctacgtgcgcatgagagccaaccctttagcctatggaatctcacataaggcctaccagatcgacccgacactgcggaagcatcgggagcagcttgtaatagaagtaggacgcaaacttgataaggcgcagatgatcaggtttgaggaacggactggctatttcagttcaaccgacctcggtagaacagcttctcactactacatcaagtataacaccattgaaacttttaatgaactgtttgacgcccataaaacagagggagacatatttgcaatcgtttcaaaagcagaagagttcgatcagattaaggtgagagaagaagaaattgaggaactggataccttgctgtctaacttttgtgagctgtcaactcccggaggggtcgagaacagttatgggaagattaacattcttttacagacttacatctcccggggtgagatggactctttctccctgatcagcgactctgcttacgtggcccaaaatgccgcacgtatagtgagggccttgtttgaaatagctctcaggaagaggtggccgacgatgacataccggttactaaatctatctaaggtaattgataagcgcctctggggatgggccagcccgttaagacagttctcaatccttccacctcacattctgaccagacttgaagagaaaaaactgaccgtcgataagcttaaggatatgagaaaggacgagataggccacatactgcaccacgtgaatatcggactgaaagtgaagcagtgcgtacatcagatcccatccgtcatgatggaggcttcgatccagcccattacaagaaccgtcctccgtgtaaccctctcaatctacgcagatttcacgtggaatgaccaagttcacgggaccgtgggggagccctggtggatctgggtcgaggatccaactaatgatcacatctaccactctgagtactttcttgctctcaagaaacaggtcatctctaaagaggcccagctgcttgtattcacaataccaatctttgagcccctccccagtcaatactacatccgagccgtgtccgacagatggttaggggctgaagccgtctgtattattaactttcagcatctcatattaccagaaaggcatccccctcatacagagctgctggatttgcagcccctgccaattacagctctgggatgcaaagcctacgaggccctgtacaatttcagtcatttcaacccagtacaaacgcaaatcttccacaccctttaccatacagattgtaatgtccttttaggagctccaaccggttccgggaagactgtggctgcagagctggccatcttcagagtgttcaataaatatcccacatctaaagctgtctacatcgctcctttaaaggccttggttagggagaggatggatgactggaaggtgcggatcgaagaaaagctgggaaagaaggtgattgaactcaccggagacgttaccccggacatgaaatctatcgcaaaagctgacctcatagtgaccacccccgaaaagtgggacggggtgtcaaggtcgtggcagaaccggaactacgtccagcaggttacaattctgatcatcgacgaaatccacttactaggcgaggagcggggaccggtgttggaagtaattgttagtagaactaacttcattagctcccatacagaaaagccagttcgtatcgtggggctctccaccgcgttagccaacgctcgcgacctcgccgattggttgaacattaagcaaatgggcctgttcaacttccgcccttcggtcagacccgttcccttagaggttcatatccagggttttcctgggcaacattactgtcccagaatggctagcatgaataaaccagcctttcaggctatccgatcccattcccctgcaaagcccgttcttatttttgtgtcttccaggcgccagaccaggttgaccgccctggagttgatcgccttcctagctacagaggaagacccgaaacagtggctaaacatggacgagagggaaatggagaacattatcgctactgtccgagattcaaatcttaagcttactcttgcttttggcattggaatgcaccacgccggactacacgagagagaccgtaagacggtggaggagctatttgttaactgtaaggtacaggtgctgatcgcaactagcaccctcgcctggggcgtcaactttccggcacacttggtcataattaagggaaccgagtattacgacggtaaaactcgacgctacgtggacttcccaatcacggacgtgctgcaaatgatgggaagggctggaagaccgcagttcgacgatcagggtaaggccgtcatcttagtgcatgacattaaaaaggacttctacaagaagtttttatatgagccattccctgttgaaagcagcctgctgggcgtgctgtcagatcatttgaacgccgagattgccggaggcaccattacctccaagcaagatgcattggactacataacgtggacatatttttttcgcaggctcattatgaatcccagttactataacctgggtgatgtttcacacgattcagtgaataaattcctatcgcatctcatagaaaagtctctcatcgagctggaattgtcttactgcattgagataggggaagataacagaagcatcgaacccctgacttatggcaggatcgcttcctactactacctgaaacaccagactgtgaaaatgttcaaggatagactaaaacccgagtgcagcaccgaggagctgctgtccatactgagcgacgccgaagaatacactgatctacctgtgagacataacgaagatcatatgaacagtgaattggctaagtgcctgcctatcgaaagcaacccccactctttcgacagccctcacaccaaggcccacctgctgttgcaggcacatctcagtcgcgctatgttgccatgtcccgactacgataccgatacaaagactgtcttggaccaggcgttgcgggtttgccaggctatgctcgatgtggcagcgaatcaggggtggctcgtgacagtgctgaacataaccaatttgatccaaatggtaatccagggacgctggttaaaagactcaagtctgcttactcttccaaatatagagaatcaccacctgcacctgttcaagaagtggaagccaataatgaaaggcccacacgccagaggcaggacatccatcgaatctctgccggaactgattcacgcttgcggcggaaaagaccatgtcttcagcagcatggttgaaagtgagctccacgccgctaaaacgaaacaggcttggaatttcctctctcatctacctgtcatcaatgtgggaatttccgtgaaaggcagctgggatgacctggtcgagggtcacaatgaattgagcgtgagcaccttgaccgccgataagagagacgataacaaatggataaaactgcatgcagaccaggaatacgtcttacaggtcagcctgcagagggtccatttcgggttccataagggtaaacccgagtcatgcgcagtgacgccacgtttcccaaaaagtaaggatgaagggtggtttctcattttaggtgaagttgacaagagagagctgatcgctcttaagagggttggctacatccgcaaccatcatgtcgcaagcttgtctttctatacccccgaaatcccaggtagatatatttacaccctgtactttatgtcagattgctacctggggctcgatcagcagtacgacatctacttaaacgtaacacaggcctctttgtcagcacaggtaaatacgaaggtgtccgatagtctgactgacctcgccttgaagta

SEQ ID NO: 213140 - DNA, 816 bp, synthetic construct
  misc_feature 1..816: note = Description of Artificial Sequence: Synthetic coding sequence
  source 1..816: mol_type = other DNA
atggaagacagccacaaatctacaaccagcgagacagccccacagccgggaagtgctgtacagggggcacacatttcccacattgcccagcaggtcagttctctgagcgaatccgaggaaagtcaagactcctccgatagtataggaagcagtcagaaagcccatggcattctggcacgaaggccctcctacagaaagatactgaaggatttgtcttccgaggatactcgcggaagaaaaggcgacggagaaaattccggcgtgagcgctgcagtaacttcaatgtccgtgcctactcctatctaccagacttcatctgggcagtacatcgccattgcccctaatggggcactgcagctcgccagtccagggaccgatggtgttcagggcctccagactctgacgatgacgaactctggctccacacagcagggcacgacaatacttcagtacgcacaaacaagcgacggacagcaaatcctggtgccctctaatcaggtggtcgtccagacagcatctggagatatgcagacctaccagatcagaaccacccccagtgcaacttccttgccacagaccgtggtcatgacttcccccgtcacgttgacatcccagacaaccaagaccgatgacccgcagctgaagcgagagatccgattgatgaagaatcgggaggctgccagagaatgcaggaggaagaagaaggaatacgtgaaatgcttggagaaccgtgtagctgtccttgagaatcagaataagacactcatcgaggaactaaagacccttaaggatctgtacagtaataagagtgtctag

SEQ ID NO: 213141 - DNA, 411 bp, synthetic construct
  misc_feature 1..411: note = Description of Artificial Sequence: Synthetic coding sequence
  source 1..411: mol_type = other DNA
atgaccaattccgggtcaactcagcagggtactacaattctgcagtacgctcaaactagcgatgggcagcagatcctggttccctccaaccaggtcgtggttcaaacagcttccggcgacatgcagacataccagatcaggaccacgccatctgcgacttcccttcctcagactgtggtgatgaccagccccgtgacgctgacttcgcagaccaccaagactgatgatccccaactgaaaagagagattagactcatgaaaaatcgcgaggctgccagggagtgtcgcagaaagaaaaaggagtacgttaagtgcctagagaatcgggtggcagtgctggaaaaccagaacaaaactctgatcgaggaattgaaaactctaaaagacctatattccaataagagcgtatag

SEQ ID NO: 213142 - DNA, 603 bp, synthetic construct
  misc_feature 1..603: note = Description of Artificial Sequence: Synthetic coding sequence
  source 1..603: mol_type = other DNA
atggaagattcacacaagagtacaacctcagagacagctccccagcccggaagcgccgtccagggagctcacatctctcacatcgcccagcaagtgtcttccctgagtgagagtgaagagtctcaggattcaagcgattccataggctctagtcaaaaggcccatggaattcttgctagacggccatcatatagaaaaatactcaaggacctttcatctgaggatacgcgcggacggaagggcgatggggaaaatagcggcgtgagtgccgcagttacctccatgtctgtgccaacacctatctaccagactagcagtggccaatatatagccatcgcccctaatggggcactgcagctcgcgtcccctggcacagacggtgtgcagggtctccagaccctcaccatgacaaacagcggctccacacagcaaggcaccaccattctgcagtatgctcagacgtctgatggccaacagatcctggttccttccaaccaggtcgttgtccaaaccgcctccggcgatatgcaaacctatcagattcggactacgccttcggcaacttctctgccacagactgtggtgatgactagtccggtatag

SEQ ID NO: 213143 - DNA, 513 bp, synthetic construct
  misc_feature 1..513: note = Description of Artificial Sequence: Synthetic coding sequence
  source 1..513: mol_type = other DNA
atggaagactcacacaaatcgactactagcgagacggccccacagcccggatcagcagtgcaaggtgcccacatatcccacatcgcacagcaggtttctagcttatctgaatccgaggagtctcaagactctagtgattccattggcagtagccagaaagcccacggaatcttggcacggagacctagctaccgcaaaatcctgaaggatctgtcatctgaggacacacgaggacgcaagggcgatggtgagaactccggggtctcagccgctgtgaccagcatgagtgtaccaactcctatctatcaaacatccagcggtcagtatatcgctattgctcccaatggcgcactccagttggcctcccccggaaccgatggggtacaagggcttcagactcttaccatgaccaatagtggctcaacacaacagggaaccacgattctacaatacgcccagactagcgacgggcagcagatcctggtcccgtccaaccaggtggtcgtgcagtag

SEQ ID NO: 213144 - DNA, 321 bp, synthetic construct
  misc_feature 1..321: note = Description of Artificial Sequence: Synthetic coding sequence
  source 1..321: mol_type = other DNA
atgatgttgcagcaccctggtcaggtctcggcaagtgaagaagagctcagattcgccatccagaacaaacatttatgccaccgtatgagcagcgctcttgagagtgtgaccgtatcagaccgccctttgggagttagtattaccaaagccgaggtggcccctgaagaggacgaaaggaagaaacgacgcagggaacgaaataaaatcgccgctgctaaatgtcggaacaagaagaaagaaaagaccgaatgcctgcagaagctcccacgcccattctgggtccagaagacttgcatctgggctgtggacagctgcaagtag

SEQ ID NO: 213145 - DNA, 546 bp, synthetic construct
  misc_feature 1..546: note = Description of Artificial Sequence: Synthetic coding sequence
  source 1..546: mol_type = other DNA
atgatgctccaacacccgggacaggtcagcgcgtcggaagtatcagctagtgctattgtgccctgcttgagcccaccagggtcattggtgttcgaagatttcgctaatcttacgccatttgtcaaggaggaattgagatttgccattcagaacaaacacctctgccatcgcatgagctcggccctagagtctgtgacagtgtcggaccgtcctttaggtgtgtctattacaaaagccgaggtggcccctgaagaagacgagcggaaaaagaggaggcgcgagagaaataagatcgccgctgcaaagtgtcggaacaaaaagaaagaaaagactgagtgcttacaaaaggagagcgaaaaactggagagcgttaatgctgagctgaaagcacaaatagaagaactgaaaaacgaaaaacagcacctgatttacatgcttaatttgcacaggcctacatgtatagtccgcgcacagaatggtagaacacctgaggacgagcgcaatttgttcattcagcagattaaggagggcaccctgcagtcttag

SEQ ID NO: 213146 - DNA, 528 bp, synthetic construct
  misc_feature 1..528: note = Description of Artificial Sequence: Synthetic coding sequence
  source 1..528: mol_type = other DNA
atgatgctccagcaccccggtcaagtttcagcttctgaggtgagtgcatcggccattgtgccctgcctgtctccgccagggtccttggtgtttgaagattttgcaaacctcacgccatttgtaaaggaggagctccggttcgcgatacagaacaagcatctgtgccaccggatgtcatccgcccttgagtctgtgactgtctccgaccgccctttgggggtgtcgataactaaggctgaagtggctcctgaagaggacgagcggaaaaagcggagaagggagagaaataaaatcgcagccgcaaagtgtcgcaacaaaaaaaaggaaaagactgagtgtctgcagaaggagtcggagaaactggaatcagtcaacgccgaattgaaagctcagatcgaggagttgaagaacgagaagcaacacttgatttatatgctgaatctgcacagaccgacatgtatcgttagggcccaaaatgggcgtacaccagaggatgagcgcaatctctttatccaacagatcaagtag

SEQ ID NO: 213147 - DNA, 408 bp, synthetic construct
  misc_feature 1..408: note = Description of Artificial Sequence: Synthetic coding sequence
  source 1..408: mol_type = other DNA
atgatgctacaacatcccggtcaggtgtctgcatctgaagtatccgcctccgctatcgttccatgcttaagccctccaggaagcctggtgttcgaagatttcgcaaatcttaccccgtttgttaaagaggagctgaggttcgcaatccagaacaagcatctctgccacagaatgtcttctgcattggaatccgttaccgttagtgatcgcccactcggggtgtctatcaccaaggccgaagtggcacccgaagaagacgaacgaaaaaaacgcaggagggaacgcaacaagattgccgctgcgaaatgccgcaataaaaaaaaggaaaaaacagagtgtctgcagaaattgcctagaccgttctgggtgcaaaagacctgtatttgggcagtggacagctgcaagtag

SEQ ID NO: 213148 - DNA, 375 bp, synthetic construct
  misc_feature 1..375: note = Description of Artificial Sequence: Synthetic coding sequence
  source 1..375: mol_type = other DNA
atgagctctgccctggaatcagtgactgtcagcgacagaccccttggcgtcagcattacaaaggccgaggtcgctccagaggaagatgagcgaaagaagcggaggagagagcgtaacaagatagccgcagcaaaatgccggaacaaaaagaaagagaaaacagaatgcctgcagaaggagtcagaaaagctcgagagcgttaatgctgagctgaaagcacagattgaagaattgaaaaatgaaaaacagcacctgatctatatgctcaatcttcaccggcctacatgcatcgtcagggcacagaacggcagaacccccgaggacgagcgcaacttgttcatccagcagattaaagaaggcaccctacagtcctag

SEQ ID NO: 213149 - DNA, 546 bp, synthetic construct
  misc_feature 1..546: note = Description of Artificial Sequence: Synthetic coding sequence
  source 1..546: mol_type = other DNA
atgatgctgcagcaccccggacaggtttcagcgagtgaggtaagcgcctctgctatcgttccttgtctcagccctcctggctcccttgtatttgaggatttcgccaatcttactccatttgtgaaggaggagctgcgtttcgccatccaaaataaacatctgtgtcaccggatgtccagcgcacttgagtcggtgacagtgtctgaccgaccacttggcgtcagcatcacgaaggccgaagtggctcctgaagaggacgagcggaagaagcgcaggcgcgagcgcaacaaaattgctgcagcaaagtgtcggaacaagaagaaggaaaagaccgaatgtctccagaaggaatcagagaaattggagagcgtgaacgccgaactgaaagcccagatagaggaacttaagaatgaaaagcagcacctcatctatatgctaaaccttcatcgtccaacttgcattgtacgcgcacagaacggccgaaccccagaagacgagagaaacctatttatccagcagattaaggaaggcacactccagtcttag

SEQ ID NO: 213150 - DNA, 408 bp, synthetic construct
  misc_feature 1..408: note = Description of Artificial Sequence: Synthetic coding sequence
  source 1..408: mol_type = other DNA
atgatgctgcagcaccccggacaggtgtctgcctctgaggtgtctgcaagtgccattgtgccctgcctctctcctccgggaagcctcgtgttcgaagactttgctaacctcacaccgttcgtgaaggaagaattgcgttttgccattcagaacaagcatctctgtcaccggatgagctccgccttggaatccgtgacagtgagtgacaggcccttaggcgtgtcgattaccaaggccgaagtcgctcctgaggaagatgagcgaaaaaagagacgtagagagcgaaacaaaatagccgcagctaaatgccgcaacaagaagaaggagaagacagagtgtctgcagaaactgccaagaccattctgggtccagaagacatgtatatgggctgtggactcatgtaagtag

SEQ ID NO: 213151 - DNA, 1056 bp, synthetic construct
  misc_feature 1..1056: note = Description of Artificial Sequence: Synthetic coding sequence
  source 1..1056: mol_type = other DNA
atgaccgagatgagctttcttagttctgaagtcctggttggcgaccttatgagcccttttgatcagtccgggttgggtgcggaggagtccctcgggttgcttgacgactacttggaggtggccaagcatttcaaaccacatggcttttccagtgataaagcgaaggcaggaagcagcgaatggcttgccgtggacgggctggtgagtccttccaataactcaaaagaggacgccttcagcgggaccgattggatgttggagaagatggaccttaaggaattcgacctcgacgccctgctcgggatcgatgacctggaaacaatgccagatgacctcttaacaacgctcgacgatacctgcgatttattcgcacccctcgtacaggaaaccaacaaacagcctcctcaaactgtgaatcctatcggccacttaccggagtcactgactaaaccagaccaagtcgcaccttttacatttctccagccattgcctctgtcccccggagtgctgagcagcacacccgaccacagtttttccttggagcttggtagcgaggtcgacattacagaaggtgatcgcaaacctgactacaccgcatatgtggccatgatcccccaatgcataaaagaggaagacacccctagtgataacgattcaggtatttgtatgagtccagaaagctatctcggatctccacagcattccccttctacaaggggaagtcccaatagatcactgccctctcccggagtgctgtgtggaagcgcgaggcccaaaccttacgacccacctggcgagaaaatggtcgccgctaaggtgaagggagaaaagctggacaagaagctgaagaaaatggagcaaaataagaccgccgcaaccagataccgtcagaagaagcgggctgagcaagaagccctcaccggcgaatgcaaagagctcgagaaaaagaacgaagccctcaaagagcgcgctgactccctggcaaaggaaatacagtacctcaaggacctcatagaagaagtgagaaaggctaggggaaagaagagggtgccttag

SEQ ID NO: 213152 - DNA, 1056 bp, synthetic construct
  misc_feature 1..1056: note = Description of Artificial Sequence: Synthetic coding sequence
  source 1..1056: mol_type = other DNA
atgacagagatgagtttcttatcctctgaggtgctggtgggagatttaatgagcccattcgatcagagcggcctcggggctgaagagagcctgggtcttttggacgattatttagaagtcgccaaacatttcaaaccacacgggttttcctccgataaagccaaggccggaagctctgaatggctggccgtggacggcttagtgagcccatccaacaatagcaaagaagatgccttttctggaactgactggatgctcgaaaaaatggacctaaaggaatttgatctcgacgctctgctgggcatcgatgacctcgaaaccatgcctgacgacctgctgaccaccctggatgacacctgcgacctcttcgccccactggtgcaggaaacaaataagcagccaccccagactgtcaatcctattggtcatctgccagaatccctaaccaagcctgatcaggtagcgccatttacattcctgcagccactacctttatccccaggagttctctcttccacccccgatcatagcttctctctggagctggggtctgaggttgacattactgagggagaccggaaacctgattatacagcttacgtcgcaatgatcccccaatgcattaaggaggaagatactccctccgataatgactcgggaatctgcatgtcccccgaatcctacttgggaagcccccagcattctccttccacgcgcggaagtcctaacaggtccctccctagccccggtgtactgtgcggatctgctcggcctaagccatatgatcctcccggagaaaagatggtcgcagccaaagttaagggtgagaagttggataagaagctgaaaaagatggagcaaaataaaaccgccgctacaagataccgccaaaagaagcgcgctgagcaggaggcactcactggcgaatgtaaggagctggagaagaaaaacgaggccctgaaggagagagctgactctctcgctaaagagattcagtacctgaaggatttgatcgaggaagttagaaaggccaggggaaagaaacgagttccttag

SEQ ID NO: 213153 - DNA, 1056 bp, synthetic construct
  misc_feature 1..1056: note = Description of Artificial Sequence: Synthetic coding sequence
  source 1..1056: mol_type = other DNA
atgaccgaaatgagctttctttccagtgaggtgctggtgggggacctgatgtccccttttgaccaaagcggccttggcgctgaagaatccctggggctgttggacgactatcttgaagtcgcaaagcactttaagccacatggatttagctctgataaggctaaggccggttcatctgagtggctggccgtggatggcttggtctccccgagtaacaactcaaaggaggacgccttctccgggacagactggatgttggagaagatggacctgaaagagtttgacctagatgctctgctgggcatcgacgatctcgagacaatgcctgatgacctactgactactttggacgatacatgcgacttgtttgctccattagtgcaggagacaaataagcagcctccgcaaactgtgaatcccatcgggcatctgcctgaaagtcttaccaagcccgaccaggtcgccccatttacttttttgcaacctttgcctctgtctcccggagtcctttcatctacccccgatcattctttcagtttggaattgggatcagaggttgatataaccgagggcgaccggaaacctgattataccgcttatgtcgccatgattccacagtgcatcaaggaggaagacaccccaagcgataacgactctgggatatgcatgtcccctgaatcctacctcggatccccccaacatagcccaagcactcgcggatcccccaatcggtctttgcccagtccaggcgtcctctgcggatcagcaaggcctaagccatacgatccgcctggcgagaagatggttgccgcaaaggtgaagggcgaaaagcttgataaaaaactgaagaaaatggagcagaacaaaacagcagccaccaggtaccggcaaaagaagcgtgccgagcaggaggcactcacaggggaatgtaaagaactcgaaaagaagaacgaggccctcaaggaacgcgcagacagccttgcgaaagagattcaatacctgaaggacctgatcgaggaagtccgcaaagctcgcggtaagaaacgggtgccatag

SEQ ID NO: 213154 - DNA, 849 bp, synthetic construct
  misc_feature 1..849: note = Description of Artificial Sequence: Synthetic coding sequence
  source 1..849: mol_type = other DNA
atgagcctcctggccacactaggtctcgaactggaccgcgctctactgcctgcctccgggttgggttggttagtggactatgggaaactgcctcccgctcctgcccctctggcgccttacgaggtactgggtggagcgttagaagggggtctcccagtggggggtgagccgcttgcgggagatggattcagcgattggatgacagagagagtggacttcaccgccttgctgcctctcgaaccgcctttgcccccagggacgctgccccaacctagtccgacgcctccagacctcgaagccatggcctccttgctgaagaaggagctggagcaaatggaggactttttcttggacgctccaccactccctcccccatcacctccccctctgccaccgcctccactacccccagcaccaagcctgcccttgtcccttccaagcttcgatcttccccagccccctgttctcgatacactagacttgctggctatctactgtcggaatgaagctgggcaggaggaggtcggtatgccgccattacctcctccacagcagcctcctccgccatcccctccacagcccagcagattggcaccttacccccaccctgccactactcggggagaccgcaaacaaaagaagcgtgatcagaataaatccgcggctctgcggtatcgacagcgaaagagggcagagggtgaggccctagagggggaatgtcagggccttgaagcacgcaatagagaactgaaggagcgggctgaaagcgttgagagggagattcagtacgtcaaagatctactgatcgaggtgtataaggctcggtcccagcgaaccagaagttgctag

SEQ ID NO: 213155 - DNA, 2013 bp, synthetic construct
  misc_feature 1..2013: note = Description of Artificial Sequence: Synthetic coding sequence
  source 1..2013: mol_type = other DNA
atgggcgaaccagccggagttgccggtacgatggaaagtcctttttctcctggcctgttccatcggctggatgaggactgggacagtgccctgtttgccgaactcggatatttcacggacaccgacgaactgcagttagaggccgcaaacgagacttatgagaacaacttcgataatctagattttgacctggatttaatgccctgggagagcgacatctgggatatcaataatcagatctgtactgtgaaagacatcaaagcagagccccaacctctctccccagcctccagctcctactccgttagcagccctcgcagtgtggacagctatagttctacgcaacatgtgccagaggagctcgacctgagttcatccagccagatgagccctctcagcctctacggtgagaatagtaacagcctctcaagcgccgaacctctgaaagaggataaacccgtcactggcccacggaataagacggaaaatggattaacaccaaagaagaagatccaggtcaactccaagccctcgatacaacccaaacctctactgctccctgccgcacccaaaactcaaactaattcttcggttcctgccaagactattataatccagacagtgcccaccctgatgcctctcgcgaagcagcaaccaataattagcttacaaccagcacccactaagggccagactgtgctgctgtctcagcctaccgtagtgcaacttcaggcccctggagttctgcctagcgcccagccagtgttggcagtagccggtggggtgactcagctgcctaatcacgtggttaacgtagttcctgcccctagtgctaattctccggtcaacggtaagctttccgtaaccaagccagttctgcaaagcacaatgcggaacgtggggtccgacatcgctgtcctgcgacggcagcagcggatgatcaagaatcgggaatccgcctgccagagccgcaagaaaaaaaaggaatacatgctgggtcttgaagcgaggttaaaggctgcacttagtgagaacgagcagctgaaaaaagagaacggaacgttaaagcgccaactggatgaagtagtaagtgaaaatcagcgacttaaggtgccctcacccaagcggagggttgtctgtgtaatgattgttctggcattcatcattctaaactacggacctatgtccatgctggagcaggatagtcggaggatgaacccttcagtgagtcccgcaaaccagaggaggcaccttttggggtttagcgcaaaagaggcccaagacaccagcgacgggatcattcagaagaacagctatagatacgaccactccgtttcaaatgacaaagcacttatggtgctgaccgaggagccactgttatacatcccacccccaccctgtcagccactcatcaatacaaccgagagtctcaggctgaaccacgaactgcgtggctgggtgcacaggcacgaagtagagcgcacaaaaagccgcagaatgacaaacaaccaacagaagacgcggatactccagggcgcactggagcagggctcaaattcacagctgatggcagtgcagtacaccgaaactacttcgtctatctcacgcaattcaggaagtgaactacaggtctactatgcctcacctcgctcatatcaggacttcttcgaagcgattagacgtcggggagatactttctacgtggtctcctttcggagggatcacctcctgctccctgccactacccacaacaaaacaacaaggccgaagatgagcatcgtgctcccggcaatcaatattaacgagaatgtcatcaatgggcaggattacgaggtgatgatgcaaatcgactgtcaggtcatggacacccgaatcctgcacattaagtccagttccgtcccaccatacctcagagaccagcagcgcaatcagacaaacacgttcttcggcagccccccagcagcaactgaggccacacatgttgtctcaactattcccgaatctctgcaatag

SEQ ID NO: 213156 - DNA, 2112 bp, synthetic construct
  misc_feature 1..2112: note = Description of Artificial Sequence: Synthetic coding sequence
  source 1..2112: mol_type = other DNA
atggccgaacttatgttgttatctgagattgcagaccctacccggttttttaccgacaacctcttgagtcccgaagattggggcctgcagaactctactctgtacagcgggttagacgaagtggctgaagagcaaacccagctgttcaggtgtcccgagcaggacgtgccatttgacggaagtagtctcgacgtgggaatggacgtgtctccttcagagcctccctgggagctcttacccatcttccccgatctccaagtcaaatcagagccctccagcccatgtagcagctcaagcctgtcatctgagtcatccagattgagcaccgagccatcttcagaagccttaggtgttggagaagtgctacacgtgaagactgaaagcctcgcgcctcccctgtgtctgctaggggacgatcctacctcttccttcgaaacggttcagatcaacgtgatcccgactagcgacgatagtagcgacgttcagaccaaaattgaacccgtgagcccttgttcttccgtcaattcagaagcatccctgctcagtgcagattcatcttctcaagcgttcataggggaagaagtgctagaggtgaagacagagtcgctttctccttcaggttgcctgctgtgggacgtgcccgcaccctctttgggggctgtgcagataagcatggggccaagcctcgacggcagctccggcaaggcactgcctaccagaaaacctccactgcagcccaagcctgtagtgctgacaaccgtgcccatgccatcccgggctgtgccgccatcaacaaccgtgctgctgcagtcactggtccaaccacctccggtgagcccggtcgtactaatccagggcgctatcagggttcagccagagggtcccgcaccttcattacctcgcccagagcggaagtcgattgttcctgcccctatgccaggcaactcttgtccaccagaagtcgacgcaaagttgctgaaaaggcaacagcggatgataaagaaccgggagagtgcatgccagtccagacgaaaaaaaaaggagtatcttcaagggctggaggcgagactgcaagccgtgttggctgacaaccagcagctgaggcgggagaacgcggcactccgccgacggctggaagcccttctagccgagaattcagagctgaagttaggaagcggtaatcgtaaggtggtctgcattatggtatttttactcttcattgccttcaatttcgggccagtgagcattagcgagccaccgagcgctcctatctctcccagaatgaacaagggcgagccacaacctcgtagacacctgctgggattcagtgaacaggagcctgtgcagggggtggaaccactgcaaggttcctctcagggacccaaggagccccaaccttcacctactgatcagcctagctttagtaacctcacagcctttccgggtggagccaaagagctcctgttgcgagatctggatcagttattcctcagttccgactgccgccacttcaaccggacagagtctttgcgcctggcagacgagctctcagggtgggtgcaaagacatcagcgaggaagacgaaagatccctcagcgggcacaggagagacagaaatcacagcctcgcaagaagtcaccacccgtcaaagctgtacccattcaacctccgggtccccctgagcgggattcagtagggcagctccaattgtaccgacatccagacaggagtcaaccagcattcctggacgcaatcgacagaagggaggacacattttacgtggtgtccttccgaagggaccatctgctgctacctgctatcagccacaacaagaccagccgaccaaagatgtcccttgtgatgcctgcaatggctcccaacgagacattgtcgggcaggggagcgccaggggactacgaagagatgatgcagatcgagtgtgaagttatggacaccagggtaatccacatcaaaacgtcaaccgtgccccctagtctccggaaacagccctctcctacgccaggcaacgccaccggaggcccactgccggtctccgccgcttctcaggcccatcaggcctctcaccagcccttatacctgaatcacccatag

SEQ ID NO: 213157 - DNA, 669 bp, synthetic construct
  misc_feature 1..669: note = Description of Artificial Sequence: Synthetic coding sequence
  source 1..669: mol_type = other DNA
atggccgaactcatgctcctctcggagattgccgacccaaccagattctttaccgacaacttgctgtccccagaagactggggtctgcagaactccacactgtattcaggcctcgacgaggtcgcagaagagcagactcaactctttagatgccctgagcaggatgttccgttcgatgggagtagcctggacgtggggatggacgtgtctccaacagatcagccaagcttcagtaatctgacagcatttcccggtggcgctaaggagctgctcctaagagatctcgaccagctcttcctgagctctgattgccgacactttaatagaacggagtccctgcgtctggcagacgaactgagtgggtgggtgcagcgccaccagcggggtcgccgaaaaatcccgcagagggcccaggagcgtcagaagtcacagcctcgcaagaagagtcctcctgttaaggcagtgccgattcaacctcctggacctcctgaacgggattccgtgggacaactccagctgtacagacacccggatcgtagccagcctgcttttctcgacgcaatcgaccggagggaggacacattctatgtggtgtcatttaggaggaccacctgttgctcccagccgagcgcaaccactaggccccctggtcccagatgtccctggtag

SEQ ID NO: 213158 - DNA, 2103 bp, synthetic construct
  misc_feature 1..2103: note = Description of Artificial Sequence: Synthetic coding sequence
  source 1..2103: mol_type = other DNA
atggcagaactcatgctgcttagtgagattgccgaccccaccaggttttttaccgacaatctgctatcaccagaagactgggactcgacactctattcaggacttgatgaagtcgccgaggaacaaactcagctattccgctgtcccgagcaagatgtgccctttgacggatccagcctggatgttggaatggatgtcagcccttctgagcccccatgggaattactccctatttttcctgacttacaagtgaagagcgaaccaagctcaccttgctctagtagtagtctgtcctcagagtccagtagactctcaacagagccgagcagtgaggctctgggtgtaggagaggtactgcacgtcaagaccgagtccctggcacctcccttgtgtctactcggtgatgacccgacatccagcttcgagactgtacagataaatgtgattcccacttcagatgattcctcagacgtgcagactaagatcgagccggtgtctccatgttcctcggttaactctgaagcctctctgctgagtgcagacagtagttcccaggcctttataggggaagaagtgctggaggtgaagacagaaagtctgagccctagtggctgtctgttatgggatgtgccagcgcctagtctgggcgcagtccaaatctctatggggccttctctggatgggtcctccggaaaggccctcccaacacgtaagcccccattgcagcctaaacccgtggttctgaccaccgtgcccatgccctccagggcagtgccacccagcactacagtgctgctgcagtcactggtccagccacccccagtgtcccctgtggtgctcattcaaggagctattcgcgtacagcctgaaggtccggctccatccttgccacggcctgagcgtaagtccattgttcctgctccgatgcccggaaatagctgccctcctgaggtggacgcgaagctgctgaaacgccaacagcgaatgattaaaaaccgcgagtcggcctgtcaaagccggagaaagaagaaagagtacctgcagggtcttgaagcgcgattgcaagccgtgctcgcagataaccagcagctgcgtcgggagaacgcggcattacgcagacgtctagaagctttgttagcggagaattctgagctgaagctgggtagcggcaaccgaaaggtcgtgtgcatcatggtgtttctcttgttcatcgctttcaatttcggcccagtgtcaatcagtgaaccgccttccgcacctatctctcccaggatgaataaaggagagcctcagcctagacggcacctgttgggctttagtgagcaggagccagtccagggcgtggaacctctgcagggatcctcacagggcccaaaagagccccagcctagccccaccgatcagccatctttcagcaacctcacagccttccccggaggcgctaaagagctccttcttcgggacttggatcagctgtttctgtcttctgactgtagacatttcaataggacagagtcactccggctggccgatgagctcagtggctgggtgcaacgccaccagcggggaaggcggaagattccccagcgtgcacaggagaggcagaagagccaaccacgcaaaaagtcaccaccagtgaaagctgtacccatccaaccccctgggcctccagaaagggacagtgtgggacagcttcaattatacaggcatcccgatcgaagtcagcccgctttcctggacgcgatcgatcggagagaggacactttctacgtggtaagcttccggcgtgaccatttgcttctgccggcaatttcacacaacaagacatccaggcccaagatgagccttgttatgcccgcaatggccccaaatgaaacgttatctggccgaggtgcacccggtgactacgaggaaatgatgcagatagaatgcgaagttatggacacacgagtaatccatatcaagacgtctaccgtcccgccatccctccggaagcagccctccccgacccccggtaacgctaccggaggacccctccccgtgtcagccgcatcacaggcacaccaggcatcccatcagcccctatacctgaaccatccatag

SEQ ID NO: 213159 - DNA, 2112 bp, synthetic construct
  misc_feature 1..2112: note = Description of Artificial Sequence: Synthetic coding sequence
  source 1..2112: mol_type = other DNA
atggcagaactaatgctgttgtccgagatcgctgacccaactcgcttcttcaccgacaatctcctgtcccccgaggactgggggctccagaattccactctgtattctggattggatgaagtagctgaggagcaaacacaactgttccgctgtccagagcaagatgttccattcgatgggtcctctctcgatgtgggtatggacgtttccccatctgagcctccctgggagctgctccccatcttccctgacttgcaggtcaaatctgaacccagttccccttgttccagctccagcctgagctccgaaagttctcggttgtcgacagagccatcaagcgaggcacttggtgtaggcgaagtcctacacgtaaagactgaatccctggcaccccctctgtgcttgctgggagatgatccaacctcatcattcgaaactgtccagataaacgtaattccaacctcggacgattcatcagatgtgcagaccaaaattgagccagtctctccctgttccagtgtgaacagcgaggcatccttgctgtctgcagattcctcttcacaggccttcataggtgaggaggtcctcgaagttaagaccgaaagcctgtcgccctcagggtgcctactttgggatgtaccggctccctccttaggggcagtacagatttcgatgggcccatctctggacggctccagcggaaaggcactgcccacccgtaagcctcccttacagcctaaacccgtagtcttgaccactgtccccatgccatcacgcgcagtacccccaagtacaaccgtgctcctacagtcactagtgcagcctccacccgttagccccgtggtcctgatccagggggcaatcagagtgcagcctgagggtcccgcaccaagtctcccccgaccagagagaaagtcaatagtccccgcacctatgccaggaaactcctgtccccctgaggttgatgcaaaactgctcaagcgacagcagaggatgataaaaaatagagagagtgcatgccagtctcgaaggaaaaagaaagaatatctccaaggactggaggccaggcttcaggccgtattggcagataatcagcaattacgcagggagaacgcagcccttcgtaggcgccttgaagcgctattggctgaaaacagcgaacttaaactggggagtggcaataggaaagtagtctgtataatggtgtttttgctgttcatcgcctttaattttgggcctgtgtccatctcagaaccgccttccgcgcctattagtccacggatgaacaagggcgagcctcagcctagacggcacctgttagggttctctgagcaagaacccgtacagggggtcgaacctctccaggggtcctcccagggcccaaaggaaccgcagccctcccccaccgaccagccttctttttccaatttaaccgcattcccaggaggtgccaaggagctgctgttacgagatctggaccaactcttcctgtctagtgactgtcgccattttaacaggacagagtcccttcggcttgctgatgaactgtcgggttgggtgcagcgccaccagagggggaggcgaaaaattccacaaagggcacaggagcgacagaagagccagcccaggaagaagtctccccctgtgaaggccgtccctatccagcctcctggccctcccgaaagggatagtgtcggacaacttcagttatatagacatccagacagaagtcagcctgctttcctggacgctatcgaccggagggaggacaccttctatgtcgtaagctttagacgcgaccacctgctactccctgccatctcccataataaaacaagtcggcctaagatgtccctggtgatgcccgcaatggctccaaacgagacgttgtctggcagaggggcacctggtgactacgaagaaatgatgcagatagagtgcgaagtaatggatactagagtgatacacataaagacttccaccgtgccacccagcttaagaaagcagcccagccctacacccggaaatgccaccgggggtcctttacctgtgtcagcagcctcacaggctcatcaggcatcgcatcaacctctctacctgaatcatccatag

SEQ ID NO: 213160 - DNA, 2103 bp, synthetic construct
  misc_feature 1..2103: note = Description of Artificial Sequence: Synthetic coding sequence
  source 1..2103: mol_type = other DNA
atggccgagcttatgcttctgagtgaaattgccgaccccacaaggttcttcactgataatctgctgtctcctgaggattgggactcgaccctgtactctggtctggacgaagtggcagaagagcaaacccagctcttcaggtgcccagagcaggacgtaccgtttgatggcagctccctagacgtcggcatggatgtcagcccgtctgaaccaccatgggagctccttcctatctttcctgacctgcaggtgaaatctgaaccctcctctccatgttctagctcaagcctttcatccgagtcttcccgactgagcaccgaaccatcatctgaagcactcggggtaggggaggtgctccatgtgaaaacagagagtctggcccctccactgtgtctattgggtgatgacccaacttcttcatttgaaacagttcaaattaatgtcatccccacatctgatgatagctcagacgtccagaccaaaatcgaacccgtctcaccttgttcctccgtgaacagcgaggcttccctgctgtccgcagattcttcatctcaggcttttatcggcgaggaggttctcgaagtcaaaaccgagtcattgagtccaagtgggtgcctgctgtgggatgtcccagcccctagccttggggctgtgcagatatctatgggcccatctctggatgggtcttctggtaaagcccttccaacccgaaagcccccattgcagccaaagcctgtggtgctcaccactgttcccatgccctctagggccgtgccaccgtctaccacagttttgctgcagtcactggtccagccccctccggtttctcccgttgtgctgatccagggggctattcgagtgcagccagagggtcctgccccttctctgccgagaccagagcgcaaaagcatagtgcccgctcccatgcctggaaactcttgccctcccgaggttgacgccaaactgctaaagcgtcagcagcgtatgattaaaaatagagagtccgcctgccagtcccgcaggaaaaagaaggagtatttgcagggcctggaggctcgcttacaagccgttctcgcagataaccagcagcttagaagggaaaatgcggcactgaggagacgcttggaggctcttcttgcagagaactcagagcttaagctcggatctggaaaccgcaaggtggtctgtatcatggtgtttctgctatttatagcatttaatttcggaccagtgagcatctccgaacctccttctgcccctattagccccagaatgaacaagggggagcctcagccacgcaggcatcttctgggatttagcgagcaggagccagtgcaaggcgtggagccgcttcaaggctcaagtcaaggcccaaaagaaccacagccttctcccaccgaccaacctagcttttccaatctgacggcgttccctggcggagcaaaagaactgttactgcgggatttagatcaactgtttctgtcctccgattgtcgtcactttaaccgtacagaaagtctcagactggccgatgaattgtctggctgggtgcaaagacaccagaggggccgaaggaaaatccctcagagggctcaggaaagacagaagtctcagccacggaaaaagagcccccctgtcaaagcagtgccaatacagcctccgggtccgccagagagagacagcgttggacagcttcagttgtacagacatccagatagatcccagccagcttttctcgatgccatagaccgcagggaggacacattctacgtggtctcattcagaagagatcatctactgctgccagccataagtcacaacaagacaagcagacctaagatgtccctggtgatgccagcgatggccccaaacgaaacgctgtcaggacgaggagcgcctggcgattacgaggaaatgatgcagatcgaatgcgaggtcatggatactagagttatccacatcaaaacgagcacggtgcctccctctctgcggaagcagccttcccctactccagggaatgccacaggaggtccactgcctgtgtcagccgctagtcaagcccaccaggctagtcaccaacccctctacctgaaccatccgtag

SEQ ID NO: 213161 - DNA, 429 bp, synthetic construct
  misc_feature 1..429: note = Description of Artificial Sequence: Synthetic coding sequence
  source 1..429: mol_type = other DNA
tgacagccatcccctacagaccagcctagctttagcaatctgacggcatttcctggcggagccaaggagttactactacgagacctagaccaactcttcctgagttcagactgtcgtcattttaacagaactgaatccttacggctggccgacgaactgtctggatgggtgcagagacatcaaagagggcgacgaaagattccacagcgtgctcaagagcgacaatctttggataccagcccgtcacgctcattgagtcacggcagatcgcacctacagcttcgtcagtcaccctcaaaccccttggaccctcaaaagggaattctttgggcatcgtgtaattacatcgccacccaaaccgtgcggtctcagcacagttggatgcaattgacagacgggaagactcacttcatgctttccctgtcctag

SEQ ID NO: 213162 - DNA, 429 bp, synthetic construct
  misc_feature 1..429: note = Description of Artificial Sequence: Synthetic coding sequence
  source 1..429: mol_type = other DNA
tgacaaccctcccctacagaccagcccagcttttcaaatctaactgcctttccagggggagccaaagagctactgctccgcgaccttgatcagctcttcttgagctcagattgtcgacacttcaatcggacagagtcactccgcctagccgatgaactcagcggttgggtgcagcgccatcagaggggaaggaggaaaatcccccagcgagctcaagaaagacagtctctcgacacttcccctagcaggagtttatcacacggcaggtcccacctccaactaagacaaagtccctccaaccctttagacccacaaaaggggatcttgtgggcttcctgcaactatatagctactcagaccgtccgatctcagcacagctggatgcagctgaccgacggaaagacccattttatgctctctctcagttag

SEQ ID NO: 213163 - DNA, 2112 bp, synthetic construct
  misc_feature 1..2112: note = Description of Artificial Sequence: Synthetic coding sequence
  source 1..2112: mol_type = other DNA
atggcggagcttatgctgctcagcgaaatcgcagatcccacacgattctttacagataatctgttgtcaccagaagactggggtctgcagaacagtacactctatagcggccttgatgaagtcgcagaggaacagacacaactgtttaggtgccctgaacaggacgtgccatttgacgggagttccctggatgtggggatggacgtgtctcccagtgaaccgccttgggaactgctgcccatttttcctgatctgcaagtaaagagcgaaccatccagcccatgctcttcgtcttctctctcatccgaatccagtaggttaagcacagaaccgtcatcagaagccctgggtgtcggtgaagtgctgcatgtgaagaccgagtctttggcccctcccttgtgcctgctcggggacgacccaacatccagttttgagaccgtccagataaatgtcattcccacctcagacgattctagcgatgtgcagaccaagattgagcccgtctcaccatgtagttccgtcaacagcgaggcaagtttactgagtgccgatagctcatcacaggcctttatcggtgaggaagtgctggaggtgaaaaccgagagcttgtcaccttctggttgtctcctctgggatgtgccagccccatctctgggcgcagttcagattagcatgggaccaagcctggacggctcttcagggaaagctctccctacaagaaaaccacccctgcagcccaaacctgtagttctgacaactgtgccaatgccatcccgggctgttccaccatccacaacagtgctgctacagagtcttgtccagccccctcccgttagcccagttgtgctgatccagggtgccatacgtgtccagcctgaagggcctgctcctagtctcccccgacccgaacgcaaatccattgttccagctccaatgccaggcaactcatgtcctcccgaggtcgatgccaagctcctgaaacggcaacaacgtatgataaagaaccgagagagcgcatgtcagtctcggagaaaaaaaaaagagtacctccaagggctcgaagcacgtctgcaggccgtgctcgctgataaccagcaactccgaagagagaatgccgctctcaggcgtaggcttgaagccctgctggccgagaattccgagctcaaactggggagtgggaatcggaaggtggtctgtatcatggtctttctcttgttcattgccttcaactttggaccggtgagtatatcagaacctccaagtgctccaatcagccctcggatgaacaaaggcgaaccgcagccaagacggcacctcttggggtttagcgagcaagagcccgtgcagggcgttgaaccccttcaagggtcatcacagggtccaaaagagccccaaccgagtccaaccgaccagccctccttttctaatctcaccgctttccccggaggcgctaaggagcttctcctcagagacctggaccagctgtttctgtctagcgattgccggcactttaatcgtaccgaatccctgcgattggcagatgaattgagcggttgggtacagaggcaccaaaggggcagaaggaagatcccgcagagggcacaggagagacagaaaagccaaccgaggaagaagtcccctcccgtaaaagctgtgccaatccagcctccaggaccgccagaacgggattctgttgggcaattgcaactctaccgccaccccgatagaagtcagcctgcctttttggatgctattgatcgcagggaagacactttttacgtggtgagtttccggagagaccatcttctactgccagccatctcacataacaagaccagccggcctaaaatgtctctggtaatgcctgccatggcaccaaatgaaacactcagcggacggggagcccctggggactatgaggagatgatgcagatcgaatgtgaggtgatggacactagggttatacatatcaagacaagtactgttccacctagtcttcgcaaacaaccaagcccgactcccggtaacgccaccgggggacctcttcccgtgagcgcagccagccaggcccaccaggcgtcccatcaaccattgtacctcaatcatccctag

SEQ ID NO: 213164 - DNA, 2112 bp, synthetic construct
  misc_feature 1..2112: note = Description of Artificial Sequence: Synthetic coding sequence
  source 1..2112: mol_type = other DNA
atggcggaattgatgctactttcagagatcgccgatcccacacggttcttcactgacaatctgctctctcctgaggattggggtctgcagaattccactctgtactccggactggatgaagtggcagaagaacaaacccagctctttcgctgtccggagcaggacgtcccctttgatggttcctctctcgatgtgggtatggacgtgagcccttcggagcctccttgggaactgttaccaatctttccagatctccaagttaaatctgaaccaagtagcccttgtagctcaagtagcctgtctagtgagagctcccggctcagtactgagcccagtagcgaagcgctgggagttggagaagtgctgcatgtgaagaccgagtcactggctccgcctctctgtcttctgggcgacgaccccacctcctctttcgagacggtccagatcaacgtgattcccactagtgatgactccagcgatgtgcagacaaaaattgaacccgtgagcccttgctcttccgtgaattctgaagcaagcttgctcagcgctgatagtagctctcaggcgtttataggggaagaggtcctggaggtcaaaacagaatccttgtcaccaagcgggtgcctcctctgggatgtgcctgcgcctagcctgggcgctgtgcaaatctcaatgggtccctctctggacgggtctagcggaaaagctctgccaacccgaaagccacccctccagcccaagcccgtggtgctgaccactgtgccaatgcctagtcgcgctgtgcctccttccacgaccgtccttctccaatcgctcgtacaaccccctcctgtctcgcccgtcgttctgattcaaggagccattcgcgtccagccagaaggtccagccccttctctccccagacccgaaaggaaaagtatcgtaccagctccaatgcctggaaattcatgtcctccagaggttgacgcgaagctcttaaagcgccagcaacgcatgattaaaaaccgggagtccgcatgccagagccgtaggaaaaagaaagagtacctgcaaggattagaggccagactgcaggccgtcctggctgataaccagcagttacgcagagaaaatgcagctctacgcaggagattagaagcgctgctcgccgaaaactctgagctgaagctggggtccggtaataggaaagttgtctgtatcatggtgttcctcctctttatcgcattcaactttggcccagttagcattagcgaacccccttcagccccaatctcccctagaatgaacaagggagaacctcaaccgcgacgccatctgctgggctttagcgaacaagagcccgtacagggcgttgagccactccagggaagctcccagggacctaaggaaccccagccgagtcccaccgatcaaccatccttctcaaacttaaccgcattccctggtggcgctaaagagctgctattgagggatctcgatcagctgtttctgtcctccgactgtagacatttcaaccggactgagtcactacggctggctgatgagttgtctgggtgggtccagcggcaccagagggggcgtcgaaagatccctcaaagggcacaggagagacaaaaaagccagcctcgaaagaagtcccctcctgtaaaggctgtacctatccagcccccaggaccaccagaacgggacagtgttggccagctccagctgtatagacatcccgatcgctcacagcctgccttcttggatgcaatagacaggcgagaagataccttctatgtggtgtctttcaggcgcgaccacctgctgctccctgctatctcccacaacaagacctcccgcccaaaaatgtcgctggtcatgccggcaatggccccaaatgagaccctgtctgggcgtggggcaccaggcgattatgaggaaatgatgcaaatagagtgcgaagtcatggacactagagttatccatatcaagacctctaccgtgccaccaagtttgcggaagcagcccagcccaactccgggaaacgcaactgggggacctctccccgtgtctgcagcgtcacaggcacaccaggcctcacatcagcccctgtatttaaaccacccttag

SEQ ID NO: 213165 - DNA, 2103 bp, synthetic construct
  misc_feature 1..2103: note = Description of Artificial Sequence: Synthetic coding sequence
  source 1..2103: mol_type = other DNA
atggcagagctgatgctgttatccgaaatcgccgatcctactagattctttacagacaatttgctctctcctgaagactgggactctacactctactctgggctggatgaagtggcggaggagcagacccagcttttcagatgccctgagcaggatgtgcccttcgacgggtcttctctcgacgtgggaatggacgtctccccgtctgaaccgccatgggagctcctgcccatttttccagatctacaggtaaaaagtgaaccttcatcaccgtgttcaagctcttccttaagctcagaaagcagtcgtctcagcacggagcctagttctgaagcgttaggcgtgggtgaagttctgcatgtgaaaaccgagagcctggctcccccactctgcctgctgggggatgacccaacctcttcgtttgaaaccgtgcagatcaacgtgatcccaacgtccgacgacagttccgatgtccagactaagatcgagcccgtgtcaccatgtagcagtgtgaattccgaggcctccctcttgtccgccgactccagcagtcaggcatttatcggcgaagaagtgctggaagtgaaaactgagtcactgagtccatccggctgcctcctgtgggacgtccctgccccatctctgggcgcagtgcaaatttccatgggcccaagcctggacggcagtagcgggaaggctctgcccaccagaaagcccccattgcaacccaagcccgtcgtgctgacaacagtgccaatgccaagtagggcggttccacccagcaccacagtgctattacagagcctggtgcagccacccccagtttcacccgtggtccttatacagggagctataagggtgcagcccgaggggcctgcaccttcactgcccagaccagaacgcaagagtatagtccccgctccaatgcccggtaacagttgtccacccgaggtggatgcaaaactgctcaagcgccagcagcggatgattaagaatagagagtcagcctgtcagtcccgaaggaaaaagaaagaatatttgcaaggtctggaggctagactgcaggcggtcttagctgacaaccaacagctaaggcgcgagaatgccgctctgcgaaggcgattggaggccctgcttgccgagaactcagagcttaagctggggagtggcaacaggaaggtcgtgtgcataatggtgttcctcctgttcatcgccttcaactttggcccagtcagtatttccgaaccccctagcgccccaatttccccccgaatgaacaagggggaaccccagcctagaagacatctgctcggtttcagcgaacaggagccagtccagggtgtggagcctctccaaggttctagccaggggcctaaggaaccacagcctagccccactgaccagccctctttctccaacctcaccgccttccctggaggagctaaggagcttctgctcagagacctcgaccagctgtttttaagcagtgattgtcggcactttaacagaactgaaagtctgagactggccgacgagttgtcagggtgggtgcagcggcaccaacgcggtagacgcaagattcctcagcgcgcacaggaacggcagaagtcccagcctcgcaaaaagtcaccacctgtgaaggctgtgcccattcagccccctggacctcctgagagagactcggtagggcagttacagctgtaccggcatccggaccggagtcagcctgcctttctagacgcaatcgacaggagggaagacactttctatgtcgtgtcttttagaagggaccacctactgcttcctgcaattagccacaacaaaacctcacgacccaagatgagcctcgtgatgcctgccatggccccaaacgaaacgctctctggtaggggtgccccaggtgattacgaggagatgatgcagatcgaatgtgaggttatggataccagggtaatacacatcaagactagcaccgttccaccctcactgaggaagcagcctagccccactccaggcaatgctacaggtggccctctacctgtgtctgccgctagccaggctcaccaggcctcgcatcagccactgtatcttaatcacccttag

SEQ ID NO: 213166 - DNA, 429 bp, synthetic construct
  misc_feature 1..429: note = Description of Artificial Sequence: Synthetic coding sequence
  source 1..429: mol_type = other DNA
tgacaaccctctcccactgatcagccatctttctcgaacctgaccgcattcccgggtggagccaaagagctccttctgagggatctcgaccaattattcctgtcatccgattgtcgccattttaatagaacagagtctctgaggctggcagacgagctgagcggatgggttcagaggcaccaaagagggaggcgcaagatccctcagagggcccaggagcggcagtccctggatacatccccttctcgttcgctgagccatggcagaagccacctgcaactgagacaaagcccatcgaaccctctggatccgcaaaaaggcatactgtgggcttcgtgtaattatattgccactcagacagtccggagccaacacagctggatgcagttgaccgatggaaagactcattttatgctgagcttgagttag

SEQ ID NO: 213167 - DNA, 2103 bp, synthetic construct
  misc_feature 1..2103: note = Description of Artificial Sequence: Synthetic coding sequence
  source 1..2103: mol_type = other DNA
atggccgaactcatgttgttgagcgagattgcagatccaacaagattttttaccgataacttacttagtcctgaagactgggactcaacgttatatagcggccttgacgaagtagctgaagaacaaactcaactctttagatgtccagagcaggacgtgccctttgatggcagtagcctggacgttggaatggacgtcagcccgtccgagcccccatgggagctgctgcccatcttccccgaccttcaggtgaagtccgagccatcttccccgtgtagctcctcttccttaagttccgagtcgagcaggctgtccaccgagccctcctccgaggccttgggcgtcggagaagtgctgcatgtgaaaacagaaagccttgctccgcctctgtgccttttgggagacgacccaacctcgagctttgagaccgtgcaaattaatgtgatcccaacttctgacgactcttcagacgttcagaccaagattgagcccgtgagcccatgctcctcagtgaatagtgaggcttccctgctctcggccgacagctcaagtcaagcattcattggggaggaagtgttagaagtgaagaccgagtccttgtcgcctagtgggtgtctactctgggatgtaccggcacccagcttgggggctgtccagatctctatggggccatctctggacggctcttcaggaaaagcactcccaactaggaagcccccactacagccgaaaccagtggtgctaacaactgtccccatgccttcacgagctgtacctccttccactacagtgctgctacaatccctcgtgcagccgccaccagtgtcacctgtcgtgctgattcagggggctatcagagtccaacccgagggaccagccccttcacttccgcgtcctgagagaaagtccatagtaccagcaccaatgcctggcaatagctgccctcccgaagtggatgcgaaattgctaaagcgacagcaaaggatgatcaaaaatcgggaatccgcatgccaatcgcgacgcaagaaaaaagagtacctccaggggcttgaggccagactgcaagccgttctggctgacaaccagcagcttcgcagagagaatgcagcactgcgcaggagactggaggcccttttggctgagaactctgaactcaaactgggctcaggcaatcggaaagtcgtttgcattatggtttttctgctgttcattgcttttaattttggtccagtcagtattagcgaacctccctccgcaccaatttctcctcgtatgaataaaggtgaaccacagcccaggcggcacctgcttgggttttcggaacaagagccagtgcaaggggttgagccattgcaagggtcttcacaaggtcccaaggagccacagccctcgccaacagatcagcctagctttagtaatctcaccgcttttccaggcggagcaaaagagctattgctgcgtgatttggaccagctgtttctctctagcgactgtcggcacttcaacaggacggagtcattacggttggccgacgagctatcagggtgggtccagaggcatcagcggggacggaggaagatccctcaaagggcacaagagcgccagaaatcccaaccacgcaagaagtccccgcctgtaaaggccgttcccattcagccccctggacctcccgagcgcgactcagtcggacagcttcagctgtatcggcatccagaccggtcacagcctgcttttctcgatgccattgacaggcgcgaggatacattctacgtggtatcctttaggagagatcatctgcttctacccgcaatctcgcacaacaaaacatcccggccaaaaatgtcacttgtgatgccagccatggccccaaacgagaccctcagtggacggggtgcccctggggattacgaggagatgatgcaaatagagtgcgaggttatggacactcgcgtgatccacataaagacatccactgttccaccatcactcagaaagcagccttctccaaccccaggcaatgccaccggcggtcctctgcccgtgtctgccgctagtcaggcccaccaggccagccatcagccactgtacctgaaccacccctag

SEQ ID NO: 213168 - DNA, 429 bp, synthetic construct
  misc_feature 1..429: note = Description of Artificial Sequence: Synthetic coding sequence
  source 1..429: mol_type = other DNA
taacagcccagccccacagaccagccttccttttctaacctaacagcgttcccaggcggtgctaaagagctgctcctgagggacctcgaccagttgttcctatcctcagattgtagacactttaataggactgagtccctccgcctggccgatgaattgtccgggtgggtgcagagacatcagaggggtagacgaaaaatcccacaacgtgcacaggagagacagtcacttgacacatctcccagccggagcctgtcacacggcaggtcccatctgcagctccgacagagtccctctaacccgttggatccccaaaagggcattttgtgggcatcatgtaattacatagctacccagactgtgagaagtcaacattcctggatgcagttaaccgatggcaagacacatttcatgctgtcactgtcatag

SEQ ID NO: 213169 - DNA, 669 bp, synthetic construct
  misc_feature 1..669: note = Description of Artificial Sequence: Synthetic coding sequence
  source 1..669: mol_type = other DNA
atggctgagctgatgttgctttcagaaatcgccgaccctactcgctttttcaccgataatctcctctctcctgaagattgggggttgcagaatagcaccctgtacagtggactcgatgaagtcgcggaagagcagacacagctgttcaggtgtcccgaacaggatgtgccttttgacgggtcttccctggatgtcggtatggacgtatcgccgactgaccagcctagcttttccaatttaactgccttcccgggaggagccaaagaactgttactccgtgatttagatcagctgttcctgtctagcgactgtcgacacttcaaccggactgagagcctgagacttgcagacgagctgtccggatgggtgcagaggcatcagagaggtcgtcggaaaattccacagcgggcacaggagcgccagaagtcgcagccacgcaagaagagccctcctgtcaaagcagtacccattcaacccccaggcccacccgaacgggattcggtggggcagctacagctgtatcgtcatccggacagatcccagcctgcgtttctcgacgctatcgatcggagggaggatactttttacgttgtgagcttcaggaggactacttgttgttctcagccaagtgccactacacgcccacccggtcctcgctgcccatggtag

SEQ ID NO: 213170 - DNA, 669 bp, synthetic construct
  misc_feature 1..669: note = Description of Artificial Sequence: Synthetic coding sequence
  source 1..669: mol_type = other DNA
atggctgagctgatgctactgagtgagattgccgacccaaccagattctttaccgacaatttgctgtcccctgaggactggggcctgcagaattctaccttgtattccgggttggatgaagtggccgaggagcaaacccaactcttccggtgtcccgaacaggacgttccctttgacggatcgagccttgatgtggggatggatgtgagtccaaccgatcagccatctttttctaatctgaccgccttcccagggggtgccaaggaactgctcctgcgagacttagaccagctctttctttcaagtgattgtcggcatttcaaccggaccgagtctctcagactggcagacgagctcagcggatgggtgcaacggcaccagcgcggtcggagaaagattccccagcgtgcccaggaacggcagaaaagccagccacggaagaaaagtccaccggtgaaggcagtgcccatccagcctcccggacctcctgagcgggatagcgtgggacagctccagttgtatagacaccctgacaggagtcagccagctttcctggacgccatcgacaggcgcgaagacaccttttacgtggtatcctttcgaagaactacctgctgctctcaaccttctgccaccacccggcctcctgggccaaggtgcccctggtag

SEQ ID NO: 213171 - DNA, 669 bp, synthetic construct
  misc_feature 1..669: note = Description of Artificial Sequence: Synthetic coding sequence
  source 1..669: mol_type = other DNA
atggcagagctaatgcttctgagcgagatcgccgaccctacccggttctttacagataacctcctaagtcccgaggactggggcctgcaaaactccacactgtatagcgggttagatgaggtggctgaagaacagacccagctgttccgctgtccggaacaggacgtacctttcgatggctcttcactggacgtggggatggatgtttcccctacggatcagcctagtttcagcaacctgaccgcatttcccggaggggctaaagagctgcttctgagggacctcgatcagctgtttctgagttcagactgtcgacacttcaacaggactgaaagtctcagactcgcagacgagctgtccggctgggtgcagcgtcatcagaggggaaggaggaagataccccagcgagcccaggaaagacagaaaagccagcccagaaagaaatctccgccagttaaggccgtgcctattcagcccccaggcccaccggagcgcgacagcgtggggcagctgcagctctacagacaccccgaccggtcgcagcccgcttttctcgacgcaattgaccgccgtgaggacactttttatgtcgtcagctttcggcgtaccacttgttgcagccagccgtccgctacaacaaggccacccggaccaagatgtccctggtag

SEQ ID NO: 213172 - DNA, 924 bp, synthetic construct
  misc_feature 1..924: note = Description of Artificial Sequence: Synthetic coding sequence
  source 1..924: mol_type = other DNA
atgggcgacgaccgaccatttgtttgcaatgctcccggatgcggacagagatttactaacgaagatcacctcgccgtccataaacacaagcacgagatgaccttgaaatttggtcctgcacgcactgattcggtgattatcgctgaccagacacccacccctacgaggtttttgaagaactgcgaggaggtcgggttatttaatgagcttgcctccagctttgagcacgagttcaagaaagctgccgacgaagacgaaaagaaggccgcagcgggaccccttgatatgtccctgccgtctacccccgacatcaaaattaaggaggaggaacccgttgaggtggacagctctcctccagactctcccgcttcctctccctgctcgccacccctgaaggagaaatcacctgcccagccaactccctccactggtggcagaagaaggagaactgtggacgaagacccggacgagagacggcagcgtttcttggagcgtaatagggccgcagcaagccgatgcagacaaaagaggaagctttgggtgagttcactcgagaaaaaagctgaggagctcacaagccagaacatccaactttccaatgaagtaactctgctacgaaatgaggttgctcagctgaaacaactcctgctggctcataaggattgccctgtgactgccctgcagaaaaagacgcagggatacctagagtcccctaaggagagtagcgaacccacagggtcaccagcacctgtaatccagcattccagtgccactgcacccagcaacggactaagcgtccgctccgctgcagaggccgtcgcgacttctgtgctgacccagatggcatcgcagcgaaccgagctgagtatgccaatccaaagtcacgtgattatgactccccagtcccagtcagccggacggtag

SEQ ID NO: 213173 - DNA, 1485 bp, synthetic construct
  misc_feature 1..1485: note = Description of Artificial Sequence: Synthetic coding sequence
  source 1..1485: mol_type = other DNA
atgggcgacgatcgtccattcgtctgtaatgcacccggatgtggacagcgtttcacaaacgaggatcatttagctgtgcacaagcacaaacacgagatgacattaaaattcggacctgctcgtaccgactcagtgataatagctgatcagactccaactcctacaaggttcctgaaaaattgtgaagaagtaggtctgtttaacgagctagcatcgagtttcgagcacgaatttaagaaagccgcagatgaggacgagaagaaagctagatcacggactgtcgccaagaaacttgttgcagccgcagggcctctcgatatgtccctcccttctactccagacatcaagattaaagaagaagaacccgtggaggttgacagctcaccacctgactcccctgccagcagtccctgcagcccgccactgaaagagaaagaagtaaccccaaagccggtgctgatctcgacccctacgcctacaattgttagaccaggcagccttcctctgcacctgggttatgatcctctgcaccctacacttccatctccgacttccgtgattacccaggccccaccgtccaaccggcagatggggtccccgacgggtagcttgcctctcgttatgcacctcgctaatggacaaactatgcccgtcctgccaggccctcccgtacagatgccttcagtcatatccctagccagaccagtgagtatggtgcccaacatccctggtattcctgggcctccagtgaactccagcggatccatatcacccagtgggcatcccattcccagcgaagccaaaatgcgcctgaaggccactctcacacaccaggtgtcttctattaatgggggttgtgggatggtagttggcactgcatcaaccatggtgactgccaggcctgagcaatcacagatcttgatccagcaccctgatgcacccagccctgctcagccacaggtctcacctgcccagccaaccccaagcacgggcggtcggcgacgaagaactgttgatgaagatccagacgaacggcgacaacggttcctggaaaggaacagagctgccgcaagcaggtgtagacagaagcgcaagctgtgggttagttccctagagaaaaaggctgaggagctgacgagccagaacatacagctctctaatgaggtgacactccttcgtaacgaagtggcacagctcaaacagcttttacttgcgcataaagactgtcccgtcactgcactgcagaaaaaaacccagggctacctggaatctcccaaagaatccagcgaacctacgggctcccctgcccctgtcattcagcactcatccgctactgccccaagtaatggactaagtgtgagaagcgcagcagaagccgtggccacctcggtgctcacgcagatggccagccaacgcaccgagctctcaatgccaattcaaagtcacgttataatgacgccacagagccagagcgcaggcagatag

SEQ ID NO: 213174 - DNA, 1389 bp, synthetic construct
  misc_feature 1..1389: note = Description of Artificial Sequence: Synthetic coding sequence
  source 1..1389: mol_type = other DNA
atgggcgacgatcgaccattcgtttgcaatgcccctgggtgcgggcagaggttcaccaatgaagaccatctcgccgtccataaacacaagcatgagatgacattaaagtttgggccagccagaaccgacagcgtgattatcgctgaccaaacccccacccctaccagattcttaaagaattgcgaggaggtgggactatttaatgaactggcaagtagctttgagcacgaattcaaaaaagccgctgacgaggatgagaagaaggcggcagccggaccactggatatgagcctgccttcgacaccggacataaaaattaaagaagaagaaccggtggaggaagtgacccccaaacccgttcttattagcactcctactcccaccatcgtgcgtcccggttcgcttcccctgcacctcgggtatgaccccttacacccaaccttgccttctccaacatccgtcatcacccaggcccctccatccaaccgacagatggggagccccactggttcactaccactggtcatgcacttggccaatggccagaccatgcctgtgctcccgggaccgcctgtgcaaatgccttccgtcatttctctggcccgtcccgtatcgatggtgcctaacattcctggaatcccagggcctccagtgaactcctccgggtccatctcccctagcggtcaccccataccctctgaggctaaaatgagactaaaagccactcttactcatcaggtctcttcaatcaatggagggtgtggcatggtcgtggggacagcctccacaatggtcaccgcacgacccgagcaatcccagatattgatccagcaccctgacgcgcctagcccggctcagccacaggtttcacccgctcagccgacaccttcaactggtgggagaagacgaaggaccgtggacgaggacccagatgagcggagacagcgctttctggagagaaatagagccgctgcctctcggtgtcggcagaaaagaaagctgtgggtgtcctctctggagaagaaggctgaggagctcacatcccagaacatacaactgtcaaacgaggttacattgctgcggaacgaggttgcccagctcaagcaactgctgctggctcataaggactgccctgtgacagcactgcagaagaagacccagggctacttggaatcccccaaagaaagcagcgagccgaccggatcgcctgctccagtgatccagcactcgtcggcgacagccccatctaatgggctgtccgtgcgaagtgctgctgaagccgtcgccacttctgttctcacgcaaatggcttcgcagagaaccgagctgagcatgcctattcagtcgcatgtcataatgaccccccagagccagtctgccggtcggtag

SEQ ID NO: 213175 - DNA, 1452 bp, synthetic construct
  misc_feature 1..1452: note = Description of Artificial Sequence: Synthetic coding sequence
  source 1..1452: mol_type = other DNA
atgggcgatgaccgcccttttgtgtgcaatgcaccgggttgcggtcagagattcactaacgaggatcatttagcagtccacaagcacaaacacgaaatgacactgaaatttgggccagcaaggaccgacagcgtcatcatcgctgaccagacccccacacctacgagatttctaaagaactgcgaggaggtggggctgtttaacgagctcgccagcagtttcgaacatgagtttaaaaaagctgctgacgaggatgagaaaaaagccgcagcgggtccactagatatgagtctgccttcaacacccgatattaagataaaggaggaagagcctgtggaagttgattcttctcctcctgattctcccgcttctagcccttgttcaccacccctgaaagagaaggaggttacacctaagccggtgctcatctctacaccaacacctactattgttcgcccaggtagcctcccgttgcacctaggctacgaccctctgcaccccacactgccaagtcctacttcggtgatcacccaggcacctcccagcaacagacagatgggtagccccaccgggtctctgccgctcgttatgcatctggctaacggccagaccatgcctgttttgcctggacctccggtccagatgcctagcgtaatttctttggcacggcctgtcagcatggttcccaacattcccggaatccccggacccccagtgaatagtagcgggagcatctcaccatctggccaccccatcccgtctgaggcaaagatgcggctgaaggctacactgactcatcaggtgtcctcaattaacggtggatgcgggatggtagtcggtactgccagcaccatggtgacagccagaccagagcagagccagattcttattcaacatcccgatgcaccctcccctgcacagccccaagtctcccccgctcagcctactccttcgacgggcggtcgtcgcagaagaaccgtagatgaagatcctgatgaaagacgccaaagatttctcgagagaaaccgcgcagccgcttcccggtgtcgccagaagcgcaagttatgggttagcagcttagaaaaaaaagccgaggagttaaccagtcaaaacatccagctgagcaacgaggttacactgttaagaaacgaagtcgcacagcttaagcagctgctgttagcacacaaagattgccccgttacagcattacagaagaagacacaaggctatttggaaagtcctaaggagagtagcgagcccacaggttcacctgcgccagtgatacaacattcatctgcgacagccccttccaacgggctgtccgtgaggtccgccgctgaggccgtagccacgtctgtgctgacccagatggctagccagagaactgagctctcaatgccaatccagagccatgtcatcatgacaccacagtcccaatcggccggtagatag

SEQ ID NO: 213176 - DNA, 1452 bp, synthetic construct
  misc_feature 1..1452: note = Description of Artificial Sequence: Synthetic coding sequence
  source 1..1452: mol_type = other DNA
atgggcgatgataggcccttcgtgtgcaatgccccaggctgcggtcaacgttttactaacgaggatcaccttgcggtgcacaaacacaagcatgagatgacactgaaattcgggcctgcacgaacagattctgtcattatcgccgaccagacccctacacccacccgattcctgaaaaattgcgaagaagtgggcctgtttaacgagctcgctagttccttcgaacacgagtttaagaaagctgcagacgaggacgagaagaaagcggcagccggaccactggacatgtcactgccgtcaacccccgacataaaaatcaaggaggaagagcctgtggaagtggattcttctccccctgattcacctgcaagctctccttgctcccccccactgaaagaaaaggaggtcactcccaaacccgttctgatatccaccccgacacctaccattgtcaggcccggatctctgcctcttcatctcggttatgatcccctgcatcctactctgccttcccccacgagcgtcatcacccaggcccctcccagtaatcggcagatgggtagccctaccggctccctgccattggttatgcaccttgctaacggtcaaaccatgcccgtcctgcctggcccacctgttcaaatgccctcagtcatctctctggcccgtccagttagcatggttcccaatatacctggcatcccagggcctccggttaattctagtggctctatttcccccagtggccaccccatccctagcgaggccaaaatgagactgaaggctacattgacccaccaggtgtcgtctataaatgggggatgcggtatggtggtcggcacggctagcactatggtaacagccaggccggaacagtcacagatcctcattcagcacccagacgcgccatctcccgcacagcctcaggtgtcacctgcacaacctactccaagcacagggggacggagaagacggacggtggatgaagaccccgacgaacgcaggcaaaggttcctggaaaggaatcgagctgccgcttctaggtgtcgccagaagcgaaagctttgggtttctagcctggaaaaaaaagcggaagaactgacatctcagaatattcagctcagtaacgaggtgacacttttacgtaatgaagtcgcccaactgaaacagctgctgcttgctcacaaagactgtcctgtgacagccctgcagaagaagacccagggttacttagaatcccctaaggagtcttccgagcctactggcagccccgctccggtcattcagcactcatccgccacagccccaagcaacggactgtcggtgagaagtgcggctgaagcggttgcaacctctgtgctgacacagatggcatcccagagaactgaattgagtatgccgatccagtcccatgttatcatgactccgcaatctcagagcgctgggagatag

SEQ ID NO: 213177 - DNA, 1485 bp, synthetic construct
  misc_feature 1..1485: note = Description of Artificial Sequence: Synthetic coding sequence
  source 1..1485: mol_type = other DNA
atgggagatgatagacctttcgtctgcaatgcccctggctgcggtcaacggttcacaaatgaggaccaccttgctgtccataagcacaaacatgaaatgaccctcaagttcgggccagcgagaacagatagtgtgattatcgccgatcaaaccccaacgcccacacggttcttgaagaattgtgaggaagtaggcctattcaacgagctggcttcctcgttcgaacacgaattcaagaaggcagcagatgaggatgaaaagaaggccaggtcaagaaccgtggcgaaaaaattggtagccgctgcgggacccctcgacatgtctctacccagcacaccggacatcaagatcaaggaggaggaacccgtggaggtggacagcagtcccccagactcccccgctagcagtccatgctctcctcctctcaaagagaaagaggtgacacccaaaccggtcctgataagtacccccacccccacaatcgtaaggcctggtagcctcccactccatctcggatacgaccccttgcaccccactttgccttccccgacttcagtgattacccaagccccaccctctaatcgccagatgggatccccaaccggtagcttacctctggtaatgcacctggccaatggccagactatgcctgtgctgcctgggccacccgttcagatgccatccgttatttcactggctagacccgtctcaatggtccctaatatcccgggaatccccggacctcctgtgaactcgtccggatccatcagcccctctggacatcctatcccctctgaggctaagatgaggcttaaagcaaccctcactcatcaggtaagctccattaatggcggatgcggcatggtcgtgggcaccgcttcgaccatggtgaccgccagacccgagcaatctcaaatactcatccaacaccccgatgcacccagccccgctcagcctcaggtatcccctgcccagcctactcctagcacgggcggtagaaggcgcaggacggtggatgaggatccagatgaacggaggcagcgctttctcgagagaaatcgggcagcagcttccaggtgtcgccagaagcggaagctatgggtgtcaagtctggagaaaaaggccgaagagcttacttcccagaacattcaactatccaatgaggttaccctcctcagaaacgaagtcgcgcagctcaaacaactgttgctggcccacaaggactgcccggttactgcattgcagaagaagacacagggctatctggaatctcctaaagagtcttcggaacctacgggaagcccggcacccgttattcagcacagcagtgctactgccccaagcaacggcctttccgtgagatccgctgctgaagcagtcgcaacgtcagttcttacccagatggcaagtcagcgtacggaactgagcatgcctatccaaagccatgtcataatgaccccgcagtcccagtctgccggacggtag

SEQ ID NO: 213178 - DNA, 354 bp, synthetic construct
  misc_feature 1..354: note = Description of Artificial Sequence: Synthetic coding sequence
  source 1..354: mol_type = other DNA
atgggagacgatcgccctttcgtctgcaatgcacccggatgtggccagagatttaccaacgaggaccatctggccgtccataagcacaagcacgaaatgacgctgaagtttggcccagctcgaacagattcagtgataatcgccgaccagaccccgacccccacccggtttcttaagaattgcgaggaggtgggcttgttcaacgaactcgctagttcttttgaacacgagtttaagaaggccgctgacgaggacgagaagaaagctcgtagccggaccgttgccaaaaaactggtggttttccgcccacgattattccttctctgcttcggaatcattttccttattggttag

SEQ ID NO: 213179 - DNA, 354 bp, synthetic construct
  misc_feature 1..354: note = Description of Artificial Sequence: Synthetic coding sequence
  source 1..354: mol_type = other DNA
atgggtgacgatagaccgttcgtgtgtaacgcgccaggctgtggccaaaggttcacaaacgaagatcacctcgcggtacacaaacataaacacgagatgacactgaagtttggcccagctcgcaccgactcagtgatcatcgccgatcaaacccccactcctactcgctttctgaagaattgtgaagaagtggggttattcaacgaactcgcttcttccttcgagcacgaattcaaaaaggctgccgacgaagatgagaagaaagcaagatcacgcaccgtggccaaaaagttggtggtgtttaggccccgtttgttcctcctatgctttggcataatattcctcatcggatag

SEQ ID NO: 213180 - DNA, 3813 bp, synthetic construct
  misc_feature 1..3813: note = Description of Artificial Sequence: Synthetic coding sequence
  source 1..3813: mol_type = other DNA
atggatagtctcgaagagccccagaagaaggtctttaaagctaggaaaaccatgagagtctcggacagacagcaactggaagccgtttacaaggtgaaggaggaactactgaaaactgacgtcaaattgctgaacgggaaccacgaaaatggagacctggaccccacgagtcctctcgaaaacatggattacataaaggataaagaggaagttaacgggatcgaggagatctgcttcgatccggagggctcaaaggcagaatggaaagaaacgccttgcatcttgagcgtgaatgtcaagaataagcaggacgacgatctaaattgtgagcccctgtcaccccacaacatcacccctgagccggtctcaaagctccccgcagagcccgtatcaggggaccctgccccaggagatctagacgcaggtgacccggcatcaggcgtgctagcttcgggtgactcaacctccggggatccaacttcttcagagccttcctcttccgacgctgcttcaggggatgcaacctctggagatgctcccagcggcgacgtctcccccggtgatgcaacaagtggggacgctaccgcagatgatctatcatccggggacccgacttcgtctgaccctatccctggcgaaccagtgcccgtggaacctatcagcggcgactgtgccgcagacgatatcgcctcctcagaaatcacctcagtagacctagcctccggtgcacctgcatccacggatcctgcctctgacgacctcgcgagtggtgatctttcctccagcgaactagccagcgacgatctagccacaggggaactagcttcagacgagctcaccagtgaatcaacctttgacaggacatttgaaccgaagtccgttcctgtttgcgaaccagttcctgagatcgataacatcgagccatcaagtaataaagacgatgatttcttggagaaaaacggggcagatgaaaagctggaacagatacagtctaaggattcactggacgaaaaaaacaaggccgataacaatattgatgccaatgaggaaactctagaaacagatgatacaaccatctgttctgacaggcctcctgagaatgagaaaaaggtggaggaagacatcatcaccgagttggccctcggtgaggacgccatcagctcctccatggagattgaccagggagaaaaaaatgaggacgagaccagtgccgacctggtggagaccatcaatgaaaatgtcatcgaagacaacaaatccgagaatattctggagaatactgattccatggaaacagacgagattattcccatcttagaaaaactggctccatcggaggatgagctgacatgcttcagcaaaacctctctactgccaatcgacgagactaacccagacctggaggagaaaatggagtcctcgtttggttcaccgtcaaaacaggagtcgtccgagtcactgccgaaagaggcattcttggttctgagtgacgaagaggacatctctggagagaaagacgaaagcgaagtcatcagtcagaacgagacctgtagccccgcagaagtagaatccaatgaaaaagacaacaaaccagaagaggaagagcaagtcatccatgaagatgacgaacgcccttccgagaaaaatgagttctctaggagaaagcgatcaaagtcggaggatatggataatgtgcagtcaaagaggcgcagatacatggaggaagagtatgaagcagagtttcaggtgaagattaccgccaaaggcgacataaaccagaagttgcagaaggtgatacagtggctgctcgaagaaaaactctgtgccttacaatgtgcagtcttcgataaaactctggcggagctgaagacccgggtggagaagattgaatgtaacaaacgtcacaaaactgtactaacagagctgcaggccaagatagcacgactgacaaaaagattcgaggcagccaaggaagaccttaaaaagcgtcatgaacaccctcctaaccccccagtcagtccgggaaagacggtcaacgacgtgaacagcaacaataacatgtcctaccggaacgccggtacggtccgccagatgctggagtcgaaacgcaacgtctctgaaagtgcgccaccttcctttcagacacccgtgaataccgtcagttccacaaacctcgtgaccccacccgctgtcgtctcatctcagcctaagctgcagacccccgtgacgtcgggatcgctgaccgccacaagtgtgctgcccgcacccaacacagcgacagttgtcgccactacgcaggtcccaagtgggaacccgcagcctacaatctccttgcagccactaccagtcatcttgcacgttcccgtcgccgtctcctcccagcctcaactcttgcaaagtcatcctgggacactcgtgactaatcagccaagcgggaatgtcgaatttatatcggtacaatcgcccccaaccgtgtcgggtctcacgaaaaatccggtcagccttccttccctaccaaatcccacaaaacctaacaatgtgccaagtgtgccttctccctccatccagaggaatcctacagcaagcgcagcaccactcggcactacattggccgtgcaggccgttcccaccgcccactccatcgtccaggcaacaagaacctcgctgcccacggtgggcccttctggcctgtactctccttcgacaaaccggggtccaatccagatgaagatacctatcagcgctttctccacctcaagcgccgctgaacagaattccaatacaacaccccgaatcgagaatcagactaacaagactatagatgcaagtgtgtcgaaaaaagcggctgacagtaccagccagtgcggcaaagccacaggcagcgacagctctggcgtgattgacctgactatggacgacgaggagtccggtgcatcgcaggaccctaaaaaattaaaccacacaccagttagtacaatgagctcttcgcagcctgttagccggccattgcagcccatccagcccgcaccacctctccagccaagcggagttcctacatccggcccttcgcagactactattcatttactgccaactgcccctaccacagtgaacgtgacacatcgcccagtgacccaggtgacaacccggcttccagtgcctagagctcctgcaaatcaccaagtggtgtatactactttacccgctcctcccgcacaggcccctttaaggggaaccgtgatgcaagctcctgccgtgcgccaagtaaaccctcaaaactctgtaaccgtgagggtgcctcagacaaccacctacgtggtcaacaatggcctgacactaggctccaccggcccacagctgactgtgcaccatcggccaccacaggtgcacaccgagccccctagacccgtgcatcccgctccactgcctgaggcccctcagccccagcgcctgccaccagaggccgcttctacttctctcccacagaagcctcacttaaaattggcgcgagtgcagagccagaacggcatcgttctgtcttggagtgtactcgaggtagatcgatcctgcgcaaccgtggatagctaccacctttacgcatatcatgaagagccctctgcgaccgtgcccagccagtggaagaagataggcgaggttaaggccttgcctctgcccatggcttgcacactgacacagtttgtctcaggaagcaagtactacttcgcagtccgcgcaaaggatatttacgggcgttttggccctttctgtgatccccagtcaacggatgttatttcgtcaacacagtcgtcatag

SEQ ID NO: 213181 - DNA, 1548 bp, synthetic construct
  misc_feature 1..1548: note = Description of Artificial Sequence: Synthetic coding sequence
  source 1..1548: mol_type = other DNA
atggatagcttagaggagccccagaagaaagtgtttaaagctaggaagacgatgcgggtgtccgaccgccagcagctcgaggcggtctacaaagtgaaggaagagctacttaagaccgacgttaagctattaaatggcaatcacgagaacggggaccttgacccaactagccccctggagaacatggactacattaaggacaaggaggaagttaacgggatcgaagaaatttgtttcgacccggaaggctcaaaggctgagtggaaagagactccttgcattctgagcgtcaatgtcaaaaacaaacaggatgacgatttgaactgtgaacccctgtcgccccataacatcactccagaaccagtgagcaagctccctgccgagcccgtatctggcgacccggctccgggtgacctggacgcaggcgaccccgctagcggggtcttggcttccggcgactctaccagcggggatcccacttcaagtgagcccagcagcagcgatgccgctagcggcgacgccacttcaggagacgcaccaagtggcgatgtatcccctggggacgcaactagcggagatgccacagccgatgacttaagcagcggagacccgaccagtagcgacccgatccctggagagccagtgccggtcgagccaatttccggcgattgtgcggctgacgacattgccagcagcgaaatcaccagcgtagatcttgcctccggggcacccgcttccaccgaccccgctagcgatgatctggcttctggcgacttgtcaagctcagaattggcctcggatgacttagccaccggggagctggcgtctgatgagttaacgtctgagtctactttcgatcggacattcgagcccaagtctgtcccagtgtgtgagcctgtgccggagatcgacaacattgagcccagttcaaacaaagatgatgacttccttgagaaaaatggcgctgacgagaagcttgaacaaatccagtcaaaggactcgttggatgaaaagaataaggctgacaataacattgacgccaatgaggaaactttggagacggacgatacaacaatttgcagcgatcggcctcccgaaaacgagaagaaggttgaggaagacattataactgagctagctttgggggaagacgcaatttcctctagcatggaaattgatcaaggagagaagaacgaagatgaaactagcgccgatctggtggaaacaattaatgagaatgtgattgaagacaacaagtccgaaaacatcctcgagaatacagacagcatggagaccgacgagattataccaattctcgaaaagctagctcccagtgaggacgagctcacatgtttctcgaaaacatccctgctccctatcgatgaaaccaaccctgacctcgaggagaaaatggaatcttctttcgggtcaccctccaaacaagagtctagcgaaagcctccccaaggaagcgtttctggtgctctctgatgaggaagacatcagcggggagaaagacgaatccgaagtcatcagtcagaacgaatag

SEQ ID NO: 213182 - DNA, 378 bp, synthetic construct
  misc_feature 1..378: note = Description of Artificial Sequence: Synthetic coding sequence
  source 1..378: mol_type = other DNA
atggactcattggaggaaccccaaaagaaggtgtttaaagcccgaaaaacgatgcgcgtctcagatcggcagcagctagaggcagtgtacaaggtgaaggaagagctgcttaaaacagacgttaagttgctcaacgggaaccacgagaatggagatttagaccctacctcacctctggagaatatggattatataaaagacaaggaggaggttaatgggattgaagaaatatgtttcgatcccgagggcagtaaagcagagtggaaagagactccttgtattttgagtgtcaacgtcaaaaacaagcaggatgatgatctgaactgtgaaccactatcaccacacaacatcaccccagagcctgtgagcaagctgtag

SEQ ID NO: 213183 - DNA, 459 bp, synthetic construct
  misc_feature 1..459: note = Description of Artificial Sequence: Synthetic coding sequence
  source 1..459: mol_type = other DNA
atggatagtctcgaggaacctcagaagaaggtgtttaaggccagaaaaacaatgagggtaagcgacagacaacagcttgaagcagtctataaggtgaaagaggagctgctgaaaaccgacgtgaaactgctgaatggcaaccacgagaacggtgacctggaccccacaagccccctggaaaatatggattacattaaagacaaagaggaagtcaatggtatcgaagagatctgcttcgaccccgaggggtcgaaggccgagtggaaggagaccccatgcatcctgagtgttaacgtaaagaataagcaggacgacgacctgaattgcgaacccctcagccctcataacatcactccggagcccgttagtaagctacccgcagagcccgtttccggagaccccgctccaggggacttagatgcgggagatcctgcttctggcgtgctagctagtggatag

SEQ ID NO: 213184 - DNA, 312 bp, synthetic construct
  misc_feature 1..312: note = Description of Artificial Sequence: Synthetic coding sequence
  source 1..312: mol_type = other DNA
atggattctttggaagagcctcagaagaaagtgtttaaggccaggaaaactatgcgggtgtctgatcgtcagcaactggaggccgtttacaaggtgaaggaggagctcctgaagactgacgtcaaacttctgaacggtaaccacgagaacggtgatcttgacccaacctcccccctggaaaatatggactatattaaggataaggaggaggtcaatgggattgaggaaatttgcttcgaccccgaggggagcaaagcagaatggaaagaaaccccatgcattcttagcgtgaatgtaaaaaataaacagtag

SEQ ID NO: 213185 - DNA, 270 bp, synthetic construct
  misc_feature 1..270: note = Description of Artificial Sequence: Synthetic coding sequence
  source 1..270: mol_type = other DNA
atggatagccttgaggagccacagaaaaaggtattcaaggcacggaaaacaatgagggtgagcgatcgtcaacagttagaggctgtgtacaaggtcaaagaagagcttttgaagacggacgtgaagctgctgaacggcaatcacgagaacggagatctggacccaaccagccctctggaaaacatggattatataaaggataaggaggaggtcaatggcatagaagaaatctgcttcgaccctgagggctctaaggccgaatggaaatag

SEQ ID NO: 213186 - DNA, 534 bp, synthetic construct
  misc_feature 1..534: note = Description of Artificial Sequence: Synthetic coding sequence
  source 1..534: mol_type = other DNA
atggattctctggaggagcctcaaaaaaaggttttcaaagctcgaaaaacgatgagagtctctgataggcagcagttagaggcagtgtacaaagtcaaagaagaacttctgaaaacggatgtgaaactgctaaacgggaaccatgagaatggcgacctggaccctacatctcccctcgagaacatggattatattaaagataaggaagaagtgaacggaatcgaagagatctgctttgatccggagggcagtaaggctgagtggaaagaaacaccgtgtattttgagcgttaacgtgaaaaataaacaggacgacgacctgaattgcgagccactcagtccccataacatcacccctgagcctgtgagtaaactccctgctgagcctgtgtcgggtgatccagcgcctggcgatctagacgctggagatcctgccagcggtgtgttggcctccggcgattcaacgtcgggagatcccacgtctagcgaacccagttcatctgatgctgccagtggcgacgccacatccggatag

SEQ ID NO: 213187 - DNA, 3813 bp, synthetic construct
  misc_feature 1..3813: note = Description of Artificial Sequence: Synthetic coding sequence
  source 1..3813: mol_type = other DNA
atggactcacttgaggagccacagaagaaggtgtttaaagcaaggaagactatgcgagtgagtgataggcagcagctggaagccgtgtataaagtaaaagaggaactcttaaaaaccgatgtgaagcttctcaatgggaatcatgagaatggggacctggaccccactagccctctggagaatatggattacattaaagacaaagaggaggtgaatggcatagaagagatctgcttcgacccagagggctctaaggcggaatggaaggaaacaccttgtatactgtccgtcaacgtgaaaaataagcaggatgatgatctgaactgcgaacctctctctcctcataatatcacccccgagccagtttccaagcttccagccgagcccgtatcaggagacccggcacccggtgatcttgatgcaggtgatcctgctagtggcgtcctggccagcggcgattcaacgtctggagacccaacaagcagtgagccatccagcagtgatgcggcaagcggggacgccacgtccggcgacgcaccaagtggcgacgtcagtccgggtgacgccacctccggcgatgctaccgccgatgacctgagcagtggtgatcccacttccagcgaccccatccctggagagcctgtgcctgtcgagcctatctccggagactgcgctgccgatgatattgcctcctccgagattacttcagtagatctggcaagcggggctcctgccagcacggacccagcttcagacgaccttgcttcaggtgatttgagctcatctgagctggctagcgatgatctggcgaccggcgaactggcgagtgacgaattaacctctgagagtacatttgaccgaacattcgagcccaagagcgtacccgtgtgtgagccagtgcccgaaatcgataatatcgagcccagcagcaacaaagatgacgattttttagagaagaatggcgcagatgaaaaactggaacaaattcaatccaaagactcactggatgagaagaataaagcagacaataacattgatgcaaacgaagaaactctggagacagatgatacgaccatatgcagcgacagacctcccgaaaatgagaaaaaggttgaggaggatataattacggagctggctcttggggaggatgcaatcagcagtagtatggagatcgatcagggcgaaaagaatgaagacgagacgagtgcggatttggtcgagacgatcaatgagaatgttatcgaagacaacaagagcgaaaatatactcgagaatacagacagcatggagaccgacgagattatccccattcttgagaagctggcccctagtgaggatgaattgacatgtttttcaaagacgtctcttctaccaatcgatgagactaatcccgacctcgaagagaaaatggagtcttctttcggctccccctctaaacaggaatctagtgagagccttccgaaagaggccttcctcgtgctgagtgacgaggaggacatctccggcgaaaaagacgaaagcgaggtcataagccagaacgagacatgcagtccagccgaggtcgagagtaacgaaaaggacaataagcccgaggaagaggagcaggtgattcacgaagatgacgagaggccatccgagaaaaacgagttctcccgtcgcaagcggtcaaaatcggaggatatggacaatgtacagtcaaagaggcggaggtatatggaggaggaatatgaggccgagtttcaggttaagattacggcaaagggcgatatcaaccagaaacttcaaaaagttatacagtggctattagaggaaaagctctgcgcgctgcaatgcgctgtcttcgacaagacactggccgagctgaagaccagggtagagaagatagaatgtaacaagcgccacaagaccgtgctgactgagctccaggctaaaatcgctcggctgacaaaacggtttgaagctgctaaagaagacctgaagaaacgtcatgagcacccccctaatcctccagtgtcccctggtaagaccgtcaacgacgtgaattccaataataacatgtcctatcgtaatgctgggaccgtccgacagatgttggaatctaagcgcaatgtctctgagtctgctcctccctccttccagactccagtgaacaccgtgtcatccacaaacttggtcactccacctgcagtagtgagtagtcagccgaaattgcagacccctgtgacttctgggagtctgactgccacatccgtgttgcccgcaccaaatacagccacagtcgttgccactacccaggtgccgtcaggtaatcctcagcctactataagcctgcagccccttccggtaatcctgcacgtcccggtcgctgtctcttctcagccacagttgttgcagtcccatcctggtaccttggtcacgaaccagcctagcggcaatgtggagtttatttcagttcagagtcctcctaccgtctcaggcctgacaaagaaccctgttagtcttccctccctcccaaaccccacaaaacctaacaatgtgccttccgtgccttccccctcaattcaaaggaatcccaccgcatcggccgctccgctcggcaccaccttagccgtgcaggcggtgccgacagcccacagtatcgtgcaggcgacccggacatctctccctacagttggaccgagcgggctatattcgcccagcaccaatagggggcctatccaaatgaagatcccgataagcgccttttcaaccagtagcgctgctgagcagaattcaaacaccaccccgaggattgagaatcagaccaacaagactatcgatgcttcagtttcaaaaaaagccgcagattctacttctcagtgtggtaaagccactgggtctgactcgtcgggggtgattgatcttacaatggacgacgaggaatcaggtgccagtcaagaccctaaaaagctgaatcacacaccggtgtccaccatgagttcttcacagcctgtttccagaccactgcaaccaatccagccagcaccgcctctccaaccttctggagtgccgacctctggcccttcccagacaacgattcacctcctgcccacagcgcctacaacagttaacgtgacccatcgcccagttacccaggtgacaacaaggttgcctgttcccagggcccctgccaatcatcaggttgtttacactactctgcctgcgccacctgcccaagccccactcagaggaacagttatgcaagcccctgcagtccggcaagtgaacccacagaattcggtaactgttagggttcctcagaccacaacttacgtggtgaataatggactgaccctggggagcactggcccacaactcacagttcaccatcgtccccctcaggtgcatacagagcctccgcgacccgtgcacccagcgccactgcctgaggccccacagcctcagaggcttcccccagaagccgcatcaacgagcttgccacagaagccacaccttaaactggctcgcgtgcagagtcagaacgggatcgtcctgagctggagtgtcctcgaggtggaccggtcctgcgctaccgtggacagttatcatctgtacgcctatcacgaggagccttctgccacagtgccaagccagtggaagaagattggcgaggttaaggcactcccactgcccatggcttgcacactgacccagtttgtgtccgggtccaaatactacttcgctgtaagggcaaaagatatctacggccgtttcggtccattttgtgaccctcagagtaccgacgttatctcttctacgcagagtagctag

SEQ ID NO: 213188 - DNA, 510 bp, synthetic construct
  misc_feature 1..510: note = Description of Artificial Sequence: Synthetic coding sequence
  source 1..510: mol_type = other DNA
atggactctctagaagagccacagaagaaagtttttaaagcgagaaaaaccatgcgcgtgagtgatcggcagcagctcgaggcagtgtacaaagtcaaggaggaactgctgaagacggacgtgaagttacttaacggcaatcacgagaacggggatcttgatcccacctctcccctcgaaaacatggattacatcaaggataaggaagaggtcaacggaatcgaggagatctgtttcgatccggagggcagcaaggccgagtggaaggagaccccctgtattctctccgtaaacgtgaagaataagcaggatgacgacctcaactgtgagccactgtccccgcacaacattacgcctgaacccgtgtcaaagctgcccgctgaacctgtgagcggcgatccagcgccaggtgatctcgacgccggtgatcctgcctctggcgttcttgcttctggggactccacgagcggagatcccacatcttctgagcctagctcatccgacgcgtag

SEQ ID NO: 213189 - DNA, 99 bp, synthetic construct
  misc_feature 1..99: note = Description of Artificial Sequence: Synthetic coding sequence
  source 1..99: mol_type = other DNA
atggactcgctagaggagccgcagaaaaaagtattcaaggctcgaaagaccatgagagtcagcgataggcaacaactggaggcagtgtacaaggtgtag

SEQ ID NO: 213190 - DNA, 399 bp, synthetic construct
  misc_feature 1..399: note = Description of Artificial Sequence: Synthetic coding sequence
  source 1..399: mol_type = other DNA
atggattctctcgaagagcctcagaagaaggtctttaaagccagaaagactatgcgggttagtgacaggcagcaactggaagctgtgtataaggtgaaggaggaactgctgaaaactgatgttaaactgctgaacggcaaccacgagaacggcgatctggaccccacttcccccctggagaacatggactatattaaagacaaagaggaggtcaatgggatcgaggagatctgttttgatcctgaagggtccaaggctgaatggaaggaaacaccttgtatcttgtctgtcaatgttaagaacaaacaggatgatgatctgaattgtgagcctctgtcaccacacaacattacaccagagccagtctctaagctgcccgcagagccggtttccggctag

SEQ ID NO: 213191 - DNA, 531 bp, synthetic construct
  misc_feature 1..531: note = Description of Artificial Sequence: Synthetic coding sequence
  source 1..531: mol_type = other DNA
atggactccctggaggagccgcagaaaaaggtctttaaggctaggaagaccatgcgcgtgtccgacagacagcaactcgaagcagtctataaggtcaaagaagaattactcaagaccgatgtcaaacttctgaatgggaaccacgagaatggcgacttggatccaacatcccccctcgagaacatggattacattaaagataaggaagaggtcaacggcatcgaggagatctgtttcgacccggagggttccaaagccgagtggaaggagacaccctgtattcttagcgttaatgtgaaaaataagcaggatgacgacctcaactgcgagccattatcacctcataacatcactcctgagccagtctcaaaactgccggcagaaccagtgagcggcgaccctgcccctggagatcttgacgctggagatccggctagtggcgttttggcctcaggtgattctacttcaggcgaccccacatcttccgagcccagttccagcgatgctgcttccggcgatgcaacctcctag

SEQ ID NO: 213192 - DNA, 180 bp, synthetic construct
  misc_feature 1..180: note = Description of Artificial Sequence: Synthetic coding sequence
  source 1..180: mol_type = other DNA
atggattcactcgaggaaccacagaaaaaggtgtttaaggcccgaaagaccatgagggtaagcgaccggcagcagttagaagcggtttacaaggtgaaggaagaactcctcaagacagatgtgaagttactgaatggtaaccatgagaatggggatttagacccgacgtcacctctgtag

SEQ ID NO: 213193 - DNA, 3318 bp, synthetic construct
  misc_feature 1..3318: note = Description of Artificial Sequence: Synthetic coding sequence
  source 1..3318: mol_type = other DNA
atggacagcctggaggaaccacagaaaaaggtgttcaaagcaagaaaaactatgagggtatccgaccgccaacagttggaagctgtctataaagtaaaagaagagctgctaaagaccgacgtcaagcttctgaatgggaatcacgaaaatggcgatcttgacccaacgtccccactcgagaacatggactacattaaggataaggaagaggttaatggcattgaagagatttgtttcgatcctgaagggtccaaagcggaatggaaggagacaccctgcatactttccgtcaacgtcaagaataagcaggatgatgatcttaactgtgagcctctgtcccctcataatatcacaccagaacctgtttccaaacttccggctgaacccgtgagcggcgacccagcgccaggcgacctggacgcaggcgaccccgcatctggggttctcgcaagtggagacagtacctccggggacccaacttcttcggaaccaagctctagtgatgcggcatcaggcgatgccacctccggcgacgcaccttctggagatgtaagcccaggcgacgccacctccggggacgcaacagcagacgatctctccagtggtgaccctacgtcatcggatcccattccaggcgagccagtccccgtggaaccgatcagtggtgattgtgctgccgatgacatcgcctcctccgagattacatcagttgatctggcttcaggtgcaccagcaagcaccgacccggcttctgacgatttagcatccggtgacctgtcctccagtgaattggccagcgacgatttggccactggagagctcgcttccgatgagctcacttccgaatccacttttgaccgcacatttgagcctaagagtgtgccggtgtgtgagccagttccagagattgataatatcgagccatcgtctaacaaagacgacgatttcctggagaaaaacggagcagacgagaaacttgagcagatccaaagcaaagattctctggacgagaagaataaggctgataacaacattgacgctaatgaagagacgctggagaccgacgacactaccatttgttccgacaggcccccagagaatgagaaaaaggtagaagaggacatcattaccgagctggctttaggtgaggatgccatttcatcctcgatggaaattgaccagggagaaaaaaacgaggacgagaccagcgccgacctggtcgagacgatcaatgaaaatgttatagaagataacaagagcgagaacatactcgagaataccgatagtatggagaccgatgagataatacctatcttagagaagttggcccctagtgaggatgagcttacctgtttctctaaaacgtctttgctacctatcgatgagaccaacccagatctggaagaaaagatggagagtagctttgggagtccctctaagcaagaaagcagcgagtctctgcctaaagaagcttttctggtgctttcagatgaagaggacatttccggcgagaaagacgagtccgaagtcatcagtcaaaatgaaacctgcagtcctgaggtggagtcaaatgaaaaggacaataaaccggaagaggaggaacaagttatacatgaagacgatgaaaggccgtccgagaagaatgaattctctcgtagaaaacgatccaagtccgaggatatggacaacgtgcaatctaagcggaggagatacatggaggaagagtacgaagctgagttccaggtgaaaatcaccgcaaagggcgacatcaaccagaagttacagaaagttatccagtggttgctggaggaaaagttatgtgccctgcaatgtgcagtgttcgacaagaccctggctgaactgaagacacgggtcgagaaaatcgaatgtaataagagacataaaaccgtcctgaccgaacttcaggctaagatcgcgcgactgactaagcggttcgaagctgctaaggaagacttgaagaagcgccacgagcatccgcctaacccgcctgttagtccagggaagacagtcaatgacgtgaattcaaataacaatatgtcctatagaaatgctggcacagtccgccagatgctcgagtctaaacggaacgtgtcagagagcgcaccccctagcttccaaacacctgttaacacagtaagctcaacaaatctcgttactcctccggcagtcgtgtcctcacaaccgaagctccagacgcctgtgactagcgggagtctgactgctacttccgtcctcccggcaccgaatacagcgactgtggttgctacaactcaagtgccatctgggaatcctcagccaactatctcactgcagcctctccctgttatcctccatgtgcctgtggccgtatcatcgcagcctcagttgctccagagccatccaggcactctggtgacaaaccagccaagcggcaatgtggaatttatcagcgtccagtcccctccaaccgtatcggggctgaccaaaaacccagtgagtctgcctagcttacctaatcccaccaaacccaacaacgtgccttccgtcccttcccctagtatccagaggaacccgaccgcttctgctgccccacttgggaccactctcgcagtacaagccgtgcccactgctcactctatcgtccaggcaacccggacctctcttcccacggtggggccttcaggcctgtattctccgagtacaaacaggggacctatccagatgaaaattccaatatctgcctttagtacttcttcagccgcagagcagaatagtaatactaccccacggattgaaaaccagacaaacaagacaatcgacgccagcgtgtccaaaaaggccgctgacagtacaagccagtgtggcaaggccacaggttcggattcctccggagtgattgatctgaccatggacgacgaagagtctggagcatctcaggacccaaagaagttaaatcacactcctgtcagtacaatgagttcaagccagcctgtgtcccggccactccagcccattcagccagcgccaccacttcaaccaagtggagtcccaacgagtggaccttcacagaccacaatccaccttctccccacggcccctaccacagttaacgtaacccataggcctgtcacccaagtaacgactcggctacccgtcccacgagcccctgctaaccatcaagttgtctacacaactctaccggctcccccagcccaagcgcctctgcggggtactgttatgcaggctcctgcggttagacaagttaatccgcagaacagcaagcggtttttcctctacatggctcctcggtacatgtag

SEQ ID NO: 213194 - DNA, 3837 bp, synthetic construct
  misc_feature 1..3837: note = Description of Artificial Sequence: Synthetic coding sequence
  source 1..3837: mol_type = other DNA
atgcaccaggatcaaagatttaggatggattccctggaggagccccaaaaaaaagtctttaaagccaggaaaaccatgcgggtctcggatcgtcagcagctcgaggcagtgtataaagtcaaagaggaactcctaaagactgatgtgaaattgctcaatggaaatcacgagaacggcgacctggacccaacctcgcccctcgagaatatggactatatcaaagataaagaggaggtgaatggcatagaagaaatatgtttcgatcctgaaggcagcaaagcggaatggaaagaaaccccgtgtattcttagcgtcaacgtgaagaacaagcaggatgatgatctaaattgcgaacctctctctccacacaatatcacccccgagcccgtatctaagctgccggctgaaccagtgagcggcgatcccgcacccggagaccttgatgctggagaccccgcttctggagtcctcgcaagcggtgactctacctccggcgatcctacttcttctgagccttcaagttcagacgccgcaagcggcgatgccacatctggagacgcccctagcggagacgtgtcgcctggagacgcgacaagcggagatgccacagcagacgacctctcctccggtgacccaacttcctctgatcccattccaggcgaacccgtacctgtcgagcctatcagtggggattgcgcagcggatgatatcgcatcctcggaaattactagcgtggacctagctagcggcgcacctgcgagtaccgacccagcatcagacgacctcgcgtctggagatctgtcctcatccgagttggcttctgacgatttggccacaggcgagcttgcctctgatgagctgaccagcgaatcaaccttcgatcgcactttcgagcccaagtctgtgcctgtctgcgagccagtgcccgagattgataacattgaacctagttctaacaaagatgatgacttcctagagaaaaacggagcagacgagaaactcgagcaaattcaaagcaaagattccctggacgagaaaaataaggccgacaacaacattgacgctaatgaggaaacccttgagacagacgacactactatttgtagcgacaggccccctgaaaacgaaaaaaaagttgaggaggatattatcacagaactagctctaggcgaggacgctataagctccagcatggaaattgaccagggggaaaaaaatgaagatgaaacttctgccgacctggttgagacgatcaatgagaacgtaatcgaggataataagtctgagaatattctggagaataccgactccatggagactgatgagatcatcccgatcttggagaaactcgcgccaagcgaggacgaactcacgtgtttttccaagacgtcgctgttgcctattgatgaaacgaatccagacctggaagagaagatggaatcatcgttcggttctccttctaaacaggaatcatcagaatccctcccaaaagaggcatttctcgtgctgagcgatgaggaagatatatcgggcgagaaggacgaatctgaggtgattagccagaacgaaacgtgttcccccgctgaggttgaatccaacgagaaggataacaaacccgaggaggaggagcaggtgattcacgaagacgatgagcggccttcagagaagaacgagttcagcagacggaagaggtcaaaatctgaggatatggataacgtccaaagtaaacggcgacgatatatggaagaggaatatgaggccgaattccaggtgaagatcactgcaaaaggcgacatcaatcaaaaactccaaaaagttatccagtggcttttggaagagaaattgtgtgccttgcaatgcgcggtgtttgacaagacgttagcagaacttaagacaagagtcgaaaagatagagtgtaacaaacgacacaagaccgtcctcactgaactccaggcaaagatcgctcgactgacaaaaagattcgaagcggctaaggaggacctcaaaaaaaggcacgagcaccctcccaatccacccgtgagtcccggtaagacagttaatgatgtaaattccaacaacaatatgtcttatcggaacgccggaaccgtccgtcagatgcttgagtctaagcggaatgtgtccgaaagcgctcctccttctttccagaccccagtgaatactgtcagttccacaaacctggtcactccccctgccgttgtgtcaagccaacccaaactccagactcctgtgacttctggaagtctaactgccactagcgtgctcccagccccaaatacggccaccgtcgtggccaccactcaggttcccagcggtaacccacaaccgacaatcagcctacagcccctgcctgtcattttacatgtgcctgttgccgtctcgtctcaaccccagttgctgcagagccatcctgggacactcgtcaccaatcagccttctggcaatgtagagtttatcagcgttcaaagtcccccaaccgtctcaggactgaccaaaaatcccgtgtccctgccaagtctgcctaaccctacaaagccgaacaacgtgccaagcgtgccatccccttcgatccagagaaacccgactgcttccgccgctcctctaggcactactctggctgtccaggccgtgccgacagcccacagcatcgttcaggccacccgtacttcactccctacggtgggtcctagcgggctgtactcaccctccaccaacaggggacctatccagatgaaaattccaatttccgcttttagcaccagttcggccgctgagcagaatagcaacacaactccgaggattgagaaccagaccaacaagacaatcgacgcttcagtctctaagaaggctgccgactcgacgtcacagtgtggaaaagcaacgggaagtgacagcagtggtgtgattgacttgacgatggacgacgaagagagtggggcatctcaggacccgaaaaagctgaaccatactccggtctcgacgatgagttccagtcagccagtgtcccgtcccttgcaaccaattcaacccgcaccccctttacagccttccggagtccctacctctggtccgtcccaaactactattcatctgctgcccacggcacccactaccgttaacgtcactcatcggccagttacccaggtcactaccaggttacccgtcccccgagctcctgccaatcaccaagtggtgtacactacacttcctgcgcctccagcccaagctccactccgcggtacagtgatgcaggccccagctgttagacaagtgaatccccagaattccgtgactgtgagggtgccccaaacgacgacatacgtggtcaacaacggtttgactctcgggtccactggtccccaactgactgttcatcatcgtccaccacaggtacacaccgagcctcctaggccagtccatcccgctcctctgcctgaggccccacaacctcagcggctcccgccagaagcagctagcacatcactgccccagaagcctcacttgaagctggcgagagttcaatctcagaatggaattgtactgtcctggtcagtcctggaggtagataggagttgcgctaccgtcgactcctatcacctgtatgcctaccatgaggagccatccgccacggtaccctcccagtggaagaaaattggcgaagtgaaagccctccccctccccatggcttgtacgctgactcaattcgtgagcgggtcaaagtattactttgcggtcagggcaaaagatatttacggcagattcgggccattttgtgatcctcagtcaaccgacgtaatctccagcacccagagcagttag

SEQ ID NO: 213195 - DNA, 510 bp, synthetic construct
  misc_feature 1..510: note = Description of Artificial Sequence: Synthetic coding sequence
  source 1..510: mol_type = other DNA
atggacagcctggaggagccacaaaagaaggtattcaaggctaggaaaacgatgcgcgtgtctgatcgacaacaattggaagctgtctataaggtgaaagaggagctgttgaagaccgatgtgaagctactgaatggcaaccacgaaaatggcgatctcgacccaaccagtcccctcgagaatatggactatataaaggataaagaggaggtaaatggcatagaggagatatgtttcgatcccgagggcagcaaggcagagtggaaggagaccccatgcatactaagtgtcaacgtaaaaaacaaacaggacgatgacttgaattgtgagcctctcagcccccacaacattacacctgagccagttagcaagttacccgcagaacccgtatcgggggatcccgcaccaggtgatttggacgccggagaccccgctagcggggttttagcctctggagatagtactagcggcgaccccacctcatctgagccgtcctcttctgatgcttag

SEQ ID NO: 213196 - DNA, 1632 bp, synthetic construct
  misc_feature 1..1632: note = Description of Artificial Sequence: Synthetic coding sequence
  source 1..1632: mol_type = other DNA
atggcatcgccagatcgctccaaaagaaaaattttgaaggccaaaaagacaatgccgctgtcatgcagaaagcaggtggaaatgctgaacaagtcgcggaatgttgaggcattgaaaaccgctattggttccaacgttccgtccggcaaccaatcgtttagcccctccgttattacccggactactgagataaccaaatgctcaccatctgagaatggggcaagttctctggacagtaacaaaaactctattagtgaaaagtcaaaggttttcagccagaattgtattaagccggtcgaggaaatcgtccattctgagactaagctcgagcaggtcgtgtgtagctatcagaagccatcccggaccacagagtcgccatctcgagtatttaccgaggaggctaaggatagtctgaacacttccgaaaacgactcagaacaccagacgaatgtcactaggagcttattcgagcatgagggcgcttgctcactcaagagctcatgttgcccaccttcggtgttatcaggagttgtgcagatgcccgagtcaaccgttacatcgacagtaggcgacaagaagactgatcagatggtgtttcacctggagaccaacagtaatagcgagtcccatgacaagcgccagagtgacaacatcctgtgttctgaagactctgggttcgtacctgtggaaaagacaccaaatctggtgaactcggtgacctctaataattgtgctgacgacattctgaagaccgacgaatgttccagaacttccatttctaattgtgagagcgctgacagcacctggcagtctagcctggacacaaacaataattcccattaccagaaaaagcgcatgttttcagagaacgaagagaacgtgaaacggatgaaaacatccgagcaaatcaacgagaacatttgtgtgagtttagagcgccagactgcctttctcgagcaggtcagacacctcatacagcaggaaatttacagtataaactacgagcttttcgacaagaagttgaaagaactgaaccagcgcatcggaaagactgaatgtcgtaataagcacgagggtatcgccgataaacttctggccaagattgcaaagctacagaggaggattaagacagtgctgcttttccagaggaactgtctgaagcccaacatgttatctagcaacggggcatcaaaggtggcgaactcagaagccatgattctggataagaacctggagtccgtgaacagcccaatcgagaaatccagcgtaaactacgagccatccaacccaagcgagaagggatcaaagaagatcaacctcagttcagaccaaaacaagtcggtttccgaaagcaacaatgacgacgttatgctgatttccgtagaaagcccgaacctaactacacccatcaccagtaatcccaccgacacgagaaagattacgagtgggaattcatccaattcccctaatgcagaggtcatgaaggtccagtatccgccatggtctcacattagaaagctgcttcagacacaaagaaagcagcctcactggcataaaatgcagtctagattcttgtctccactcagcacctgccacctgtcccagaatcatcagcatcattacctcaactag

SEQ ID NO: 213197 - DNA, 2049 bp, synthetic construct
  misc_feature 1..2049: note = Description of Artificial Sequence: Synthetic coding sequence
  source 1..2049: mol_type = other DNA
atggccagccccgaccgctcaaaacgaaagatactgaaagcgaagaaaaccatgccactgtcatgcaggaaacaggtggagatgctgaataagtcccgcaatgttgaagctctcaaaacagccattggttcaaacgtgccgtcagggaatcagtccttctccccgtcagtcatcactcgcacaactgaaattacgaaatgcagtccctcagagaatggggcaagttcactggactcaaacaaaaactctataagcgaaaagtcgaaagtgttttctcagaactgcatcaaaccagtcgaagagattgtgcactctgagacaaagcttgagcaggttgtgtgcagttaccaaaagccaagccgtaccacagaatctccgagccgagtgtttacggaggaggccaaagatagccttaatacctcagaaaacgactccgagcatcagacaaatgttacgcgcagtctctttgagcacgagggggcttgctcactcaaaagcagttgttgccctccttccgtccttagtggcgtggtgcagatgccggagtccactgtcacgagtacggtgggcgacaagaaaaccgaccaaatggtttttcacttggagacaaattctaactccgagtcccatgataagcgccagagcgacaatatcctgtgttccgaggactcaggatttgtgccagttgagaagactccgaacctggtaaactccgtcacatcgaataactgtgcagatgatatcctaaagaccgacgagtgcagtaggactagtatttccaactgcgagagcgctgacagcacgtggcaaagttctttggacaccaacaataactctcattatcagaagaagagaatgttttcagaaaatgaagagaacgtgaagcggatgaagacatcggagcagattaatgagaatatctgcgtttctttggaacgccaaaccgcctttcttgagcaggttcggcatctaatccaacaggagatttacagcattaactacgagctgtttgataaaaagttgaaagagttaaatcagaggatcggtaagacagagtgcaggaataagcatgaaggcatagcagataagctgctggccaaaatcgccaaacttcaaagaaggatcaagaccgtcctgctttttcagagaaactgcttgaagccaaacatgctgtcctctaatggcgcttctaaggtggctaatagcgaggcaatgatcttagataagaatcttgagagcgtcaattctcctatcgagaagtcaagcgttaattacgaacctagcaatccatccgaaaaggggtctaagaagatcaacttgagcagtgatcagaataaatcagtgagtgagtcaaacaacgacgatgtgatgctgatttctgtggagtcccccaatctgactacgcctatcactagtaaccccaccgacacccgaaaaatcacaagcggaaatagcagcaacagcccgaacgccgaggtgatggccgtgcagaagaaattggactccatcatagacctcaccaaagaaggactgtccaactgcaatacagaaagtcccgtctcgccactcgagtcacactccaaggccgcttccaatagtaaggagaccacgccgttagcccaaaatgcagtgcaggttcccgaaagtttcgagcacctgccccctcttcccgaacctccagctccactgcccgaactggtcgataagacacgcgatacattgcctccacaaaaaccagaattgaaggtcaagagggtctttcgaccgaacggcatcgccctgacctggaacattacaaaaattaatcctaaatgtgccccagtggaatcataccatttgttcctgtgtcacgagaacagtaataacaaacttatttggaagaaaattggtgagataaaagcattgccacttccaatggcctgcacgttaagtcagtttctggccagtaaccgatactacttcacggtccagtccaaggatatctttgggcgttatggaccattttgtgatatcaaatctatcccaggcttttctgaaaacctgacgtag

SEQ ID NO: 213198 - DNA, 1632 bp, synthetic construct
  misc_feature 1..1632: note = Description of Artificial Sequence: Synthetic coding sequence
  source 1..1632: mol_type = other DNA
atggctagtcccgacaggtccaaaagaaagattctgaaggccaaaaaaactatgcctctctcctgtagaaaacaagttgaaatgctcaataagtctcggaatgttgaggctctcaagactgcgattggtagcaatgtgccatcaggaaatcagtcattttctccttccgttatcacccgcactaccgaaatcacaaaatgctcgcccagcgaaaacggcgcttctagcctggatagtaacaaaaactccatatcagagaaatccaaggtgttctcccagaattgtataaaaccagtggaagaaatcgttcattcagagactaagcttgagcaggtggtgtgtagttatcagaagccctcccgtacaaccgagtcaccgagtcgagtttttacagaggaagccaaagactcccttaacacaagcgaaaatgactcagagcaccaaaccaacgtaactagatctctatttgagcatgaaggcgcttgctctttaaagtctagttgttgtcccccttctgtactatcgggggtggtacagatgcccgagtccaccgtcaccagcactgtgggggataagaaaaccgatcagatggtctttcacctggagacgaacagcaattcagagtcgcacgataagcgccagagcgacaatattctgtgttcagaggatagcggatttgtgccagtagagaagaccccaaatctggtcaactctgtcaccagcaataattgcgccgatgacatcttgaaaacggatgagtgttctaggacgtctatttctaattgtgagtcagccgactccacctggcaatcttcgctggatacaaataataactctcactaccaaaagaagagaatgttttccgaaaatgaagagaatgtgaaacgcatgaagacatccgagcagatcaacgagaatatttgcgtgagtctggagcgacagacagcattcttggaacaggttcgccacctcatccagcaggagatctattctatcaactatgagctgttcgacaagaaactgaaggagctcaatcagagaattggcaagacagagtgtcgtaacaaacacgaggggatcgccgacaaacttctcgctaaaatcgctaagctacagcgaaggatcaaaacagttctcctgtttcagaggaactgcctaaaacccaacatgcttagttcaaacggcgctagcaaagtggctaatagtgaggccatgattctcgacaagaatctggaatctgttaacagtccaatagaaaaaagcagcgtcaattatgaaccctccaatccctccgaaaagggatctaaaaaaatcaacttgtcgagcgaccagaacaaatcggtttccgaatctaacaatgatgacgtgatgttaatttcggtcgagagccctaatctgaccacgcccatcacatctaaccctacagatactagaaaaataactagcggaaattcctcaaatagcccaaacgccgaggtgatgaaggtccagtaccccccttggagtcatattagaaagctgttacaaacacagcgtaaacagccacactggcacaagatgcagtccaggtttctctcacccctcagtacttgccacctgagccagaatcaccaacatcactatctaaactag

SEQ ID NO: 213199 - DNA, 2049 bp, synthetic construct
  misc_feature 1..2049: note = Description of Artificial Sequence: Synthetic coding sequence
  source 1..2049: mol_type = other DNA
atggcatcacccgatcgcagtaagcggaaaattctcaaggcaaaaaagacaatgccactgagttgtcggaaacaagtggagatgcttaataagagccgcaacgttgaggctctgaagactgcgattggctccaacgtgccctctgggaatcagtcgttcagccctagcgtgattaccaggaccacagaaatcactaagtgcagtcccagcgaaaatggcgcaagttctctagattccaacaagaattctatcagtgaaaagagcaaagttttcagccagaattgtataaagcccgtcgaggagattgtccactccgagaccaaactcgaacaggttgtgtgttcttaccagaaaccaagcaggacaaccgagagcccttcccgtgtattcaccgaggaggctaaggatagcttgaacaccagcgagaacgacagtgagcatcagactaatgtgacgcgctctcttttcgaacacgaaggcgcatgttctcttaagtccagctgctgcccaccatccgtgttaagcggagtagtgcaaatgcctgaaagcacagtgacttcaacagtaggcgacaaaaagaccgaccagatggttttccacctggaaaccaacagtaacagcgagagccacgacaagaggcagtcagacaatattttgtgttctgaggatagcggattcgtccccgttgaaaaaacacccaacctcgtaaactctgtgacttccaataattgcgcagatgacattctcaaaactgacgagtgctcacgcacctctatctccaattgcgagtccgccgattctacttggcagtcttcactggatacgaacaacaactcccactaccagaagaagcggatgtttagtgagaacgaggagaatgttaagcgcatgaaaacttctgaacagattaacgagaacatttgcgtttcacttgaacggcaaaccgctttcttggagcaggtgcgccacctaatacaacaagagatttacagcattaactatgagctttttgataagaagttgaaagagctgaaccaaaggatcggcaagaccgaatgtcgtaacaagcacgaaggcatcgccgataagctgcttgccaaaattgccaagctgcagagaaggatcaagacagtactgctgttccagcgtaattgcttgaagcctaacatgctcagtagcaatggtgcctccaaagtcgcaaactccgaagcaatgattttggacaagaacttagaatccgtgaactcaccaattgaaaaatcatcagtaaattatgagccaagcaaccccagtgaaaaaggaagcaagaagatcaacctgtcttctgaccagaacaaatcagtgtccgagagtaacaacgatgatgttatgctgatctcagtagagagtcccaatcttaccactcctatcacgagcaaccccaccgacacacgaaagattacatcgggtaattccagcaacagccctaatgcagaggtcatggctgttcagaagaagcttgactctattatcgacctgactaaggaaggcttgagcaattgtaacactgaatctccagtaagccctctggaatcccactccaaagcagcatccaactcgaaagaaacaacacctctggcccagaacgcagtgcaggtacctgagtccttcgaacacctgccacccttgcccgagccacccgctccactacctgagctcgtagataagacccgagataccctcccccctcagaaaccagagttgaaagtgaagagagtcttccggcctaacggaattgctctgacttggaatatcactaaaatcaatccgaaatgtgcacctgtggagtcctaccatctgttcctttgccatgaaaattcgaataacaaactaatatggaaaaagattggggagatcaaagcattgcccctaccaatggcctgtaccctgtcgcaattcctggcttctaacagatattattttactgtgcagtccaaagatattttcggaagatatgggccattttgtgacatcaaatccatccccggattctctgaaaatctgacttag

SEQ ID NO: 213200 - DNA, 1278 bp, synthetic construct
  misc_feature 1..1278: note = Description of Artificial Sequence: Synthetic coding sequence
  source 1..1278: mol_type = other DNA
atggcatcccccgacaggagcaaacgcaagattctgaaggccaagaagaccatgcctttgtcctgccgtaagcaggttgaaatgctgaataagtctaggaacgtggaggcattaaaaacagcaatcggaagcaatgtgccctccggcaatcaatccttctctcctagtgtaatcaccaggactactgagataaccaaatgcagccctagtgaaaacggagccagcagtctagactcaaacaaaaactcaataagtgagaaaagtaaggtgttttcccagaattgtataaaaccagtggaagagatagtgcattctgagacaaaactggagcaggtcgtgtgcagctatcaaaagcctagccgaactacagaatccccctctagagtgttcacagaggaagcgaaggactccctgaatacatccgagaatgactctgaacatcagacaaatgttacacgaagtctgttcgaacatgagggcgcttgcagtcttaagagcagttgctgccctccaagcgtcctgtccggtgtcgtgcagatgccagagagcactgtcacctctacagtgggcgacaaaaaaactgaccaaatggtgttccacttagagactaatagtaactcagaatcccacgacaagaggcagtctgataatattctgtgctctgaggactctgggttcgtacccgttgagaagaccccgaacctcgtaaactccgttacttccaataactgtgctgacgatattcttaagactgacgaatgtagccgtaccagcattagtaattgtgagtcggctgatagcacatggcagtcttcattagataccaataacaactctcactatcagaagaaaaggatgttctcagagaatgaagagaacgtaaagcggatgaaaactagtgagcagataaatgagaatatctgcgtgagtctggagcgccagaccgcattcctggaacaggtgcgacatctgatacaacaggaaatttatagtataaattatgagctgtttgacaagaagttaaaggagctgaatcagcggatcggcaaaaccgagtgccgcaacaagcatgagggcattgccgataagctcctggcgaagatcgccaagctgcagcggcgaattaagactgtgttactcttccagcggaattgcctgaagcctaacatgttgtcgtccaacggcgctagcaagatccccgaaaagctccatcaggaaattcttgccatcctgccgatgctgaagctttggctctacaggagaaacctcatcctctag

SEQ ID NO: 213201 - DNA, 681 bp, synthetic construct
  misc_feature 1..681: note = Description of Artificial Sequence: Synthetic coding sequence
  source 1..681: mol_type = other DNA
atgttgatatcagttgaaagcccaaacttgaccacccccattacaagcaatccaacagatacacgcaagatcacatctggcaactcaagtaacagcccaaacgctgaggtgatggctgtccagaagaaactcgattccatcatagacctcaccaaggagggtctcagtaactgtaacaccgagtcccctgtgtcccccctggagagccactccaaagcagccagcaatagcaaagaaacaactccactggctcagaacgcagtccaggttcccgaaagctttgaacatctgccccctctccccgagccccctgcaccgctgccagagctggtggacaagacacgggataccctgccccctcagaagcccgagctcaaggtcaagagagtgttcagaccaaatgggattgcacttacatggaatatcacaaaaatcaacccaaaatgtgctcccgtggagagctaccatctattcctgtgtcatgagaattcaaataataaactcatatggaagaaaattggggagattaaggcactgcctctcccaatggcctgtacgctttcacagtttctggcctcaaaccgttattactttacggttcagagtaaagatatttttgggcgttatggcccattctgtgatatcaaaagtatacctggtttttctgagaacttgacatag

SEQ ID NO: 213202 - DNA, 714 bp, synthetic construct
  misc_feature 1..714: note = Description of Artificial Sequence: Synthetic coding sequence
  source 1..714: mol_type = other DNA
atgactagcgaaatcacctacgctgaggtgaggttcaaaaatgagttcaagagcagcggcattaacaccgcctcttcagccgcttccaaggagcgcactgcaccccataagtcgaatacagggttccccaagctactgtgcgccagccttcttatctttttcttgctgctcgccatatcgttctttatcgcgttcgtgatcttttttcagaaatacagtcagttgctggaaaagaaaaccactaaagaattggtgcacactaccttggagtgcgtgaagaaaaacatgcccgttgaggagacggcctggtcatgttgtcccaagaattggaaaagcttttctagcaattgttatttcattagtaccgagagcgctagctggcaggacagcgaaaaggattgcgccagaatggaggcgcatctgctagttatcaatactcaggaggaacaggatttcatatttcagaatctccaggaggagtctgcttatttcgtgggtctctcagatccggaaggacagcgccactggcaatgggtagatcaaaccccttacaacgaaagttctacgttctggcacccacgggagccctctgatccaaatgaacgatgcgtggtcttgaatttccggaagagcccaaagcgatggggttggaatgacgtgaactgtcttgggcctcagagatcagtgtgtgagatgatgaagatacatctgtag

SEQ ID NO: 213203 - DNA, 2469 bp, synthetic construct
  misc_feature 1..2469: note = Description of Artificial Sequence: Synthetic coding sequence
  source 1..2469: mol_type = other DNA
atggaggaggaggaagaagccatcggactgcttgataaggtccttgaagatgaagacgtgtttttactcgaagagtgcgaacttggaacccccacctcaccgggttccggcagcccttttcttgtagcagtgaaagtcgaggcgggaaaggggctggaaatgagaaaacttgtgctgagcggttttctggcttccgaagaaatctatattaatcagctggaggcccttttactcccgatgaaacctctcaaagcgaccgccactacctctcaacccgtgttgacaatccaacagattgagactattttttacaaaatccaggatatttacgaaatccacaaagagttttatgacaacctctgtccaaaagtacagcagtgggatagccaagttacaatggggcatctatttcagaagctggcctctcagctgggcgtgtacaaggccttcgtagataattacaaagtagctctagagacggctgagaaatgctcccagtctaacaaccaatttcagaagatcagcgaggaattaaaggtgaagggccctaaggattctaaggacagccacactagcgtaaccatggaggccttactgtataaacccatcgatcgggtcactaggagcacattagtactgcacgatttgctgaaacatacgcctgtagatcaccccgactaccccctcctccaggacgcccttcggatttcacagaactttctgtcatcaatcaatgaggacattgatcccagaagaactgccgtgacaacgcctaaaggtgagactcggcagctggtgaaagacggattcttagttgaagtaagcgagagttcccgaaagctcaggcatgtctttttattcacagatgtgctcttgtgcgcaaagctgaagaaaacgtctgctggcaagcatcagcagtatgattgcaaatggtacattcctctggccgatctcgtctttccttccccagaggaaagtgaggctagcccacaggttcatccttttcctgaccatgagctagaagacatgaagatgaaaattagcgctctaaagagcgaaattcagaaggagaaagctaataaaggccagtcccgcgcaatcgagagattaaaaaagaaaatgttcgagaacgaatttcttctgctcctaaatagcccaactattccgttcaggattcataatcgcaatggtaaatcttatctgttcctcctttctagcgattacgaacgatctgagtggcgggaggccatacaaaaactccaaaaaaaggatttgcaggccttcgtcctttcatcagtcgaactgcaggtgttgactggttcctgctttaaactgcgaactgtacataatatccctgtcacatccaataaagacgacgacgagagtcccggactttatggcttcctccatgtaattgtgcattctgccaagggtttcaaacagagcgccaatctttattgtaccctggaggttgactcttttggttatttcgtgagtaaggccaagaccagagtcttcagagacactgccgaaccgaaatgggacgaagagttcgagattgagctggaggggagtcagtccctgcgaatattgtgttacgagaagtgctatgacaaaactaaagtcaacaaggacaataacgaaatcgttgacaagatcatggggaagggtcaaatacagctggatccacagactgtcgagacaaaaaattggcacactgacgtcatcgagatgaatgggatcaaagtggagttctccatgaagttcacctccagagacatgtccctcaagagaaccccaagcaaaaagcagaccggcgtatttggcgtgaaaatctcggtggtcacaaagcgggagaggtccaaggtaccctacattgttaggcagtgtgtcgaggaggtggagaaacgcggaattgaagaggtagggatctataggatttccggagtggctacagatattcaagccctgaaggccgtcttcgatgccaacaacaaggacatcttgcttatgctctccgacatggatatcaacgcaatcgctggaactttaaagctctacttccgtgagctgccagagcctttgctgaccgacaggctttaccccgcattcatggaaggaatagccttgtccgacccggcagccaaggagaactgtatgatgcacctgctccgctccttgcctgaccctaatctgattacttttcttttcctcctggaacacctgaaacgggtggccgagaaagagcccatcaacaagatgtcgctgcacaacctggcaaccgtgttcgggcctacactgttgcgcccatccgaggtggaatcaaaggctcacttaacctccgctgcagacatttggagccatgacgtgatggcccaggtacaggtattgttatattacctgcagcatccccctatctctttcgctgaactgaaacgcaacactttgtatttctcaaccgacgtctag

SEQ ID NO: 213204 - DNA, 2580 bp, synthetic construct
  misc_feature 1..2580: note = Description of Artificial Sequence: Synthetic coding sequence
  source 1..2580: mol_type = other DNA
atggagccgcttagccacagaggtctgccgagattgagttggattgatacactctactccaactttagctacggcactgatgagtatgacggggagggcaacgaggaacagaagggcccacctgaggggtcggagactatgccatacattgatgagagtcctacaatgtcccctcagttaagtgcaagatctcagggcggtggggacggggttagccccaccccaccagagggacttgcccctggcgtagaagcaggcaagggactcgagatgcgcaagctggttctgtccggatttttagcctccgaagagatctatatcaaccaactggaggctctgctcttacctatgaagcctctgaaggctactgccaccacgtcacagccggttctaactatccaacagattgaaacaatcttttacaaaatccaggatatttacgaaatccataaggaattttatgataacctgtgtccaaaggtgcagcagtgggatagccaggtgactatgggtcacctattccagaaactggcttcacagctgggggtgtataaagcattcgttgataactataaggttgcgcttgagactgcggaaaaatgtagtcagtcaaataaccagtttcagaagatttcagaagaactcaaggtgaaaggcccaaaggattcaaaagactctcacacgtcagtaaccatggaggctctgttgtataagcctatcgatcgggtaacaaggagcactctggtcctacacgacctgctgaagcacactccagttgatcaccctgattaccccctgctccaggatgccctgcgcatatctcaaaacttcctgtcttccatcaatgaggatatagatccacgtcgcaccgcagtgactaccccgaaaggtgaaactagacaactggtcaaagacgggttcctggtcgaggtcagcgagagcagcaggaagctgcgccatgttttcctgttcactgatgtattactctgtgccaagttaaaaaaaacctccgccggtaaacaccagcagtacgattgcaaatggtacattcccctggctgatctggtgttcccctctcccgaggagtcggaggcatctccccaggtgcaccccttccctgaccacgagctggaagacatgaagatgaagatctctgccctgaagtcagaaatccaaaaagagaaggccaataagggccaatctagggctatagaaagactgaagaagaagatgttcgaaaatgaattcctgctgctgctgaacagcccgactataccgtttcggattcataatagaaatggcaagtcttacctatttctcctttcttccgattatgagaggagcgaatggagagaagcaatccagaaacttcagaaaaaggacttacaggcctttgtgctgtcaagtgtggagctgcaggtgctgactggctcatgctttaagctgaggacagtgcacaatataccggttaccagcaacaaggatgacgatgagtcccctggactctatggcttcttgcacgtgattgtgcatagcgcaaaggggttcaagcagtcagcaaatctgtactgtaccctggaggtcgacagcttcggatactttgtgtcaaaggctaaaaccagagtattcagggatactgctgaaccgaagtgggatgaagagttcgaaatcgaactggagggatcccaatcactaagaatcttgtgttatgagaaatgctacgataagacaaaagtcaacaaggacaataacgagatagttgataagataatgggaaaaggtcaaatccagctggatccacagaccgtcgagacgaagaattggcatacagacgtcatcgaaatgaatggaattaaggtcgagttctccatgaagttcacatcccgcgacatgagtttgaaaagaactccttccaagaagcagaccggcgtgttcggcgtcaagatctcagtagtcacaaagagagagaggagcaaagtaccttatatagtccggcagtgtgtcgaggaggtggagaaacgcggaatcgaggaggtggggatataccggatctccggcgtcgctaccgacatccaagctctaaaagctgtttttgacgctaataataaggacatactgcttatgttgtctgatatggacatcaacgccatcgctggcaccctcaaactatactttagggagctccccgagccgctcctcacggaccgcttgtaccctgcctttatggaaggaatcgccctctccgatccagcggctaaagagaattgcatgatgcacctacttaggtcactgcccgacccgaacctgatcacctttctgttcctgttggagcatctcaaacgggtagctgagaaagagccaattaacaaaatgagtcttcacaatttagcaaccgtgttcgggcctacactgttgagacctagtgaggttgaatccaaagcacatctcacctcagctgctgacatctggagccatgacgttatggcccaggtccaggtgctgctgtattacttgcagcacccaccgattagctttgcagagctaaagaggaatactctttatttttccaccgacgtgtag

SEQ ID NO: 213205 - DNA, 1092 bp, synthetic construct
  misc_feature 1..1092: note = Description of Artificial Sequence: Synthetic coding sequence
  source 1..1092: mol_type = other DNA
atgaaaccccttaaggccaccgctacaacatcccagcccgtgttgactatccagcaaatcgagacaattttttacaaaatacaggacatttacgagatccacaaggagttctacgacaacctatgccccaaggtgcaacagtgggacagtcaagtcactatgggccatctgttccagaagctggctagccaactcggagtttacaaggccttcgtagataactataaagtggcccttgaaacagctgaaaaatgttctcaatcaaacaaccagttccaaaaaatctccgaagagcttaaagtgaagggacctaaagatagtaaggactcccacacatctgtcaccatggaggctctgctgtacaaacccatcgatagagtgacccgctccactctcgtgctgcacgacttattgaagcacacccctgtggatcatccggactatccgctactccaggacgctctgcgaatttctcaaaattttctgagtagcatcaacgaagatatcgacccaagacgaactgcagtcaccacccccaagggagaaactcgtcagctcgtgaaagacgggtttctggtcgaggttagtgagtcttccaggaaattgagacatgtgtttctatttacggacgtgttactttgcgcgaaactcaagaaaacgagtgcgggaaaacaccagcagtacgattgcaaatggtacatcccactagccgatctggtgtttccgtcccccgaggaaagcgaagcgtccccccaggtgcacccctttcccgatcatgagctcgaggacatgaagatgaagatctcagctctcaagtctgaaatacagaaggaggaggtagaaaagcggggaatcgaagaggtggggatctacaggattagcggggtcgcaacagacattcaggctctcaaagcagtgtttgatgccaacaataaggacatcctcctgatgttgtcagacatggacattaatgccatcgccggaacgctaaagctgtacttcagggaactgccagaacccctgctgacagataggttgtccccatgccccaccccaacttcatctccatccagctcttgttggaacacctag

SEQ ID NO: 213206 - DNA, 1926 bp, synthetic construct
  misc_feature 1..1926: note = Description of Artificial Sequence: Synthetic coding sequence
  source 1..1926: mol_type = other DNA
atggaaatactgctgattatccgcttttgctgcaactgtacctatgcactgctttacaagcctatcgatagagttacgaggtccacactcgtcctgcatgatcttctcaaacacacgcccgtcgatcatcccgactatcccctgttacaggacgccctgcgtatatctcaaaacttcctgtcatctataaatgaggacatcgatccacggaggaccgctgttactaccccaaagggagagacgagacagctggtgaaggatggattccttgtggaggtgagtgagagctcccgtaagttaaggcacgtgtttctcttcaccgatgtgctcctctgtgccaagttgaagaagacaagtgcaggcaaacatcagcaatatgactgtaagtggtatatccctctcgcggacttggtatttccaagccctgaagaatctgaggcaagtccacaggtgcatccgtttccagatcacgaactggaagacatgaagatgaaaatttccgctctcaagagtgaaattcagaaggaaaaggccaataaaggtcaaagcagggccatagaaagactgaagaagaagatgttcgaaaacgagttcctgctgctgctgaacagccctacaatccctttccgaattcataatcgtaatgggaagtcttatctatttcttctgagttctgattatgaaagaagtgagtggagagaggccatacagaagcttcaaaaaaaggatcttcaggcctttgtgcttagttctgtcgaattacaggtgctaaccggctcctgctttaagctgcgtaccgtgcacaacatacccgtgacatcaaataaggacgacgatgagagtcccggtctgtacgggttcctgcacgtgattgtccactcagccaaaggcttcaagcagagtgctaacctttactgcactctggaagttgattcttttggatactttgtttctaaggcaaaaacccgcgtcttccgcgataccgcggaacctaaatgggacgaggagtttgagattgagctcgaggggtcccagtcgttgagaatactctgctatgaaaagtgttatgacaaaacgaaggtcaataaagataataatgagatcgtggacaagatcatgggaaaggggcaaatacagctggatccccaaacagtagaaaccaaaaactggcatactgacgtaattgaaatgaacggaattaaggtggagttctcaatgaagtttaccagccgcgatatgtctctcaagcgtacgccaagcaaaaagcagactggtgtattcggggtcaaaatttcagtagtgaccaaaagagaaaggagcaaggtgccatacatcgtgagacaatgcgtagaagaggtggagaagcggggtatagaagaggtgggcatttacaggatctcaggggtggcaacagatattcaggctttgaaagcagttttcgacgcaaacaacaaggatatccttttgatgctgtccgacatggatattaacgcaattgccggtaccctgaagctgtactttagggagttacccgagcccctcctgaccgataggctgtatcctgcctttatggaaggtatcgccctgagcgaccctgcagctaaggaaaactgcatgatgcacctgcttagatctcttccggaccccaatctcattacctttctgtttctgctggaacacttaaagcgcgttgcggaaaaggaaccaatcaataaaatgtctctgcataaccttgccactgtcttcgggccaacacttcttaggccctcagaagtcgaatccaaggcccatttgacctcagctgccgacatctggtcccacgatgtgatggctcaagtgcaggtcctgctatattacctgcagcatcccccaattagcttcgcagaacttaaacgtaacaccctctatttctcaaccgatgtttag

SEQ ID NO: 213207 - DNA, 933 bp, synthetic construct
  misc_feature 1..933: note = Description of Artificial Sequence: Synthetic coding sequence
  source 1..933: mol_type = other DNA
atgactgacgtgctccctcaacctgattgcagcccgaaagctggacgggagcctcttgcactggaggaatccggttccaagagacccccaaataccggcgcacgactgtggggcagagttaggaacaagttactacgaaacaagctagatccccagactgtggagactaagaattggcacaccgatgtcattgaaatgaatggcataaaggtggaattcagcatgaagtttacctctcgagacatgagtcttaaacgcacacccagcaaaaagcaaacaggcgtatttggtgtcaagattagcgtcgtgactaagcgcgagaggtcgaaagtcccttacattgttagacaatgtgtggaagaagtggaaaagagggggatcgaagaagtcggtatttatagaatatccggggtggccacagacatacaggccctgaaagccgtgttcgacgccaataacaaggacatcctgctgatgctgagcgatatggacataaatgccatcgccggtactctgaaactgtatttcagagagttgccagagcccttgctgacagacagactctaccctgcttttatggagggaatagctctcagcgatcctgccgctaaggagaactgcatgatgcacctgctgcggagtctgcccgatccgaacttgataacctttttgttcttattggagcaccttaagagggtggctgagaaggaacccattaacaagatgagcttgcataacctggctacggtgtttggccctaccttgctacgcccatctgaagtggagagcaaggcacatttgacctctgccgctgacatatggtcccacgacgtcatggctcaggtacaggtcttgctttactatctgcaacatccccctatctcgttcgccgagcttaagcgcaacaccctgtacttttccactgatgtctag

SEQ ID NO: 213208 - DNA, 2442 bp, synthetic construct
  misc_feature 1..2442: note = Description of Artificial Sequence: Synthetic coding sequence
  source 1..2442: mol_type = other DNA
atgccctacatagatgagtcacccactatgtccccacagctgtccgccaggtctcagggaggcggtgatggcgtaagtcccactcccccagagggtctggcccctggtgtcgaggctggaaagggtctggaaatgcgaaagttagtcctgtctggatttcttgcaagtgaggagatatacattaatcagctcgaagctctgcttctccctatgaagcccttgaaggcaactgcaaccacgtctcagccagtattgacaatccagcagatcgagaccattttctacaagatccaggacatctacgaaatacacaaagagttttatgataatctatgtcccaaggttcagcagtgggactctcaagtgacaatgggccatcttttccaaaagttggcttcacagcttggcgtttataaggcctttgtggataactacaaagttgctcttgaaactgctgagaaatgctctcagtctaataaccagtttcagaagatcagcgaggagctcaaagtgaaggggccaaaagattctaaagattctcacactagtgttacaatggaggcattgctatacaagcctatagacagggtgactcgctcaactctcgtcctgcacgatcttttaaaacatacccccgtggatcaccccgattatcctctcctgcaggacgctctgcgaatttcacagaactttctgtcctcaattaacgaagacattgaccctagacgaacggcggtgacgacgcctaagggggaaactagacagctggtaaaagatggttttctggttgaagtctccgaaagttccaggaagctgagacatgtgtttctcttcaccgatgttctgctgtgcgccaagctcaaaaagacaagcgcagggaaacaccaacagtacgactgcaagtggtatatacccttagccgacctggtctttcccagcccggaggagtctgaggcttctccccaggtccatccctttcctgatcacgagctggaggacatgaaaatgaaaatttctgcactcaagtcagaaatccagaaagagaaggcaaacaagggacaatcgcgggctattgagagattgaagaagaaaatgtttgaaaacgaattcctgctgctgctgaacagtccaacgatccccttccggattcataatcggaacggcaagagctacctattccttttgtcctctgactatgagagatctgagtggcgggaagcgatccaaaagctgcaaaagaaggatctgcaggcctttgtgctttcctccgttgagctgcaagtccttactggctcttgtttcaagctgaggacagtccacaacatccccgtcacctccaacaaagacgacgatgaatctccaggactctacgggtttttacacgtgatcgtgcactcagctaagggctttaaacaaagcgccaacctgtactgcacgctggaagtcgatagcttcggttacttcgtaagcaaggccaaaacaagagtgtttagagacactgctgaaccgaagtgggacgaggaattcgaaatcgaacttgagggttcccagagccttcgcatcttatgttatgagaagtgttacgacaagaccaaggtgaataaagataacaatgaaatagtggacaaaattatgggtaagggacaaatccagctcgatccgcaaacagtggagacaaagaattggcataccgacgtgattgaaatgaacggcatcaaggtcgagtttagtatgaagtttactagccgcgacatgagccttaaacgcacaccatctaagaagcaaactggtgtgttcggcgtcaagatatcggtcgtgactaaacgagaaagatccaaagtcccctacattgtgagacagtgcgtcgaagaggtcgagaaaaggggcatcgaagaggtgggcatttaccggatttcaggagtcgctaccgacattcaggccttgaaagccgtttttgacgccaacaataaggatatactgttaatgctatctgacatggatattaatgccatcgctggaacgttgaagctgtattttcgcgaactcccagagccattgctcacagatagactctatcccgctttcatggaagggatcgcactatccgaccctgccgcaaaggaaaactgtatgatgcacctgctcagatccctaccagatcctaatcttattacatttctatttctgctggaacacctgaaacgagtggcggagaaggagcccattaacaaaatgtcactgcataatctcgcaaccgtgttcggcccaacactcctgcggccaagcgaagtggagtccaaggcccacttgacctccgctgcggatatctggtctcatgacgttatggctcaggtccaggtgttgttatattatctgcagcaccccccaatatcttttgcggaactaaagcgcaacacattgtatttttccacggatgtgtag

SEQ ID NO: 213209 - DNA, 1332 bp, synthetic construct
  misc_feature 1..1332: note = Description of Artificial Sequence: Synthetic coding sequence
  source 1..1332: mol_type = other DNA
atgctgacgaacggaaaggagcaagtgatcaaaagctgtgtgtctttgcctgaattgaatgcgcaagtgttctgccattccagtaataatgtgaccaagacagaatgctgctttaccgacttctgcaataacatcacactccacttgcctacagccagtccaaatgctccaaaactcggacctatggagctcgcgattatcatcactgtgcctgtttgcctgctgtcaattgccgcaatgctgacagtctgggcatgccaaggcaggcaatgtagctatcgtaaaaaaaagaggccaaacgtggaagagccacttagtgagtgcaatctggtgaacgcaggcaaaacactcaaggacctgatttatgacgtcacagcatctggatccggctctggactgccccttctggtgcagaggactattgccagaactatagtgttgcaggagatcgtgggaaagggtcgcttcggcgaggtgtggcacggcagatggtgcggcgaggatgttgcagtgaagatattttcttcccgggacgagagatcttggttccgagaagccgaaatctatcagaccgtaatgctccgacacgagaacatcctgggttttatcgccgcagacaataaagataatggtacctggacccaactgtggctagtttctgaatatcatgagcaaggcagcctgtacgattacttaaatcggaatatcgtgaccgtggcgggaatgatcaaactggccttgagtattgcctctgggctagcccatctccatatggagatcgtggggacccagggcaagcccgctattgcccatcgggacatcaaatctaaaaacattctggtgaaaaaatgcgagacttgcgcaattgccgaccttgggttagcagtgaagcatgacagcatcctgaatacaatcgacatccctcagaacccgaaggtcggaaccaagcgatatatggccccagagatgttagatgataccatgaacgttaacatcttcgagtcattcaagcgggctgatatctactctgtgggcctggtgtactgggagatcgccaggcgctgttctgttgggggtatcgtggaggaatatcagctgccctactacgatatggtcccctctgaccctagcatcgaagagatgagaaaggtggtgtgtgaccagaagtttaggccctcaatccctaatcaatggcagtcatgcgaggcccttcgagtcatgggacgtattatgagggagtgctggtatgcaaatggagcagcacgtcttaccgcgcttcgaattaagaaaactatcagccagctctgcgtaaaggaagactgtaaagcatag

SEQ ID NO: 213210 - DNA, 1512 bp, synthetic construct
  misc_feature 1..1512: note = Description of Artificial Sequence: Synthetic coding sequence
  source 1..1512: mol_type = other DNA
atgaccctgggttcccctcggaagggacttcttatgctgctaatggccctcgtgacccagggcgaccccgtaaagccatcccgagggccactggtcacctgcacttgtgagtcgccacattgtaagggccctacctgtcgcggagcttggtgcacagtggtgctcgtccgcgaggaaggtcgtcacccacaagaacaccgaggatgtggtaatcttcatagagaactctgtcggggacgccctacagagtttgttaatcattattgctgcgattcgcacctgtgtaatcacaacgtttcgctggtgcttgaggccacccagcctccatcggaacagcctggcacagacgggcagctcgctttgatccttgggcctgtcctggccctgcttgctcttgtggctctaggtgtcctagggctgtggcacgtcaggagacgccaggaaaagcagcgagggttgcacagcgagttgggtgagagtagcctgattctgaaggcatccgagcagggcgacagtatgttaggcgatttgctggactctgactgcacgaccggtagcggctctgggttgcctttcctggtgcaaagaaccgttgcacgacaagtcgctctggtcgagtgcgtcgggaagggccgatacggggaggtgtggaggggcttgtggcacggcgagagtgtggctgtcaagatattcagctcgcgcgacgaacaatcatggttccgggagaccgagatttacaataccgtgttgcttcgtcatgataatattctgggatttatcgcttccgacatgacgagccgcaatagcagcacacaactgtggttgatcacacattaccatgagcacggatctctttacgacttcctccagaggcagaccctggagcctcacttggcgctgcgacttgccgtatctgcagcatgtggactggcgcatctccacgtggaaattttcggcactcagggcaagccggcaatcgcccaccgagattttaagagccggaacgtcctggtaaaatcgaatttacagtgttgtatagccgacctcggattagccgtgatgcattcccaaggttctgattacctcgatattggcaataatcccagagttggcacgaagagatacatggctcctgaggtcctcgacgagcaaatccggaccgattgtttcgagtcttacaaatggaccgatatttgggcctttgggctggtcctgtgggagatcgccagacgcactattgtgaacggtatcgtagaagattatagacccccattttatgatgtggtaccaaacgatcctagtttcgaggatatgaagaaggttgtgtgcgtggaccagcaaactccgacaatacccaaccgcttggccgcagaccctgtcctgagtggtctggcacagatgatgcgtgagtgttggtacccaaatccctcagctcgtctgacagctctgaggatcaaaaaaaccctgcagaaaatctctaattcccccgagaaaccaaaggttattcagtag

SEQ ID NO: 213211 - DNA, 1512 bp, synthetic construct
  misc_feature 1..1512: note = Description of Artificial Sequence: Synthetic coding sequence
  source 1..1512: mol_type = other DNA
atgaccctgggctcccccaggaaggggctgcttatgctgcttatggctctagtgactcagggcgatcccgtgaagccttccagaggacctctggtgacctgtacctgtgaaagtccccactgtaaaggacccacatgcagaggcgcatggtgcaccgtcgtgctggtccgagaggaagggaggcaccctcaagagcaccgaggatgtggcaacctacatcgcgagctgtgtagggggcgtcccacagaattcgtgaatcactactgctgcgattcccacctctgcaatcacaacgtgtctctggtgctggaggccacccaacctccctctgagcagccaggtactgatggccagcttgcccttattctgggaccagtgttagcactgttggcactggtggccttaggtgtactgggcctctggcatgtcaggaggagacaggaaaaacagcgtggtctgcacagtgagctcggggagtccagcctgatacttaaagcctctgagcagggggattctatgttgggagacctgctggactcagattgcactactggatcaggctctgggctgccatttctggtacagcgtaccgtagcaagacaggtcgctctggtggagtgtgtaggtaaaggtagatacggtgaggtgtggagaggactgtggcacggtgaatctgttgcagttaagatcttcagctctcgggatgaacagagttggtttagggagactgaaatttataacactgtgctgctgcgccacgacaacatcctgggatttatagcctccgatatgacctctcgcaattcaagcactcagctctggcttataacacattaccacgaacacgggagcctgtatgactttcttcagcgccagaccctcgaacctcatcttgccctgaggctggctgtgagtgctgcttgcggcctcgcccatctgcacgtcgagatctttggtacccaggggaagcccgcaatcgcacaccgtgatttcaagtcgcggaacgtcttagttaagagtaacctgcagtgctgtatcgccgacttaggactggccgttatgcattcccagggtagcgactacctggatattggcaataatcccagggtgggaactaaaagatatatggccccagaagtgttggatgagcagataagaacggattgtttcgagtcctataaatggacggatatttgggcattcggtctggtgttatgggagatcgctcgcagaacgattgtcaatggcatcgtggaagattaccggcctccgttttacgatgtcgtgcccaacgacccctcatttgaagatatgaaaaaggtggtctgcgtggatcaacagaccccaaccatcccaaataggttggcagctgaccccgtgctgtcagggctcgctcagatgatgcgcgaatgttggtatccgaaccccagcgcaaggttgactgccctacgcatcaagaaaactcttcaaaaaatttcaaacagtccagaaaaaccgaaggtgattcaatag

SEQ ID NO: 213212 - DNA, 990 bp, synthetic construct
  misc_feature 1..990: note = Description of Artificial Sequence: Synthetic coding sequence
  source 1..990: mol_type = other DNA
atggctctcacaccccctctccttcttttatctgctggcacgatgacacttggtagccctagaaaggggttgttgatgctactcatggcattagtcacacaaggcaaaggtaggtacggggaggtctggcgcggtttatggcacggggagagtgtcgccgtgaagatcttctcttcacgcgacgagcagagttggttcagagaaacagaaatttacaacacagtgctgctgcgccatgacaacatcctgggtttcattgcgtctgatatgacaagtagaaattcctccacgcagctgtggctgatcacccattatcatgaacacggctctctctatgacttcctgcagcggcagacactggagccccaccttgctcttcgcctggccgtgagtgcagcctgcggacttgcccatctgcacgtcgagatatttggcacacaagggaagccggcaatcgcccatcgcgactttaagagtcggaacgtgctcgtcaaatcgaacctccagtgctgtattgcagatctgggccttgcggtgatgcattcccaaggcagcgattacctggatataggcaacaatcccagggtcggaacgaagcgttacatggcaccagaggttctcgacgagcagatcaggacagattgtttcgagagctataaatggacagacatttgggccttcggactggtgctgtgggagatcgcccgacggacgatagtgaatggaatagtcgaggactatcgtcctccgttttacgacgttgtgcccaacgatcctagctttgaggacatgaagaaggtggtttgcgtagatcagcaaacccctactatcccaaatagattggccgctgatcccgttttaagcggcctggctcagatgatgagagaatgctggtaccccaatccatccgctcgacttaccgccctacgcattaaaaaaactctacagaagatatctaatagtccagaaaaacctaaggtgatacagtag

SEQ ID NO: 213213 - DNA, 480 bp, synthetic construct
  misc_feature 1..480: note = Description of Artificial Sequence: Synthetic coding sequence
  source 1..480: mol_type = other DNA
atggccttaacaccacctttgctcctactaagcgcaggaacaatgactctgggatcgcccagaaagggcctcctgatgttgctgatggcgttggtgactcagggtgatccggttaaaccatcccggggacccttagtaacatgcacctgcgaatctccacattgtaagggacccacgtgcaggggtgcctggtgtaccgtggttctggtacgcgaagaaggccgtcatcctcaagagcacagaggctgcggcaaccttcaccgagagctgtgccgagggcgacccaccgagttcgtgaaccactactgttgtgattcccatttgtgtaatcacaacgtgagcctggtgctcgaggggaaaggcagatacggggaagtctggcgcggactctggcacggggagagcgtcgccgtgaagatcttttccagccgcgacgagcaaagctggtttcgcgagacagaaatttacaacacggtatag

SEQ ID NO: 213214 - DNA, 1554 bp, synthetic construct
  misc_feature 1..1554: note = Description of Artificial Sequence: Synthetic coding sequence
  source 1..1554: mol_type = other DNA
atggctttaactccaccattactccttctttctgcagggacgatgacattaggcagtcccaggaaaggactgctcatgctgctgatggcactggtgacgcagggtgaccctgtgaagccttctagagggcctctggtgacttgcacctgtgagagcccacactgtaagggacctacttgccgaggggcatggtgtacggtggtcttggtgcgggaggaaggcagacacccacaggaacatcgcggttgcggcaatttgcaccgggagctgtgtaggggcaggccaacggaatttgtgaatcattattgttgcgacagccacttgtgtaaccataatgtgagtctcgtcctggaggccactcagcccccttctgagcagcccggaacagacggccagctggcgctgattttgggccctgtgctggcactgcttgccctcgtcgcccttggcgttctggggctctggcatgtgcgccgtaggcaggaaaagcagcggggtttgcattcggagctgggagaatctagcctgatccttaaagcctccgagcagggcgactcaatgctgggagacctcctcgatagcgactgcaccactggtagcgggtcaggtctgcctttcctggtgcagaggactgtcgccagacaggtggcactggtcgaatgcgttggcaaggggagatacggtgaggtgtggaggggattatggcacggggagagcgttgctgtaaagatatttagttcacgagatgagcagtcttggttccgcgaaacggagatttacaacaccgtgttgctccgccatgataatatactaggtttcatagcatccgatatgacatcaaggaactcttcaacacagttgtggctgattactcactatcatgaacatggctctctttatgattttctgcagcggcaaacgctggagccacatctggccttgaggctggccgtgtcagctgcatgcggcctcgcccatcttcacgtggagatctttggtacacaaggaaaacctgcaattgcacatagggactttaagagccgcaatgtcctggtgaagagtaaccttcaatgctgtattgcggatctgggcctcgcagttatgcactcccaagggtctgactacctagatatcggcaataacccacgagtggggacaaagaggtatatggcacctgaagtcttggacgaacagatccggacggattgctttgagtcatataagtggacagacatctgggcattcggactcgttctttgggaaatagctagacggaccattgtgaacggtatagtggaagattacagacctcccttctatgatgtagtacccaatgaccctagcttcgaagacatgaagaaagtggtctgtgtggatcagcagactccgaccattcctaataggctagcagcggatccagtgttgtccggactggcacaaatgatgcgggagtgctggtaccccaatccctcagctcgactgacagccctgcgcattaaaaagacactgcagaaaatttctaactcccctgagaagccgaaagtgattcagtag

SEQ ID NO: 213215 - DNA, 1530 bp, synthetic construct
  misc_feature 1..1530: note = Description of Artificial Sequence: Synthetic coding sequence
  source 1..1530: mol_type = other DNA
atggttgacggcgttatgattctgcccgtgcttattatgattgctctgccatcgccatcgatggaggatgaaaaacccaaggtgaatcctaagctctatatgtgtgtttgtgaaggattatcttgcggaaacgaagaccactgcgaaggacagcaatgtttttccagcctgagcatcaatgacgggttccatgtctaccaaaagggatgcttccaggtctacgagcaggggaagatgacatgcaagacacccccaagtccaggccaggcagtggagtgttgtcagggggattggtgcaacaggaatataactgctcaactgcccacaaagggcaagagcttccccggtactcagaacttccacttagaggtagggctcatcatcctgagtgtagttttcgccgtgtgcctgctggcatgtctgttgggggtggctctccgcaagtttaagagaagaaaccaggagcggctaaatccgagagacgtcgaatacgggaccattgagggcctgataacgaccaatgtgggagactcaactttagcagacttgcttgatcacagttgcaccagtggctctgggtcggggctgccattcctcgtgcaaagaactgttgccagacagatcaccctcttggaatgcgtcggcaagggcagatatggtgaggtctggcgtgggtcatggcagggggaaaacgtggcagtgaaaattttttcaagtcgagacgagaaaagttggttcagagagaccgagctatacaacaccgtcatgctacgccacgagaacatcctgggcttcattgcaagcgatatgacatctagacattcctccacacagctttggttgatcactcactaccacgagatgggttcattatacgactacctgcagctgacaacacttgatacagttagttgtctacgaatagtgctaagcattgcctcagggctggcacatttgcatatcgagatctttgggactcaggggaagccagccatcgcccaccgcgacctgaagagcaagaatattctcgtgaaaaagaacggccaatgttgtatcgccgatctgggattggctgtcatgcactcgcagtcaacaaaccaactggacgtaggaaataaccccagggttggaacgaagaggtatatggcccctgaggtcctggatgagaccattcaagtggactgttttgatagttacaagcgcgtggatatttgggccttcggcttggtgctgtgggaagtcgcaagacgcatggtgtctaatgggatcgtagaagattacaaaccacccttttacgacgtggttccaaatgatccgagtttcgaagacatgcggaaggtcgtctgcgtagaccagcaacggcctaacatccccaataggtggttcagtgaccccactctgacaagcttggctaaacttatgaaagagtgttggtaccagaatccatctgccaggttgaccgctctgagaatcaaaaaaactctcacaaagatcgacaattccttagacaagctaaaaacggactgctag

SEQ ID NO: 213216 - DNA, 1530 bp, synthetic construct
  misc_feature 1..1530: note = Description of Artificial Sequence: Synthetic coding sequence
  source 1..1530: mol_type = other DNA
atggtcgatggggttatgatcctgcctgttctgatcatgatagcactcccctctccctccatggaggacgaaaagccgaaggttaatcctaagctgtatatgtgcgtctgtgaaggcctttcctgtggcaacgaagatcactgtgaaggccaacaatgcttttccagcctcagcatcaatgatggatttcatgtgtaccaaaaaggttgtttccaggtgtatgagcaaggtaaaatgacgtgcaagacccccccttcaccagggcaagctgtcgagtgctgtcaaggcgattggtgcaaccgcaacattaccgcacagctccctaccaaaggaaagtcttttcccggaacccagaactttcatctggaggtggggctgatcattctgtctgtggtctttgccgtatgtctgctcgcctgcctcttgggcgttgccctccgaaaatttaagaggcgaaaccaggaaagactgaatccgcgtgacgtggaatacgggactatcgaggggctgatcacaaccaatgttggtgattccactctggctgacctgctggatcactcttgtacatccggctcggggagtggcctcccctttctggttcagcgaacagttgctcgtcagattactcttctggagtgtgttgggaagggcaggtatggtgaggtttggcgagggtcctggcagggggaaaacgtcgcagttaagatcttcagctctagagacgaaaaaagttggttccgggaaactgagctttacaataccgttatgctgcgacatgaaaatatcttaggcttcatagcttccgatatgaccagtagacactctagcactcagctgtggctcattacccactaccatgagatgggctctttgtatgactatttgcaactgaccactctggacactgtttcctgtctgagaatcgtgctgtctatagcctccggcctggcgcacttgcatatcgagattttcggcacgcagggcaagccggcaatcgcccatcgtgatctcaagagcaaaaatatcctggtgaaaaaaaacgggcagtgttgcatagcagatcttggcctcgccgtcatgcatagtcagtctactaatcaactcgatgtgggaaataatcctagagtaggaaccaagaggtacatggcccctgaggttttagacgaaactatacaggtggattgttttgattcgtacaagagggttgacatctgggcatttggccttgtgctatgggaagtggcgaggcggatggtaagtaacggcatcgtggaggactataaaccgccattttatgatgttgtaccaaacgatcccagctttgaagacatgaggaaggtggtgtgtgttgatcagcagagaccgaatattccaaatcgttggttttcggatcctacattaacatctctggccaaacttatgaaagaatgttggtatcagaacccttctgctaggctgaccgcgctgcgaatcaaaaagactttaactaaaatcgataactctctggacaaactgaagacagattgttag

SEQ ID NO: 213217 - DNA, 1530 bp, synthetic construct
  misc_feature 1..1530: note = Description of Artificial Sequence: Synthetic coding sequence
  source 1..1530: mol_type = other DNA
atggtcgacggagtgatgatcctgcctgttctcatcatgatagccctgcctagcccctccatggaggacgagaagcccaaggtgaaccccaagctgtatatgtgtgtctgcgaagggttatcctgcggtaacgaggaccattgtgagggccagcaatgttttagttcactgtccatcaacgacggtttccacgtctaccagaaaggctgttttcaggtatacgaacagggcaagatgacatgcaaaacccctccatcgcctggccaggccgtcgaatgctgtcagggtgactggtgcaatcgtaatataactgcccaactgcccacaaagggcaagtctttccccggaactcagaacttccatctggaggtcggcctgattatcctgagcgtggtgttcgccgtctgtctgctggcgtgtctgctgggcgtcgcgcttcgaaagttcaagcgcaggaatcaggaacggctcaacccgagagacgtcgagtacggtacaatcgaggggctgattacaaccaatgtgggagactccactctggctgatctgctggaccacagctgcacatccggtagcggctctggtctcccatttctggtacagcggacggtggccaggcagatcactctcctggaatgcgtggggaaaggaaggtatggggaagtatggaggggcagctggcagggtgagaacgttgccgtcaagatattctctagccgtgacgagaaaagttggtttcgggaaacagagctctacaatactgtgatgctcaggcacgagaacatccttggcttcatagccagcgacatgacttcacgccatagcagtacgcagctctggctcatcacacactatcatgagatgggatcactttacgattatctgcagctgactaccctagacaccgtctcctgcttgcgcattgtgctgagtatcgcctctgggttagcacatctacacatcgagatctttggtactcagggcaaacccgctatcgcccatcgggatttaaaaagcaaaaatattttggtgaaaaaaaacggccagtgctgtattgctgatctggggctcgccgtcatgcacagccaaagcaccaatcaactggatgtgggcaacaaccccagggtgggcaccaagcgatacatggcccctgaggttttagacgagaccatccaggttgactgcttcgatagctataaaagggtggatatttgggctttcggattggtactatgggaggtggcccgtaggatggtgagcaacggcattgtggaagactacaagcccccattttatgatgttgtcccgaacgatccctcattcgaggatatgagaaaagtagtgtgcgttgaccaacagaggcctaacattcctaatagatggttttcagacccaaccctgaccagtcttgcaaaactgatgaaggagtgctggtatcaaaacccttcagctagattaacggctcttcgaatcaaaaagaccctcacgaaaattgacaatagcttggacaaactaaaaaccgattgttag

SEQ ID NO: 213218 - DNA, 264 bp, synthetic construct
  misc_feature 1..264: note = Description of Artificial Sequence: Synthetic coding sequence
  source 1..264: mol_type = other DNA
atggtggacggagtcatgatcttgcccgtcctcatcatgattgcgttgccctctccaagcatggaggacgaaaaacctaaagtcaaccccaagctgtatatgtgtgtgtgtgaggggctctcatgtggtaacgaggatcattgtgaaggacagcagtgtttttcaagcttgtccattaacgacgggtttcatgtctaccagaagggttgcttccaggtttatgaacagggcaagatgacatgcaaaacaccccctagtccatag

SEQ ID NO: 213219 - DNA, 66 bp, synthetic construct
  misc_feature 1..66: note = Description of Artificial Sequence: Synthetic coding sequence
  source 1..66: mol_type = other DNA
atggtggacggagtgatgatcctaccagtgcttattatgattgctttgccctccccttcgatgtag

SEQ ID NO: 213220 - DNA, 216 bp, synthetic construct
  misc_feature 1..216: note = Description of Artificial Sequence: Synthetic coding sequence
  source 1..216: mol_type = other DNA
atggtggacggagtgatgattctgccagtgctgattatgattgccctgcctagtccatctatggaggacgaaaagccaaaggtcaatccaaagctttatatgtgcgtatgcgaaggactttcctgcggcaatgaagaccattgcgaaggacaacaatgtttctcctcgttgagtataaatgacggatttcacgtgtaccagaaagggtgcttttag

SEQ ID NO: 213221 - DNA, 1530 bp, synthetic construct
  misc_feature 1..1530: note = Description of Artificial Sequence: Synthetic coding sequence
  source 1..1530: mol_type = other DNA
atggtggatggggtgatgatcctgccagtactgatcatgatcgccctgccgtctcccagcatggaagacgaaaaacccaaagtgaacccgaaactatacatgtgtgtctgtgagggtctgagctgtggcaatgaagaccattgcgagggccagcaatgtttttcaagcctctctattaacgacggcttccacgtgtatcaaaaggggtgttttcaggtttacgagcaggggaagatgacttgtaagactcccccatcgcctggacaggccgttgagtgttgccagggagactggtgtaatcgaaatatcacagcccagctccctaccaaaggaaagtccttccctgggacgcagaatttccatctggaagtcggtctcatcatcttaagcgtcgtcttcgcagtgtgcttgctggcgtgcttactcggagtcgcacttcgaaaatttaagcgaagaaatcaggagcgcctcaaccccagagatgtagaatatggcactatagagggcctgattacaactaacgtgggcgattccactctggcagatctcctggaccactcatgtacctccggcagcggttccgggctcccgttcctggtgcagcgcaccgtagctcgacagatcaccctgctcgagtgtgttggaaagggcaggtatggggaagtgtggagagggagttggcagggagaaaatgttgccgtgaagattttcagctcgcgggacgagaaatcttggtttagagaaactgaactgtacaacaccgtgatgttacgtcacgagaatatcctcgggttcattgcatccgatatgactagcaggcacagcagcacccagctgtggctcatcacacattaccacgagatggggagtttatatgactacctgcagttaacgactctggataccgtgagttgtttacggatagtgctgtctatcgccagcgggctcgcacatctccatattgaaattttcggcacacaagggaagccagctatagcacacagggatctgaaaagcaagaacatcctggtaaagaaaaacggccagtgctgtatagccgatctcggcctcgccgtgatgcattctcagtccaccaatcagcttgacgtgggaaataacccacgagtcggtacgaagcgatatatggcaccagaagttctggatgagactatccaggttgactgctttgactcatataagagagtggacatttgggcgttcgggctggtcttatgggaagtggcaaggcgcatggtgagtaacggaatcgttgaagattataagccgcctttctacgatgtggtgcccaacgaccctagctttgaggatatgcgaaaagtcgtctgcgtggatcaacaacgaccgaacatccccaaccgatggttttcagatcctaccctgacctcactagcgaagttaatgaaagagtgttggtaccagaatcccagcgctagattaactgctctgagaatcaaaaaaacattgaccaagatcgataacagcctggataaattaaaaactgactgctag

SEQ ID NO: 213222 - DNA, 264 bp, synthetic construct
  misc_feature 1..264: note = Description of Artificial Sequence: Synthetic coding sequence
  source 1..264: mol_type = other DNA
atggtcgacggggtgatgattctacctgtgttgatcatgattgctctaccatcaccctcaatggaagacgaaaagcccaaggtgaaccctaagttgtacatgtgcgtgtgtgaggggctcagctgcggcaacgaggatcactgcgaaggtcagcagtgcttctcaagtctctctataaatgatggcttccacgtataccagaaaggatgtttccaggtatacgagcagggaaaaatgacatgcaagacaccgccttccccctag

SEQ ID NO: 213223 - DNA, 222 bp, synthetic construct
  misc_feature 1..222: note = Description of Artificial Sequence: Synthetic coding sequence
  source 1..222: mol_type = other DNA
atggtggatggtgtgatgatcctacccgtgttgatcatgatagccctcccttctcccagcatggaagacgaaaaacctaaagtgaatccaaaactctatatgtgcgtgtgcgagggcttgagctgtggaaacgaagatcactgtgagggccaacagtgtttcagtagcttatccatcaatgacggttttcatgtgtatcagaagggctgcttccaggtctag

SEQ ID NO: 213224 - DNA, 1518 bp, synthetic construct
  misc_feature 1..1518: note = Description of Artificial Sequence: Synthetic coding sequence
  source 1..1518: mol_type = other DNA
atggcagagagcgccggagcaagtagtttcttccctctggtggttctgcttcttgccggttctgggggttcaggacctagaggagtacaggccctgctatgcgcttgtacgagctgtttacaggcaaattatacctgcgaaactgacggagcctgcatggtgtcgatttttaatctggacgggatggagcaccatgtgcggacatgcatcccaaaagtggagttggttcccgctggaaagccattttattgcctttccagcgaggacctacgaaacacccactgctgctatacagactactgcaaccgaatagacctgcgggtgccaagcggccacctaaaggaacccgagcatccctctatgtggggccctgtggagcttgtgggcatcattgccggacctgtctttttgctttttctgatcataatcatagtcttccttgtcattaactatcatcaaagggtttatcacaatcggcagcggctggatatggaagatccctcctgcgaaatgtgcttgtcaaaagacaaaaccttgcaggaccttgtgtacgacctgtctacgagtggctctgggagtggactccccttattcgttcagaggactgttgccagaacaatcgttttacaagaaatcatagggaaaggcagatttggtgaagtttggcgcggtcgatggcgcggtggcgacgtggctgtcaagattttcagctccagagaggaacgatcatggttccgggaagctgagatttatcagacggttatgctgaggcacgagaatatcctggggttcatcgcagccgacaataaggacaatggaacgtggacccagctctggctagttagtgactaccatgagcacggtagcctgtttgactatttaaaccgctacaccgtgaccatcgaaggaatgattaagttagctttgtccgccgcatcgggcctcgcccacttacatatggagatagtggggactcaaggaaagcccggtatcgcccaccgagatctgaaatcaaagaatatcctggtgaaaaaaaacgggatgtgtgctatcgcggacttgggactggccgttagacacgacgcagtaacagatacaattgatattgcacccaatcagagagttggtaccaagagatacatggcacctgaggtgctcgacgaaacaataaatatgaagcacttcgatagtttcaagtgcgctgacatctatgctttgggactcgtgtactgggagatcgccagaaggtgcaactccggaggagtccatgaggaataccaactcccgtattatgatcttgtcccatccgatccaagtatagaggagatgagaaaagtggtgtgcgatcagaaactacggccaaatattccgaactggtggcaaagctacgaggcactgagagtaatgggaaagatgatgagagagtgctggtatgccaatggagcagcgcgactgacggcgttacgaataaagaagaccctctcacagttgagtgttcaagaggacgtgaagatctag

SEQ ID NO: 213225 - DNA, 1464 bp, synthetic construct
  misc_feature 1..1464: note = Description of Artificial Sequence: Synthetic coding sequence
  source 1..1464: mol_type = other DNA
atggcagagagtgcaggtgcaagcagttttttccccctggtagtgctgctcttggcaggatccggcggatcaggacctaggggcgttcaggccctgctgtgcgcttgcacctcctgtctccaggctaattacacatgcgaaactgatggtgcctgtatggtttcgatctttaacctggatggtatggagcatcacgtaaggacttgcattcccaaggttgaactggtgccggcaggcaagcctttctattgtctttcatccgaggatctgcgaaacactcattgctgttacactgactattgcaatcgcatcgatttgcgggtgccgtccggccatctgaaagagccagaacatccttccatgtgggggccagtcgaattggtgggaatcatcgcaggtcccgtgttcttgctgtttttaatcattattattgtatttctggtcattaactaccaccagcgggtctatcacaaccggcagaggctggatatggaggatccaagctgcgagatgtgcctgagtaaagacaagactctgcaggatttggtttacgatctcagtacgtccgggtcgggctccggtctacctctgtttgttcagaggacagtagccagaacaatcgttttacaggaaatcatcggcaaaggtagattcggcgaggtttggcgcggtcggtggagaggaggggatgtggccgtgaaaatttttagtagccgtgaggaacgcagctggtttagagaggcagaaatctaccagactgtgatgctgaggcacgaaaacatcctggggttcatcgctgccgataataaagacaatggcacatggacacagctatggctcgtgtccgattatcacgagcatggttctttatttgattatttgaataggtatacggtcaccatcgaaggtatgataaaactggcactgtccgcagcgtcgggcttagcccacctgcatatggagatagtggggacccagggtaagcctggcatcgcccatagggatttaaagagtaagaatattctcgtcaaaaaaaatggcatgtgcgccatcgctgacctcggccttgcagttagacacgacgccgtgactgacaccatagacatcgcaccgaatcagcgagtgggcaccaaaagatatatggccccagaggttcttgatgagactataaatatgaagcatttcgactcttttaagtgtgctgatatttacgccctgggccttgtatattgggagattgccagacggtgcaattccggagggacttttttgttttgcttgtgtagttatctcccattccaggatgccggatcacccaaagctgtgctgcttccaccatttttcctgcaacctgttggttgtctgctccccgaaccggaatctagcttcaaggtggccataaagggggtggaagtggccgtgctcagggtccgtctgttcttcagagaccaatttgtggagtag

SEQ ID NO: 213226 - DNA, 1431 bp, synthetic construct
  misc_feature 1..1431: note = Description of Artificial Sequence: Synthetic coding sequence
  source 1..1431: mol_type = other DNA
atggcggagtccgcgggtgcctcctcattcttcccactggtggtcctactgctggcgggaagtggaggatcaggccctagaggggtgcaagctctcctgtgcgcttgcaccagctgtctgcaggcgaactatacctgcgaaacagacggggcttgtatggtaagcatttttaacttggacggtatggagcaccatgtaaggacctgtatcccaaaagtcgaactggtgccggctggcaagccattctattgcctctcttctgaagacttacgcaatacacactgctgctataccgactattgcaacaggattgatctccgcgtgccttccggccacctcaaggagcccgagcacccctctatgtggggaccagtggagttggtgggcatcattgcaggacccgtttttctgcttttcttgatcatcattattgtgttcctggtgattaactaccaccagagggtctatcacaacaggcagagacttgacatggaagacccctcttgtgagatgtgcctgtcaaaggataaaacgcttcaggatttagtgtatgatctgtcaactagtggatcagggagcggactgccactgttcgtgcagaggaccgtggctagaaccatcgttctgcaggagatcattggtaaaggcagatttggagaggtttggagaggcagatggcggggtggcgacgtagctgtgaaaatattctcatccagagaagaacgctcttggttccgggaggcggagatctatcaaactgtgatgctgaggcacgagaacatcttgggatttattgccgctgataataaggataacgggacgtggacgcagctgtggctcgtgtccgattaccacgagcatggtagcctttttgactacttaaatcgttatacggtaacaatcgaaggcatgatcaaactggcactgtcagccgcatccggcctagcccatctgcatatggagattgtgggcacacagggcaagccaggaatcgcacaccgtgatctcaaaagcaaaaacatcctggtcaagaagaatggtatgtgcgccatcgccgatctcgggctggctgtgagacacgacgctgttacagataccattgacattgccccaaaccagagagtggggacgaaaagatatatggcgccagaggtcctcgatgagaccattaatatgaaacactttgactcattcaaatgcgccgacatctacgctcttgggcttgtatactgggaaatagccagacgatgcaacagcgggggtgtccacgaagagtatcagttaccctactatgatctcgtgccaagcgaccctagtattgaagagatgcggaaagtagtgtgtgaccagaaactgaggcccaacattcctaactggtggcaatcatacgaggtgagaagctggccacctgccgcattccccagcgcctag

SEQ ID NO: 213227 - DNA, 1641 bp, synthetic construct
  misc_feature 1..1641: note = Description of Artificial Sequence: Synthetic coding sequence
  source 1..1641: mol_type = other DNA
atggccgagagcgcaggagcttcatcctttttcccgttggtcgtcctgcttctggctggcagcggagggtctggccctcggggagtgcaggcgttgctctgtgcgtgcacttcatgcttacaagccaactacacttgtgagaccgacggtgcctgcatggtgtccatatttaatctcgatgggatggaacatcacgtgcgcacctgcattcccaaggtcgaactggtgcctgccggtaaacccttttactgtctgtccagcgaagacctcaggaacacacactgctgttatacagactactgcaaccggattgatctgcgggtgcctagcggccatctgaaggagccagagcacccttctatgtggggcccagtggagctcgtgggcataattgcgggacccgttttccttctttttttgattatcattattgtattccttgtaatcaactaccaccagagggtttaccacaataggcaacggctggacatggaagatccttcttgtgagatgtgtctgtctaaagacaaaacgctgcaagatctagtctatgacctgagtacgtccggcagcggcagtggcctgcctctcttcgtacaacgaacggttgcaaggacaatagtgctccaggagattatcggaaaaggtcgattcggggaggtgtggagaggtagatggagggggggtgacgtggccgtaaaaatttttagtagccgggaggagagaagctggttccgagaagcagagatctatcagaccgtaatgcttaggcacgagaatatcctgggcttcatcgctgctgacaacaaagctgactgcagtttccttaccctgccctgggaagttgtgatggtgagcgctgctcccaagttaaggagcttgagactccagtacaagggtggaagaggcagggctagattcttgttccccctgaataacggaacatggacacagttatggttggtaagcgattaccatgagcacggtagcctcttcgactatctgaacaggtataccgtgaccatagaaggtatgataaagctggcgctgtcagcagcaagtgggctcgcacaccttcatatggagatcgtcggcacccaggggaagcctggcatcgctcatcgggatctgaagagcaaaaatatcttggtcaaaaaaaatggtatgtgcgccattgctgaccttggcctggctgttagacacgacgccgtcactgacacgatagatattgcacccaatcagcgtgtcgggaccaagcgctatatggccccagaagtactggacgaaacaataaatatgaagcactttgactcattcaagtgtgccgacatatatgccctgggtttggtctattgggagatcgcacggaggtgcaatagtggcggagtccacgaggagtaccaattgccatattatgatctcgtgccatcagacccaagcattgaggagatgcgaaaggttgtgtgtgatcagaaattgaggcccaacatcccgaactggtggcagtcctacgaagcgctacgcgtaatgggtaagatgatgagggagtgttggtacgcaaacggtgctgcacgcttgacagccttgcgcatcaaaaagaccctgtctcagttatccgtccaagaggatgtcaaaatatag

SEQ ID NO: 213228 - DNA, 1362 bp, synthetic construct
  misc_feature 1..1362: note = Description of Artificial Sequence: Synthetic coding sequence
  source 1..1362: mol_type = other DNA
atggtgagtatctttaatctggatggaatggaacaccatgtgcgcacatgtattcctaaggttgagctcgtcccagcaggaaagcccttctattgcctgtcctcggaggatctgagaaacacacattgctgctacaccgattattgcaataggattgacctgagagtaccctcagggcacctgaaagagcccgagcacccatccatgtgggggcctgtggaactcgtcggcataatcgcgggaccagtcttcctgctttttctgattatcattattgtcttcctcgtgattaactaccatcagcgcgtttaccacaacaggcagagattggatatggaagatccttcttgtgaaatgtgcctgagcaaggataagacactacaggatctggtctatgacctgtccacgtccggaagcggcagcgggctgcccctcttcgtgcagaggaccgtcgctcgcacaattgtgctgcaggagatcatcggaaaagggaggttcggcgaagtgtggagggggagatggagaggtggtgacgttgcagtgaagattttcagctcacgcgaggagaggtcctggtttcgcgaagctgagatctatcagacagtcatgctccgccacgagaatattctcggcttcatcgccgcagacaacaaggataatggaacatggacacaactctggctggtgtcagactatcacgagcacgggtctctgtttgactatctcaatcggtatacagtaacgattgaaggcatgataaaactggctcttagcgcggcaagcggattagcgcatctgcacatggaaatagtcggtacccagggtaagccaggtattgcccaccgcgacctgaaatctaaaaatatcctggttaagaaaaatggcatgtgcgcaatcgcagatttgggcctggctgttcgtcacgatgctgtgactgatacaattgatatcgcgccaaaccaacgggtgggcaccaagcgttacatggccccagaggtactcgatgagacaataaatatgaagcatttcgactccttcaaatgcgcggatatctacgcgctgggcctagtgtactgggagatcgctcggaggtgtaactctggcggtgtgcacgaggagtatcagctcccatattacgatctggttccctctgacccctctatcgaagaaatgcgtaaggtggtgtgcgatcaaaagctgagacccaacattcccaactggtggcagtcctatgaggccctgcgagtcatgggcaagatgatgcgggaatgttggtacgccaacggggcagccagactgacagcactgcggatcaaaaaaactttatcccagttaagtgtgcaggaagatgtgaaaatttag

SEQ ID NO: 213229 - DNA, 1482 bp, synthetic construct
  misc_feature 1..1482: note = Description of Artificial Sequence: Synthetic coding sequence
  source 1..1482: mol_type = other DNA
atgaccagggctctgtgtagcgccctgcgccaggcactgctgctcctcgctgccgctgcggagctctcacctggactgaagtgtgtttgcctgctatgcgactccagcaattttacatgtcaaacagagggggcttgttgggccagtgttatgctgaccaacggaaaggagcaagtgattaaatcttgcgtgtctctaccagaactgaatgcccaggttttctgccacagcagcaataacgtgaccaagactgagtgttgctttacggatttttgcaataacattaccttgcacttacctacagcatctccaaacgcacctaaactcggcccaatggaactagcgatcattatcaccgttcctgtgtgcctgctctcgatcgccgcaatgttgactgtctgggcctgtcaggggagacagtgctcttacaggaaaaagaagcgccctaacgtagaagagcccctctcagaatgtaatttggtcaacgcaggaaagacactgaaggacctgatatatgacgtgactgctagcgggtctggctccggtctgcccctcctcgtgcagaggaccatcgccaggaccattgttctccaagagatcgtgggcaagggcagattcggtgaagtctggcacgggcgatggtgcggcgaagatgtcgccgtgaagatcttctccagtcgcgatgaacgatcttggtttagagaggcagaaatttaccagacagtcatgctgcgacacgagaatatacttggctttatcgctgcagacaataaggacaatgggacctggacacagctgtggctggtttccgaatatcacgaacagggtagcctttatgactatctgaataggaatatagttactgtggccggaatgattaagttggcgctgagcatagccagcggtctggcccatctgcacatggagatagtcgggacacaaggcaagcctgcaatcgcgcatagagacatcaaaagtaaaaacattcttgtaaaaaagtgcgagacctgcgccattgcagacctaggactcgccgtgaaacacgactcgatcttgaacacaattgatataccccaaaaccccaaggtcgggacaaaaaggtatatggctcccgagatgctggatgacacaatgaatgtaaacatttttgaaagctttaaaagagccgacatttactccgttgggctcgtttattgggagatcgcacgccgttgtagtgttggcggaatcgtggaagaatatcaactaccatactatgatatggtaccctcagatccctctattgaggagatgagaaaggtcgtttgcgaccaaaaattccgaccctctattcctaaccagtggcagtcctgcgaggcactgagagtgatggggagaatcatgcgagaatgctggtacgcaaacggggctgctaggctcacagcgcttcggattaagaagacgatcagccagctgtgcgtcaaagaagattgcaaggcatag

SEQ ID NO: 213230 - DNA, 1242 bp, synthetic construct
  misc_feature 1..1242: note = Description of Artificial Sequence: Synthetic coding sequence
  source 1..1242: mol_type = other DNA
atgactcgcgctctgtgcagcgccctgcgccaagcccttctactgctcgccgctgccgcagagctgtcccccggactgaagtgcgtgtgtctgctgtgcgattcctccaacttcacttgccagaccgaaggcgcttgttgggcatccgtgatgctcacaaatggcaaggagcaggttatcaagtcttgcgtcagcctgcccgaactcaacgcacaggttttctgtcactctagtaacaatgtaaccaagacagagtgttgcttcacagatttctgtaataatatcacgctgcatctaccaaccggactgcctctcctggttcagcgtaccatcgctcgaacaattgtgctccaagaaatcgtcggaaaaggcagatttggcgaggtgtggcacggacgatggtgtggagaggatgtcgcagtgaagatatttagctcacgtgatgaacgctcatggttcagagaggctgagatttatcaaaccgttatgcttaggcacgaaaatattctgggcttcatcgcggctgacaacaaagataacgggacatggacgcaactttggctcgtgtcagagtatcacgaacaaggcagcctgtacgattacctgaacaggaatatcgtcaccgttgcaggcatgattaagctcgctctttcaattgctagcgggctcgcgcacctgcatatggagattgtaggaacgcagggaaagcctgccatcgcccatcgggacataaaatctaagaatattctggtcaaaaaatgtgagacctgtgccatagccgacctgggactggcagtcaagcacgatagcatccttaacactatcgatataccccagaacccaaaggtcggcaccaaaaggtatatggcaccagagatgctggatgacactatgaatgttaacatatttgagtctttcaagagggccgatatctatagcgtaggcctggtttactgggaaatcgcacgcagatgtagtgtaggcggaatcgtggaggagtaccagctgccttattacgatatggtgccgagcgatcctagcatcgaggagatgagaaaggtagtttgtgaccagaaattccggccttcgatcccaaaccagtggcaatcctgcgaggcactgcgagtaatgggaagaataatgcgggagtgttggtatgccaacggagcagctaggctaacggccctccgaatcaaaaagaccatcagtcagctatgcgttaaagaagattgtaaagcttag

SEQ ID NO: 213231 - DNA, 1011 bp, synthetic construct
  misc_feature 1..1011: note = Description of Artificial Sequence: Synthetic coding sequence
  source 1..1011: mol_type = other DNA
atgacgagggctttgtgctctgcactgcgtcaggctctgctcttgctggcggcagcggctgagctgagtcccggactgaagtgtgtctgcctcctgtgcgacagttcaaacttcacttgccagactgagggagcctgctgggcttcagtgatgctcactaatggcaaggagcaggtgattaagagctgcgttagcctgccagagttgaacgctcaggtcttctgccactcctccaataacgttacgaagaccgagtgctgttttaccgacttctgcaacaacatcacactgcacctgcccaccgacaacggcacatggacccagctgtggctggtgagcgagtatcacgagcagggttctctctatgattacttaaatcggaacatcgtgactgtggctggaatgataaagttggctctttccatagcctccggcctcgctcacttgcacatggagattgttggaacacagggtaaaccagccatcgctcacagagacataaagtccaagaacatcctcgtaaagaaatgcgaaacctgtgctatcgcagacttggggcttgcagttaagcatgacagcattcttaataccattgatatcccacagaaccccaaagttggcaccaagcgctatatggcccctgaaatgctggatgacacaatgaacgtcaatatcttcgaaagttttaagcgtgcagatatatactctgttggcctggtctactgggagattgctcgaaggtgttccgtgggtggaatcgtggaagagtaccaactaccctattatgatatggtaccgtccgacccaagcatcgaagaaatgcgtaaggtagtctgtgaccagaagttccggccatcaatacctaatcagtggcagtcttgcgaggccctacgtgttatgggcagaatcatgagggagtgctggtatgcaaacggcgcagccaggctaaccgcccttcggattaagaagaccatctcccaactatgtgtgaaggaggattgcaaggcttag

SEQ ID NO: 213232 - DNA, 1542 bp, synthetic construct
  misc_feature 1..1542: note = Description of Artificial Sequence: Synthetic coding sequence
  source 1..1542: mol_type = other DNA
atgggggctgccgctaagcttgcatttgccgtcttcctgatctcctgctcctccggggcaattctaggcagatccgaaacgcaggaatgccttttcttcaatgccaattgggaaaaggatcgtacgaaccagaccggcgttgagccatgttatggggacaaagataaacgcagacactgttttgctacatggaagaatatcagcggctcaatagaaatagtcaaacaaggttgctggttggatgatatcaattgttatgatcgtaccgactgcgtcgagaagaaagactccccggaagtgtacttctgctgctgcgaaggcaacatgtgcaatgaaaagttttcttatttccctgaaatggaggtaacacaacctacttccaaccctgtgacaccaaaaccgccttactacaacatcctcctttatagcctagtccccctcatgctcatcgctggaatcgtgatctgcgctttttgggtttatcgccaccacaaaatggcatacccccctgtgctcgttccaacacaggatcccggtccaccccctccatccccactgttggggcttaagcccctccaactcctggaagttaaggcacggggacgatttggatgtgtttggaaggcccagctgctcaatgaatacgtggcagtgaagattttcccaatccaggataaacagtcctggcagaacgagtacgaggtatatagcctgcccggaatgaaacacgagaatattctgcagttcatcggggcagagaaacggggaactagcgtcgacgtggatctctggctgattacagcctttcacgaaaagggctccctttctgatttcttgaaagccaatgtggtctcatggaacgaattatgccacatcgccgagaccatggccagaggtctcgcttacctccatgaagacatcccagggcttaaggatggacacaaacccgcaatttcccatcgggatattaagagcaaaaacgtactgttgaagaacaacctgacagcctgtatcgcggactttgggctggctttgaagtttgaagccggaaagtccgccggagacacacacggtcaggtcggaactcgcagatatatggcgcctgaagtgcttgagggtgcaattaatttccagcgtgatgcattcctgagaatcgatatgtacgcgatgggcttagtgttatgggagctggcgtcaaggtgcactgccgctgatggacctgtagatgaatatatgctgcccttcgaagaggagattgggcagcacccatccctcgaagatatgcaggaggtggtcgttcacaagaagaaacgcccagtattgagagactattggcagaagcacgcagggatggcgatgctttgcgaaaccatcgaagagtgttgggaccacgatgcggaggctcggctgagtgccggttgcgttggagaacgaataacccaaatgcagcggttgacaaacatcattaccactgaggatatcgttacggtggtaacgatggtcaccaatgtggacttcccacccaaggaatcttctctgtag

SEQ ID NO: 213233 - DNA, 1542 bp, synthetic construct
  misc_feature 1..1542: note = Description of Artificial Sequence: Synthetic coding sequence
  source 1..1542: mol_type = other DNA
atgggcgctgcagcgaaactggccttcgcagtgttcctgatctcctgctccagcggggcaattctcgggagatctgagactcaggaatgtctgttttttaacgctaactgggaaaaagatcgtactaaccagacgggggtggagccctgttatggtgacaaagataagagaaggcactgctttgccacctggaaaaatatttccgggtcaatcgagattgttaagcagggctgctggctggatgacatcaactgttatgacaggacagattgtgtggaaaaaaaagactcacctgaagtctacttctgttgctgtgaagggaacatgtgtaatgagaaattttcctacttcccggagatggaagtgacacagcccaccagtaaccccgttacccccaagcccccttactacaacattcttctgtattcactcgtgccgctgatgctgatcgcgggtatcgttatctgtgccttctgggtgtatcgtcatcataagatggcctatccaccagttttagttccaactcaagacccaggcccaccacccccatctccattgctcggcctcaagccgctgcagctccttgaagtcaaggcgagggggcgattcggatgtgtctggaaggctcagttactgaacgagtatgtggccgtgaaaatcttcccaatccaggataagcaatcctggcaaaacgaatacgaggtttatagcctgcctggcatgaaacacgaaaatatcctgcaattcattggagctgagaagaggggaacgtctgtggatgtcgacctgtggttgatcacagcgttccacgaaaaaggctcgctaagtgactttctgaaagctaacgtcgtgtcctggaatgagctctgtcatattgcagagaccatggcccgtggtctcgcctacctgcatgaggacatccctggcctcaaggatgggcataagcccgctataagccatcgagatattaagtcgaaaaatgttctccttaaaaataatttaacagcttgcatcgccgattttggactggcgcttaaattcgaggcaggcaaaagcgctggggatacccacggtcaggttggcacccggcgttatatggctccagaggttttagagggagccataaattttcagcgggatgctttcctgcgtattgacatgtacgccatgggattggtgttgtgggaactggcctcacgatgcacagccgcagatggacccgtggatgaatacatgttaccatttgaagaagaaattggtcagcatccatcactggaggacatgcaagaagttgtggtgcacaagaaaaagcggccagtcttacgggactactggcaaaagcatgccggtatggctatgctttgcgagactattgaggaatgctgggatcatgatgccgaggccaggctgagcgctggctgtgtgggcgaacggataactcagatgcagagacttacaaacattattactaccgaggatatcgtgaccgtcgtgactatggtcacaaacgtggacttcccacctaaggaaagctcactgtag

SEQ ID NO: 213234 - DNA, 1218 bp, synthetic construct
  misc_feature 1..1218: note = Description of Artificial Sequence: Synthetic coding sequence
  source 1..1218: mol_type = other DNA
atgtgtaacgagaagttttcatatttcccggaaatggaggtgacccagccaacctcaaaccccgtgacccccaagcctccctattacaacatactgctatatagtctggtcccgctgatgcttatcgctgggatcgtaatctgtgcattttgggtgtatcgtcaccataaaatggcctatcctccagtcttggtgcccacacaagaccctggtcctccacctccaagtcccctcttggggctgaagcccctgcagttgctcgaggtgaaagcaaggggtaggttcggatgcgtttggaaggcccagctactcaatgaatacgtggctgtcaagatctttccaatccaggacaagcagagttggcagaatgaatacgaagtttattctctccctggtatgaagcatgagaatatcctgcagttcatcggagccgagaagaggggaacatccgtcgatgtcgacctctggctgataactgccttccacgagaaagggagccttagcgatttcctgaaggctaacgtggtaagctggaatgagctgtgtcatattgccgaaactatggctagaggcctggcatacctacacgaagacatcccaggactcaaggatgggcataagccagccatctcccatagagacattaagagcaaaaacgtcctcctcaagaacaacctgaccgcatgcattgcagacttcggacttgccttgaagttcgaagccggtaaatctgccggtgacacacacggtcaggttggaacacggaggtatatggcgccagaggtactggaaggcgctataaacttccaacgagatgcattcctgcgaatagatatgtatgcgatgggattagtgttgtgggaacttgcgtctcggtgtaccgccgctgacgggcctgttgacgaatatatgctgccatttgaggaggagatcggtcagcacccctcccttgaggacatgcaggaggtggtggtacacaaaaagaagcggcctgtgcttcgagattattggcagaagcacgcaggcatggcaatgttgtgtgaaaccatcgaggaatgctgggaccacgatgccgaggccaggttgagtgccggatgtgtcggggagcgtattacgcaaatgcagcgcttaactaatatcatcacaactgaagacatcgttaccgtggttaccatggttactaatgtcgactttccgccaaaagagagcagcctgtag

SEQ ID NO: 213235 - DNA, 1539 bp, synthetic construct
  misc_feature 1..1539: note = Description of Artificial Sequence: Synthetic coding sequence
  source 1..1539: mol_type = other DNA
atgacagcgccatgggtcgcactggcgttgctgtggggaagcctatgtgccggtagcggccgtggcgaagcggaaacacgcgagtgtatttactataacgccaactgggaactcgagcgaacaaatcagtctggcctggagcgctgtgagggcgaacaagacaagaggctacactgttatgccagttggaggaatagcagtggcactatagaattagtcaaaaaggggtgttggctagacgactttaactgctacgatcgacaagaatgcgtagccaccgaggaaaatccccaggtgtatttctgctgttgcgaaggcaatttttgcaacgaacgtttcactcacctgccagaagccggtggtcccgaagtcacatatgaaccccctcctacagcacctaccttgctcaccgtgctggcttattcactgctgccaatcggcggattgtctctcattgttctgctcgctttctggatgtaccgacacaggaagcccccttacggccatgtggacatccacgaggacccgggacctccacccccttcccccttagtaggcttaaagcccctacagttactagagatcaaagcaagaggacgctttggatgcgtttggaaggctcagttaatgaatgacttcgttgcagtcaagatcttcccactccaggataagcagtcctggcagagcgagcgcgaaatcttttcaacccctggaatgaagcacgagaatctgttgcagtttatcgctgctgagaaaagggggagcaaccttgaggtagagctatggttgataacggcttttcacgacaaagggagtctcactgattatcttaaaggcaatatcattacatggaacgagttgtgtcacgtcgcagagaccatgagcagaggtttatcttacctgcacgaggacgtcccttggtgcagaggcgaaggccataagcctagcattgcccacagagacttcaaatctaaaaacgtgttgttgaagagtgatttgacagcagtgctggctgattttgggctggccgtgcggtttgagcctggcaagccaccaggtgacacacacggtcaggtcggaactcgaaggtacatggcccctgaagttcttgagggggctataaacttccagagggacgccttcctacgaatcgacatgtacgctatgggccttgtgttgtgggagctggttagccggtgcaaagccgcagatggccctgtggatgagtacatgctacctttcgaggaggaaatcggtcagcacccttctttggaggaactccaagaggtcgtcgtgcacaagaaaatgaggcctactatcaaagaccattggttgaagcaccctggcttagctcaactgtgcgtgaccatagaggagtgctgggatcacgacgcagaggcacgcctgtccgcaggatgcgtggaagagagggtttctctgatcagacgctccgtcaacggtactacatccgactgtctagtgtccctcgttacttccgtgaccaacgtcgacctcccccctaaagaatcttccatttag

SEQ ID NO: 213236 - DNA, 1191 bp, synthetic construct
  misc_feature 1..1191: note = Description of Artificial Sequence: Synthetic coding sequence
  source 1..1191: mol_type = other DNA
atggaactcgaccatcggacctcaggaggccttcacgcgtatcccggtccaagaggcggacaggtggccaagcctaacgttatccttcagattggaaagtgtcgagctgagatgctagagcatgtccgcaggacacatcggcacctgctggcggaagtttccaaacaggtggagcgagagttgaaaggattacaccgatcagtgggcaagttagagtccaaccttgatggctatgtgcctacaagcgactcacagcgctggaaaaagtccatcaaagcctgtctgtgccgttgtcaggagactatcgccaatttggaacgatgggtgaaacgtgagatgcacgtgtggcgtgaagtgttttacagattagagcggtgggcagaccgactggagagtaccggtggtaagtatcccgtgggaagtgaatccgccagacacaccgtcagtgtgggagtcggtggcccagagtcctattgccacgaagctgatgggtatgattatacagtctctccttatgccataactccccctcctgcagcaggcgagttgcctggtcaagagccagcagaagcccagcagtaccagccctgggtgcctggcgaagacggtcaaccatcacctggcgtggatactcagattttcgaagacccgagggaattcctgtcccatcttgaggaatatctcaggcaggtgggcggatcagaagagtattggctgtcgcagatccagaatcatatgaacgggccagctaagaaatggtgggaattcaagcaagggtctgtgaaaaattgggttgagtttaagaaagagttcctccagtatagcgaggggacgctgagccgggaggctattcaaagagaactggatctcccccagaagcagggcgaaccgctggaccagtttctgtggcggaaacgagacctctaccagactttatacgtcgatgctgacgaggaggagatcatccagtacgtcgtggggaccctgcaaccaaagctcaagaggtttcttagacatcccttaccaaaaacactggagcagctgatccaacgcggtatggaggtccaggacgacctcgaacaggccgcagagcctgccggaccccatctccccgttgaggatgaggccgaaactctcacccccgcacccaattccgagtcagtggcttccgataggacacaacccgaatag

SEQ ID NO: 213237 - DNA, 1587 bp, synthetic construct
  misc_feature 1..1587: note = Description of Artificial Sequence: Synthetic coding sequence
  source 1..1587: mol_type = other DNA
atggccgctgtgctgaacgcagaaaggcttgaggtcagcgttgacggactcaccctgtcgccggatcccgaggagaggcctggtgccgagggggcacccctgctgccccctcccctgccgccacccagccccccaggctcagggcgaggacccggtgcctccggtgagcagcctgaacctggggaggccgctgccggtggtgcagcagaggaggctaggcgcctcgagcagcgctggggctttggacttgaagagttatacgggctagctctgcgcttttttaaagaaaaagacgggaaggcattccatcccacctatgaggaaaagctaaaactggtcgcactacataaacaagtgttgatgggaccttataatcccgacacgtgtcccgaagttgggttcttcgacgtgctgggcaatgaccgcaggagggaatgggctgccctgggaaatatgagtaaggaggatgccatggtggagtttgttaagctgctaaacaggtgttgtcacttgttttctacctacgtagccagtcataagatcgagaaagaagagcaggagaagaaacgcaaagaagaggaagagagacgtcggcgagaggaggaagaacgcgaacgtttacaaaaggaagaggaaaaacgaaggcgggaggaagaggagcgcttgcgcagggaggaagaagagaggagacggattgaggaggagcgactacgattggaacagcagaaacaacaaatcatggcagcactcaactcccagacggccgtgcagttccagcagtacgcggcacaacaataccccggaaattatgagcagcaacaaatcttgattcggcagctccaagagcaacattaccagcagtatatgcagcaattgtaccaagtccaactggcccaacagcaagcagctttgcagaagcagcaggaagttgtagtggccggatcctcactccctaccagcagcaaagttaatgcaacagttccctctaatatgatgagcgtgaacggacaggcaaaaacgcacaccgattcttccgaaaaggagttagaacccgaggccgctgaagaggcccttgaaaatgggccaaaagagtctctgccagtcattgccgctccttcgatgtggaccagacctcagattaaagactttaaagagaagatccaacaggatgcagatagcgtgataactgtaggaagaggggaagttgttaccgtgcgggtaccgactcacgaggaaggtagctatctgttttgggagtttgcgacagataattacgatatcgggtttggggtgtacttcgaatggactgactcacctaacaccgccgtgtccgttcatgtctcagagagctccgatgacgacgaggaggaggaggagaacatcgggtgcgaagagaaagcaaagaagaacgctaacaagcccctgttggatgagattgtgccagtctatcgtcgcgattgccacgaggaagtgtatgccggatctcatcagtaccccggtcggggtgtttatctcctcaagtttgacaactcttacagtttgtggcgcagtaagtcagtgtactatagagtatattatactcgatag

SEQ ID NO: 213238 - DNA, 2343 bp, synthetic construct
  misc_feature 1..2343: note = Description of Artificial Sequence: Synthetic coding sequence
  source 1..2343: mol_type = other DNA
atgaagccgggtgctacaggggaatccgacctggctgaggtcctaccccaacacaagttcgacagcaaatccctggaagcctatctgaaccagcaccttagcggcttcggcgctgaacgggaggccacactcaccatcgcgcagtaccgtgcaggaaagtcaaatcccaccttctacctgcagaaagggtttcagacctacgtgctgcggaaaaaaccacctggatcactactgcctaaggcacaccaaatcgaccgagaatttaaagttcaaaaggctctgttttccatcggcttcccagttccaaagcccatattgtactgctctgatacttcggtgatcggaacagagttctatgtgatggaacacgtccagggtcgcatcttcagagatctgacaatacccggattgtcacccgctgagcgctccgccatatacgtggcgacagttgaaaccctcgctcaactgagatctcttaatattcagagccttcagcttgagggctatggcattggtgcaggctattgtaaacggcaagtaagcacgtggactaaacagtatcaggcggcagcccatcaggatattcccgctatgcagcagctgtccgagtggctgatgaaaaacctgccagacaacgacaacgaggaaaatctgatccatggcgactttcgcctggataatatcgtctttcatcccaaagagtgcagagtaatagctgtgctggattgggagctctccacgattggccaccctttatccgacttggctcacttcagcttgttttacttttggcccagaacggtacctatgatcaatcagggatcatattcagaaaactccgggatcccatcaatggaggagctgatttctatctattgccgctgtaggggaatcaattcgatcctgccgaactggaattttttcttagcccttagctacttcaaaatggcagggatcgcccaaggcgtttattccaggtatctgctaggaaacaattcctcagaggactcgtttctcttcgctaatattgtgcaacctcttgctgaaactgggctccaattgtccaaaagaacattcagtacagtactcccacaaatcgatactactggacagctgttcgtgcagacaagaaagggtcaggaagtcctcattaaagtgaagcactttatgaaacagcacattctgcccgctgaaaaagaggttacagagttctatgttcagaatgagaactctgtcgacaaatggggaaagcccttagtaatcgacaaactcaaggagatggccaaagtggagggtctctggaatttgttcttgcctgccgtgagcggcctaagccatgttgattacgcccttatcgcagaggagaccggaaagtgtttctttgccccagacgtgttcaattgtcaggcaccggatactggtaatatggaggtgctccacctttacggctccgaagagcagaagaagcagtggctcgaaccccttcttcagggaaatattacatcttgcttctgtatgaccgagcctgacgtcgcctcaagtgatgcaaccaatattgagtgttccattcaacgggacgaagattcctatgtcattaacggaaagaaatggtggtcctcgggcgctggtaaccctaagtgtaagatcgccattgtgttggggagaacacagaacaccagtctcagtcggcataaacagcatagcatgattcttgtccctatgaataccccaggggttaagatcatccgcccactatcggtctttggctatacagacaattttcatggaggtcactttgagatccactttaaccaggtgagagttcctgccacaaaccttattctgggggaagggagaggttttgaaatttcacaggggcgactaggcccagggagaatacaccactgtatgcgcacagtgggtctcgcagaacgtgccttacagatcatgtgcgagcgggcaacgcagaggatcgcctttaaaaagaagctgtatgcacatgaggtggtggcgcattggatcgctgaatcccggatcgctattgaaaagatccgcctgcttacgctcaaggctgcccactctatggacaccctaggcagcgcgggtgccaaaaaagagatagccatgatcaaagtggccgctccacgggcagtctctaaaatagtcgattgggcgattcaggtgtgcggtggagccggagtgtctcaggactaccccctggcaaacatgtacgcgataaccagagtactgagattggcagacggacctgacgaagtccacttatcagcaatcgccactatggagcttcgagatcaggccaagcgactgacggccaagatctag

SEQ ID NO: 213239 - DNA, 2031 bp, synthetic construct
  misc_feature 1..2031: note = Description of Artificial Sequence: Synthetic coding sequence
  source 1..2031: mol_type = other DNA
atgaaaccaggtgctactggggagtcagacctggcggaagtacttccacagcacaaattcgactctaagtccttagaagcctatttaaatcaacacctctccggtttcggagcagagcgagaggccactctgacaatcgcccagtacagagcaggcaaatccaaccctacattttacctgcaaaagggatttcagacctacgtcctgcgcaagaaaccacctggaagcttgctgcccaaagcccatcaaatcgaccgcgaattcaaggtccagaaggctctgttcagtattggttttcccgtcccaaaaccaatcctctactgctcagatacatctgtgattgggacagagttttacgtgatggaacacgtgcagggcaggatttttagagacctaacaatccccggtctctcgccagcagaaaggagcgctatctacgttgctactgtggagacattagcccagcttcgatccttgaacatccagagtctgcaactagagggctacgggatcggcgctggatactgcaaaagacaggtgagtacgtggaccaagcagtaccaggctgcggctcaccaggatattccagcaatgcagcaactgtcagagtggttgatgaaaaacctacccgataatgacaacgaagagaaccttatccacggcgactttcggctggacaacattgtgttccaccctaaggaatgccgcgtcatcgccgtactggattgggaattgagcaccattggacaccctctgtcagatttagcccatttcagtctcttctacttctggccgaggaccgtacccatgatcaatcaggggagttatagtgagaactctggcatacccagtatggaagaactgatttcaatctattgcaggtgcaggggtataaatagtattttgcctaactggaatttcttcctggctttgagttactttaagatggccggaatcgctcagggtgtatacagccgctatctgctgggtaacaactccagtgaggattcttttctcttcgctaatattgtgcaaccgttggctgaaacaggtttgcagttatcgaagcgtaccttctccacagttctgcctcagattgacactacaggccagttgtttgtacagaccaggaaggggcaggaagtgctgatcaaggtgaagcactttatgaagcaacatattctgccggcagaaaaagaggtgacggagttttatgttcagaatgaaaactccgttgataagtggggaaaaccactcgttatcgacaaactgaaggagatggcgaaagtcgaggggctttggaacttgttcttgcccgctgtgagtgggttgagccacgtcgattacgccctcattgctgaagaaacaggtaaatgcttctttgcccctgatgttttcaattgtcaggcgcctgacacaggcaacatggaagtcctgcacctctatgggagcgaggagcagaagaaacagtggctggaacctcttctgcagggaaacatcacatcatgcttctgcatgaccgaacctgacgtggcatcgtctgacgctacgaatattgagtgttccattcagcgtgacgaggacagttacgtgattaacggaaaaaaatggtggtcatcaggggctgggaaccctaagtgcaagatcgccatcgttcttggcaggactcagaatacatcgctgagccgagaagtggtcgcccactggatcgccgaatccagaatcgcaatagaaaaaatcagattactgactcttaaagcagcccatagcatggataccctgggcagtgctggtgccaagaaagaaattgctatgattaaagtagccgcaccgcgtgccgtgtcaaagattgtagactgggcaatccaggtctgtggaggggctggagtttctcaagactacccgctcgctaacatgtatgccatcacccgggtcctacgcctggctgacggccctgacgaagtgcacttaagcgcaatcgctacaatggaattaagagatcaagccaaacgcctcactgcgaaaatttag

SEQ ID NO: 213240 - DNA, 918 bp, synthetic construct
  misc_feature 1..918: note = Description of Artificial Sequence: Synthetic coding sequence
  source 1..918: mol_type = other DNA
atggaggtgctccacctctacggctctgaagagcaaaagaagcagtggctggagccgttgctccaagggaacataacatcatgtttttgtatgacagagcctgatgtggcctcctccgatgctaccaacatcgagtgcagtatccaacgtgatgaggatagttatgttatcaacgggaagaaatggtggtctagcggtgctggcaatcctaagtgcaagattgccattgtcctggggcgaacacagaatacttccttgagtcgacataaacagcattctatgattctggtgcccatgaatactcccggtgtgaaaatcatacgccctctgagtgtgtttggatacacagataacttccatgggggacattttgaaattcattttaatcaggtgcgcgtgcctgctaccaacttgatcctcggagagggacggggattcgagatttcacagggacgtcttgggccaggccgaattcaccactgcatgcgaaccgtgggacttgcggaaagagctctgcagattatgtgcgaaagggctacgcaacggatcgctttcaagaagaagctgtacgcccatgaggttgtggctcactggatagccgagtctcgcatcgccatcgaaaagattagacttcttacactgaaggcggctcattctatggataccctggggtctgccggtgcaaaaaaagagattgccatgatcaaagtagcagccccaagagctgtctctaagattgttgactgggccatccaagtgtgtggtggcgctggggtgtctcaggactaccctctggcaaatatgtacgctattacccgggtactccgtctggcagacgggccagacgaagtgcacctgtccgcaatcgcaacaatggaattacgcgatcaggccaagagactcacagctaaaatatag

SEQ ID NO: 213241 - DNA, 1248 bp, synthetic construct
  misc_feature 1..1248: note = Description of Artificial Sequence: Synthetic coding sequence
  source 1..1248: mol_type = other DNA
atgctgtggagtggctgtcggagatttggagccagactcggatgcctccccggtggtctgcgtgtccttgtacaaactgggcacaggtcgctgacctcatgtatagacccatctatgggcctgaatgaggagcagaaggagttccagaaagtggcgttcgactttgccgctcgggagatggctccaaatatggcagagtgggaccagaaagagctcttccctgtggacgttatgagaaaggccgcacaattggggtttggcggagtttacattcagaccgacgtcggcggttctggacttagccgccttgacacctccgtgatcttcgaggccctggctacgggttgcacatctactacagcctatattagcatacacaacatgtgcgcctggatgatcgactcattcggcaatgaggagcagcgccacaagttctgcccccctctttgtaccatggagaagtttgcctcatattgccttactgagcctggatccggctcagatgccgcttcgctgctgacctcagcaaagaagcagggagatcactacattttgaacgggtcaaaagctttcatatccggtgctggcgagagcgatatttatgtggtcatgtgcaggactggtggccctggaccaaagggcatcagctgcatagtcgttgagaaaggcacccctggattgtctttcggcaaaaaggaaaaaaaagttggctggaacagtcagccaactagggccgtaattttcgaggattgcgcagtccccgtggccaaccgaatcggttccgaagggcaaggttttctgatcgcagtccgcggactcaacgggggaaggattaacattgcttcatgttccctgggggctgcacatgcctcagtgattctgacccgtgatcatctcaacgtaaggaaacagttcggggagcccctcgcatcgaatcagtatctccagtttaccttggcagacatggctacaagattggttgccgcacgtctcatggttagaaacgcggcagtagctttgcaggaagagaggaaggacgcagttgctttatgctctatggcaaagttattcgccacagacgagtgttttgctatctgtaatcaggccctgcagatgcatggagggtacggttacttgaaagactatgccgtacagcagtatgttagggactctcgggtacatcagatcctggaaggatctaatgaagtcatgcgtatactcatctccaggtcccttctgcaagaatag

SEQ ID NO: 213242 - DNA, 1074 bp, synthetic construct
  misc_feature 1..1074: note = Description of Artificial Sequence: Synthetic coding sequence
  source 1..1074: mol_type = other DNA
atgcgaaaagcagcccagttgggatttgggggagtatacatccaaactgatgtggggggttcaggtctgtcccgacttgacacctcggtcatcttcgaggcactggccacaggctgcacctccaccaccgcctacatctctatccacaatatgtgcgcctggatgatcgacagttttggcaatgaagagcagcgacacaaattctgtcctccgctgtgcaccatggagaaattcgcatcctattgcctaaccgagcccggaagcggctctgatgcagcctcccttttgactagcgctaaaaagcagggcgatcattacatcttgaatgggagtaaagctttcattagcggtgcaggagagtctgacatctatgtagtgatgtgtaggaccgggggtccgggtcctaagggcatttcctgcattgtggtggagaaaggtacccctgggctctcttttggaaagaaagagaagaaggttggatggaatagccagccaactcgcgcagtcatcttcgaggactgtgcagtcccagtggccaaccggatcggctccgaaggtcaggggttcctgatagcggtgcgtgggctcaatgggggacgaatcaatattgcttcctgcagtttaggcgcagctcacgcctctgtcatcctgaccagagatcaccttaacgtcagaaaacagttcggagagccgctggcttccaatcagtatttacagtttaccctcgctgatatggccaccagactggtggcagcccgattgatggtgagaaatgccgctgttgctctacaagaggagagaaaagatgccgtagcgctgtgtagcatggctaagctatttgcaaccgacgagtgttttgccatatgcaatcaggcattacagatgcacgggggttacggctatctgaaggattacgctgtgcagcagtatgtccgtgacagccgggtccatcagattctggaggaactgttctggcaaggccctggggttcaaagccgcagttttgttcctttcggcggtcctcaaatcgcactcctgttaccatttagttcgggcgatctgagggaggggtag

SEQ ID NO: 213243 - DNA, 819 bp, synthetic construct
  misc_feature 1..819: note = Description of Artificial Sequence: Synthetic coding sequence
  source 1..819: mol_type = other DNA
atgggactgaacgaggagcagaaagaatttcagaaggtggcttttgattttgccgctcgggagatggcacccaatatggcggaatgggatcagaaagaactcttcccggttgatgtgatgcgaaaggccgctcagctcggattcggtggtgtctacatccaaactgacgtgggcggaagcgggctgtcacgcctcgatacatctgtgattttcgaggccttagccactggctgcacatcgacaactgcatatattagcattcataatatgtgtgcctggatgattgattcctttggcaatgaagaacagcgccataagttttgcccacccttatgcaccatggaaaagtttgcatcctactgcctcacggagcccggttcaggatctgacgctgcctctctcctgacttctgcaaagaagcagggggaccattatattctcaatggtagcaaggccttcatttcaggagctggcgaaagcgatatttacgtggtgatgtgccgaactgggggacccggacccaagggcatatcatgtattgtagtagaaaagggaacgcccggactgtcattcggcaagaaagagaagaaggtgggctggaacagccagccaacgagagccgtcattttcgaggactgtgctgtgcccgtggccaataggatcggctccgaaggtcaggggttcctgatagctgtcaggggactcaatgggggacgcattaacatcgctagttgttcacttggatgtccacgcctgtgccacccgcacccaagaccccctcagtgccctgaggctgtttggagagcaagcggacaatag

SEQ ID NO: 213244 - DNA, 681 bp, synthetic construct
  misc_feature 1..681: note = Description of Artificial Sequence: Synthetic coding sequence
  source 1..681: mol_type = other DNA
atgaagtcccgaaagaatttcaagaagtggcccttgacactgctgcctgaacggtggctgcagatctggcagtctggtacccggtccatgtgcgcttggatgatagactcgtttggaaacgaggaacagcgccacaaattctgcccccctctctgcactatggagaagttcgcaagctactgcctgacagagccaggctcagggtcggacgctgcttccctgctgacttctgccaagaaacaaggcgaccattacattctcaatggctctaaagcctttatctcaggggctggagaaagcgacatctatgtggtgatgtgtcgcaccgggggacccggacccaaaggcatcagttgtatcgtcgtcgagaaaggcacccctggcctgtcttttggaaaaaaagaaaaaaaagtgggctggaacagtcaacccactagggccgtgatctttgaagactgcgctgtgcccgtcgctaatcggatcggctctgaaggtcagggatttctgatagctgtaagaggcctgaacggcggaagaattaacatcgctagctgttcacttggggcagcccacgcatcagtgatcctgacgagggatcatctaaacgttcgcaagcagttcggggagccgctggcatctaatcagaaaaagcaggaaacactcaaattgtggattacatag

SEQ ID NO: 213245 - DNA, 1866 bp, synthetic construct
  misc_feature 1..1866: note = Description of Artificial Sequence: Synthetic coding sequence
  source 1..1866: mol_type = other DNA
atgagcgggtgcggcctctttctgaggaccacagccgcagctcgggcttgcaggggactcgtagtgagtacggcaaaccggaggctcctccgcacctccccaccagttcgcgcatttgccaaagagctttttcttggcaaaataaagaaaaaggaggtgttcccctttccagaggtgagtcaggacgagctgaacgagatcaaccagtttctgggaccagtggagaaatttttcacagaggaggtcgacagtagaaagattgatcaggagggaaagatcccagacgagactctggagaagctgaaatcgctgggtctgtttggtctgcaggtccccgaggaatacggcggtctgggtttttcaaatacaatgtactccaggctgggcgagattattagcatggacggcagtattaccgtgaccctggcagcacaccaggccattggcttaaagggcattattctcgctgggaccgaagaacagaaggcaaagtacctgcctaaattggcttcaggggaacacatcgcagccttctgcctgaccgaacctgcctcaggttccgatgcggcttccatcagaagtcgcgcaactcttagtgaggataagaagcattatatcctaaatggttctaaagtttggataacaaacggcggtctggctaacattttcaccgtgtttgccaaaactgaagtagtcgatagcgatggaagcgtgaaggataagatcactgcattcatcgtggaacgggattttggcggagtgaccaacggtaagccagaggataaactgggtatacgtggcagcaacacatgtgaagtgcacttcgaaaatacaaaaatccctgtggaaaacatcctgggtgaggtcggggatggctttaaagtcgccatgaatatccttaacagcgggagattctcaatggggtccgtcgtggccggacttcttaagaggttgatcgagatgaccgctgagtacgcgtgtacccggaagcagtttaataagagattgtctgagttcggactgattcaggaaaaattcgcactgatggcccagaaggcttacgtgatggagtctatgacttacctcacagctggcatgttggatcagcccggattccctgattgttccattgaggctgcaatggtgaaggtgttttcctccgaagccgcttggcagtgcgtgagtgaggctctgcaaattctcggtggtcttggatatactagggactatccttacgagaggatccttagagacaccaggatactgctcatcttcgagggcaccaatgaaatcttacgtatgtatatagcactcactggcctgcagcacgccggaagaatcttgaccacgaggatccacgagctgaaacaagccaaggtaagtacagtgatggacacagtcggcaggcgactgcgcgacagccttggacggactgtggatctcggtctaactggcaatcacggtgtagtgcacccctctctggccgatagtgccaataagttcgaagagaatacctattgctttggcaggacagtggagacactactgctgcgatttggaaaaactattatggaggagcagctcgtacttaaaagagtggctaatatcctgatcaatctctacggcatgacagctgtgctcagtagggcttcacgaagcataagaatagggctgagaaaccacgatcacgaggtcctgcttgctaataccttctgcgttgaagcctacctccagaatctgtttagcctcagccagctggacaagtatgcaccggagaatcttgacgagcagattaaaaaggttagccagcagattcttgagaaaagagcttatatttgcgcccatcccctggaccggacgtgctag

SEQ ID NO: 213246 - DNA, 1467 bp, synthetic construct
  misc_feature 1..1467: note = Description of Artificial Sequence: Synthetic coding sequence
  source 1..1467: mol_type = other DNA
atggatggatccatcacggtcacgctggctgctcaccaagctataggcttgaagggcattatcctagcgggtactgaggaacagaaggcaaaatatctcccgaagctggcctctggcgaacacatcgccgcattctgcctgacagaacccgcatccggaagtgatgcggctagcattaggagtcgggcaacactttccgaggataagaaacactacattctcaatgggagtaaagtctggataacgaatggcggtctggctaatatatttaccgttttcgccaaaacagaggtggtggactccgatgggtcagtgaaggataaaatcaccgccttcatcgtcgaacgcgacttcggcggtgtaacgaacgggaaaccagaagacaaactgggcattcgaggctccaatacctgtgaggtgcatttcgagaacacgaaaattcccgtcgaaaacatccttggggaggttggggatggcttcaaagtcgcaatgaatattctgaactcagggcgtttttccatgggatctgttgtggcgggactgcttaaaaggttgatcgaaatgaccgccgaatacgcgtgcacaaggaaacagtttaacaaaaggttgtcagagtttggcctgattcaggagaaattcgcccttatggcccagaaggcctacgtaatggaatccatgacctatttgacggcgggaatgctcgaccaaccagggttcccagactgttctatcgaggctgcaatggtcaaagtgttttcttcagaagccgcatggcagtgcgtctcagaggccctgcagatcctcgggggtctcggctatacaagagattacccatacgagcgtatccttcgcgacacacgaatcctgctgatattcgaaggaacgaacgagatattgcggatgtacatagcccttaccggtctacaacatgcagggagaatcctcaccacgcggatccatgagttgaagcaggccaaagtgtctacagttatggacaccgtcggtagacggttgcgagatagcctgggaagaactgtggatttaggacttacagggaaccatggagtagtgcatccatccctcgccgactcagcaaacaagtttgaggagaacacttactgcttcgggagaacggtggagacccttctactgcggttcgggaagacaatcatggaggagcagctggtactgaagagagtggcaaacatcctgattaatctatacggcatgacagctgtgctctctagggcttcacgctctatcaggattggcctgaggaatcacgatcacgaggtactgctggcgaataccttctgtgtagaagcatatctgcagaacctgttctctctttcccagctggacaagtatgcccctgagaacttggacgaacagatcaaaaaggttagccagcagattctggagaaacgcgcttatatttgtgcccacccattagaccgaacatgttag

SEQ ID NO: 213247 - DNA, 507 bp, synthetic construct
  misc_feature 1..507: note = Description of Artificial Sequence: Synthetic coding sequence
  source 1..507: mol_type = other DNA
atggaggaacagctggtcctgaagggcggacaacatccccatcagccagtctggcatgacggtcgggctgtcgccggtcagccattacaccctcattgggcgccacagccaagacccaggggctcactcggtcagcaccttctgcgagggagcctcctagcagaatccctacagcctctgagcgctggtcaggtttgctcacgtaaaccgaggagcaggctacggaaatgtccaagccgctcactgaggagtgaaccaatcagcgtcccaactctgtggactggccatgctgagcgaggacaatgccccctcctgccgccagcaccgacccacgggcctctccttgatgactgctattctttcttcagaaggctcggattgtcccaggttaaaccatttgtccccaggttacacctaaagggatgtagattagcttgggagtccctattccaggtccttacctgtcgccagtgttccttgacgggcccttctcagttgctcaactag

SEQ ID NO: 213248 - DNA, 1239 bp, synthetic construct
  misc_feature 1..1239: note = Description of Artificial Sequence: Synthetic coding sequence
  source 1..1239: mol_type = other DNA
atggcagcagcacttcttgctcgtgccagtggccctgctcggcgtgctttgtgcccccgagcttggcgacagctccataccatatatcagagtgttgaactgccagaaacccatcaaatgctgctacagacatgtcgggatttcgcagaaaaagaactttttccaattgcagcccaggttgataaagagcacttgtttcctgcggcacaggtgaagaagatgggtggactgggactcctagctatggacgtgcctgaggaactggggggagctggcttggattacttagcctacgccatcgccatggaagaaatttctcgcggttgcgcttccaccggagttatcatgagcgttaacaactcgctttacctgggacccatattgaaattcggctcaaaagagcaaaagcaggcttgggtaacaccattcactagcggcgacaaaatcgggtgtttcgcgttgagcgagcctggaaatgggagtgatgcgggagccgcaagcacgaccgccagagctgagggtgactcatgggtgcttaatggaacaaaggcatggatcaccaacgcttgggaggcaagcgcagctgttgttttcgcatccaccgaccgggcactgcagaataaaggaattagtgcctttctggtgcccatgcccacgccgggattgactcttgggaagaaagaagataaacttggaatccgcggaagctccactgccaacttaattttcgaggattgtcgcattccaaaggactctattctaggggagcctggaatgggctttaagatcgctatgcagaccctggacatgggacgaattggaatcgctagccaagccttggggatcgcccagaccgctctcgactgtgctgtgaactacgccgagaatcgcatggcctttggagccccactgactaaactgcaggttattcaattcaaattggctgatatggctctagcactggagagcgccagattgctaacgtggcgggctgcaatgcttaaagacaacaagaagccctttatcaaggaggcggcaatggccaagttggccgctagcgaggccgcaacggcgataagtcaccaggccatccaaattctcgggggtatgggatatgttaccgaaatgccagcagaacggcattacagagacgctaggatcacagagatctacgaggggaccagtgagatacaacggctcgtcattgccggtcaccttttgcgctcatacaggtcatag

SEQ ID NO: 213249 - DNA, 1365 bp, synthetic construct
  misc_feature 1..1365: note = Description of Artificial Sequence: Synthetic coding sequence
  source 1..1365: mol_type = other DNA
atggcggctggttttgggagatgctgtagggtccttcgctcaatttccaggttccactggcgctcgcagcataccaaggcaaaccgccagcgagagccagggctggggttctcttttgaatttaccgagcaacagaaagagtttcaggccacagctaggaaattcgcccgagaggagattatcccagttgctgcagagtacgacaagactggtgagtacccagtgcccctcattagaagggcttgggagctgggtctgatgaacactcatatccctgagaactgcgactacagcgtatgtcctctactggaggcatgtacactctatctcgatgcattttttctccttctgactggcagcaaccttaacctacaccttaatctgggcggattggggttggggacttttgatgcttgtctcatttctgaagaactggcctatggctgcactggggtgcaaaccgcgatcgagggcaactcccttggccagatgccaattattattgcgggtaatgaccagcagaagaaaaaataccttggacggatgaccgaagaacctttaatgtgcgcttattgcgtcactgagcctggcgctgggtctgacgttgccggaattaagaccaaagccgagaaaaaaggggatgagtacatcattaacgggcaaaagatgtggatcacaaatggcggaaaagctaattggtacttcctgttggccagaagtgatcccgaccccaaggctccagccaataaagcttttaccggcttcattgtagaggccgacacgcccggtatacagatcggacgaaaggagttgaacatgggtcagagatgcagtgatactagaggcatagtatttgaggacgtaaaagtaccgaaagagaacgtactgatcggcgacggagcgggattcaaggtagcgatgggcgcttttgataagacgcgccctgtcgtggctgccggagccgtcggcctggcccagcgggctctggacgaggccacaaaatatgctctggagcgcaagacctttggaaagctcttagtggaacatcaggctatcagctttatgctcgccgagatggctatgaaggtcgaactggcacggatgtcatatcagagagcggcatgggaggtggacagcggaagacggaatacctattacgcctctatcgccaaagcgttcgccggagacattgccaaccagctggccacagatgccgtccagatcctcgggggtaacgggtttaacaccgagtatcccgtagaaaagctcatgcgcgacgctaagatctatcaaatttatgaaggcacctctcagatccaacgtctcatcgtggcaagggagcacatcgataagtataaaaattag

SEQ ID NO: 213250 - DNA, 1266 bp, synthetic construct
  misc_feature 1..1266: note = Description of Artificial Sequence: Synthetic coding sequence
  source 1..1266: mol_type = other DNA
atggcagccggttttggccgttgctgtcgagtccttcgtagcatcagcagatttcactggaggtcacagcacacgaaggccaacagacagagggaacctgggcttggcttttcatttgaatttacggaacagcagaaagaatttcaggcaacggccaggaaatttgctcgcgaggaaattatccccgttgcagcggaatatgataagactggagagtatccggtacccctcatacggagagcgtgggaactcggcctgatgaacacccacatacccgaaaattgtgggggactcgggttagggacctttgatgcctgcctcattagtgaagagctagcctatggatgtacaggcgttcagacagcaattgaaggaaactcactcggtcagatgccaataatcattgcaggaaacgaccaacagaagaaaaaatatttaggacggatgactgaagaaccactcatgtgtgcttactgtgtgaccgaaccaggcgctggtagcgacgttgccggtatcaaaaccaaagcagaaaagaaaggagatgaatatatcatcaatggtcaaaagatgtggatcaccaacgggggaaaagctaattggtatttcctgctggctagatcggaccccgacccaaaggcccctgccaacaaagcttttaccggttttatcgtcgaggccgatacacccggtatacagattggacgaaaggaattaaatatggggcagaggtgctccgacacaagagggattgtatttgaggatgtcaaagtgcccaaggagaacgtgcttatcggagatggcgctggatttaaggtcgccatgggtgcttttgacaagacaagacctgtagtggccgctggggcagtcggacttgctcaaagagccctggacgaggctactaagtacgccctggaacgcaagaccttcggcaaactcctcgtagaacaccaggctattagttttatgttggcagagatggccatgaaagtggagctggcacgaatgagttaccagagggccgcttgggaggttgatagtgggcgtcgaaacacatactacgcttccatcgccaaagcttttgccggagatatcgccaaccagctggcaaccgacgctgtgcaaatcctcggagggaatggattcaatacagagtatcccgtggaaaagctcatgcgcgacgccaagatttaccagatctacgagggaacttctcaaattcagaggttaattgttgctcgggagcacatcgataaatataagaattag

SEQ ID NO: 213251 - DNA, 1278 bp, synthetic construct
  misc_feature 1..1278: note = Description of Artificial Sequence: Synthetic coding sequence
  source 1..1278: mol_type = other DNA
atggcggctgggtttggcagatgctgtcgatgttcattacaggtgttgcgatccatctcacgtttccactggcgatctcagcatacgaaggcgaatagacagcgcgagccaggcctgggattctcatttgagtttacggagcaacagaaagaatttcaagcaacagcaaggaaattcgcccgagaagagatcattcccgtggccgctgagtacgataagactggtgagtatccggtgcccctcataaggagggcatgggagctcggcctcatgaacacacacatccccgaaaactgcggtggactgggccttggcacttttgatgcctgtctcatatctgaagagctcgcgtacgggtgcaccggggtacagactgccatcgaggggaatagccttggacagatgcccattatcatagccggaaacgaccaacagaaaaaaaagtaccttggacgcatgacagaagagcccctgatgtgcgcttattgcgtcaccgagcctggagcagggtcggacgttgccggaatcaagactaaggccgaaaaaaagggtgacgaatatattatcaatgggcagaagatgtggatcaccaatgggggaaaggccaattggtattttttgctggcaagatctgaccccgatcctaaggcgccagctaacaaagcgttcacaggctttattgtggaggctgacacccccggaatccagataggccgtaaggagttaaacatgggccagcggtgtagtgacacacgaggcatcgtgttcgaagatgttaaggtgccaaaggagaatgttctgatcggagatggagctggcttcaaagtggcaatgggggcattcgacaaaacaaggcccgtcgtggccgcaggtgctgtgggtctggcccagagagcactggatgaggcgacaaaatacgcactcgagcggaaaactttcggtaaactgttggtcgagcaccaggcgatctccttcatgttggccgagatggccatgaaggttgagctcgctcgaatgagctaccagagggccgcttgggaagtcgactcagggaggaggaatacctattacgcttcaatcgcaaaggcctttgccggagatatcgccaaccagttggcaactgacgcggtgcagattttaggcggaaatggatttaatactgagtatcctgtggaaaaactgatgagagacgctaaaatctatcagatttacgaaggtacgtcacagattcagagattaatcgtcgctcgcgaacacattgataaatataaaaactag

SEQ ID NO: 213252 - DNA, 1158 bp, synthetic construct
  misc_feature 1..1158: note = Description of Artificial Sequence: Synthetic coding sequence
  source 1..1158: mol_type = other DNA
atgttgcaggagtttactgaacaacagaaagagtttcaggccaccgccaggaaattcgctagagaggagattatacctgtggctgccgagtacgataagaccggagagtaccccgttcctttaatccgtcgcgcttgggaactggggttaatgaacacgcacattccagaaaactgcgggggactggggttaggcaccttcgatgcatgtctcataagtgaggagctcgcctatgggtgtacaggtgtccagacggctatcgagggtaactcgctcgggcagatgccgattatcattgcaggaaacgaccagcaaaagaagaaatacctgggccgtatgacagaggaaccccttatgtgcgcttactgtgttaccgagcctggcgctggtagcgatgtggctggtatcaaaacaaaagccgagaaaaaaggtgacgagtatataattaatggacaaaagatgtggattacaaacgggggtaaagccaattggtacttcttattagctagaagcgatcccgatcccaaggcgccagccaataaggcctttaccggattcatcgtggaggccgataccccagggattcagatagggaggaaggaattgaatatgggccagcgctgctccgatacacggggaatcgttttcgaggatgtgaaagtgcccaaggagaatgtgttgatcggtgacggtgccggtttcaaagtggctatgggggctttcgacaagaccaggccggtggtggcggcaggcgctgtcggcctcgctcaacgagcattggacgaggctacgaaatacgcactagaacgtaagactttcggcaaacttttggtggaacaccaggccatctctttcatgctcgccgaaatggccatgaaggtggaactggcacgcatgagctaccagcgagccgcttgggaggtggacagcggacgacgcaacacctattatgcctccatcgctaaagctttcgctggcgacatcgccaaccagctcgccactgacgccgttcagatactgggcggtaacggattcaacacagagtatccagtggaaaagctgatgagggacgctaagatttatcagatatatgagggcaccagccagatacagaggcttatagtggcacgggaacacattgacaagtataaaaactag

SEQ ID NO: 213253 - DNA, 699 bp, synthetic construct
  misc_feature 1..699: note = Description of Artificial Sequence: Synthetic coding sequence
  source 1..699: mol_type = other DNA
atgtggataactaacggcggtaaagcgaattggtactttctgctggccaggagcgatcctgacccaaaagccccagcaaataaagctttcaccgggtttattgttgaggctgatacccctggaattcaaatcggcagaaaagagcttaacatgggacaacgatgttctgatacacgaggaatagtgttcgaagacgtgaaggttccaaaggaaaacgtcctgattggggatggcgctggtttcaaagttgctatgggagcgtttgataaaacccgacccgtggtggccgctggggctgtagggctcgcccagcgcgcattggacgaggcaaccaagtacgccctcgaaagaaagacgtttggcaaactgcttgtcgagcaccaagcaatttcttttatgctggccgagatggcaatgaaggtagagctcgcacgcatgtcctaccaacgggcagcctgggaggtggactccggtcggcgtaacacatactatgcatccatagcaaaagctttcgccggagacatcgctaatcaacttgccacggacgccgtgcagattctcggaggaaatggttttaatacagaatatccagtggaaaagctgatgcgcgatgctaagatttaccagatctacgaaggaaccagtcagattcagcggctgattgtggccagagagcatatcgacaagtacaaaaactag

SEQ ID NO: 213254 - DNA, 1446 bp, synthetic construct
  misc_feature 1..1446: note = Description of Artificial Sequence: Synthetic coding sequence
  source 1..1446: mol_type = other DNA
atggatggggctgttatggaaggccctttgttcctccagtctcaaagattcgggacgaagaggtggcgcaagacctgggccgtgttatacccagcctccccgcatggggtagcgagattggaatttttcgaccataaaggctcatctagcggagggggtagaggctcctcccgacgcctcgactgcaaggtgatccggctggctgaatgcgtaagtgtagccccagtgactgtggagacgcctccggagcccggtgcaactgcttttcgccttgacacagctcagaggtcccacttgcttgcggctgacgcgccatcctcagcagcgtgggttcaaacgctctgcaggaatgcgttccccaagggcagttggacactggcgccaactgacaaccccccaaaacttagtgccctagaaatgctggagaatagtctctattccccaacctgggaaggaagtcagttttgggtaacagtacagcgtactgaggcagccgaacgatgcggactgcacggctcctacgtactgagggtggaggccgagcggctcacactactgaccgtaggtgcgcagtctcagatcctggagcccctgctatcttggccttatactctgctgcgccgttatggacgggacaaagttatgttttctttcgaggcaggcagaaggtgcccttccgggcctggtacattcactttccagaccgcccaggggaacgatattttccaggccgtcgaaacggccatccaccgacagaaggctcaagggaaggccggacagggtcacgatgtattgcgagccgatagtcacgagggcgaagtcgccgagggtaagttgccatcaccacctgggcctcaagaactcctcgactctcccccagcattatacgctgagcctttggacagtttgcgtatcgctccatgcccatcacaggattctctgtacagcgaccctctggactcaactagcgctcaggccggagaaggcgtgcagcgcaaaaaacctctctactgggacctttacgagcacgctcagcaacagctacttaaggccaagcttaccgatcctaaggaggatccgatatatgatgaaccagaagggctcgccccagttcctccgcaggggctgtatgatctgccgagagagcccaaggatgcttggtggtgccaggctagagtgaaggaggaaggctacgagctgccatacaacccagcaacagacgactacgccgtgcccccacctagatcaaccaagcctcttcttgcgccaaaaccccagggccctgcttttccagaacctgggactgcaaccggcagtgggatcaaatcccacaacagcgctctgtacagccaggtgcagaaatctggagctagcggttcctgggactgcggcctctcgcgcgtcgggacagacaaaactggcgtaaaaagcgaaggaagcacctag

SEQ ID NO: 213255 - DNA, 1299 bp, synthetic construct
  misc_feature 1..1299: note = Description of Artificial Sequence: Synthetic coding sequence
  source 1..1299: mol_type = other DNA
atggaagggctcgccgttagattgctgagaggaagccggctgctgcgtagaaacttcttgacttgcctgtcgtcctggaagattccgcctcacgtgagtaaaagtagtcagtccgaggctctgctaaatataaccaacaacggtatacacttcgcccctctccagacctttacggacgaggagatgatgattaaatccagcgtgaaaaagttcgcccaggagcaaatcgcccctctcgtcagtacgatggatgaaaactcgaaaatggaaaaatccgtgatacaggggttatttcagcaagggctgatgggcatcgaagtcgatccagagtatggcggtaccggagcttcgttccttagtactgtcctcgtgatagaggaactcgcaaaagtcgatgcaagcgtagccgtcttctgtgagattcaaaatactctgataaacaccctgatacggaaacacggcacagaggaacagaaggctacatatctgccccagttgacgacagagaaagtaggctcgttttgtctttccgaagcaggggctggtagtgacagtttcgccctgaagactagagcagataaagaaggcgattattatgtgctgaatgggtcaaagatgtggatttcctctgcggaacatgccggactgtttctggtcatggcgaatgtggatccaacgattggctataagggaatcacctcattcctggtcgacagggacactcccggtctgcacatcggtaagccggagaataagctgggcctgcgggcaagtagcacttgccccctgacttttgagaacgtcaaggttcccgaggccaacatcctgggacagattgggcatggctataaatatgccattggtagtttgaatgagggacggatcggcatcgctgctcagatgcttggactcgcccagggttgcttcgattacaccatcccctatattaaagagaggatccagttcggcaaacgactgttcgacttccaaggactgcaacatcaagtcgcgcacgttgccacccagttagaggccgctaggctcctgacttataacgctgcccgtctgctcgaggccggtaaacccttcataaaggaggcgagtatggcgaaatattacgctagcgagattgccggtcaaacgacttctaagtgtatagagtggatgggcggtgtaggctacacgaaggactaccccgtcgagaagtatttccgtgacgctaagataggaaccatctacgagggtgccagtaatatccagcttaacaccatcgccaaacacatagatgccgaatattag

SEQ ID NO: 213256 - DNA, 993 bp, synthetic construct
  misc_feature 1..993: note = Description of Artificial Sequence: Synthetic coding sequence
  source 1..993: mol_type = other DNA
atgggcattgaggtggatcctgaatatggtgggaccggtgcttcattcctgagcactgtgctcgtaatcgaagaactcgcaaaggttgatgcatccgtcgccgtcttctgtgagatccagaatacactcatcaataccctgatcaggaaacacggaactgaggagcagaaggccacttaccttccccagctgacaacagagaaggtggggagtttctgtctgtccgaagccggagccggatccgactccttcgctctgaagactcgggcagataaggaaggggattactacgtcttaaatgggtctaaaatgtggatctcgtctgcagagcacgccggtctgttcctagtgatggcaaacgtcgaccccacaatcggctacaaagggatcacctccttcttagtagatcgggatacccccggactgcacatcggaaaaccagaaaacaagctgggactccgtgcaagctccacctgccctctcacatttgagaatgtaaaggtgccagaggcaaatatactgggacaaattgggcacggctataaatacgcaattggcagcctaaatgagggacgaattggtatagcagcccaaatgttgggattggcccaaggatgctttgattacactatcccgtacatcaaggaacggattcagtttggtaagcgccttttcgactttcaaggacttcaacatcaggttgctcacgtcgccacgcagctggaagccgctcgcctcctgacctataacgccgcacgactgttggaggcgggtaagccttttatcaaggaagcctcgatggctaaatactatgcttcagagatagcgggacagacgacgagcaagtgcattgaatggatgggaggggtgggctatacaaaggattacccagttgagaagtacttccgggatgcgaaaatcggcaccatttacgagggcgcaagtaacatccagctcaacaccattgccaaacacatcgatgctgagtactag

SEQ ID NO: 213257 - DNA, 1968 bp, synthetic construct
  misc_feature 1..1968: note = Description of Artificial Sequence: Synthetic coding sequence
  source 1..1968: mol_type = other DNA
atgcaggcagccagaatggcagcatcgctggggcgtcagcttcttaggctgggaggtggctcctccagactgactgcactgttgggccagcctcgaccgggacctgctagaagaccctacgctgggggtgcagcccagctggcattggataagtctgacagccatccatccgacgcactaactagaaaaaagcctgccaaggcagaatctaagagctttgccgttggaatgttcaaaggccagctcacaaccgatcaggtattcccataccctagtgtcctcaacgaagagcagacacaattcctgaaggagttggtcgagcctgttagtagatttttcgaggaggttaacgatccggctaaaaatgatgcactggagatggtggaggaaactacctggcaagggctgaaggaactgggcgcttttggcctgcaggtgccttcggagctgggaggcgttggcctgtgtaatactcagtatgccaggttggttgagattgtcggtatgcacgatctaggcgtgggcattaccctcggcgctcaccagtctattggtttcaaagggatcctgttgttcggtactaaggcccaaaaagaaaagtatctgcccaaacttgccagtggcgagactgtggccgctttctgcttgaccgagccctcttccggcagcgacgccgctagcattcgaacatcggccgtaccatccccttgcggcaagtattatacactgaatggttccaagctatggataagcaatgggggtctcgccgatatcttcactgtattcgctaaaacacctgttacagaccccgctacgggagccgtcaaggagaagattactgcttttgtggtggagagggggtttggtggcattacccacggaccccctgaaaagaagatggggataaaggcctcgaatacagctgaggtattctttgatggcgtcagggtaccttctgagaacgttctgggggaggtgggctctggatttaaggtggccatgcacatcttaaacaatggaaggtttggcatggctgcagccctggcaggcaccatgcgcggaattatcgcaaaggctgtggatcacgcaactaatcggacacagtttggagaaaaaatccacaatttcggcctcatccaggagaaactggccagaatggttatgctgcagtacgttacagaaagtatggcatatatggtcagtgcgaatatggaccagggcgctacagacttccagatcgaagccgctatctccaagatatttggttccgaagccgcttggaaagtgacagacgagtgcatccagatcatgggcggtatgggctttatgaaagagccaggggtggagcgtgttctgcgcgacttaagaatatttcgaattttcgaggggacgaacgacattctaaggctgttcgtcgcgctgcagggctgcatggacaaagggaaagaactcagtggtttgggatccgccttaaagaatcctttcggtaatgccggactcctcctaggagaggccggtaaacagctgagacgcagagccggactaggctcgggcctgagcctcagcggccttgtgcatccggagctctctagatcgggagagctagctgttcgggcactggaacagttcgccaccgtagtggaggcaaagctgatcaaacacaaaaagggcattgtcaacgaacaattcttgctccagcgcctcgccgatggtgccattgacttgtatgcaatggtcgttgtgttaagtcgagcgtctagatccttgagcgagggccaccccacggcccaacacgagaaaatgctgtgcgacacttggtgcattgaggccgctgctcggattcgagaggggatggcagccctacagagtgatccttggcagcaagagctctacaggaacttcaagtctataagtaaagcactcgtggagcgcggtggcgtggtgacttctaaccctctgggattctag

SEQ ID NO: 213258 - DNA, 1902 bp, synthetic construct
  misc_feature 1..1902: note = Description of Artificial Sequence: Synthetic coding sequence
  source 1..1902: mol_type = other DNA
atgcaggcagctcggatggcagcctctctgggccgtcagctcctccggctcggagggggatctagtcggctgactgcactgctgggtcagcctcggcctgggcctgctcgcagaccttacgccggtggcgctgcccaggagtctaaaagcttcgccgtaggcatgttcaaaggacagttgacaaccgaccaggtgttcccatacccgagcgtgttaaacgaagaacagactcagtttctcaaagagcttgtcgaacctgtttctcgattctttgaagaagtaaacgacccagcaaagaatgatgcactggaaatggtggaggagaccacctggcagggcctgaaggaattgggcgctttcggtctgcaggtgccatccgaactgggaggggtgggactgtgtaatacacagtatgccaggttagtggaaatcgtggggatgcacgacctgggcgtgggcatcacattaggggctcaccagagcattggatttaaaggaattctgttgttcgggaccaaagcacagaaggagaagtacctgcctaaactggccagtggtgaaaccgtcgccgctttttgtctgaccgaaccatcctctggtagcgatgctgcaagcattaggacctctgcagtccccagcccttgcggcaagtactacaccctgaacggctccaagctatggatatcgaatgggggacttgctgacatctttacggtcttcgccaagactcctgtgaccgatcctgcaaccggtgccgtcaaagagaagatcaccgcgtttgtagttgaacggggattcggaggcatcactcatggcccaccagaaaaaaaaatgggaatcaaggcatccaacaccgccgaggtgttcttcgacggagtaagagtcccctcagagaatgtgttgggagaggtgggcagcggattcaaggtcgctatgcatatactgaacaatgggagattcggcatggcggctgcgctggcaggcacgatgagagggattatcgcaaaggctgtggatcacgcgacgaacaggacccagttcggggaaaaaatccacaacttcgggctgatccaggagaagctagccagaatggtgatgctacagtatgtgaccgagtctatggcgtacatggtgagtgccaacatggatcagggagctaccgacttccagatcgaggccgcaattagcaaaattttcgggagtgaagcagcttggaaggtgaccgatgagtgtatccagattatgggcggaatggggttcatgaaagagcctggggtagagcgtgtgttgcgagacctccggatttttaggatatttgaagggaccaacgacatcctcagactatttgtggcactccaaggctgcatggacaaaggcaaggaactgtcagggctaggaagcgccctaaagaatcctttcggaaatgccggtctattgctaggtgaagcaggcaagcagctgaggcgtcgcgcaggattgggttcaggcttgagtttgtcgggcctggtgcaccccgagctgtccaggagcggagaacttgcagtgcgcgctctcgaacaattcgcaacggttgtggaagccaaactgattaaacacaaaaagggcattgtaaatgaacagtttctgctacagaggttggccgacggtgcaatcgacctgtatgctatggtcgtggttctttctcgcgcttcccggagtttatctgagggccatcctacggctcaacacgaaaaaatgctttgtgacacatggtgcattgaagccgctgctaggatacgtgagggtatggccgcactccagagcgacccgtggcagcaagagctctaccgcaatttcaaaagcatctctaaggcactggtcgaaagagggggagtcgtgacctccaatccacttggcttttag

SEQ ID NO: 213259 - DNA, 2106 bp, synthetic construct
  misc_feature 1..2106: note = Description of Artificial Sequence: Synthetic coding sequence
  source 1..2106: mol_type = other DNA
atgcctagaggtcctcaaccaagtgcagctagatgtacagttgatgatgaaagtggccttggcgcaccgggacgcggaagggctggtcggcagtcctgggtcagagcaagagcaagcggagcccgacgagactctgagatgcaggctgccagaatggcagccagccttggcaggcaactcttgaggttaggaggtggctcctccagactgacagctttactgggtcagccgcgtcccggacctgcaaggcgcccatatgctgggggagccgctcaattggccttggataagtctgactcacacccatctgatgctcttacgagaaagaagcctgccaaggcagagtcaaagtcctttgcggtgggcatgttcaagggccagctcacaacggaccaggtgttcccctaccctagcgtgcttaacgaggaacagacacaattcctgaaagagctcgtcgaaccagtcagtcggtttttcgaggaggttaacgaccccgcaaagaatgacgccctggaaatggtggaagaaaccacctggcagggactcaaagaacttggagcttttggactgcaggttccatccgaacttgggggagtgggcctttgtaatacacagtacgctcggcttgttgagatcgtgggcatgcacgatctgggagtggggatcaccctgggggcacaccaatcaattggttttaaaggcattttgctattcgggaccaaggcacagaaggagaaatatctgccaaaactggcatccggggaaacagtggccgctttttgcctgactgagccttcctcaggaagcgacgcagcatccatcaggaccagcgccgttccttctccatgtggcaaatattacacccttaacggctctaagctatggatcagcaatgggggtctggccgacatctttaccgtgttcgctaaaactcctgtgactgatccagctaccggcgctgtaaaggaaaagatcactgcgtttgtggtggagcggggatttggcggaattacgcacggacccccagagaaaaagatggggataaaggcttccaataccgctgaagtatttttcgacggcgttcgggtcccatctgaaaatgtgctcggcgaggtcggttctggttttaaagtagccatgcatatactaaacaatggacggttcggcatggcagctgcactggcaggaacaatgcgaggaatcatcgcaaaggctgttgaccacgccacgaaccgcacccagtttggggagaagattcacaactttggcctgatacaggagaagctggctagaatggtgatgcttcagtatgtgaccgaatctatggcttatatggtgagcgctaatatggatcagggagcaaccgatttccagattgaagccgcaatatctaagattttcggttccgaagctgcatggaaggtgactgatgaatgtatacagatcatgggagggatgggatttatgaaagaacccggtgtagaacgggtactgagagatcttcgcattttcaggatattcgagggcactaacgacatcctgcggctgttcgtcgcactccagggatgtatggacaagggaaaagagctcagcggactgggtagtgccctgaaaaatccattcggtaatgctggcctgctactgggtgaggccggaaagcagctgagacgacgagccggactcgggagtggcctgtcgttatctggattagtgcacccagagctatcccgctccggtgaactcgcagtgcgcgctctggagcaattcgccaccgtagttgaagccaagctgattaagcacaaaaagggcatcgtgaacgaacagtttctgttacagcgcttggccgatggcgctatcgacctgtatgctatggtcgttgtgcttagcagggcttccaggagcctttccgaggggcatccaactgcccagcatgaaaagatgctgtgcgatacttggtgcattgaagcagccgctaggatccgtgaaggtatggccgcactccagagcgatccctggcagcaggagttgtaccgaaactttaagtctatcagtaaagccttagtggagcgagggggagtggtcacatccaacccattaggtttttag

SEQ ID NO: 213260 - DNA, 2106 bp, synthetic construct
  misc_feature 1..2106: note = Description of Artificial Sequence: Synthetic coding sequence
  source 1..2106: mol_type = other DNA
atgccacggggtccccaaccctccgccgcacgctgcacagtggatgacgagtctggtttaggcgctcctggacggggaagggccggacgacaaagctgggtcagagcaagagctagtggcgctaggagagattctgaaatgcaggctgcccgtatggctgcctctttggggaggcaactgcttaggctgggcggaggcagttccagactcaccgctctgttggggcagcctcgcccaggccctgctaggaggccttatgccggaggagcggctcagctcgctctcgacaagagcgactcacacccaagtgatgctctaacgcgtaagaaacccgcaaaagcagaatccaagtccttcgctgtcggaatgtttaaaggtcagctgacaaccgaccaggttttcccttacccttctgtccttaatgaggagcagacgcaattcctcaaggaattggttgagcctgtgtccaggtttttcgaggaggtgaatgatccagctaagaatgacgcccttgagatggtggaggaaactacctggcagggattaaaagagctgggagccttcggcctgcaggtgcccagtgagcttggcggtgtaggactttgtaacactcaatatgcaaggcttgtagaaatcgttggcatgcacgacctgggcgtgggtataaccctcggagcacaccagagcatagggttcaagggcattttgctgttcggcaccaaggcccagaaagaaaagtatttacccaagctcgcatctggcgaaactgttgcagccttctgtctaaccgaaccaagctccggctctgacgcagctagcatccgaactagcgcggtgccatccccctgtgggaagtactacactctgaacggatcaaaactgtggatctctaatggcggactggcagacatttttaccgttttcgctaagacccctgttaccgacccagcaaccggggctgtgaaggaaaagatcacggcctttgtcgtggagagagggttcgggggtataacccacggcccacccgaaaaaaagatgggaattaaagcgtccaacacagccgaggttttcttcgacggggtgcgtgtgccaagtgaaaatgtgcttggggaagtcggctccggctttaaggtggctatgcacatattaaacaacggtcgatttggtatggcagccgctctggcaggtactatgcgcggaataatagccaaagccgtggatcacgccacaaaccgcacgcagtttggggagaaaatccacaatttcggccttatccaagaaaaattggcgagaatggtaatgttgcagtacgtgactgagtcaatggcctacatggtgtccgcgaacatggaccagggcgcaacagacttccagattgaagccgctatctctaaaatttttggatctgaggccgcttggaaagtaaccgacgagtgtatacagataatgggaggcatgggcttcatgaaagagcccggtgtggagcgagtcctaagggatctgcgcatattcaggattttcgaggggaccaatgatattctgaggctgttcgtagctctgcagggttgcatggacaaaggcaaggagctgagcggcttgggcagcgccttaaagaatcctttcgggaatgccggactgctcctgggagaggccggaaaacagcttcgccgaagagctgggctcggcagcggactatctttatctggtcttgtgcatcccgagctgtcccgcagtggggaattggctgtccgggctctggaacagttcgccacagtcgttgaggccaagctcatcaaacacaagaaggggattgtgaatgagcagtttctgttgcagcgcttagccgatggagcaatcgacttgtatgccatggtggttgttttgtcccgcgcatcaaggagtttatctgagggtcatccaactgcccaacacgaaaaaatgctctgcgacacgtggtgcattgaggctgcagcaaggattcgcgagggaatggccgctctgcaatctgatccatggcagcaggagttgtatagaaatttcaagtccatttccaaggcactggttgagcgcggaggggttgtgaccagtaaccctctgggattttag

SEQ ID NO: 213261 - DNA, 2037 bp, synthetic construct
  misc_feature 1..2037: note = Description of Artificial Sequence: Synthetic coding sequence
  source 1..2037: mol_type = other DNA
atgctgggcggtctggcagccgctgctgggacaaggattatgggaaaagagattgaggctgaggcgcaacgccctctgcgacagacctggcggccaggacaacccccagccatgacagccaagaccatgtccagcagactgaccgccttgctaggacaaccgcgacccggacccgctagaagaccttacgccggtggtgccgctcagttggctctggataaatcagattcccacccaagtgacgccctgacccgaaagaaacccgcaaaggccgaaagcaaatccttcgccgtcggaatgtttaaaggacaattgacaaccgatcaggtcttcccttacccctcagtccttaacgaagagcagacccagtttctgaaggaattggttgagcccgtgtcacgatttttcgaggaagttaacgaccccgctaaaaacgacgctcttgagatggttgaagagaccacttggcagggcctcaaagaactgggcgcattcggactgcaggttccgtccgaactaggcggagtggggctgtgtaacacacagtatgcgcgactcgtcgagatagtggggatgcacgacctcggcgtaggaattactcttggcgcacatcaaagtatcgggtttaaagggatcctgctgttcggcacaaaggcccaaaaggaaaaatatcttcctaagctcgcatcaggtgagactgtggccgctttctgtctgaccgaaccaagttccggcagcgatgcggcatctattaggacttctgccgtcccctccccttgtggaaaatattacacattaaacggaagcaagctgtggattagcaacgggggtctcgccgacattttcaccgttttcgctaagacacctgtcacagacccggcaaccggggctgtgaaagagaagataacggccttcgtcgtcgagagaggattcgggggtatcacacatggccctccagagaaaaagatggggatcaaagcatcgaataccgccgaggtattcttcgatggagttcgcgtaccatctgaaaacgtcctcggcgaagtcggcagcggctttaaagtcgccatgcatatactgaacaatggtcggtttgggatggccgcagcacttgcgggtacaatgaggggcatcatcgccaaggcagtcgaccacgcaacaaatcgcacgcaattcggggagaaaattcataatttcggactgatccaggagaaactcgcaaggatggtaatgctacaatacgtcacagagtctatggcatatatggtgagcgctaacatggaccagggtgccacagactttcagattgaggccgcaataagcaaaatatttgggtcagaagctgcttggaaagtgaccgatgaatgcatccagattatgggaggaatgggttttatgaaggaaccaggagtcgaacgcgtactgcgtgatcttagaatttttaggatcttcgagggcactaacgatatcctgcggctttttgtcgccctgcagggctgtatggacaaaggcaaagagcttagtggtctgggctcagcgctcaagaacccttttggtaacgccggtttactacttggcgaagctgggaagcagctgcgcagacgagctggactgggaagtggcctctctcttagtggtctggtgcatccggagctcagccgatctggagagctggctgtgcgtgccttggaacagtttgcaactgttgttgaggccaagctcatcaaacataagaaggggatcgttaatgagcagtttttactgcagcgactcgccgacggggcaatcgacttgtatgcgatggtggttgtcttgagtcgggcaagccgctcactgtcagaaggccatccaaccgctcagcacgagaagatgctctgcgacacatggtgtattgaagctgcagcaagaatcagagaaggcatggccgctctgcagtcagatccttggcaacaggagctgtacagaaactttaaatctatatcaaaagccctggtggagcggggaggcgtggtgacatctaaccctcttggcttctag

SEQ ID NO: 213262 - DNA, 1983 bp, synthetic construct
  misc_feature 1..1983: note = Description of Artificial Sequence: Synthetic coding sequence
  source 1..1983: mol_type = other DNA
atgaatccagatctgcgcagagaaagagattctgctagctttaatcccgagctgttgactcacattctggatggcagcccagagaagaccagacggaggagagagattgaaaacatgatcctcaacgatcccgacttccagcatgaggacttgaattttctcactagatcacagaggtatgaggtggctgtgcggaagagcgctattatggtcaagaaaatgcgagagttcggtatagctgaccccgatgagattatgtggttcaaaaacttcgtgcatcgtggcagaccagagcccctggacctgcatttggggatgtttctgcccaccctgctccatcaagcgaccgctgagcagcaggaacggtttttcatgccggcttggaacctggagatcatcggcacgtatgcacagaccgagatgggccatggtacacacctgcgcggactcgagacaactgcgacgtacgatcccgagacccaggagttcatcctaaatagcccaaccgtgacctcaatcaagtggtggcccggagggctgggaaagacttccaaccacgccatcgtcttggcgcagctgattacgaagggaaagtgctacggactccatgccttcattgtgcccattcgggagattggtacccacaagcccctccccggaattactgttggtgatatcgggccaaagttcggatatgatgaaatcgacaacgggtacttgaaaatggataatcatcgcattcctagagagaatatgctgatgaagtacgcgcaggtgaagcctgacgggacctacgttaaaccactgtccaacaaactgacgtacggaaccatggtgtttgtgagatcctttctggtgggcgaagcagcacgagccctcagtaaagcttgtaccatagccattaggtatagtgcggtaagacatcaatcagagataaaaccaggtgagccagagcctcagatactggattttcaaactcagcagtacaaactgttcccacttctggccactgcctacgcattccagtttgtgggcgcttacatgaaagagacttaccacaggattaacgagggaatcggtcagggcgatctgtccgagttacctgagttgcatgctctgacggcagggctcaaggccttcacatcctggaccgctaatactggcatagaggcctgccgaatggcatgcggaggtcacgggtatagccactgctccgggctccctaacatctatgtaaattttactccaagttgcaccttcgaaggcgaaaatacagttatgatgttacagaccgcaagatttctcatgaaatcctatgatcaggtgcactccgggaagctggtgtgtggcatggtttcttatctgaacgatctgccatcccaacggatccaaccacagcaggtggcagtgtggccgaccatggtggatattaattccccagagagccttaccgaggcttataagctccgcgctgcacggttggtggagatcgccgcaaaaaacctgcaaaaggaggtcattcatcggaagtctaaggaagtggcatggaacctcacatccgttgatctggtgcgtgcctctgaggctcactgtcattatgtggtcgtcaaactgttcagtgagaaactgctaaagattcaggacaaagctattcaggcagtgctcaggagcctgtgcctcttgtattctctttatggcatttcccagaacgccggagacttcctgcagggaagtatcatgacggaaccacagattactcaagtcaaccagcgcgtcaaagagctgcttaccttaatccgctcagatgcggtggctcttgtggacgcgtttgacttccaggatgtcaccctcggatccgtcctgggcagatacgacggtaacgtttacgagaacctctttgagtgggccaaaaattcaccactcaacaaagcagaagtgcatgagagctataaacaccttaagagtctgcagagcaaactgtag

SEQ ID NO: 213263 - DNA, 1983 bp, synthetic construct
  misc_feature 1..1983: note = Description of Artificial Sequence: Synthetic coding sequence
  source 1..1983: mol_type = other DNA
atgaaccctgatctgaggcgagaacgcgattctgcctcattcaatcccgagcttctcacccacattcttgacgggtctcctgagaagacacgcagacggagggagattgaaaacatgatccttaatgaccctgatttccaacatgaggacttaaattttctcaccaggagtcaaaggtacgaggttgctgtgcggaagtcagcaattatggtcaagaaaatgagagaatttggcattgcagacccagatgagatcatgtggtttaagaagttacacctggtgaatttcgtcgagcccgtcggccttaactattcaatgtttattcctacacttctgaaccagggcacgacagctcagaaggaaaagtggttactcagcagtaagggcctgcagattattggcacctacgcccagacagaaatggggcatggaacccacctcaggggcctcgaaaccacagccacctatgatccggagacacaggagttcatcctaaacagtcccactgttacttcaatcaagtggtggcccggtggactcgggaaaactagtaaccatgccatcgtcctcgcccaactgataaccaaaggcaagtgctatgggctgcacgcctttattgttcccatccgggagattgggacacacaaacccctgccgggtatcaccgtgggcgacataggcccaaaattcggatatgacgagatcgacaacggatatctgaagatggacaaccatcggatacctagagagaacatgctcatgaagtatgcgcaggtgaagccagatggtacgtatgttaagccgctgagcaataaactaacatacggcaccatggtgtttgtgcgttccttccttgtgggtgaagcggctcgggcactgtccaaagcatgtacaatcgcaattagatactccgccgtccggcaccaaagtgagataaaacctggcgagccggagcctcagattctagacttccagacacagcaatataagctctttcctctactggccaccgcttacgcatttcagtttgtgggtgcctatatgaaagaaacctaccataggatcaatgaaggcataggacaaggggacttgtcagagctgccagaactgcatgccctgaccgccggtttgaaagctttcacatcttggactgctaacactggcatagaagcatgtaggatggcgtgcggcggacacgggtactcgcactgctcaggcttacctaacatttatgttaattttacaccctcctgtaccttcgagggagagaacactgtgatgatgctgcagacagccaggttcctcatgaagagctacgatcaggtccacagcggaaagttagtttgcggaatggtgtcttatctgaatgaccttccctcacagcgtattcagccacagcaagttgcagtctggccaactatggtggacatcaatagcccagagagtctgactgaggcatataagctgcgggctgctcggcttgtggagatcgccgctaagaatctccaaaaggaggtgattcatcgaaagtccaaggaagtagcatggaatcttacaagtgtggatctggtgcgggcttccgaggcacactgtcactacgtggtagtgaagctcttcagtgaaaagctgctcaaaatccaagacaaggcaatccaggcagtactacggagtctttgtttgctgtacagtttatatggcatttcccagaatgccggtgactttctccaggggagcatcatgacagagcctcaaattacccaagtcaatcaacgtgtcaaagagctgcttactctgattcgcagcgatgcagtagccctggtcgacgcctttgatttccaggatgttactctgggatccgtgctcggcagatatgacggaaatgtctacgagaatctatttgaatgggccaagaactctcctctgaacaaggctgaggtccatgaatcctacaagcacctgaagtccctgcagtcgaagctgtag

SEQ ID NO: 213264 - DNA, 1869 bp, synthetic construct
  misc_feature 1..1869: note = Description of Artificial Sequence: Synthetic coding sequence
  source 1..1869: mol_type = other DNA
atgattctgaatgatcccgatttccagcacgaggatctcaacttccttaccagatcccaaagatacgaggtcgccgtccgcaaatcagccatcatggtgaagaaaatgagggagttcgggatagcagatcctgacgagattatgtggttcaagaattttgtacacaggggacgacccgagcccttagacctgcacctgggaatgtttttgcctaccctgctgcaccaggcgacagctgagcagcaagagcggttcttcatgcctgcatggaatttggagattataggaacatacgctcaaaccgagatgggacatggaacccacctccgtggcttagaaactacagctacttacgaccctgaaacccaggaattcatccttaactcccccacagtaacatccattaaatggtggcccggagggcttggtaaaaccagcaaccatgcaattgtccttgcacagttgattacaaagggtaaatgctacggacttcacgctttcattgtgcctattagggaaatcggtacacacaagccgctcccagggatcacagttggcgatatcgggccaaaatttggatatgacgagattgataacggatacctgaagatggacaaccacagaatcccacgcgagaacatgctcatgaagtatgctcaagttaagccagacggcacctatgtgaaaccacttagcaacaagttaacatacggtactatggtcttcgtgaggagctttttggtgggagaagctgccagggctctgtcgaaggcttgcacaatagcaatccggtactcagccgtgaggcaccagtcagaaatcaaaccaggcgaaccagagccacaaattttggacttccagactcagcagtataaactgtttccactcctcgctacagcctacgcctttcaatttgtgggggcatacatgaaggagacatatcataggatcaacgagggaattggacagggggacctaagcgaactgcccgagctgcacgccttgacagccggacttaaggccttcaccagttggacggcaaacaccggcatagaagcatgtcggatggcttgcggcggtcatggttacagtcattgtagtgggctccctaatatttatgtaaatttcaccccctcatgcacttttgagggggagaacactgtgatgatgctgcagacagctcgatttctgatgaaatcctacgatcaagtgcacagcgggaagctcgtgtgcggaatggtatcctacctaaacgatttgccttcccaacggatccaaccacaacaagtggcggtgtggcccactatggtcgacatcaattctccggaaagtctcacagaggcgtataagctgcgggcagcacgcttggtcgaaattgctgccaagaacttgcagaaggaagtgattcatcgcaagtccaaggaagtggcatggaacctaacatccgtggacctcgtgcgcgcttcggaggcccattgccactacgttgtagtcaagttgtttagcgagaaacttttaaaaatacaggacaaagctattcaggccgtgctgcggtctctgtgcctgctatacagcctatatgggatctcccagaatgccggtgactttctgcaaggctccattatgacagagccacagattacacaggtgaaccagcgggttaaggagttgttaaccttgattcgtagcgatgcggtcgcattggtggacgcgttcgacttccaggatgtaaccctgggttctgtcctggggagatacgatgggaatgtctatgagaacctgtttgaatgggcaaagaacagccccctgaacaaagctgaggtccacgaatcctacaagcatctcaagtcactacagagtaagttatag

SEQ ID NO: 213265 - DNA, 1779 bp, synthetic construct
  misc_feature 1..1779: note = Description of Artificial Sequence: Synthetic coding sequence
  source 1..1779: mol_type = other DNA
atggccgctttcatccagaggactccggataactggcacctgagacccgatggcaatggtccgaggttcgttcatagaggacggccagaacccctagatctgcatttgggtatgtttcttcccaccctgctacaccaagctacagcagagcaacaagaaagattcttcatgcctgcgtggaatctggaaataatagggacctatgcccaaactgaaatgggccatggcacacacctccgaggactggagacgaccgccacttatgacccggagacccaggagttcatactgaactcacctactgtcaccagcatcaagtggtggccaggcggactgggaaaaacgtccaatcatgcaatcgtgttggcacaactgattactaaggggaagtgctatggacttcacgcgttcatagtacccattcgcgaaattggtacccataaacctctgccaggaatcacagtgggtgacattggtcccaagtttgggtacgacgaaatcgataacggctacttaaaaatggacaaccaccgcatccctagagagaatatgctaatgaaatatgcccaggtcaagccggatgggacttacgtaaagccgctctcaaataagctgacctacgggacaatggtgttcgtgaggtccttcctagtgggggaggcagccagggccttatccaaggcatgcacaatagccatccggtactcagccgttcgccatcaatctgagataaagcccggtgagccagagccccagatattggactttcaaacccagcagtataagctgttccctttgctggcaactgcttacgcttttcagtttgtgggtgcttacatgaaagagacttaccacaggataaatgaaggtattggtcaaggtgacttgagtgagctaccagaattgcacgcgctgacggctggactcaaagcttttactagttggaccgccaacactggcatcgaagcctgcagaatggcttgtggtggacacggctactcccattgttctggtttaccaaacatatacgttaactttacaccctcttgcacattcgaaggagagaatactgtgatgatgctgcagactgctagatttctgatgaaaagttatgatcaggtgcattccgggaagctggtgtgtggaatggtgagttatctcaacgaccttccctcacagcgcattcagccacaacaagtcgcagtatggccaaccatggtggatataaattcaccagagtcactgactgaggcgtataaacttagggctgcgagactggtagagattgctgccaagaatttgcagaaggaagtgatacatagaaagtctaaagaggtggcttggaacctcacttcagtggatcttgtaagggctagtgaagctcattgtcattacgttgtggtgaagctctttagcgaaaaactcctgaagattcaggacaaagctatccaggcagtactccgctctttgtgcttgctgtatagcctttatggaataagccaaaatgctggcgattttctgcagggaagtattatgacggaaccacagattactcaggtgaaccaacgtgtaaaggagctacttaccttgattcgctctgacgccgtggcattagtcgacgcctttgacttccaggacgtcaccctagggtccgtgctcgggagatacgacggaaatgtctacgaaaatctgttcgaatgggctaagaacagtccccttaataaggcggaggtgcacgagtcatataagcatctgaaaagtcttcagagcaaactgtag

SEQ ID NO: 213266 - DNA, 1983 bp, synthetic construct
  misc_feature 1..1983: note = Description of Artificial Sequence: Synthetic coding sequence
  source 1..1983: mol_type = other DNA
atgaacccggacctcagacgagagagagacagtgcaagctttaaccctgagctcctgactcacatcttggacgggagccctgagaagactcgtagaaggcgggaaatcgaaaacatgattttaaacgatccagattttcagcacgaagaccttaatttcctaactaggagtcaacggtatgaagtcgcagtacgtaagtcggccatcatggtgaaaaagatgcgggagtttggaatcgcagatccagatgagatcatgtggtttaagaatttcgtccatagaggcaggcctgagcccctggacctgcatctgggcatgttcttacctacgctgctgcaccaggctaccgcggagcagcaggagcgtttttttatgcccgcatggaatcttgagatcataggcacctacgctcagactgaaatgggccacggaactcatctacggggactggaaacaactgctacatatgaccccgagactcaggaattcatcttgaattctcctaccgtcacttccatcaagtggtggcctgggggacttgggaagacctcgaatcatgccatcgtcctggcgcaattgattacgaaaggtaaatgctacggactacacgcatttattgtcccaattcgggaaataggaacacacaaacctctccctggtattaccgttggggacatcggacccaaatttggatacgacgagatcgataacggctatctcaaaatggataaccacaggatccctcgggaaaacatgttgatgaaatacgcccaagtcaaacccgatgggacctacgtgaagcccttatccaacaagttgacgtatggaaccatggtgttcgtaagatcattcctagtgggagaagcagcaagggcgctgtccaaggcttgtactatcgctataaggtatagtgcagtacgccaccaaagtgagattaaacccggtgaacccgagcctcagatcctcgactttcagactcagcagtacaaactatttcctctgctcgctactgcctacgcatttcaatttgtaggcgcttacatgaaggagacttatcatagaattaacgaaggtatcggacagggcgacctcagcgagctgcccgaattacacgccctgaccgcaggactgaaggcctttacttcctggactgctaacaccggtatcgaggcctgtaggatggcatgcggtggccacggttattcccactgttctggtctgcccaatatctatgtgaattttactcccagttgcaccttcgaaggggaaaatacggttatgatgctgcagacagcacgatttctaatgaaatcctacgaccaggtgcacagcggaaaattagtgtgtgggatggtgtcctacctcaatgacctgccgagtcagaggatccagcctcagcaagttgctgtgtggcctacgatggttgatataaactcacctgagtcactgacagaagcctataaactcagagctgccaggctcgttgaaatcgccgcaaagaatttacagaaggaggtgatccacaggaaaagcaaggaggtagcctggaatctcaccagtgtggatctggtgcgcgcaagcgaagcacactgtcactacgtggtggtaaaattattctcagaaaagcttctcaaaatacaggataaagccatacaggccgtcttgagaagcctatgcctgctgtactcactgtacggtatctcacagaatgccggagacttcttgcagggctcaatcatgactgaaccacagattacacaggtgaatcagcgggttaaagaactactgactctgatccggtcagatgcagtggccctggttgacgcatttgacttccaggatgttaccctaggatcagtcctcgggcgatatgacggcaacgtgtatgaaaacctctttgagtgggccaaaaattctccactgaataaggccgaggtgcacgaatcttacaaacacctcaaatcgctccagagcaagctgtag

SEQ ID NO: 213267 - DNA, 2046 bp, synthetic construct
  misc_feature 1..2046: note = Description of Artificial Sequence: Synthetic coding sequence
  source 1..2046: mol_type = other DNA
atgggatctccagtacaccgggtcagcttgggcgacacctggtccagacagatgcacccagatatcgagagcgagcggtacatgcaaagttttgatgttgagagactgactaacattctggacggaggggctcagaataccgctctgaggcgaaaggtcgaatccatcatacattcataccccgaattcagttgtaaagacaactacttcatgacccagaacgaacgatacaaggctgccatgcgtcgggcttttcacattagacttattgcaagacgtctagggtggctcgaggacggcagggagttaggctacgcttaccgtgctctctcaggagatgtggccttaaacatccaccgcgtgtttgtgcgggctctcagatctctgggcagcgaagaacagattgccaagtgggatccactctgtaagaacattcagattatagccacctacgcccagactgaactggggcacggtacctatcttcaggggctagagactgaggccacatatgacgccgctacgcaggagttcgtgattcacagtccgaccctcaccgcgacaaaatggtggccaggcgaccttggtagaagtgccacccatgctctggtgcaggctcaactcatatgctcaggtgctcgcagagggatgcatgccttcatagttccgattcgctctctgcaggaccacacacctctccccggaatcatcattggagatataggccctaaaatggactttgaccagaccgacaatggctttttgcagctgaatcacgttagagtacccagagaaaatatgctcagcaggtttgctcaggtgctgccggatgggacctatgtgaaactgggaactgctcagtctaattatctgccgatggtggtggtacgtgtggaactcctgtctggggaaatcctacctatcttgcagaaggcgtgcgtgatcgccatgagatattctgtgattcgtcgacagagccgcctgcggcctagtgaccctgaagccaaggtgttagactaccaaactcagcaacaaaaactattcccacagctggccatttcctacgcttttcatttcttagctgtgtcactgctggaatttttccagcacagctacacggccattttaaatcaggatttttcctttctgccagaactgcacgcactgtcaaccgggatgaaagctatgatgtccgagttctgcacccagggggctgagatgtgtcgaagggcctgcggaggccatggttacagcaagctgagcggcttgccaagcttggtgacgaagctctcagcatcttgcacgtacgaaggcgaaaacactgtgctgtacctgcaggttgcacgctttctagtgaagtcctacctccaaacccaaatgagtccagggtctaccccacagcggagcctgtcaccttctgtggcatatctcacagctcccgatctggccaggtgtcccgctcaaagggctgctgactttctgtgccccgagctctacaccactgcctgggcgcatgtagccgttcgcctcattaaagatagtgtgcagcacctccagactctcactcagtccggcgcagaccagcacgaagcttggaaccagactactgtgatacatctccaggcagctaaagtacactgctattacgtcacggtgaaaggttttacggaagccttagaaaagctggaaaacgagcccgcaatccaacaggttctgaaacggctgtgtgatctgcatgcaattcatgggatcctgacaaactccggcgattttctccacgacgcatttctttcgggggctcaagtcgatatggcacgaactgcctatcttgacctgctgcgcctcattaggaaggacgccatcttactgacggacgcctttgactttactgatcagtgcctcaacagcgccctcggctgctatgacggtaacgtttacgagcgcctttttcaatgggcccagaaatcccccaccaacactcaagagaaccctgcatacgaggaatacatccgacccctgctacagtcatggaggtccaagctgtag

SEQ ID NO: 213268 - DNA, 516 bp, synthetic construct
  misc_feature 1..516: note = Description of Artificial Sequence: Synthetic coding sequence
  source 1..516: mol_type = other DNA
atgggcagtcccgtacaccgagtgtctctcggagacacctggtccaggcagatgcatccagatattgagtctgagaggtatatgcagtcttttgacgtcgagcggctcactaatatcctggacggcggtgctcagaatacggcgcttcgacgtaaagtggaaagcatcattcacagctacccagaattctcttgcaaggacaattactttatgacacaaaatgaaaggtacaaggcagctatgcgccgagcgttccacattcgcctcattgcaagacgactgggctggctggaggacgggagggagctgggctatgcttatcgcgctcttagcggagacgtggctttgaatatccaccgggtctttgtccgggcattaagatcattgggatcggaagaacagattgcaaagtgggaccctctgtgtaagaacatccagataattgcgacctacgctcaaactgagctgggacacgggacctatctccagggcttggaaactgaagccacctactag

SEQ ID NO: 213269 - DNA, 2103 bp, synthetic construct
  misc_feature 1..2103: note = Description of Artificial Sequence: Synthetic coding sequence
  source 1..2103: mol_type = other DNA
atggcaagcactgtggagggcggtgatacggccctgcttcctgagttcccacgagggcctttggatgcctatcgggcacgagcttcattctcctggaaggagctcgctcttttcaccgagggagaaggaatgctgaggttcaagaagaccatcttctcagctctggaaaatgatcccctgttcgctcgctctccaggggcagatctgtccctggaaaagtatagggagctgaactttctgaggtgcaaacgcatattcgagtatgattttctatctgtcgaggacatgtttaagtccccactgaaagtaccagccctgatccagtgtcttggaatgtacgattcctctctagctgccaagtacttattgcacagcctggtgtttggctctgccgtgtattccagcggatccgagagacatttgacctatattcaaaaaatctttagaatggagatcttcggctgcttcgccctaaccgagctatcacatggctcaaacaccaaggccattaggactactgctcactatgaccctgccactgaagagtttatcatccattcaccggacttcgaagccgcaaaattttgggttggcaatatgggtaagactgcaacacatgcagtggtcttcgcaaaattgtgcgtcccaggtgatcaatgccacgggcttcacccatttattgtgcagatacgcgatcctaaaacattgctgccaatgccgggtgttatggtcggagacatcggaaagaagcttggccaaaacggactcgacaatggcttcgccatgtttcacaaagttcgggtcccacgacagtccctcctgaacaggatgggagatgtcacgcccgagggaacctatgtgagccctttcaaagacgtacggcagaggtttggggcatccctgggctcactgtcaagcggaagagtgtccattgtttccctggccatcttgaatctcaaattggctgtggctatcgctctccggttctctgctacccgcaggcagttcggcccaacggaggaagaggaaattccagtgctggaataccccatgcagcaatggcggctactgccttaccttgctgcagtttacgcactcgaccatttctccaagagcctgttcctcgatttagtcgaactgcaacggggactggctagcggagataggtctgccaggcaagctgaattggggagggagatccatgctctcgcctccgcctccaagcccctggcatcatggaccacacagcagggcatccaggaatgtcgagaggcatgcggtggtcacggctacttggctatgaacaggttgggggtgctcagagatgacaatgaccctaactgcacttatgagggagataacaatatcttactccaacagacctctaactacctgctgggacttttggcacatcaggttcacgatggtgcttgtttcagatccccattgaagtcagtggatttcctcgatgcatatccaggaatactggatcagaagtttgaggtgtcctcagtggcagattgcctcgattccgcagtcgctttagccgcttacaagtggctggtgtgttatctgctgagggaaacctatcaaaaactgaatcaggagaaaaggagtgggtcctccgacttcgaagcccgaaataagtgccaggtgtcccacgggcgacctttggctctggcctttgtcgagctgactgtggtccagagatttcatgaacatgtccaccagcccagcgttccacccagtttgcgcgcagtgttggggagactctcggctctttatgctctctggtctctatctagacacgccgcactcctttacagaggaggttatttctcaggcgagcaggctggggaagtgctggaaagtgctgttcttgccttgtgttcccagctgaaagatgacgccgttgcattggtcgacgtgatcgcacctcccgacttcgttcttgattctcccattggcagagccgacggcgagctctacaagaatctgtggggagccgttctgcaggagtctaaggtgctcgagcgggctagctggtggcctgagttttctgtgaacaaacctgtgattggctcgctgaaaagtaagctgtag

SEQ ID NO: 213270 - DNA, 1875 bp, synthetic construct
  misc_feature 1..1875: note = Description of Artificial Sequence: Synthetic coding sequence
  source 1..1875: mol_type = other DNA
atggccagcacggttgaaggtggggataccgcgctgttaccagagttccctagggggccactggatgcataccgcgcaagagcctcattcagctggaaagaactggcacttttcactgagggagaaggaatgttgagattcaaaaagaccatcttttctgcactggaaaatgatcctttgtttgcaagatctccaggagccgatctttccctggagaaatacagagagctcaattttctccgctgcaagcgaattttcgaatacgattttctttccgtggaagacatgttcaaaagccctcttaaggtgcctgcccttatccagtgcctcggcatgtatgactcctctctggcagcgaagtatctgctccactcgctcgtgtttggaagtgctgtttacagtagcggctccgagaggcacttgacctacattcagaagatattccggatggaaatcttcggctgttttgcccttactgaactgtcgcacggaagcaataccaaagctattcggaccacagcccactatgatcccgctaccgaggaattcatcattcattcaccagatttcgaggccgcaaagttttgggtggggaacatgggaaaaactgccacacacgctgttgtgtttgctaagctctgtgtgcccggtgaccaatgccacgggcttcaccctttcatcgtgcagatccgcgatccaaagaccctcctgcctatgccaggcgtgatggtcggtgacatcggaaaaaaactaggacaaaacggactggataatgggttcgctatgtttcacaaagtgcgggttcctcgccagtcattgctgaatcgtatgggcgatgtaactccggagggaacatacgtctctccctttaaggatgttcgccagagatttggcgcttctcttggaagtttatcctctggacgagtaagtatagtgagcctggcgatcctcaacctgaagctggctgttgccatcgcactccggttctcagccacacggagacagttcggacccaccgaagaagaagagattccagtcctggagtatcccatgcagcagtggaggctcctgccctatctggcagccgtgtacgccctggatcacttttctaagagtctatttttggacctggtggagcttcagcggggtttagccagtggcgatcgttctgctcggcaagccgagctgggtcgagagatccacgccctggcctctgctagcaaacctttggcaagctggaccacgcaacagggaatacaagagtgtagggaagcctgcggcggacacgggtatttggctatgaaccgattaggcgtgttacgagatgataatgatcccaactgcacatatgaaggtgacaataatatcctgctacagcagacctcaaattatcttctgggacttctcgctcatcaggtacatgatggcgcttgcttcagatcacctttaaagtccgttgatttcttggatgcttaccccggaatcctggatcagaaattcgaggtcagctctgtcgctgattgcttagacagcgcagttgccctggcagcttataaatggttagtctgctacctgttacgggagacttatcaaaagctgaaccaagaaaaaaggtccgggtcttcagacttcgaagctagaaataagtgccaggttagtcacggcaggcctcttgccctggccttcgttgagttaactgtcgtccaacggttccacgaacatgttcaccaaccctccgtaccgcctagcctgcgagccgttctgggcaggctgtctgccctttacgccctgtggagtctatcccgccacgcagcccttttgtacagagctgaaaggaggtgtagctgccctggaaggcgggacagaagcagctag

SEQ ID NO: 213271 - DNA, 2103 bp, synthetic construct
  misc_feature 1..2103: note = Description of Artificial Sequence: Synthetic coding sequence
  source 1..2103: mol_type = other DNA
atggcttcaaccgtagagggcggtgataccgcactgctgcccgaatttcctagaggtcccctcgacgcatacagagccagggctagtttcagttggaaggaactggccttgttcacagagggtgagggaatgttgagattcaagaagacaattttctcggcactcgagaacgacccacttttcgctcggtcccctggggcagacctgagtctcgagaagtacagagaactcaatttcttgcgatgcaagcgcatcttcgagtacgactttctatctgtggaagatatgtttaaatcaccactgaaagtgccggctctgattcagtgtctcggcatgtacgacagcagtctcgccgctaagtatctgctgcacagccttgttttcggcagtgccgtgtactcctctgggtccgagagacacctgacctacatacaaaagatcttccgaatggaaatctttgggtgcttcgctctgaccgaactatcacacggcagcaatacaaaggctatccgcacaacagcccactacgaccctgccacagaggaatttatcatacattcccctgacttcgaggccgcaaagttctgggtgggcaacatgggtaagactgctacccatgcggtggtgttcgcaaaactgtgtgttccaggtgaccagtgccacggcctgcatccattcatcgtgcagatacgggatcctaagactctcctgccaatgccgggagtcatggtgggagacatcggtaaaaagttgggtcagaacggcctcgacaacggctttgctatgttccacaaagtgagagtgcctaggcagtccctactgaatcgcatgggtgatgtgactcctgagggcacctatgtgagcccattcaaagacgtcaggcagcgcttcggggcttcccttggtagcctaagtagtggtcgcgtaagtatcgtctctttggcaatcttaaacctcaaacttgcggttgccatcgcattgcgattttcggcaactcgcagacagtttggcccaaccgaggaggaggaaattcccgtgcttgagtacccgatgcagcaatggcgacttctgccctatctggccgctgtgtacgcgttagaccatttctctaaaagcctgtttctggacttggtggagctgcagcgaggcctggcaagtggggacagaagcgcacgccaggcggagctggggagagagatacacgcgctggcaagcgcaagcaagccactcgcttcttggaccacacaacaaggtatccaggagtgccgcgaggcctgtggagggcacggatatctggctatgaatcggctgggggtcttgcgggatgacaacgaccccaattgcacctacgagggggataataatattttgctgcagcagactagcaattacctccttggactgttggcccaccaggtccatgacggtgcatgctttcggtcacccttaaaatcagtggacttcctcgatgcatatccgggaattcttgaccagaaatttgaggtgagctcagtggccgattgtctggattccgccgtcgcgctggcggcttataagtggctggtgtgctacctgctgagagaaacctaccaaaagctgaaccaggaaaaaaggtcaggttcctcggacttcgaagctcgcaataagtgccaagtgagccacggcaggccactggctctggcctttgtggagctcacagtggtccaaagattccatgagcacgtgcaccagccctccgtaccacccagcttgcgggctgtgctgggcagactgtccgctctgtacgcactgtggtccctcagcagacacgctgcactcctgtaccgtggaggatacttcagcggtgagcaggctggggaagtgttggaaagtgccgtccttgctttatgttcccagcttaaagacgacgctgtggccctggtcgacgtgatcgcccctccggacttcgtgctggatagccctataggacgcgcagacggagaactgtataagaacctgtggggagccgtcctccaggaaagcaaggtgctggagcgcgcatcttggtggccggagttctctgtaaacaaacctgtgattggttcactcaagtcaaagctttag

SEQ ID NO: 213272 - DNA, 2175 bp, synthetic construct
  misc_feature 1..2175: note = Description of Artificial Sequence: Synthetic coding sequence
  source 1..2175: mol_type = other DNA
atgccccgtaattcgggggcaggctatggctgtccacacggtgacccatctatgctcgacagtcgggaaacgcctcaggagagtcgccaggacatgatcgtcaggacgacgcaggagaaacttaagaccagctccttgactgacagacagcccctcagtaaggaatccctaaatcatgcgctggaactgtctgtgccagagaaagtgaacaatgcccagtgggatgctcccgaagaggccctttggaccacacgggcagacggtagagtacggttgcggatcgacccgtcatgtcctcaactgccttacactgttcatcgcatgttctacgaggcacttgacaagtacggtgatcttatcgcactgggcttcaaaagacaggataagtgggagcatatcagctacagccagtactatctgctcgccaggagggccgcaaagggattcctgaaactcggtttgaagcaagctcacagcgtggccattctcggctttaactctcccgagtggtttttctccgcagtcggcacggtattcgcaggcggtattgtgacgggcatttataccacctccagtcccgaggcatgccagtatatcgcttatgattgctgcgccaacgtgatcatggtggatactcagaagcagctcgaaaaaatccttaaaatttggaaacagctcccacaccttaaggcagtggtgatatacaaggagcctcccccaaacaaaatggccaacgtctatactatggaggaattcatggaactgggcaatgaagtgcctgaggaagcgcttgacgccatcatagacacacagcagcctaatcagtgttgcgtgctcgtgtacacctccggcactacagggaaccccaaaggtgtgatgctgtcccaggataacatcacatggaccgccaggtatgggtcacaagcaggagacatccggccagcagaggttcagcaggaggtggttgtatcctatctgccactgagccacatcgctgctcagatctatgatctgtggactggcatacagtggggcgcacaggtttgctttgcagaacccgatgccctaaaaggctctttggtgaatactctgagggaggtggagcctaccagccatatgggtgtgccacgcgtgtgggagaagataatggagcgcattcaggaggtggccgcacaaagcgggtttatcaggagaaagatgctgttatgggccatgagcgttactctggaacagaacttaacttgccccggttccgatctcaagccctttactacaaggctggccgactatctagtactggccaaagttagacaggccctggggttcgctaaatgccaaaagaacttctacggggcagcacctatgatggccgaaacccagcacttcttccttggcctgaatatcagactgtacgcaggctatggcttgagcgagacctccggacctcattttatgtctagtccctacaactatagactgtatagctcaggcaagctagtcccaggctgtagagtgaaacttgtgaatcaagacgcagagggaatcggggagatttgtctgtggggtcggacaatttttatggggtacctgaacatggaggataagacgtgcgaggccattgacgaagaaggatggttacacacaggagacgcaggaaggctggacgctgacggctttctgtatattaccgggagactaaaggaacttatcatcaccgcaggtggtgagaacgtcccacctgtgcccatagaggaggcagtgaaaatggagctgccaatcatctcaaatgcaatgctgatcggtgaccagagaaagtttttatccatgctcctcacactcaaatgcactctggatccagatactagcgaccagaccgacaatctgaccgagcaagcgatggagttttgtcagagagttggcagtcgcgcaactactgtttcagaaatcatcgaaaaaaaggatgaggccgtgtaccaggctatagaagagggaatcagaagagtgaacatgaacgcagccgctcgcccataccatatccagaaatgggcgattctggaaagggatttctctatttccggaggggaactgggccctacaatgaagctgaagcgactgacagtgctggaaaaatataaaggtataatagacagcttttatcaagaacagaagatgtag

SEQ ID NO: 213273 - DNA, 1449 bp, synthetic construct
  misc_feature 1..1449: note = Description of Artificial Sequence: Synthetic coding sequence
  source 1..1449: mol_type = other DNA
atggcgaatgtgtatacaatggaggaatttatggaattgggtaacgaggtgcctgaggaagccctagatgcgatcattgacactcagcagcctaatcagtgctgtgtcttggtttatactagtggcactactggcaatccaaaaggagtcatgctctcccaggataacattacatggacagccaggtacggaagccaggcaggagacatccggccagctgaagtgcagcaggaagtcgtagtgtcttatttacctctctcccatattgctgcacaaatctatgatctttggacgggcatccagtggggtgcgcaagtgtgctttgcagaacctgacgctttgaaaggctcactggttaacacattaagggaggttgagcccaccagtcacatgggagtgccgcgagtctgggagaagatcatggagagaatccaggaggtggctgcccagagcggcttcatccggagaaagatgctgctgtgggcaatgagcgtgacactggagcagaacctgacctgcccaggctcagacttgaagccattcacaactcgactcgccgactaccttgttctggcaaaagtacggcaggctcttggcttcgctaaatgtcagaagaacttctacggggctgcccctatgatggctgagacacagcacttctttctaggactgaacatcagactttatgctgggtacggcctgtctgagacaagcggaccacatttcatgtcctcaccatataattaccgtctgtacagttccgggaagttagtgccaggttgccgggtgaagctggtgaatcaggacgctgaggggataggagaaatctgtctttgggggagaactatcttcatgggttacttgaacatggaggacaagacttgtgaagccattgatgaagagggctggctgcatactggtgatgctggtcgtctcgatgctgatggattcttatatattaccgggaggctgaaggagcttattattaccgccggaggcgagaacgtgcctcccgttcccatagaggaagctgtcaaaatggaactgcccattatctccaatgcaatgctgatcggcgaccagcgaaaatttctttccatgcttctgactctcaaatgtaccctcgatcccgacactagcgaccagacggataatctcactgaacaggccatggagttctgtcaaagagtcggatccagggctacgacagtttcagagattatcgaaaaaaaggacgaagctgtgtatcaggctatcgaagaaggaatccgcagagtgaatatgaacgctgcagcgaggccgtaccacattcaaaaatgggccatcctagagcgtgacttctctatctcaggcggtgagttaggacctacaatgaagctcaagcgactcaccgtgctcgagaaatacaaaggaatcattgacagcttctaccaggagcagaagatgtag

SEQ ID NO: 213274 - DNA, 2001 bp, synthetic construct
  misc_feature 1..2001: note = Description of Artificial Sequence: Synthetic coding sequence
  source 1..2001: mol_type = other DNA
atgaccgggaccccgaaaacacaagaaggcgctaaggatctggaagtcgatatgaacaaaacggaggtcacacctcgcctgtggactacctgcagggatggggaagtgcttctgcgtctatctaagcatggacctggccacgaaactcccatgacaataccggaattttttcgggagtcagtgaaccgcttcgggacttatcccgcattggcaagtaaaaacgggaagaaatgggaaatcctgaatttcaaccagtattatgaggcatgccggaaggccgcaaagtcattaatcaagctgggactggagagattccatggcgtcggcattcttgggtttaatagcgcagaatggtttatcaccgccgtaggggcaatcttggctggcggactgtgcgttgggatttacgccaccaactctgcggaggtatgtcagtacgtgatcacgcatgctaaagtgaacatcttgctcgtggaaaacgatcaacagttgcagaaaatccttagcataccccagtcttcactggaacctcttaaagctattattcagtacaggctacctatgaagaaaaacaacaacctgtatagctgggatgatttcatggagctcggacgcagcattcccgatacgcagttagagcaagtaatagaaagccagaaagctaaccagtgtgctgtcttaatttatacatcagggactaccggcattccaaaaggtgttatgctgtcgcacgataatattacatggatagcaggagcagtcacaaaagacttcaaactcacggacaagcacgaaacagttgtaagctatctgcctctttctcatatagcagcccaaatgatggacatttgggttcctatcaagattggagccctgacttactttgcccaggcagacgccctgaaaggcacgttggtgtcgaccttgaaggaggttaagccgactgtgtttatcggggtcccgcagatttgggagaagatccacgagatggtgaaaaagaatagcgccaagagcatgggactcaagaagaaggcttttgtttgggctcgcaatattggctttaaagtaaactctaagaaaatgctcgggaagtataatacccctgtgagctataggatggccaaaacactggtgttcagtaaagtgaaaacttctttgggactggaccactgtcattcctttatttccggcactgcccctcttaatcaggaaacagcggaattcttcctgtccttggatatacccattggcgagctctatggactgtccgaatccagcgggccacatacaatctccaatcagaacaactataggcttctgtcttgtgggaagatcttgaccggttgtaagaacatgttgttccagcagaataaggacggcataggcgaaatctgcctctggggcagacacatttttatgggatatttggagtccgaaacagagacgacagaggctattgacgatgagggatggctgcattccggcgacctcggccaactggacggattgggattcctgtatgtaacggggcatataaaggagattctcattacggcgggtggggaaaacgtgccccctatcccggtcgagaccttggtgaagaagaaaattccaataatctccaatgccatgctggtcggggacaagctgaagtttctgagcatgctactcacgctgaaatgcgagatgaatcagatgagcggcgagcccctggacaagcttaatttcgaagcaattaatttttgtagaggacttggatctcaggctagcacagtgaccgaaatcgttaaacagcaggatccacttgtttataaggcaatccagcaggggattaacgcagtgaaccaggaggccatgaataacgcacaaagaattgaaaagtgggtcatactggaaaaagatttttccatctacggaggcgaactcggtcctatgatgaaacttaagagacacttcgtcgcgcagaagtataagaagcaaatagaccatatgtaccattag

SEQ ID NO: 213275 - DNA, 1848 bp, synthetic construct
  misc_feature 1..1848: note = Description of Artificial Sequence: Synthetic coding sequence
  source 1..1848: mol_type = other DNA
atggccgtttacgttggcatgttgaggctgggacgcttgtgcgccggatcgtccggagtgcttggcgcacgggctgctctgtcacgcagttggcaggaggcacgcttgcagggggtcagatttctgagtagcagggaggtggataggatggtgagcactccaatcggcggtctctcgtacgtgcaggggtgcactaagaagcacctgaatagcaagaccgtgggacagtgtctggaaaccaccgcgcagagggtcccggagagagaggcactggtggtactgcatgaggatgtgcgtctgacattcgctcaattaaaagaagaggtggacaaagcggcatcaggcctgctctccatcggcctgtgtaagggtgatcgcctgggaatgtggggaccgaatagctacgcctgggtgcttatgcagctggctaccgcacaggcaggaatcattctcgtgagcgttaatcccgcatatcaagcaatggagctggaatatgtgctgaagaaagttggctgtaaggccctggtgttcccaaagcagttcaagacacagcagtattacaatgtgctgaaacaaatctgtccagaggtggagaacgcccagcccggagctctgaagagccagaggttgcccgaccttacaacggtgataagcgtcgacgccccactcccgggaacgctactgctggacgaggtggtcgccgcaggcagcacacgtcagcatctcgaccaactgcagtataatcagcagtttttgtcatgtcatgatcccattaacatccagtttacttcagggaccaccggttcccccaagggcgctacactctcacactataatatcgtcaataattctaacattttgggagagcgcctgaaacttcatgaaaaaacacccgagcagttgagaatgatcctgccaaatcccctgtaccattgcctcgggtctgtggcaggtaccatgatgtgtttaatgtatggggcaactcttattctcgccagtccgatttttaacggcaagaaagcactcgaggctatatctagagaacggggtacttttctgtacggcactccaactatgttcgtcgatatcctgaaccaaccagacttcagttcttacgatatctccaccatgtgcggcggtgtgattgccggatccccagctcctccagagctcattcgggcaatcatcaataagatcaatatgaaggacttggtagttgcttacggtaccacggaaaactctcctgtcacttttgcccattttcccgaggataccgtagaacagaaggcggaatccgtggggagaattatgccacacaccgaagctcgtattatgaacatggaggctggcaccctggccaagttaaacacacctggagagctctgtattcggggttattgcgtaatgctgggctattggggtgagccccagaaaacagaagaggctgtcgatcaggacaagtggtactggaccggcgacgtggccactatgaatgagcagggcttttgtaagatcgtagggcgatcaaaggatatgatcattcgcggaggcgagaacatctatccggctgaattagaagatttctttcacacccatcccaaggttcaggaggtacaggtggtgggcgtgaaagatgaccgcatgggagaggaaatttgcgcatgcatcaggttgaaagacggggaagaaacaaccgtggaggagatcaaggccttctgtaaaggaaaaattagtcacttcaaaattccaaaatacatcgtttttgttacgaattacccactgacaatctccggaaaaatccaaaagtttaagctgcgcgaacaaatggaacggcaccttaatctgtag

SEQ ID NO: 213276 - DNA, 1923 bp, synthetic construct
  misc_feature 1..1923: note = Description of Artificial Sequence: Synthetic coding sequence
  source 1..1923: mol_type = other DNA
atggcagtctacgtcgggatgctgcgactcgggaggctctgcgcgggtagctccggtgtcctgggggcacgggcagccctgtctagaagctggcaagaagcgagattacaaggagttcggttcctgagtgcccgaggcggaatggaagcgggtcgccaaaggatttccgtgccgtctagttttaccgcctctgcggctgctcattcccgagaggtagacagaatggtgagtacacctattgggggattatcctatgtgcaagggtgcacgaagaagcaccttaacagtaagaccgtgggccagtgcctggaaacaaccgcacagcgggtgccggaacgggaggccctcgtcgtgctacacgaggatgttcggctgaccttcgcccagctgaaggaggaagttgacaaagccgcttccggtcttctgtctatagggttgtgtaagggcgataggctgggcatgtggggacctaactcctatgcctgggttcttatgcaattggcgacagctcaggccggtattattctcgtgtctgtgaatcccgcttatcaggcaatggaactggagtacgtccttaagaaggttggctgtaaggctctagtgtttcccaagcaatttaagacacaacagtactacaatgtgctgaagcagatctgtcctgaagttgaaaatgcgcagcccggtgcccttaaaagtcagcggctccccgacctcactaccgttatctcggtggatgcaccactcccaggaactctactgctcgacgaagttgtcgccgcagggagcacacgccagcacctggaccagctgcagtataaccaacagtttttatcttgtcacgatcccataaacatacagttcacttcaggtacgacaggaagccccaaaggagccactttgtcccattacaatattgtaaataattctaatatcctgggggaaagacttaaactacacgagaagacacctgagcagctgaggatgatcttaccaaaccccctgtaccattgtctagggagcgtcgcgggaaccatgatgtgcttaatgtatggggcaaccctcatcctggcttcgcctattttcaatgggaagaaagctctggaagccattagccgagaacgtggcactttcctgtatggaacccccacaatgttcgtggacatccttaatcaacctgacttctcatcatacgacatttcaactatgtgtggcggagtcatcgctggatctcccgctcctcctgagcttattcgcgcaatcatcaataaaatcaatatgaaggatctggtggtcgcatacggaacaactgagaactcgcctgttacctttgcccacttccccgaagatacagtggaacaaaaggctgagtctgtgggacgcatcatgcctcatactgaagccaggatcatgaatatggaggcaggtacgctagcaaagctgaacaccccaggcgagctgtgtattcgtgggtattgtgttatgctgggatattggggggagcctcagaagaccgaagaggcggtagaccaggataagtggtactggactggtgatgtagctaccatgaacgagcagggtttttgcaaaatagttggtagaagcaaagacatgattatccggggtggagagaacatctacccagccgaactggaggacttttttcacacccaccctaaggtccaggaggttcaggtagttggagtgaaggacgatcgcatgggagaagaaatttgtgcttgcatacggctgaaagatggggaggagacaacagtggaggagatcaaagcattctgcaagggcaaaattagccatttcaaaattcccaaatatattgtttttgttactaattatccactaaccatcagcgggaaaattcagaaattcaaactgcgggagcagatggaacgtcacctcaacttgtag

SEQ ID NO: 213277 - DNA, 1809 bp, synthetic construct
  misc_feature 1..1809: note = Description of Artificial Sequence: Synthetic coding sequence
  source 1..1809: mol_type = other DNA
atggcagtgtacgtgggcatgctgcgcttgggtaggctgtgcgccggaagctccggcgtcctcggggcacgtgctgccctcagccggagttggcaggaggcaaggctgcagggcgtgaggtttctatcttcccgagaggtggatcgaatggtttcaactccaatagggggtctttcctatgtccagggatgtaccaaaaagcatttgaacagtaagaccgtgggacaatgcctagaaaccaccgcacagagggtgccggagcgcgaggctctggtggttctgcacgaggacgtgcgtcttacctttgcacagctcaaagaggaagtggataaagccgcttctgggttgctgtctataggattgtgcaaaggcgaccgactcgggatgtgggggcctaactcttacgcctgggtgctcatgcagctggccacagcgcaggcaatggaactggagtacgtgcttaaaaaggtggggtgcaaagccctggtctttcctaaacaatttaaaactcaacaatattataacgtgctgaagcagatttgtcccgaggtcgagaacgcccagcctggagctctgaagtcacagcgattaccggaccttactaccgtgatttccgtggatgcacccttaccgggaacgctgttactggatgaagttgtcgcagcgggatcaactcgtcagcatcttgatcagctgcagtacaatcaacagttccttagctgccacgaccccatcaatatccagttcacctctggcactactggttcgcctaagggcgctacactgtctcactacaacattgtcaataactctaatatacttggcgagaggctgaagttacacgagaaaacacctgagcagttacggatgattctgcccaatccactctaccattgtttaggatcggtggccggtactatgatgtgtttaatgtatggtgccaccctgattctggccagtcccatcttcaacggcaaaaaagccctggaagcaatctccagagagcgcggtaccttcctctacggcacacccaccatgttcgtggacatcctgaaccaaccagacttctcttcttatgacatcagtactatgtgtgggggagttatcgctggaagccccgctcctccggagctgatccgggctatcattaacaagattaatatgaaagacctagtcgtagcttacgggacgactgagaattcgcctgtgacgtttgcacacttccccgaagacaccgtggaacagaaggccgaaagcgtcgggcgtattatgccccacaccgaggccaggatcatgaacatggaggccggaacactggccaaacttaacactccaggcgaattatgtatacgcggatactgtgtgatgctgggttactggggggaaccccagaaaaccgaagaagccgtggaccaggataaatggtattggacgggtgacgttgccactatgaatgaacaggggttttgcaaaattgttggaaggtctaaagatatgattattcgcggtggcgaaaacatctatcctgccgaactggaggactttttccacacccacccgaaggttcaggaagtccaggtggttggggtaaaagacgatagaatgggagaggagatctgtgcctgcataagattgaaagacggggaagaaacgactgtagaagagataaaagcgttctgtaaagggaaaattagccattttaagatccctaaatacatagtgttcgttacaaattacccactcactatctctggaaaaattcaaaaatttaagctgcgggaacaaatggagagacacctgaacctgtag

SEQ ID NO: 213278 - DNA, 1719 bp, synthetic construct
  misc_feature 1..1719: note = Description of Artificial Sequence: Synthetic coding sequence
  source 1..1719: mol_type = other DNA
atggccgtctatgttgggatgctccgactgggcagactctgtgccggttccagcggcgtccttggggctcgcgctgctcttagcaggtcctggcaagaggccaggctccaaggagtgaggttcctctctagccgggaagtcgaccggatggtgtctactcccatcggcggattgtcctacgttcaggggtgcactaaaaagcatttgaacagcaagaccgttggacagtgcctggagaccacggctcagcgggtgcctgagagagaggccctggtcgttctgcacgaagatgtccggcttacttttgcacagctgaaggaggaagtcagcgtgaatcctgcctatcaggccatggagctggagtacgttttaaagaaggtgggatgcaaagcgctcgtgtttcctaagcagttcaagacccaacagtactataacgtgttaaagcaaatctgtcccgaggtggagaacgcacagcccggtgccctcaaaagccagaggttgccagatcttaccaccgtgatctccgtggacgcccctctgccaggaaccttgctgttagacgaggttgttgctgctggatcaacgcgccagcatcttgaccagttgcagtataatcaacagtttttgtcatgccacgaccctataaatatccagtttactagtggtacaacgggcagtccaaaaggagcaaccctttctcattacaacattgtgaacaatagcaatatcttgggcgagagactgaaacttcacgagaaaacacccgaacaactgaggatgatattacccaacccgttgtaccactgtttgggctcagtggcagggactatgatgtgtctgatgtatggcgcaactctcattctggcatccccaatcttcaatggaaagaaggccctggaggcaatctcgagggaacggggaacatttttatacggaactccaactatgttcgtagacattcttaaccaacccgacttctcttcgtacgatatctcaacaatgtgcggaggcgtgatcgctggatcgcccgctccccctgagttgattcgagctattataaataaaatcaacatgaaagacctcgttgttgcttatggtacaactgaaaattccccagtgacattcgcccacttcccagaagatactgtagaacagaaagcagaatctgtcgggcgaatcatgcctcatacagaagccaggatcatgaatatggaagccggaacactggcaaaactgaatacgcccggagagctgtgcattagaggctattgtgtgatgttaggctactggggagagcctcagaagactgaggaggccgtagatcaagataaatggtattggaccggagacgttgccaccatgaatgaacaggggttttgcaaaatagtcgggagaagcaaagatatgattattcggggaggtgaaaatatctaccccgctgagctcgaggatttttttcacacccatcctaaggtccaagaggttcaagtcgtgggtgtcaaggacgatcggatgggagaggagatctgtgcctgcatacggctcaaagacggggaagaaacaacggtagaagagatcaaagccttttgcaagggcaaaatctctcacttcaagattccgaaatatatcgtgttcgtcaccaactaccccctgactatctcaggcaagatccagaagttcaaactgcgagagcagatggagcggcatttgaacttgtag

SEQ ID NO: 213279 - DNA, 1368 bp, synthetic construct
  misc_feature 1..1368: note = Description of Artificial Sequence: Synthetic coding sequence
  source 1..1368: mol_type = other DNA
atggagctggaatatgttctgaagaaagtgggctgcaaggcacttgtctttcctaagcagttcaaaactcagcagtattataatgtcctgaaacagatctgtcctgaggtggagaatgcccagcctggggctcttaaaagtcagagattgccggatctgactacagtcatctcagtggatgcacccctgcccggaacactgctgttagacgaagtcgtggccgcaggctccactcgccagcacctggaccagctccagtacaaccaacagttcctctcatgccacgacccgatcaacattcaatttacgtctggaaccacaggctctcccaaaggtgccacactgtcacattataacattgttaacaactcaaatattctgggtgagcgactgaagttacatgaaaagactcctgaacagctgcggatgattctgccaaacccactgtaccattgtctgggaagtgtcgcaggcacaatgatgtgcctcatgtatggagcgacactcatcctcgcctcaccgatatttaatgggaaaaaggccctggaagccatctccagggaaaggggaacctttctgtatggaactcccacaatgttcgtggatatcctgaaccagcccgacttttcctcctacgatatatcgactatgtgcgggggagtgattgctggcagccctgcgcctccagagctgataagagctatcattaacaaaatcaatatgaaagatctggttgttgcctacgggactaccgaaaatagccccgttacttttgctcattttcctgaggacacggtggagcagaaagccgaaagtgtgggacgcataatgccacacacggaggcaaggataatgaacatggaagcaggtaccctggccaagctgaacacacctggtgagctatgtatccgtggatactgcgttatgctgggatactggggggagccacagaaaacggaagaggccgttgatcaggacaagtggtactggacaggtgatgtggccaccatgaatgaacagggcttttgcaaaattgtcggcaggagcaaggatatgattatcaggggcggtgagaacatctatccagcggagctggaggattttttccacacgcacccaaaagtccaggaggttcaagtggttggggtgaaggacgatagaatgggggaggaaatttgtgcatgcatcaggctcaaggacggagaagaaacaacggttgaggagattaaagcattctgcaaggggaagatcagccactttaaaatccctaaatacatcgtttttgtgactaattatcccctcactatcagtggtaagatccagaagttcaagctccgggaacaaatggagaggcatctcaacctgtag

SEQ ID NO: 213280 - DNA, 1731 bp, synthetic construct
  misc_feature 1..1731: note = Description of Artificial Sequence: Synthetic coding sequence
  source 1..1731: mol_type = other DNA
atgcttcctcatgtagtgttgaccttccggagactggggtgcgcccttgcaagctgccggctggccccagctagacaccggggtagcggcctgctgcataccgccccagtcgctcgtagtgatcgatctgccccagtatttaccagggctctggccttcggagataggatcgcccttgtggatcagcacggcaggcacacatatcgcgaattatacagtagaagcctgagactttcccaggaaatttgccgactttgcggctgcgttggcggagatctgagagaggagcgagtttcatttctgtgcgccaatgacgccagctacgtcgtggcacagtgggctagttggatgtcaggcggagtagccgtgcccctgtatcggaaacacccagccgcacaactcgaatacgtgatctgcgactctcagtcttccgtggttctagcaagccaagagtacctggagttactgagtccagtggtgcgtaaactcggagtccccctcctgccccttacacctgccatttatactggtgccgttgaggagcctgctgaagtacctgtgcccgaacagggatggcgaaacaagggggctatgatcatctataccagtgggactacaggacgcccaaaaggggtcctgtctactcatcagaatatccgggcagttgtgacgggactcgttcacaaatgggcctggacaaaagatgacgtgattttacatgtcctgccacttcatcacgtgcatggggtagttaacgcactgctgtgtcccttatgggtgggggctacttgcgtgatgatgcccgaattttccccccagcaggtgtgggagaaatttctctcaagcgagactcccagaattaatgtgttcatggctgtccctaccatctatacaaagctgatggagtactatgacaggcacttcacacagcctcatgctcaggactttctccgcgctgtgtgtgaggagaagatccgactaatggtgagtggatccgcggcactgcctctgcctgttctcgaaaagtggaaaaacattacaggccacactctgctcgagcggtatggcatgacagagatcggaatggcactaagtgggccactgacaacagcggtccggctcccaggttctgtcggaacgccactccccggtgtgcaggttcgaatcgtcagtgagaaccctcagcgggaagcatgttcctatactattcacgccgaaggtgacgagagaggaactaaagttaccccagggtttgaggagaaagaaggcgaattgctggtgaggggaccatctgtgtttagggagtactggaataaacctgaagagacgaagagcgcttttacgctggatggctggttcaaaaccggggacaccgtcgtgttcaaggacggacagtattggatcagaggacggacctctgttgatatcataaagaccgggggatacaaggtgtccgcgctagaggtggaatggcaccttcttgcccatcccagcataacagatgtcgcagtcattggcgtcccagatatgacctggggccagcgggtcacagctgtagtgaccctgcgggagggccacagcctgtcccacagagagctcaaagaatgggcccgaaacgttttagccccttatgccgtccctagcgagttagtcttggtagaggaaatacctcgcaaccagatgggaaagatagataagaaggctctgatccgtcactttcacccttcctag

SEQ ID NO: 213281 - DNA, 1731 bp, synthetic construct
  misc_feature 1..1731: note = Description of Artificial Sequence: Synthetic coding sequence
  source 1..1731: mol_type = other DNA
atgctgccccacgtcgtgctgacttttcgccgactggggtgcgcactcgcttcatgccggttggccccagctcgacatcgaggttcaggcctcctgcatacagcaccagtggcgaggagcgaccggtctgccccagtgttcactcgggctctagcattcggcgataggatcgctctggtggatcaacacggcaggcacacctatcgcgaactgtatagcagatccctgcgtctcagccaagaaatttgtcggctgtgtggctgcgtgggcggagacctccgggaggagcgggtgagcttcctgtgtgctaatgacgcatcctatgtggtggcccagtgggcctcctggatgtccggcggtgtagccgttccattatatagaaagcatccggcagcccagcttgaatatgtcatctgcgattctcagagcagcgtagtgttagctagccaggagtacctcgagctgctgtcaccagtagttaggaaactcggtgtgccacttctgcccttgacccccgcaatttacacgggggcagtcgaggaaccagcagaggtccccgtgcccgagcagggttggaggaacaagggcgctatgattatctatacttccggaaccacgggacgacctaagggtgtgctgtccactcaccagaacattcgagctgtcgtaacagggttggtgcacaaatgggcctggacgaaggacgacgtgattcttcacgttctaccgctccaccacgttcacggagttgtcaacgctttgctttgcccactgtgggttggcgcaacctgcgtaatgatgccggaattcagccctcagcaagtctgggaaaaatttttaagctccgagaccccaagaatcaatgtatttatggcagtccccactatctacaccaagctgatggagtactatgataggcactttacccagccacatgcccaggatttcctgagagcagtgtgcgaggagaagatcaggttgatggtgagcggctccgcagcccttccactacccgtcctggaaaaatggaaaaacatcacagggcacacccttttagagcgctatggcatgactgagatcggcatggccctctccggccctctcaccaccgccgtgagacttcccggatcagtggggaccccactgcccggtgtgcaagtaaggatagtgagtgaaaacccccagagggaggcatgttcgtacactatccatgcagaaggcgatgaacgtggaactaaggtgactccaggtttcgaagagaaggaaggagagctgttagtcagaggtccttccgtgtttcgagagtattggaacaaacccgaagaaaccaagtccgcattcactctagatggctggttcaaaacgggggacaccgttgtgtttaaagacggccaatattggatccggggaagaacatctgtggatattattaagaccgggggatataaagtgtcagctctggaggtagagtggcacctgctggcccatccttcaatcaccgatgtagccgtgatcggggtgccagatatgacatggggacagagagtgacagccgtcgtaaccctccgggaaggacacagcctgagccaccgagagctgaaggaatgggctcggaacgtactggccccttatgctgtcccttctgagctagtcctggtggaagaaatccccaggaatcaaatgggcaagatcgacaaaaaagccctcatccgccacttccatcccagttag

SEQ ID NO: 213282 - DNA, 714 bp, synthetic construct
  misc_feature 1..714: note = Description of Artificial Sequence: Synthetic coding sequence
  source 1..714: mol_type = other DNA
atgctgccccacgtggtccttacctttcgtcgcctaggctgtgctttggcgtcttgtcgcctggcgcctgcccgacaccgtggcagcggtttgttacacaccgcgcctgtagcgagatctgaccgatccgcacctgtattcacaagagcgctggcctttggcgatcgtatcgcattggtggatcagcacggcaggcacacttatcgcgaactctatagccggtccctccgactgagccaggagatatgcaggctctgtggctgcgtagggggtgacctgagagaggaacgcgtgtcctttctctgcgcaaatgatgcgtcctatgtagtggcccagtgggcctcgtggatgtcaggaggagtcgctgtcccactgtaccggaagcatccagcggcacagctggagtacgttatttgtgattctcagtcatcagtcgtccttgcaagtcaggaatatttggagctgctttcccctgtcgtgcggaagctgggagtgccccttctgcctctgaccccagccatctacaccggtgccgtcgaggagcctgccgaagtgcctgtccccgagcaaggctggcgcaataagggtgccatgattatatatacatccggcacaacaggacgacccaaaggcgtactcagtacccatcagaacattagagccgtggtcactgggcttgtgcacaagtgggcttggacaaaggacgacgtgtag

SEQ ID NO: 213283 - DNA, 2097 bp, synthetic construct
  misc_feature 1..2097: note = Description of Artificial Sequence: Synthetic coding sequence
  source 1..2097: mol_type = other DNA
atgcaggcccacgagttgtttagatattttaggatgcctgagcttgttgactttcggcaatatgtaaggaccctcccaaccaacaccctgatgggatttggggcttttgccgcactgactactttctggtacgctaccagacctaagccgcttaaaccaccttgtgatttatcgatgcaatccgtcgaagtggccggaagcggcggagccagacgcagcgccctactagactcagacgagccccttgtgtatttctatgatgatgtcaccacgctgtacgagggctttcagcggggaattcaagtgtcaaataatgggccatgcctcggatccagaaagccggaccagccctatgagtggttatcttacaagcaggtcgcagagcttagtgagtgcatcggcagcgccctgatccaaaaggggttcaagactgcccctgaccaatttattgggatctttgcccagaaccggcctgaatgggtgatcattgaacaggggtgcttcgcttactctatggtcattgtgcccctctatgacactctgggcaatgaggccattacctatatcgtgaataaagctgagctgtccctagtcttcgttgacaagccagaaaaggccaagcttcttttagaaggcgttgaaaataagctgattcccggactcaaaatcatcgttgttatggatgcctacggtagtgagctcgtggaacgcggtcagcgatgcggcgttgaagtcacctcaatgaaagccatggaagatctaggacgtgccaaccgcagaaagcccaaacctcctgcaccagaggatctggcagtgatatgttttacaagcggtacaaccgggaatccaaagggtgctatggtgacccatagaaatattgtgtctgactgtagcgcctttgtgaaagccaccgaaaacactgtgaatccttgtccagacgataccctgatcagtttcctaccacttgcacacatgtttgagcgcgttgtggaatgcgtgatgctttgtcacggcgcaaagattggattcttccagggagatatacgcctgttgatggatgaccttaaggtgttgcagcctaccgtgttccctgttgtgcctagactcctcaacagaatgttcgacaggatatttggacaggctaataccacactgaagcgatggctgctggacttcgcatcgaaaagaaaagaggcagagttaagatcgggaataattcgcaacaattcattgtgggaccgcctgatatttcataaggtacaaagctcactcgggggaagagtgcgcctgatggtcacaggagcagcaccggtgagtgctacggtactgactttccttagagcagcccttggttgtcaattctatgagggctacggacagactgagtgcactgccggatgctgcttaacgatgccgggagactggacagcagggcacgttggagcccctatgccttgcaacttaattaagttagtggacgtagaggaaatgaattatatggccgcagagggcgaaggcgaggtgtgtgtcaagggcccaaacgtgttccaaggttacctgaaagatcccgctaagaccgctgaagcactagacaaagatggatggctgcacacaggggacatcggaaagtggttgcctaatggcacgcttaaaattatagatcgaaaaaagcacatcttcaagctagcgcagggggaatatatcgctccggagaaaatcgaaaacatctacatgagatcagagcctgttgcgcaagtctttgtgcacggagagagtctccaagcatttctaatcgccattgtcgtgcccgatgtggaaactctgtgctcatgggcccagaaacgcggtttcgagggtagtttcgaggaattatgccgaaataaggacgtaaagaaggccattttagaggacatggtgagattaggcaaagatagcggcctcaagccttttgagcaggttaaagggatcactctacaccccgagttgtttagtatagataacggactgttgactcccacaatgaaggccaaacggcctgagttgcgcaactatttccgaagtcagatcgatgatttgtactccaccatcaaagtctag

SEQ ID NO: 213284 - DNA, 1584 bp, synthetic construct
  misc_feature 1..1584: note = Description of Artificial Sequence: Synthetic coding sequence
  source 1..1584: mol_type = other DNA
atggtcatagtgccactgtacgatacgctggggaacgaggcaatcacatatatcgtgaacaaagctgagttaagcttagtgtttgtggacaagcccgagaaggctaagctcttacttgagggggtggagaataagctcataccaggcctaaaaatcatcgtagtgatggacgcctacggctcggaattagtggaacggggacaaaggtgtggggtagaggtgaccagtatgaaggccatggaagacttgggaagagcaaacagacggaagcccaagccccctgcgcctgaggatttagcagtgatttgcttcacatctggaacaacaggaaaccctaagggagcaatggtaacgcatagaaacatcgtgtccgattgcagtgccttcgtgaaggctaccgagaatacagttaatccatgtcccgatgacaccctaatctcctttctccctttggcgcacatgtttgagagagtggtcgaatgcgtgatgctttgccatggagccaaaattgggttctttcagggggatattcggttgctaatggatgacctcaaagtccttcagccaaccgtattcccagtagtgcctcgcttgctgaataggatgttcgatagaatttttggacaagctaacaccacgttgaagaggtggctgcttgacttcgcttcaaaaaggaaggaagcagaactcaggagcggcataattcgaaataatagcttgtgggatcgtcttattttccataaggtccagtcttctttagggggacgcgtgcgtttgatggtgaccggcgctgccccagtgtcggcaactgtactgacgttcctgcgcgctgcccttggatgccaattctacgagggatatggccagacagagtgtaccgcagggtgttgcctgacgatgcctggcgactggacagccggtcatgtcggggcacccatgccatgtaacctcattaaactcgtggatgttgaggaaatgaactacatggcagccgagggagagggcgaagtatgcgtcaagggcccaaatgtgttccagggatacctgaaggatcctgctaagactgcagaggccctggacaaagacggatggctgcataccggcgatattggcaagtggctcccaaacgggacattgaaaatcatcgatagaaagaaacacatttttaaactggcacagggcgaatacatcgctcctgagaagatcgagaacatttacatgcggagcgagcccgtggcccaggtctttgtacatggggaatccttacaggcctttctcattgcaatcgtggtgcctgacgttgagaccttatgctcatgggcccaaaaacggggttttgaagggtccttcgaagagctctgccggaacaaggatgtaaagaaggcaatcctggaagatatggtaagactgggaaaagactctggcctgaagccgttcgagcaggtcaagggaataactctacaccccgaacttttctcaatagataatgggctgctcacgccaactatgaaggcaaagcggccagagctcaggaactattttcgctcacagatcgacgatctttactccactatcaaagtctag

SEQ ID NO: 213285 - DNA, 1584 bp, synthetic construct
  misc_feature 1..1584: note = Description of Artificial Sequence: Synthetic coding sequence
  source 1..1584: mol_type = other DNA
atggtgatcgttccactctacgatacgttgggaaacgaagcaattacttacatcgtgaacaaggcggagttgtcattggtgttcgttgacaaacctgagaaggcaaaactgctgttagagggggtcgagaacaaactcatccctggcctgaaaattatagttgtgatggacgcatatgggtctgaacttgttgagcggggtcagagatgcggggtggaggtcacttccatgaaggctatggaggacctcgggcgagctaaccgccgaaagcccaagccccctgcaccggaagacctggcagtgatctgcttcacctctggcactacgggcaacccgaagggggcaatggtgacccaccggaacattgtgtctgattgctctgcttttgtgaaggccactgagaacacagttaacccatgcccagacgacactctcatctcttttcttccactggcacacatgttcgaaagagttgtggaatgcgtgatgttgtgccacggagccaagatcggattttttcagggtgacatccgtctcttgatggatgacttgaaagtcctccaaccaaccgtttttcccgtcgtgcctcggctgctgaaccgaatgtttgaccgtattttcgggcaggcgaacactacgctgaagagatggttgcttgacttcgcatccaaaagaaaagaagccgagcttcggtcaggcataatcagaaacaacagtttgtgggatcgcctcatttttcataaagtccagagcagcctcggtgggagggtgaggctgatggtcacgggggctgcacctgtgtccgccactgtgttaaccttcttgagagccgctttaggatgtcaattttatgaagggtacgggcagaccgaatgcactgctggctgctgtctgaccatgccaggagattggaccgccggacatgtcggtgctcccatgccatgcaacctaattaagcttgtggatgtggaagagatgaattacatggccgctgaaggcgaaggcgaggtgtgtgtcaaggggcctaatgttttccagggttacctgaaggatccagctaagaccgctgaagccctcgacaaggatggctggctgcatacaggagatattggcaagtggctaccaaatggcacactgaagattattgatcggaaaaagcatatttttaagctcgcacagggagagtacattgctccggagaagattgagaatatttacatgagatccgagcctgtggcccaagtgttcgtgcatggcgagagcctacaggccttccttatagcgattgtggtcccggatgttgagacactttgtagttgggctcagaaacgtggctttgaaggtagctttgaagaattatgtcgcaataaagatgtgaaaaaagccattttagaagatatggttcggctcgggaaggactcgggccttaaacctttcgagcaggtgaagggcatcaccttgcatcctgaactgttttccatagacaacggcctcctcactcctacaatgaaagccaaacgccctgagttgcgcaactactttaggagccagatcgacgacctgtattcaactataaaggtctag

SEQ ID NO: 213286 - DNA, 2097 bp, synthetic construct
  misc_feature 1..2097: note = Description of Artificial Sequence: Synthetic coding sequence
  source 1..2097: mol_type = other DNA
atgcaggcccacgagctctttagatactttcgtatgcccgagctggtggacttccggcagtacgtgcggactttgccaacaaacacacttatgggattcggagcattcgcggcactcacaaccttctggtacgctactagacctaagcctctgaaacctccctgtgacctctcgatgcagtccgtggaagtagctggcagcggaggcgcaagaagatctgctctcctcgactctgatgagcctctggtatacttttatgacgacgtcacaactttgtatgagggatttcagcgcggaatacaggtgtccaacaatggcccatgtttgggcagtagaaagcccgatcagccttatgagtggctttcgtacaagcaagtggcagagctgtctgagtgcatcggatccgcgctgatccagaaaggctttaagaccgccccagaccagttcattgggatcttcgcacaaaataggcctgagtgggtgatcatagaacaagggtgcttcgcatactcaatggtaattgttccactgtacgatacgctggggaacgaagctattacgtacatcgtcaataaagcagagctcagcctcgtttttgttgataaacctgagaaggccaagctcctcctggaaggtgttgagaataagctgattcccggacttaaaattattgtggtcatggacgcctatgggtccgagcttgttgaacgaggccagcgctgtggagtggaagttacctctatgaaggcaatggaggacctgggccgagctaacagacggaagcccaaacccccagcacctgaagacctcgccgtaatttgtttcacatcagggacaacaggaaatccaaagggagcgatggtaacacaccggaacattgttagcgactgttccgcattcgtgaaagccactgaaaatacagtcaacccgtgtcccgatgatactttgatcagcttcctccccctggctcacatgtttgaaagggtcgttgagtgcgtgatgctctgtcatggggctaagatcggtttttttcagggggatattagactcttgatggacgacctgaaggtgcttcagccaactgtcttccctgtagtgccacggctgctcaaccggatgtttgatcggattttcggccaggcaaacacaactttgaaaaggtggcttctcgattttgcttccaagcggaaggaagctgaactccggagtgggatcattcgtaataactctctgtgggatagactcatctttcacaaagtgcagagttccctcgggggtcgtgtaaggctgatggttaccggggctgcgccagtatccgctaccgtgctaaccttccttcgcgctgccctggggtgccaattctacgaaggctatggccagacagagtgtacggccggttgctgcctcactatgccgggtgactggacagccggtcacgtaggcgctccaatgccgtgcaatcttatcaagctggtcgatgttgaggagatgaattacatggccgcagagggagaaggggaggtgtgtgtgaagggcccaaatgttttccaggggtatctgaaggaccccgctaagaccgccgaggccttagataaagacggatggttgcataccggcgatatcgggaaatggttgcctaacggcacacttaaaatcatcgatcggaagaaacatatcttcaagcttgcacagggcgaatacattgccccagagaagatagaaaacatttatatgaggtccgaaccagtagcccaagtcttcgtgcatggggaaagcctccaggcctttctaattgctatcgttgtccctgatgtggagaccctgtgctcgtgggcccagaagcgagggtttgagggaagttttgaagagttgtgtcgaaacaaagacgtcaagaaagctattcttgaagacatggtccgcctcggaaaagattctggccttaagccctttgagcaggtgaaggggattactctacacccagaacttttcagcatcgataacggcttgctcacaccaaccatgaaggcgaaaaggcctgagctccggaattattttcggtcccagatagatgatctctactccaccataaaggtatag

SEQ ID NO: 213287 - DNA, 1995 bp, synthetic construct
  misc_feature 1..1995: note = Description of Artificial Sequence: Synthetic coding sequence
  source 1..1995: mol_type = other DNA
atgcaggcccatgagctgttccggtatttccggatgccagaactggttgacttcaggcagtacgtgcgcacattgcccactaacaccctcatgggatttggcgcattcgctgcccttacgaccttctggtatgctaccaggccaaaacccctgaagcctccttgcgacttgtccatgcagtctgtagaggtggccggttccggtggcgctagacggtcggctctgttggacagcgatgaacctctagtttatttctatgatgacgtcaccactttatatgagggatttcagaggggaatccaggtatcaaataacggcccatgccttggatctaggaaacctgatcagccatacgagtggctgagttacaaacagtgggtgatcatagagcaaggttgttttgcctactcgatggtcatagttccgctgtatgacacactgggaaacgaagccattacctacatcgtcaataaagctgaactgagtttagtgtttgttgataagccagagaaggctaaactccttctcgaaggggtggaaaataagctgatcccaggtttaaaaataatagtcgtaatggacgcatatgggagcgaattggtggagcgcggtcaacggtgtggagtcgaagtcacttccatgaaggccatggaggatttgggacgtgcaaacaggagaaagccaaagcctcctgcacccgaagacctcgcagttatctgttttacttcgggtacaacaggaaatccgaagggggcaatggtaactcaccgtaacatcgtgagcgactgtagtgcatttgttaaagcaaccgagaacaccgttaacccctgccccgatgatactcttatctcctttctgccactggcccacatgttcgagcgcgtggtggagtgtgtaatgctgtgtcacggcgctaagatcggatttttccagggtgacataagactactgatggatgatctcaaagtgctgcagcccacagtgtttccagtggtcccccgattgttaaaccggatgttcgataggatctttggacaggcaaatactacgttaaaacgttggctcctcgacttcgctagcaaaagaaaagaggccgagctaagatcagggattatcagaaataatagcctgtgggataggctaatcttccacaaagttcaatctagcttgggcggaagagtgaggctgatggtgaccggagccgcaccagtaagcgccacagtgctgacattcctgcgggctgccttgggatgtcagttctatgagggatatggtcagactgaatgtaccgcgggttgctgcttgactatgccgggtgactggacagctggccacgtgggggctccgatgccgtgtaacctgattaagctggtcgacgtggaggaaatgaattacatggctgccgagggtgagggggaagtttgcgtcaaggggcctaacgtatttcaaggatacctgaaagacccggcaaagacggcagaggctctggacaaagacggatggctgcatacgggagatatcggtaagtggctccctaacggaaccctgaagatcattgatcggaagaaacatatattcaaattggcacagggagagtacatcgccccagagaagattgaaaatatttacatgaggtccgaaccggtggcgcaggtgttcgtgcacggggagtctttgcaggcctttctgattgcaatcgtagtgcctgatgtggagactttgtgttcctgggcccagaaaagaggttttgagggaagtttcgaggagctgtgccgcaataaagacgtgaagaaagcaatcttggaggacatggtgagactcggcaaggatagtggacttaaaccgttcgagcaagtcaaaggcatcacccttcatcctgagctgttttcaatagacaacgggctattaaccccaactatgaaagctaaaaggcccgaattgaggaattactttaggtctcagatcgatgatctgtacagcactattaaagtttag

SEQ ID NO: 213288 - DNA, 2097 bp, synthetic construct
  misc_feature 1..2097: note = Description of Artificial Sequence: Synthetic coding sequence
  source 1..2097: mol_type = other DNA
atgcaagcgcacgaactgtttcggtacttcaggatgccagaattggttgatttcagacagtacgtaagaacactacctacaaacacgctcatgggattcggcgcttttgctgcccttacaaccttttggtatgctactcggccaaaacctctgaagcctccttgcgacctaagcatgcagtccgtggaagtggctggtagcggcggtgcgaggcgctctgcactactggacagcgatgaacctttggtgtatttctacgatgacgtcactacgctgtacgagggctttcagagggggattcaagtgtccaataatgggccatgtctcggctcaaggaaacctgaccagccctatgaatggctgtcttacaagcaggtggcggaactgtcagagtgtataggctctgccctcatacagaagggctttaaaacagcccctgaccagttcatcgggatttttgcccaaaacaggcccgagtgggtgatcatcgagcagggctgtttcgcctatagcatggtgatcgtccctctttacgacacgctcgggaatgaggctatcacatatattgtaaacaaagcagagttatccttggtgtttgtagataaaccagaaaaggccaaactgctgctcgaaggcgtcgaaaacaagctgataccgggtttgaagataattgtggtgatggatgcctacggctccgagctcgtcgaacgcggacagcggtgtggcgtggaagttacaagtatgaaagccatggaggatttaggcagagctaatcgcaggaagccaaaaccccctgcccctgaagacctggccgtgatttgtttcacctccggtacgacaggaaaccctaaaggagcaatggtcacccaccgcaatatagtatctgactgctctgcattcgtgaaggcgaccgagaatacagtgaacccatgccccgacgataccttaatcagtttcttacctctcgcacacatgtttgagagagttgtggaatgcgttatgctctgccatggcgctaaaatagggtttttccagggagatatccgcctcctgatggacgatctgaaggttcttcagcccaccgtttttcccgtcgttcctcgattactaaaccgcatgttcgaccggatcttcggccaggctaacacgaccctgaagcggtggttactggacttcgcatctaagaggaaagaggctgagctgagatcaggtatcattcgcaacaactccctctgggacaggctgatatttcacaaggtgcagtcgagcctaggcggaagggtgcgactgatggtgactggggcagcccctgtatccgctacagtgctgacttttctccgtgcagctttggggtgtcagttttacgaaggatatggacagaccgagtgcacagcgggatgctgtttaacaatgcccggagattggactgccggacacgtcggcgcaccaatgccctgtaatctgataaaactggtggatgtcgaggagatgaattatatggcagctgaaggcgagggcgaggtgtgcgtcaaaggtccgaacgttttccagggataccttaaggaccccgcaaaaacggccgaggctcttgacaaagacggctggctacatacaggggatatcggcaaatggctgcctaatggtacactgaagatcattgatagaaaaaaacacatttttaagttggctcagggggagtatattgccccagaaaagatcgagaacatttacatgcgtagcgaaccagtggcacaggtgttcgtgcacggagagtcacttcaggcttttttgattgctatcgttgtacctgacgtggagacgttatgttcttgggcccagaagcgagggttcgagggaagctttgaggagctttgccgaaacaaggatgtgaagaaagcaatacttgaggacatggtccgcttggggaaagattctgggttaaaacccttcgagcaagtgaaaggtattacgttgcaccccgagttattctccatagacaatggcctgctgacccctactatgaaggccaaacgaccagaactgcgaaactactttagaagccagatcgatgatctgtacagcacgatcaaagtgtag

SEQ ID NO: 213289 - DNA, 2163 bp, synthetic construct
  misc_feature 1..2163: note = Description of Artificial Sequence: Synthetic coding sequence
  source 1..2163: mol_type = other DNA
atgaataatcatgtgtcgagcaagcctagcactatgaagctcaagcatacgatcaatccaatccttctttactttatccactttctgatcagcttatacaccatcctaacctatatacctttttatttttttagtgagagccgacaggaaaagagtaaccgcattaaagccaagcccgtgaacagcaaaccggatagcgcctaccgctccgtgaactctctggacggactggcatccgtgttataccccggatgtgataccctcgacaaggtgttcacatatgccaagaacaaattcaaaaacaaacgcctcctcggcacacgcgaagtcctgaatgaggaggacgaagtccagccaaacgggaaaatcttcaagaaagtaatactggggcagtataactggttgagctacgaggatgtgtttgtaagagcctttaacttcggcaacggcctccaaatgctgggtcagaagcccaagactaacattgcaatcttctgcgagactagagccgaatggatgatcgctgcacaagcgtgtttcatgtacaacttccagctagtcacattgtatgcgacgctcggcggaccagccattgtgcacgcactgaacgaaacggaagttacaaatattattacttccaaggagctgctccagaccaaactgaaggacattgttagtctggttcctcgactgaggcacattatcaccgtcgacggtaaacctcccacgtggagtgaattccctaaggggatcatcgtccacaccatggcagccgtggaagcactgggcgcaaaggcctccatggagaatcagcctcacagcaaaccactgccatctgatatcgctgtgatcatgtatacctccggtagcacaggactacctaaaggagttatgattagccactctaatatcatcgctggcattacaggaatggcagaaagaatcccagaactgggggaagaggatgtgtatatcggctatcttccactggcacatgtccttgagttaagtgcggagcttgtctgccttagccacgggtgtcgcataggatattcgagcccacaaactcttgctgatcagtcttcaaagatcaaaaaaggctcaaaaggggataccagcatgctgaagcctacactgatggctgccgtccctgagatcatggaccgaatttataaaaacgtcatgaacaaggtgagtgagatgtctagctttcagcggaatctgttcattttggcgtacaactacaagatggaacaaatatcaaaggggagaaatacccccctctgtgattccttcgtattccggaaagttcgcagcctgctaggcggtaacatccgcctgctcctgtgcggcggtgccccactctcagccaccactcagaggttcatgaatatttgcttctgttgtcccgtcgggcaagggtatggtctgaccgaatccgctggcgctgggacaatctccgaggtgtgggattacaacacgggtagagtcggcgcaccattagtctgctgtgaaataaaacttaagaattgggaagaagggggatacttcaacaccgacaagcctcacccaaggggtgagatcttgattggtggacagtccgttaccatgggatattataaaaatgaggccaagaccaaagccgacttcttcgaggacgagaacggccagagatggctgtgtacaggcgacataggggagtttgaacctgatggctgtctgaagatcatagacaggaaaaaggaccttgtcaagctgcaggcaggggagtatgtgagtctgggaaaagtcgaggcggctctgaaaaacttgccattggtggataatatctgcgcctatgcaaatagctaccacagctatgtcatcgggtttgtagttcccaatcaaaaagagctgaccgagctggctagaaagaaaggtttgaaagggacatgggaagagctgtgcaactcatgtgagatggagaatgaggtcctgaaagtgcttagcgaggcagcaatcagtgcctctctcgaaaaattcgagatccctgttaagattagactttcacccgagccttggacaccagaaacgggcctggttactgacgcgttcaagctgaagcgcaaggagctgaagacgcactaccaggctgacattgaacgcatgtatggcaggaaatag

SEQ ID NO: 213290 - DNA, 2163 bp, synthetic construct
  misc_feature 1..2163: note = Description of Artificial Sequence: Synthetic coding sequence
  source 1..2163: mol_type = other DNA
atgaataaccatgtttcttcaaaaccatctacaatgaaactaaaacacaccatcaatcctatactcctgtacttcatccacttcctgatctcactgtatacgatcctgacctacatcccgttctactttttctccgagagtagacaggagaaatctaatcggatcaaggccaagcccgttaacagcaaacccgattcagcgtatcggtctgttaacagtctagacggtctcgctagcgtcctgtaccctggttgtgataccttggacaaagtatttacctacgccaagaacaagtttaagaacaagcgactcctgggcacacgcgaggtgttgaacgaggaggacgaggttcagccaaatggcaaaatatttaaaaaagttatcctggggcagtacaactggctctcatatgaggacgtattcgtgagagcgtttaattttggcaatggccttcaaatgcttggacagaaacctaaaaccaatatcgcgattttctgcgagactcgcgctgagtggatgatcgcagctcaggcctgctttatgtataatttccagctagtcacattgtacgcgactcttggagggcctgccattgttcacgccttgaatgagacagaggtgaccaatattatcacctctaaagaactgttacaaaccaagctgaaggatatcgtgtcactcgtccccagacttcgtcatataataaccgtggatggcaagccaccaacctggtcagaattccccaaaggcattatcgtgcataccatggcggcagtggaagcactaggtgccaaggctagtatggagaatcagccccattctaaaccgctgccgagcgacatcgccgtgattatgtatacgtctgggagcactggcctgccaaaaggcgtcatgatttcccattcgaatataatagcgggaatcactggcatggctgagcgtatcccagagctaggtgaagaggacgtatacatcggctacctacctctggcccatgtgctggagctgtctgccgaactggtttgtctcagtcatggatgccggattggatatagctcacctcaaactttggctgaccaatcaagcaagatcaagaagggatccaagggtgacaccagtatgctgaaacccactttgatggcagctgtacccgagattatggaccggatctacaagaacgtcatgaacaaagtgagcgagatgagcagttttcagcggaatctgtttattttggcatacaactataagatggagcagatttcaaagggcaggaacactcccctgtgcgattcgttcgtctttagaaaggtccgatccctcctggggggaaatattaggctgctgctgtgcggcggagcccctctctctgctacaacccagagatttatgaacatttgcttctgctgcccagtgggccaggggtacgggctgacagagagcgctggcgctggtaccatctcagaggtgtgggattataacacaggcagagtgggagctcctcttgtgtgttgcgaaattaagctgaaaaattgggaggagggcggatattttaacaccgataagcctcacccgcgtggggaaatacttatcggcggtcagtctgtcactatggggtactataaaaacgaagccaagaccaaagccgacttcttcgaggatgagaatggccagaggtggttgtgtactggcgatattggggagttcgagccagacggctgccttaagatcatcgaccgtaaaaaagacctggtcaaactgcaggcaggagaatatgtctctctcgggaaggtggaagctgcgttgaagaatctgccattggtagacaacatttgcgcgtatgccaattcctaccattcttacgtaatcggatttgtggtacctaaccagaaagagcttaccgagcttgcacggaaaaaaggcctcaagggtacctgggaggagctttgcaattcctgcgagatggagaacgaagtgttaaaggttttaagcgaggcagcaattagcgcgagtctcgaaaaattcgagattcccgtgaagatacgactcagtcccgagccttggaccccagagacaggtctagtcacggatgcattcaagttgaaacggaaggagcttaaaactcactatcaggctgatatcgaacgcatgtacggtcggaagtag

SEQ ID NO: 213291 - DNA, 267 bp, synthetic construct
  misc_feature 1..267: note = Description of Artificial Sequence: Synthetic coding sequence
  source 1..267: mol_type = other DNA
atgaataatcatgtttctagtaagccttcaactatgaagcttaagcataccattaatccaatcctgctgtacttcatccacttcctgatctctctctacaccattcttacctacattccgttctactttttttccgaatcacgacaggaaaaatccaatcgaataaaggccaaaccagtgaacagcaagccagattccgcctatagatccgtcaattctctggacgggctggcctcagtactgtatccagggtgcgacaccctctag

SEQ ID NO: 213292 - DNA, 288 bp, synthetic construct
  misc_feature 1..288: note = Description of Artificial Sequence: Synthetic coding sequence
  source 1..288: mol_type = other DNA
atgaataaccacgtctccagtaagccttccacaatgaagctgaagcacaccatcaatcccatcctcttatacttcatccattttctcatttcgctttacacaattttgacatatatacccttttactttttcagcgaaagtagacaggagaaatccaaccggattaaagcaaaaccagtgaatagtaaaccagacagcgcctataggagcgttaacagtctggacggcctggcctccgtcttatatcctggttgcgacacgctggacaaagtgtttacctacgcgtag

SEQ ID NO: 213293 - DNA, 2052 bp, synthetic construct
  misc_feature 1..2052: note = Description of Artificial Sequence: Synthetic coding sequence
  source 1..2052: mol_type = other DNA
atgctgttcatcttcaacttcctcttctctcccctcccgacgcctgctttgatctgcatcttgacgtttggtgctgccatcttcctgtggcttataacccgccctcagcccgttctgccactccttgatttgaataaccagtccgtgggaatcgagggaggggctcgaaaaggagttagccagaagaataacgacctgacatcctgttgcttctcggacgctaagactatgtacgaagtgttccaacggggtctggccgtctcagacaatgggccttgtcttggctatagaaagcctaatcagccctaccggtggttatcatataagcaagtttccgatcgcgctgagtacctggggtcctgtctgttacataaagggtacaagtccagcccagaccagtttgtgggaatcttcgcccagaaccggccagagtggatcatcagcgaattggcgtgctacacatactccatggtggcagtgcccctctacgatactctcggacctgaagcaattgttcatatcgtaaacaaggcggacattgcgatggtgatctgcgatactcctcagaaggcactcgtgctgattggtaacgttgaaaaagggttcaccccatccctgaaggtgattattctgatggatccctttgacgatgacttgaagcaacggggagagaagtcgggaattgaaattctgtctctgtatgacgcagaaaacttaggtaaagaacactttagaaagcccgtgcctccgagcccggaggatctctctgtcatttgcttcacctcagggacaacgggagatcccaaaggagcaatgattacccatcaaaatattgtcagcaatgccgcagcatttctgaagtgcgtggagcacgcttacgagcccacacccgacgatgtggccatttcctatctgccgctcgcacatatgttcgagcgaattgtgcaagctgtggtctatagctgcggtgccagagtcggcttctttcaaggggacataagactgctggcagacgatatgaaaaccctgaagcctaccctgtttcccgctgtgcctcgcttgctaaaccgcatctatgataaggtacagaacgaggctaaaactccattgaagaagtttctcctgaagcttgccgtgtctagcaagttcaaggagctccaaaaaggaattataaggcatgacagcttttgggacaagttaattttcgctaaaatccaggatagcctcggtgggagggtacgagtcatcgtaactggagcggctcctatgtccacaagtgtgatgaccttttttagagccgctatgggctgtcaggtgtatgaggcgtatgggcagaccgagtgcacagggggttgcacattcacgctgcccggagattggaccagtggccatgtgggcgtgccactggcctgcaattacgtaaagttagaagacgtggctgatatgaattactttactgttaataatgagggcgaagtgtgtatcaagggcaccaacgtcttcaaggggtatctgaaggacccggaaaaaacccaggaagccctggacagcgatgggtggctgcacactggtgatatcgggaggtggttgcccaacggaactttgaaaatcatagacaggaagaagaatatcttcaagttggcacagggcgagtacatcgccccagaaaaaattgagaatatatacaatcgcagccagcccgtgttgcagattttcgtacatggagaatcgctgcgctcctcactggtcggcgtggtggtgccggatacagacgttctcccatcattcgcggctaagttgggcgttaaaggctctttcgaagagctgtgccagaatcaagtggtgcgcgaggctatcttggaggatctgcaaaaaatcggaaaggagtctggtcttaagacgttcgagcaggtaaaagccatctttctgcacccagaacccttctctattgagaacgggctcctgactcctactttaaaggcaaaaaggggagagctgtccaaatacttccgcacacagatagattcgctgtatgagcacattcaggattag

SEQ ID NO: 213294 - DNA, 2052 bp, synthetic construct
  misc_feature 1..2052: note = Description of Artificial Sequence: Synthetic coding sequence
  source 1..2052: mol_type = other DNA
atgctgttcattttcaatttcctgttttcccccctgcccacccctgctcttatctgcatcctaacctttggagcagccattttcctctggttgatcaccaggccccagcccgtcctaccattgctggatttgaataatcagtcggtcggcattgaagggggtgctcgcaagggtgtctctcagaagaacaacgacctcactagttgttgcttctccgacgcaaagactatgtatgaagtatttcagcgagggctggcggtatccgataatggcccttgtttgggctatcgcaagccaaatcagccttatagatggctgtcctataagcaagtgtctgacagggcagaatatctgggctcctgcttattgcataaaggttacaagtcctcccctgaccagttcgtgggaatctttgcgcagaatcgcccagagtggattattagtgaacttgcttgctatacctatagcatggtagcagttcccctctatgatacgctcgggccagaggcaattgtccacattgtcaacaaggctgacatcgctatggtgatctgcgataccccgcaaaaggccctcgtgttgatcgggaatgtggagaaaggttttacacccagcttaaaggtgattatcctgatggacccgtttgacgacgatctgaagcagcgaggagagaaatctgggatcgagattctgagcctctatgatgctgagaatctgggcaaagagcactttcgtaagcctgtgcctccaagccctgaggacttgagtgtgatatgcttcacttcaggtaccacaggtgatcccaaaggagccatgatcacccatcagaacatcgtctctaacgctgccgcttttctgaagtgtgtcgaacatgcatacgagcctacgccagacgacgtggcaatcagctatctcccactcgctcacatgtttgagcgcatcgtgcaggctgttgtatactcctgcggcgctcgtgtgggatttttccagggtgacatcagactcctcgccgacgatatgaagactcttaagccaacattatttcccgcagtgccgagactcttaaatcgcatatacgataaggtccaaaatgaggccaaaacacctttaaagaaattcttgctaaagctggcagtgagtagcaagttcaaggagctccaaaagggcatcatcagacacgattcgttctgggacaagctgatcttcgccaaaatccaggactctctggggggacgcgtgcgtgtgatagttactggcgctgcaccaatgagcactagtgtgatgacctttttccgggctgccatgggatgtcaggtgtatgaggcatacggacagactgagtgtaccgggggttgcacattcacgttaccaggtgactggacctcggggcatgttggtgtgccactagcgtgtaactatgtcaaattagaggacgtcgccgacatgaactacttcaccgtgaataacgagggcgaggtatgcataaaaggcactaacgtgtttaagggctatctgaaagaccccgaaaagacccaggaggccctggatagcgacggatggctacatacaggcgatattggcaggtggctgcctaacggcactttaaagattatagatcggaaaaagaacatattcaagctggctcagggagagtatattgcgcctgaaaagattgaaaacatatacaataggtcacagcccgtactccagatcttcgtccatggagagagcctgagaagcagtctggtgggagtagtagtaccagacacagacgtgttgccctcctttgccgctaagcttggagtaaagggaagcttcgaggagctatgtcaaaaccaggtggtgagagaagctattctggaggacttacaaaaaattggcaaagaatcagggctgaaaacattcgaacaagttaaggccatattcctgcaccctgaacccttcagcatagaaaatggtttgttgacccccaccctgaaggcgaaacggggagaactgtcaaagtactttagaacacagattgattcactgtacgaacatatacaggactag

SEQ ID NO: 213295 - DNA, 2220 bp, synthetic construct
  misc_feature 1..2220: note = Description of Artificial Sequence: Synthetic coding sequence
  source 1..2220: mol_type = other DNA
atggacgcgctgaaaccgccatgtctctggcgaaatcacgagagaggaaaaaaagatcgagatagctgcggcaggaagaatagtgagcctggctcgccacattcccttgaggcacttcgtgacgcagcacccagccaaggactgaattttttgcttctattcacaaagatgctgttcatatttaacttcctgttttcaccactaccaactccagcgctcatctgtatactcaccttcggtgctgctatttttctgtggcttattacgcgtccgcagcctgtgctacctctgctggaccttaataaccagagtgtcggcattgaggggggtgcgcgaaaaggcgtgtcccaaaaaaacaatgacctgacctcctgctgctttagcgacgctaagactatgtatgaggtgttccagcgtggcttggccgtttccgacaatgggccatgcctagggtataggaaacccaatcagccttatagatggctgtcttacaagcaagtctcagaccgggcagaatatctgggctcatgcctgctgcataaaggatataagtcaagccccgaccaatttgtggggattttcgcacagaaccgccctgagtggataatttctgagctcgcctgctatacctactccatggtggctgtcccactgtatgacactttagggcctgaggccatagtccatattgtgaacaaggcggacattgccatggtgatctgtgacactccgcagaaggctttggtgctaattggaaatgtcgaaaaaggattcactccatccttaaaggttatcattttaatggacccgtttgacgacgatctcaagcagcggggagagaagtctggaatagagattctgtccctctatgatgcagagaacctcggtaaagagcactttcgcaagcccgtgcctcccagccctgaagacttgagtgtaatttgtttcacttctgggactaccggagaccccaagggcgcaatgattactcaccagaacattgttagtaacgcagctgcttttctgaaatgtgtggagcacgcctatgagccgacacccgacgacgtggctataagctacctgccactagctcacatgtttgagcggattgtgcaagcagtcgtatactcgtgtggtgccagagtggggttcttccagggcgacatacgcctcctggcagacgacatgaaaaccctgaagcccaccctgtttccagcagtgcctcggcttctgaaccgaatttatgataaggtgcagaatgaggccaagacaccgctcaagaaatttctgctaaagctagcagtgtcatctaagttcaaggagcttcagaagggtataatccggcacgactctttctgggataagctcatctttgctaaaattcaagactcacttgggggtcgtgtgagggtgattgtcactggggctgcccctatgagcacaagcgttatgacatttttccgcgctgccatggggtgtcaggtgtacgaggcttacgggcagaccgagtgcaccggcggatgcaccttcaccctcccaggggattggacaagcggacacgtcggcgttccactcgcatgcaactatgtaaagctcgaggatgtggctgatatgaattactttacagtgaacaatgaaggcgaagtctgcattaagggtactaatgtttttaaaggctacctgaaagatccggaaaagactcaagaggctctggacagtgatggctggttacacaccggagacataggacgctggcttcccaacggaaccctgaaaatcattgatagaaagaaaaacatcttcaaactggctcagggggaatatatcgccccagaaaaaatcgaaaacatatataatcggtctcagccagtacttcagatcttcgtgcatggcgaatcactgcggtcatcgctggtgggagttgtagtgcccgataccgatgtactgcctagttttgctgctaaactgggggtcaagggtagctttgaggagctgtgccagaatcaggtggtaagggaggccatcctggaggatctgcagaagattggcaaggagtctggtttgaaaactttcgaacaggtaaaagccatcttcctgcatccagaacccttcagcattgaaaatggtttgctgactcctacgctgaaggcgaagcggggagaactgagtaagtacttccgcacgcagattgactcactgtacgaacatattcaggattag

SEQ ID NO: 213296 - DNA, 1398 bp, synthetic construct
  misc_feature 1..1398: note = Description of Artificial Sequence: Synthetic coding sequence
  source 1..1398: mol_type = other DNA
atgctttttccaggagcatccatagtgccagagtgttggttgcttgtgctcattcagaatctgggcaaagaacattttaggaagcccgtgcctccttcccccgaggacttgtcagtgatctgtttcaccagcggcactaccggagaccccaaaggagctatgatcacccatcagaacatcgtctccaacgccgctgcattcctgaaatgcgttgaacacgcttacgaacctactcccgacgacgtcgctattagctacctgcccctggcacatatgtttgagcggattgtccaggctgtagtttactcatgtggagcaagggtcggtttcttccagggtgacatccggctcctcgccgacgacatgaagacactgaagcccaccctattcccggcagtccctcgcttattgaacaggatatatgataaagttcagaacgaagccaagaccccactgaagaagttcctgctgaagcttgctgtcagtagcaagttcaaggagctgcagaaaggaatcatcagacatgattcgttctgggataagctgattttcgccaagattcaagactctctggggggacgcgtgcgcgtcatcgtgacgggggcagccccaatgtcaacatcagtgatgacattctttagagcagcgatggggtgtcaggtgtatgaagcttatggacagaccgagtgcaccgggggatgcacatttactttaccaggagattggacgagcgggcatgttggagtgcccctggcctgtaattatgttaagctcgaggacgtggctgatatgaactatttcacggtcaataacgagggcgaagtgtgcataaagggtactaatgtctttaagggttatctcaaggaccctgagaaaacccaggaagctctggactccgacgggtggcttcacaccggcgacatcggacgctggctacctaatggtacgctcaaaatcattgacaggaagaagaatatttttaagcttgcacagggcgagtatatcgctcccgagaaaattgaaaatatttacaaccgcagccagcccgtactccagatttttgttcacggtgagtctttgaggtcatctctcgttggggtggtggttccagatacagacgtgctgcccagcttcgccgcaaagctgggagtgaaaggcagcttcgaggagctgtgccaaaaccaagtcgtgcgggaagcaatcctggaggatctgcagaaaatcgggaaagaaagcggactcaagacatttgaacaagtgaaagccattttcttgcacccagaaccattttcgattgagaatggactgctaacacccaccttgaaggcgaaaaggggcgagctaagcaaatatttccgtacccaaatcgactctctttatgagcatatccaggattag

SEQ ID NO: 213297 - DNA, 2052 bp, synthetic construct
  misc_feature 1..2052: note = Description of Artificial Sequence: Synthetic coding sequence
  source 1..2052: mol_type = other DNA
atgctgttcattttcaactttttgttctctcccctgcccacacctgccctgatttgcatcttaactttcggcgcagcaatattcttgtggctcatcacccgacctcagcccgtgttgcccctcctcgatctgaataaccaaagcgttgggatcgaggggggtgccaggaaaggtgtttcgcagaaaaacaatgatctgacctcctgttgttttagtgatgctaaaacaatgtatgaagtcttccaaaggggtctagctgtgagtgataacggcccatgcttaggctatcgtaagccaaatcaaccctatcgctggctgagctacaaacaagttagtgatcgcgcagaatacctgggttcttgtctgctgcacaaaggctataagtcctctccagatcagtttgtggggattttcgcgcagaatcgacctgagtggatcatttccgagcttgcctgttacacctattctatggtggccgtcccactctatgatacactaggccctgaggctattgtccatatcgtgaataaagccgatattgcaatggtcatttgtgacacaccacagaaggcactggtcctcatagggaacgtggaaaagggattcacccctagcctgaaggtaatcatactgatggatccctttgacgacgacctcaagcagcggggagagaagagcggcattgagatcctgtcactatacgacgctgagaacttgggcaaagaacacttcagaaaacccgtgcctcccagtccagaggatttgagtgtgatatgctttacatctggaaccacaggagatccgaaaggcgcaatgatcacacaccaaaacatagtcagcaatgccgcagctttcctcaaatgcgtcgaacatgcatatgaaccgaccccagatgacgttgcaattagttatctcccccttgctcatatgtttgaaaggatagtacaggctgttgtgtactcttgcggcgcaagagtgggcttcttccaaggagacattagactgttagcagatgacatgaagaccctgaaaccaaccctgttccccgctgtgccccgactgcttaatagaatttatgacaaagtgcagaacgaggccaaaaccccgttgaaaaaattcttactaaagctagcagtctcgagcaaattcaaggagctgcagaaaggaattattcgacacgactcgttttgggacaaattgatcttcgcgaaaatacaagacagcctgggcggacgggtgcgcgtcattgtgacaggtgcagctccgatgtctacttcagttatgaccttttttcgcgcagctatgggctgtcaagtctatgaagcgtatggacaaactgagtgcaccggaggatgcaccttcactttacctggagactggacaagcgggcacgttggagttcctttggcgtgcaattatgtgaagctcgaggatgtggcagacatgaattacttcaccgtcaataatgaaggggaagtgtgcatcaaaggcaccaatgtgtttaaaggctacctcaaagaccctgaaaaaacacaggaagccctggatagcgacgggtggcttcacaccggggacataggtaggtggctgccaaatgggactctgaagattatcgatagaaaaaaaaatatctttaaactcgcacaaggagaatatatcgcgcctgagaagattgaaaatatctacaatcgcagccagcctgtgcttcagatcttcgtgcacggagaatcgttgcgctccagcttggttggcgtggttgtgccagataccgacgtactcccctcatttgccgcaaaactcggggtgaaggggtcatttgaagagctgtgccagaaccaggtcgtgagggaggcgattctcgaggatctacaaaaaattgggaaggagagtggtctcaaaacatttgagcaggtgaaagcgatcttcctgcatcctgagccgttctcaatagagaatggcctgctcaccccaacactgaaggccaagagaggagaactttcaaaatatttccggacccagatagacagcctctacgagcacattcaagattag

SEQ ID NO: 213298 - DNA, 1980 bp, synthetic construct
  misc_feature 1..1980: note = Description of Artificial Sequence: Synthetic coding sequence
  source 1..1980: mol_type = other DNA
atgttgtttatttttaatttcctgttttctccactgccaacccccgcattgatctgcatattgacattcggggctgccatttttctgtggcttattacaagaccacagccagtgttgcctctactggatcttaacaaccagagcgtggggatagaaggcggtgcaaggaagggagtttcacaaaagaataatgatctgacctcatgttgtttctctgatgctaagactatgtacgaagtcttccagcggggactggcggtgagcgacaatggtccatgcctgggctaccggaaaccaaatcagccctataggtggctgagttataagcaggtgtccgacagagcagaatacttgggtagttgtctgctccacaagggctacaaatcaagtccagatcagtttgtgggcatcttcgcccaaaacaggccagaatggatcatctctgaactggcatgttatacttactcaatggttgctgttccactgtacgacacgctcggcccagaagccatagtccatatagtgaataaggctgatatcgcaatggtaatctgcgacacaccacagaaagcactggtcttgatcggcaatgttgaaaaagggttcaccccaagcctgaaggttatcatccttatggatccgtttgatgacgacctgaagcagaggggcgaaaagagcggaatcgaaatcctttccctctacgacgcagaaaacctaggcaaggaacacttccgcaaacctgtgccgccatccccggaagatctctccgtcatatgctttacatctgggacaaccggagatcctaagggcgctatgatcacccatcaaaacatagtcagtaatgccgctgcgtttctcaaatgcgtcgagcacgcctacgaaccaaccccggatgatgtcgctatctcctacctgcctcttgcccacatgttcgagaggatcgtccaagccgttgtgtacagttgcggcgcacgcgtaggattctttcagggggacattcgccttctagcggatgacatgaagacgttgaaaccaacactcttcccagcagtgccacgtctgctgaaccgcatctacgacaaagttcagaacgaagctaaaacccccttaaagaagttcttgctgaaactcgctgtgtcgtcaaagtttaaggagctgcagaaagggataattcgtcacgacagcttctgggataagctgatcttcgcaaagatccaggacagcctcggcggtagggtgcgagtgatcgtcacaggggctgctccgatgagtacaagcgtcatgacattctttagggctgctatgggatgccaagtgtacgaagcttatggacagacggagtgcacgggaggctgcacattcaccctgcctggagactggacgtctgggcacgtgggtgtaccgttggcttgcaattacgtcaaacttgaggatgtcgctgatatgaattattttaccgtgaacaatgagggggaagtgtgtatcaagggtactaatgttttcaagggctatctaaaagatcccgagaagactcaagaagctctcgactcagacgggtggctccacaccggagatatcgggcgatggctacccaatggaacactcaagataatcgacaggaaaaaaaacattttcaaacttgcccaaggggagtacattgcccctgagaagatagagaatatttacaataggagtcagcctgtgttacagatctttgtgcacggcgagtccctccgcagtagcttggtcggagtcgtcgtgcctgatacagacgtcttaccttccttcgccgctaaactcggggtcaaggggagctttgaggaattgtgtcagaatcaggttaaagccatcttcctccatcccgagcctttttcaattgagaatggcttgttaacacccaccttgaaagctaagcggggtgaattgtcaaaatatttccgaacacaaatcgatagtctctatgaacacattcaggattag

SEQ ID NO: 213299 - DNA, 2169 bp, synthetic construct
  misc_feature 1..2169: note = Description of Artificial Sequence: Synthetic coding sequence
  source 1..2169: mol_type = other DNA
atgctgactttttttctagtgagcgggggatcgctatggctcttcgtagagttcgtgttaagcctactcgagaagatgcagacccaagagatattgcgcatcttaagattgcccgagctcggcgatctcggacagttctttcgatctctgtcagcgaccaccctagtgtccatgggcgcactcgccgcaatccttgcttattggtttacgcaccggcctaaggccctgcagcccccttgcaatttgctaatgcaatctgaggaagtggaggacagtgggggagctagacggtctgtgattggcagcggaccacagctactcacacattactacgatgatgctagaacgatgtaccaggtttttcgtcggggactgtccatctctggcaatggaccatgcctcgggttccgtaagcccaagcagccctaccagtggctgagctaccaggaggtggccgaccgggctgagttcctgggctccgggctgctgcagcacaactgtaaagcatgtactgatcagttcatcggcgtgttcgcccagaatcgccctgagtggataattgttgagctggcgtgttacacctattcaatggtggtcgtccccctgtatgacacactgggccctggggctatacgatatatcattaacaccgccgatattagcactgttatcgtggacaagccgcaaaaggccgtgctgctcctggagcacgtggagcgaaaggaaactccgggactgaaactgatcattcttatggaccccttcgaggaagctctgaaggagcgaggacagaaatgcggcgtagtgatcaaaagcatgcaggcagttgaggactgtggacaggaaaatcaccaggccccagtaccgccacagcctgatgatctatccatcgtttgcttcactagtggaacaacaggtaatcctaagggtgcgatgttaacacacggaaatgtggtggctgatttttccggctttctcaaggtgactgaaagtcagtgggccccaacgtgcgctgacgttcacattagttacctccccctcgcccacatgtttgaacgcatggtgcagtcggtagtctactgtcacggaggtcgcgtgggcttctttcaaggagatataaggttgttgtctgatgacatgaaagccctttgccccacaattttcccagtggtgcctagacttctgaaccgcatgtacgataagatttttagtcaggcaaacacaccccttaagaggtggcttctcgaattcgccgcaaaacgaaagcaggctgaagtgcggagcggtattataagaaacgactccatctgggatgagctgttcttcaataagatccaggcctccctcgggggatgcgtgaggatgattgtgacgggagctgcccctgcctccccgacagtgctggggttcctgcgggctgcactgggatgtcaagtgtatgaaggctacgggcagaccgagtgtaccgccggttgtacttttactacacccggagattggacgagcggtcacgttggcgcacctctgccgtgcaaccatatcaaactggttgacgtcgaagaactgaactattgggcgtgtaagggggagggcgagatctgcgtgagaggaccaaatgtcttcaagggatatctgaaagaccccgatcggacaaaggaagcactcgattccgacggctggctccacaccggagacatagggaagtggcttccagccggaacccttaaaatcattgacaggaaaaaacacattttcaaactggcccagggcgaatacgtggcccctgagaagattgaaaatatttatatccggagccaacccgtggcccagatctacgtccatggggatagtttgaaggcattcctcgtaggaatcgtggttcccgaccccgaggtgatgccttcatgggcccaaaaacggggaatagaaggtacctatgccgacttatgtacaaacaaggatcttaagaaggcaatacttgaggacatggtgaggctgggcaaggagtccggtctccactccttcgaacaagttaaagccattcacattcacagcgacatgttctctgtgcagaacggcttgttaactccaacactaaaagccaagaggcctgaattgcgtgagtatttcaaaaagcagatcgaggagctttactccatatccatgtag

SEQ ID NO: 213300 - DNA, 1869 bp, synthetic construct
  misc_feature 1..1869: note = Description of Artificial Sequence: Synthetic coding sequence
  source 1..1869: mol_type = other DNA
atgcagacacaggaaatattgcggattctaagactgcccgagctcggggatctcgggcagttcttcaggtcattgtctgccactacgctggattcaggcggtgcaaggaggagtgtcattggatccggtccccagttgttaacacattactatgatgacgctcgcactatgtatcaagtcttcagacggggactatcgataagcggaaatggaccctgtctcggattccgcaaacctaagcagccgtatcaatggctctcctaccaggaagttgccgatcgggcagaatttctcggatccggccttctccagcataactgtaaagcctgcaccgatcagttcataggggtgtttgctcaaaacagaccagagtggattatcgtcgaactggcctgctatacatactccatggtagttgtccccctgtacgataccttggggcctggtgctatcagatatattattaacaccgctgacatcagcacagtcattgttgataaacctcaaaaggccgtgcttctgctggagcatgttgagcgaaaagagactccagggctcaagctgattattttgatggaccctttcgaggaggctctcaaggagaggggacagaaatgtggggtcgtgataaaaagtatgcaggcagtggaagactgtggtcaagagaatcaccaggccccagtgcctccgcagcccgacgacctatccatagtgtgtttcacaagcggaacgaccgggaatccaaagggcgcaatgcttacacatggcaacgtcgtggcagacttctctggattcctgaaagtgacagaaggcgacatccgactgctgagcgacgacatgaaggccttgtgccctactattttccccgtggtaccgcgactgctcaataggatgtacgacaagatattcagccaagccaacacccccttgaagcgttggttactcgagttcgccgcaaaacggaaacaggccgaggtgcggagcggcattatcaggaacgattccatttgggacgaactgttcttcaataagattcaggcctctctaggaggatgtgtgcgcatgatagtgactggggctgccccagcgagtccaacggtgctagggtttttgagagctgccctggggtgccaggtgtacgaaggctacggtcagacagagtgtacagctggatgtaccttcacaacacccggagactggacctcaggccacgtaggcgcacctttaccttgtaatcatatcaagctcgtggacgtggaggagctgaattactgggcatgcaaaggagagggtgaaatctgtgtgaggggccctaatgtatttaagggttatttgaaggaccccgaccggacaaaggaggcattggactctgacggatggctgcacactggggacatcggcaagtggttgcccgcaggcacattgaaaataatcgaccgtaagaagcacatatttaaattggctcaaggagagtacgtggctcctgaaaagatcgagaatatttacatacgctcccagcctgtggctcagatatacgttcacggggatagcctcaaggcatttttggtgggcatagttgtaccagatcccgaagtcatgcccagctgggctcagaagagaggtatcgaaggaacatatgccgatctgtgtacaaataaagatctcaagaaggcgatactagaagacatggtcagactgggcaaggagtcgggattgcacagtttcgagcaggttaaggctattcatattcattcagacatgtttagcgtgcagaacggactcctgactcctacgctcaaggctaagcggccagagttgcgcgagtactttaagaagcagattgaggagttgtactctataagtatgtag

SEQ ID NO: 213301 - DNA, 2094 bp, synthetic construct
  misc_feature 1..2094: note = Description of Artificial Sequence: Synthetic coding sequence
  source 1..2094: mol_type = other DNA
atgcagacccaggagatcttaaggatcctaagactgcctgaactgggtgatctgggtcagttcttcagatcgttatccgccacaacactcgtttcaatgggtgcacttgccgcaatactggcatactggtttacacatcgacccaaggccctacagccaccttgcaacctcctgatgcagtcagaagaagttgaagatagcggaggtgccaggcgctctgtgatcggaagcggccctcagctgctgacccattactacgatgatgcaaggacaatgtaccaggtgttccgacgtggattgtcaatttcgggtaacggaccatgcctgggcttccgaaagccaaaacagccttaccaatggctgagctatcaggaggtcgctgatcgcgctgaattcctggggtctggacttctccaacacaattgtaaagcctgcaccgaccagtttatcggtgtcttcgcacagaatcggcctgaatggataatcgttgagttggcctgttacacatattctatggtggtggtgcccctgtacgacactttgggccctggagccattcgttatattattaacaccgcagacattagcaccgtgatcgtggataagcctcagaaagctgtgctgctgctggaacacgtggagcgtaaagaaacacccggtctgaaattgatcattctgatggacccatttgaggaagctctaaaggagaggggacagaagtgtggagttgtcattaaatccatgcaagcagtagaagactgtggccaggaaaatcatcaggcccctgtgccgcctcagccagacgatctcagtatcgtgtgtttcacttcggggacgaccggaaatccaaagggggctatgctcacacacggtaacgtggttgctgacttcagtgggtttctcaaggtaaccgaaaaggtgatctttccacgtcaggatgatgttctgattagctttctgccattagcccacatgttcgaacgtgttatacaatcagtggtgtattgtcacggaggcagggtagggtttttccagggcgatatccgcctcttgtcagacgatatgaaggcactgtgccccaccatattccctgtggtgccacgcctgttgaaccgtatgtatgacaagattttctcccaggccaatacaccactgaagagatggctcctggaattcgccgcaaaaaggaagcaggccgaagtgcgtagtggcataatcaggaatgattcaatctgggatgagctgttcttcaacaaaatccaggcaagcttgggcggatgcgttaggatgattgtgacaggagctgcacctgctagccctaccgttctagggtttttgcgagctgcacttggttgccaagtttatgaaggctacggacagactgaatgtacagccggatgcaccttcacgactcccggtgactggactagcgggcatgtgggcgctccactcccatgtaaccacatcaagttggtggatgtggaagaattgaactattgggcctgcaaaggagagggtgagatctgcgtgcgcggaccaaacgttttcaaagggtatctgaaagacccggaccgaactaaggaggctcttgatagcgatgggtggctgcataccggtgatatcggaaagtggctccccgcagggactcttaagatcattgatcgtaagaagcatatatttaaacttgcccaaggcgaatatgttgcaccagagaagatagagaacatctatatcagatcccagccagtagctcaaatctacgtccacggggattcccttaaggctttcctggttggcatcgttgtacccgatcctgaagtgatgcccagttgggcccagaaacgtggcatagaaggtacctatgccgacctctgtacgaataaggacctgaaaaaggcaatattggaagacatggtgcgcctcgggaaggagtctggcttacattccttcgaacaggttaaggcaatccatattcactcagatatgttttcggtgcagaacggattactcacccctacgctcaaagctaaaagacccgaactcagagagtactttaagaagcaaatcgaggaactttactccatttccatgtag

SEQ ID NO: 213302 - DNA, 2094 bp, synthetic construct
  misc_feature 1..2094: note = Description of Artificial Sequence: Synthetic coding sequence
  source 1..2094: mol_type = other DNA
atgcagacacaggaaattctgcgaatcttacgcctgcccgaactgggcgatctgggccaattctttagatcccttagcgctaccacactggtgtccatgggggcactagctgccattctcgcatattggtttacacatcgaccaaaagctctgcagccgccttgcaacctgttgatgcaaagtgaagaggtcgaagacagtgggggagccaggcgctcagtgattggcagtgggccacaactgctcactcattactacgacgatgcaaggaccatgtaccaagtctttcggaggggactgtctatttcaggcaacgggccatgcttaggctttcgcaaaccaaagcaaccttaccaatggctgtcctaccaggaagtggctgacagagcagagtttctgggatctggattgcttcagcataattgcaaggcttgtactgaccaatttattggggtgttcgcgcagaaccgtcccgagtggatcatcgtggaactggcgtgctacacctacagcatggtggtagtgcctctgtacgacacactgggcccaggagccatccgatacataattaataccgcggatatctccacggtcatcgtggataagccccagaaagccgtgctcctgctggagcatgtagaacgcaaggagacacctggtcttaaacttattatcctaatggacccttttgaggaagccttgaaagagagaggacaaaaatgtggggtggttatcaagagtatgcaggctgtggaggactgcggccaggaaaatcaccaggctcccgttccaccacaaccagacgatctcagcatcgtctgctttacctctggcaccactggaaatccaaagggggctatgctgacccacgggaatgtggtggctgatttttcaggttttctcaaggtcactgagagtcagtgggcacctacttgcgctgacgtgcatattagttatcttcccctcgctcacatgttcgaaaggatggttcagtccgtcgtgtattgccatggtggaagggtcggattctttcagggggatatcaggctcctcagtgacgatatgaaagctctctgccccactatttttcccgtcgtgcccagacttttgaaccgaatgtatgacaaaattttcagccaggccaacaccccccttaagaggtggctgcttgaattcgctgccaaaaggaagcaggctgaggtccgttcaggtattatcaggaacgactccatttgggacgagttattcttcaacaaaatccaggcatctctgggtggttgcgtgcgcatgatcgtgacaggtgcagctcctgcatcaccgactgtcctgggctttctgcgcgctgcactagggtgtcaggtgtacgagggatatggccagacggaatgcacagcaggctgtacctttaccacccccggagactggacctctggacatgttggggctccactgccatgcaaccatattaagctggtggacgtcgaggagctgaactactgggcgtgtaagggggagggcgagatctgtgtgcgcggtcccaacgtcttcaagggctacctgaaggaccctgacagaacaaaggaagctctggactcagatgggtggctgcacacaggggacattggcaagtggctgccggcaggaaccctgaagattattgacaggaaaaagcacattttcaagcttgcccaaggcgagtatgtagcaccagaaaagatcgagaatatctatattagatctcaacccgttgcgcagatttacgtccatggcgattccctgaaagcgtttctagtcggcattgtggtcccagatccagaggttatgccatcctgggcacagaaaagaggcatcgaagggacgtatgctgatctctgcacaaacaaagacctgaaaaaagctattttggaggacatggtgaggctcggtaaggagtctggcctgcacagcttcgagcaggtgaaagccatacacattcacagcgatatgttcagtgtccagaacggcttgttaacgcccaccttgaaggccaagaggcctgaactgcgcgagtatttcaaaaaacagatcgaggaactttactcaatttccatgtag

SEQ ID NO: 213303 - DNA, 2127 bp, synthetic construct
  misc_feature 1..2127: note = Description of Artificial Sequence: Synthetic coding sequence
  source 1..2127: mol_type = other DNA
atgcccgaatttgtgctgagcctgctggaaaagatgcagacccaggagatcctgagaatattgcgactgccagagttgggcgatctcggccagttctttcgatccctgagcgctacaactctggttagcatgggagctctcgcagcaattttagcatactggtttacacatcgcccaaaggcattacagcctccgtgcaatcttctgatgcaatctgaggaggtcgaggactctggtggggctcgtaggagtgtgattggttccggccctcaacttctcactcactactacgacgacgccagaacaatgtaccaagtgttccggagaggtctatccatcagcggtaacggtccatgtttgggcttccgaaaacccaagcagccttaccaatggctgagctatcaggaggttgcagatcgcgctgagttcctaggttcagggctgctgcagcacaactgcaaagcctgcactgatcaatttataggagtattcgcccaaaaccggccagaatggattatcgttgagcttgcgtgttatacctatagcatggtggtggtgccactgtacgacaccctgggccctggagcaattagatacataatcaacacagccgatattagcactgttatcgttgacaaaccacagaaagctgtcttgctcctggaacatgtggaacgtaaagaaaccccgggtctgaagctgatcatactgatggatccgtttgaagaggctcttaaggaacgaggacaaaaatgcggagtggtgatcaaatctatgcaagccgtggaagactgtggacaggaaaatcatcaggcacctgtcccaccccagcctgatgacttgagcatcgtttgctttacgtccggcactacaggtaatccaaaaggggcaatgctgacacacgggaacgtcgtagccgacttctccgggtttctgaaggtcacagagaaagtcatcttccctcggcaggacgacgtcctcattagttttctccctctcgctcatatgttcgaacgcgtcatccagtctgtcgtttattgccacgggggtcgggttggtttctttcaaggcgacatcaggctcctgtccgacgacatgaaagcactgtgcccaactattttcccagtggttccaagactacttaaccgcatgtacgacaaaatcttctcacaggctaacacacctttgaagagatggctccttgaattcgccgctaaacgcaagcaagccgaggtgaggtccggaatcatccgaaacgattccatttgggacgaacttttcttcaacaaaatacaggcctcactcggaggatgcgtgcgcatgattgtgacgggagccgctccagcatcaccaacggttctgggctttctgcgggcagccctggggtgtcaagtatacgagggctacggccagacagagtgtaccgcgggatgcacgttcactacacctggggactggacctctggccacgtgggggcacctctgccttgtaatcatattaagctggtggatgtagaagagctgaactattgggcgtgtaaaggagagggggagatttgtgtcaggggcccaaacgtctttaaggggtatctcaaggatcctgaccgtactaaagaggctctggacagtgatggttggctccacacaggggacatcgggaaatggcttcctgcaggtacactcaaaattattgatagaaagaaacatatttttaaattggcacaaggcgagtatgtggcacccgagaagatcgaaaacatctacatccgatcccagcctgtggcccaaatctatgtccacggcgatagtctcaaagcgttcctggtggggattgtcgttcccgacccggaagttatgccctcttgggcgcaaaaacggggtattgaaggcacttacgccgacctgtgtacgaacaaggatttaaaaaaagctatactagaggacatggttcggcttggcaaggaaagcgggttgcactcctttgaacaagttaaggcaatccacattcactcagatatgttcagcgtgcagaacgggctcctgaccccaacactgaaggctaaaagaccagagctgagggagtatttcaaaaagcagatcgaggaactgtactctattagcatgtag

SEQ ID NO: 213304 - DNA, 2004 bp, synthetic construct
  misc_feature 1..2004: note = Description of Artificial Sequence: Synthetic coding sequence
  source 1..2004: mol_type = other DNA
atgcagacacaggaaatcttgcgaattctgagattgcccgaactgggggacctcggccagttctttcgctccctatcagccactaccctggtctctatgggagccctggccgcaattttagcctattggttcacacaccgtcctaaagcgctgcaacctccttgtaacctcttgatgcagagcgaagaagtcgaagactcaggtggagctcgacgctccgtgattggttctgggccacagcttctgactcactactatgatgatgcacgcactatgtatcaggtcttccggcgtgggctatcaatctccgggaatggcccatgtttggggttccgcaagcctaagcagccttatcaatggctgtcataccaggaagtggctgatagggccgagtttctagggtctgggctcttacagcacaactgtaaggcctgtaccgatcagtttatcggcgtgttcgctcagaaccggcctgagtggattatcgtcgaactagcctgctacacttatagtatggtggtggtgcctttatatgacactcttggtcctggtgcaataaggtacatcatcaacaccgccgatatctccacagttatcgtggataagccgcagaaggcagtactgctcttggaacacgttgagcgcaaagagacgcctgggcttaagctcattatcctgatggatccctttgaggaagcactgaaggaacggggacagaaatgtggcgtggtgatcaaaagcatgcaggccgtagaagattgtggccaggagaaccatcaagcaccagtgcctcctcagcccgacgacttgagtatcgtatgtttcacctcaggaactacaggcaatccaaagggggctatgcttacccatggaaacgtcgtggccgacttttcaggcttcctcaaagtcacagaaagccagtgggcccctacgtgcgctgacgtccacatttcttacctgcctcttgcgcatatgtttgagcggatggttcagagcgtcgtttactgtcatgggggacgggtaggcttttttcagggtgacatcagactcctttcagacgacatgaaggccctgtgtccaacgatttttccagtcgtccctagactgctgaatagaatgtatgacaaaatcttctcccaagccaatacacccctcaagcgatggctgctggagtttgcagccaagcgaaagcaggctgaggttagaagcggcataatccggaacgatagtatttgggatgaactgttctttaataagatccaagccagtctgggcggatgtgtgcgcatgattgtgaccggagctgcccctgcctcacccacagttctcggtttccttagagcagcgctcgggtgccaagtatacgagggttatggccaaacggaatgtaccgcaggctgcacctttacaaccccaggcgactggacatctggacatgtgggcgctccgctcccttgcaaccacattaaactggtcgatgtggaagagttgaactactgggcatgcaaaggcgagggtgagatctgcgtgagggggcctaacgtgttcaaaggctacctcaaagatcccgaccgcacgaaagaggctctggacagtgatggttggctgcacaccggcgacattggtaaatggctgcctgcaggcactctgaagatcatcgatagaaaaaagcacatttttaaactggcgcagggagagtacgtcgcccctgagaagatagaaaatatatatattagatcccaacctgtggctcagatatacgtccacggcgactcattgaaggcttttctggtgggaatcgtcgtgccagatccagaagtgatgccttcctgggcccagaaacggggaatcgaaggcacatacgcagatctttgcaccaataaggacctgaaaaaggctatcctcgaagatatggtgagacttggcaaggaatccgggctccactccttcgaacaagacctcccccaatgcctgattcagatcaaagtgttcagcaaatattag

SEQ ID NO: 213305 - DNA, 2169 bp, synthetic construct
  misc_feature 1..2169: note = Description of Artificial Sequence: Synthetic coding sequence
  source 1..2169: mol_type = other DNA
atgctgactttttttctcgtttctggtggtagtctctggctgtttgttgagtttgtgctatctctccttgaaaaaatgcagacccaggagattctcagaatccttcgcctcccagagctcggcgatcttgggcaattcttccggagtctatccgcgaccaccttggtctctatgggggcactggcagcgattcttgcttattggtttacgcatcgacccaaggccttacagcccccatgtaatctcctgatgcagtccgaggaggtggaagatagcgggggagcgaggcgatccgtcatcgggtccggccctcagttgttgacacattactacgacgacgcccgaactatgtatcaggtgtttaggagaggcttatctattagcggcaacggaccctgtcttggctttcgcaaacccaaacagccctaccagtggctcagctaccaggaggtggccgaccgcgcagaattcttggggagtggtctgttgcagcacaattgtaaggcttgtacagaccagtttatcggagtctttgcccaaaacagaccggagtggatcattgtggagctcgcatgctacacgtactctatggtggtcgtgcctctgtatgatactctcgggcctggggctattagatacatcattaacacagcggatatatctaccgtcatcgtagataaaccccagaaggccgtgcttttactcgaacacgtagagcggaaagaaacaccaggcctgaaattaatcatacttatggatcctttcgaagaggcgctcaaagagaggggacagaaatgtggcgtcgttattaaaagcatgcaggccgtagaggactgtggtcaggagaatcatcaagcccctgtgcctccccaaccagatgatttgtcaatagtgtgtttcacctcggggacgaccggcaatcccaaaggggctatgcttacccatggcaatgtggttgcggacttctccggctttcttaaagtaactgagaaagtcatcttccctagacaggacgacgtgctcatttcttttctgcctctggctcatatgtttgaaagagtcatccagagcgtcgtgtattgccacggcggtcgcgtaggcttcttccaaggcgacataagattacttagtgacgatatgaaggcactatgtcctactatttttccagtggtgccacgcctgcttaacagaatgtatgacaagatctttagtcaagccaacactccccttaagaggtggcttcttgaatttgctgcaaagaggaagcaggccgaggtaaggagcggaattattcgcaacgactccatctgggatgaactgttttttaataagattcaggcctccctcggcggatgtgtgcggatgattgtgacgggtgctgcgccagcttcccctactgttctcggttttcttagagctgcccttggttgccaagtgtatgagggctacggacagactgagtgtacagctggttgtacattcaccaccccaggtgactggacatctgggcacgtgggcgctcccctcccctgtaatcatattaagctcgttgacgttgaagagctaaactattgggcttgcaagggcgagggagagatctgcgtcagaggaccaaatgtctttaagggataccttaaggatcccgataggacaaaagaggcactggatagcgacggatggctgcacactggagacataggaaaatggcttccagccggtaccctgaagatcatcgatcgcaagaagcacattttcaaacttgcgcagggcgaatatgttgcccctgaaaaaattgaaaatatctacatcaggtcacagcccgtcgcgcagatttatgtacatggcgattctctgaaggcttttcttgttggaatcgtggttccggatccggaagttatgcccagttgggctcagaagagaggtatagagggtacctatgctgatctttgcactaacaaggatctcaagaaagccatcctagaggatatggtgaggttggggaaggagagcgggctgcactcctttgaacaagtcaaggcgatacacattcactcagatatgttttctgtgcagaatggcctgcttacaccaacgctgaaggctaaaaggcctgaactaagggaatactttaaaaagcaaatcgaagaattatactctatatccatgtag

SEQ ID NO: 213306 - DNA, 2139 bp, synthetic construct
  misc_feature 1..2139: note = Description of Artificial Sequence: Synthetic coding sequence
  source 1..2139: mol_type = other DNA
atgcagacccaggagatcttacgtattttgcgcctaccagaattgggagatctgggacagtttttcaggagtctctctgcaactactcttgtttccatgggcgcactcgctgccatcctcgcttactggtttactcaccgccctaaggctttacagccgccatgcaatctgctgatgcagagcgaagaagtggaggatagcgggggagctagaaggagcgtgatcggttcaggccctcaacttttaacccattattacgacgacgccagaacaatgtaccaggtgttccgcaggggtctgtcgattagcggaaacggcccttgccttggattccgcaagcccaagcagccatatcaatggttgagttatcaggaagtagccgacagagccgagtttctgggctctgggctgttgcagcataattgcaaggcctgcaccgatcagttcattggagtgtttgcgcagaaccggcctgaatggatcatcgtcgaattggcatgttatacttacagcatggtggttgtccccctttacgacaccctgggtccaggagccatcagatacatcatcaacaccggtctgagttgtcaggaaggtgcctccgccacagcctccacccaggctgacatttctactgtgatcgtcgacaaaccgcagaaggctgtgctgctccttgagcatgttgagcgaaaagaaacaccagggctcaagttaatcatactgatggatccatttgaggaagctctgaaagaaaggggccaaaagtgcggagtggtaattaagtctatgcaggcagtggaagattgtgggcaggaaaaccaccaagcccctgtccctccacaacctgatgatttgtccattgtatgtttcaccagtggtaccactggtaatcctaagggggcaatgctgacacacggtaatgtcgtggcggacttctcgggattcctcaaagtgacggaaaaggtaatcttcccaagacaggacgacgtccttatatcatttctccctcttgctcacatgtttgagagggtgattcaatccgtcgtctattgtcacggcggaagagtgggatttttccagggggacattagactgctgtcagacgacatgaaggccctgtgccctaccatattccccgtggtgcctcgcctgctcaataggatgtatgacaagatcttcagtcaggccaacactccactcaagcgttggcttctggagttcgcagcaaagcgcaaacaagccgaggtcaggagtggaatcatccgtaacgactcaatatgggacgaacttttctttaataaaatccaggcctctctcggtgggtgtgtccggatgatcgttaccggcgctgcccctgcgagtcccaccgtgcttggttttcttcgggctgccctcgggtgccaagtgtacgaaggctatgggcagacagaatgtacagctggatgcaccttcacgacccccggtgactggacgtccggccatgtaggggctccgttaccctgtaaccacattaagctggttgacgtcgaagaacttaattattgggcctgcaaaggggaaggtgaaatttgcgtgcggggacccaatgtgtttaaagggtacctgaaagaccccgatagaacaaaggaagcactggatagtgacggctggctgcatacgggagacattggtaagtggttacctgccggaaccctgaaaatcatcgaccggaaaaagcacatattcaagctggcacaaggcgagtatgtggcgcctgaaaaaatagaaaatatttacattcgcagccagcccgtagcccagatttatgtgcatggagactctttaaaggccttcctcgttgggatagtggtgcctgatccggaggtgatgccctcttgggcacagaaacgtggcattgaaggtacttatgccgacctatgtaccaacaaggatctcaagaaggcaattctggaggatatggtccgactgggtaaagagagcgggctgcacagcttcgagcaggtcaaggctatccacattcacagcgatatgttttccgtgcagaacgggctattgacacctactctgaaagctaagcggccagagttacgggaatatttcaaaaaacagattgaggagctgtattcgatctctatgtag

SEQ ID NO: 213307 - DNA, 2094 bp, synthetic construct
  misc_feature 1..2094: note = Description of Artificial Sequence: Synthetic coding sequence
  source 1..2094: mol_type = other DNA
atgcaaacccaagagatactgcggattctgcgtctgccggaactgggcgacctcggacaattttttcgatctctgagcgctacgacactggtgtctatgggagccttggctgccattctggcatactggtttacgcacagacccaaagcactccagccaccttgtaacttgcttatgcagagtgaagaggtcgaggactccggaggtgctcgacggagtgtgattggcagcgggccacagctgctgacccactactacgatgacgcgagaaccatgtatcaggtctttaggagaggactctctatctctggcaatggcccatgtcttgggttccggaagcccaagcagccttatcagtggctgtcgtaccaggaggtggccgatcgagccgaatttctgggcagcgggctgctacagcacaattgtaaagcctgcactgatcagtttatcggagtgtttgcacagaacaggccagaatggattattgttgagctcgcctgctacacgtactctatggtcgtcgtgccactctatgatacactcgggccaggcgctattcgttacattatcaatactgctgacatctcaaccgttatcgtggacaagccgcaaaaggccgtgctgctcctggagcacgtagaacgtaaggagactcctggtttgaaacttatcatattgatggaccccttcgaggaagcactcaaagagagggggcagaaatgtggggttgtgataaaatcgatgcaagccgtggaggactgcggtcaggagaaccatcaagcaccggtacctccccagcctgatgatctgagtatcgtctgtttcacatcaggtactacgggcaaccctaagggagctatgctgacccacggcaatgtggtagcagacttcagcggatttttgaaagtcacagagagccagtgggctccgacttgcgccgatgtacacatatcttatttgcccctggcccacatgtttgagcgcatggtgcagtccgtcgtgtattgtcacggtggacgcgtgggcttctttcagggtgatatcaggctgctatctgatgatatgaaagccctgtgtccaacgatttttcctgttgtgccaagattgctcaatcgcatgtacgataagatcttttcccaggctaatacccctctcaaacgatggctgttggagttcgctgcaaagaggaaacaggcagaagtcagatcgggcattatacgtaatgattcaatttgggatgaattatttttcaataaaatccaggcaagcctgggcggatgcgtccgcatgattgtgacgggcgctgcacctgcatcgcctaccgtccttggattcctgcgggctgccctcgggtgccaggtttacgagggttacggccagactgaatgcacagcaggttgtacctttactacacctggcgattggactagtggccacgtgggggcacctctgccttgtaatcatatcaagctcgttgatgtggaggaactcaattactgggcgtgcaaaggcgaaggggagatctgcgtgagaggtccgaacgtgtttaaaggttatctcaaggatccagaccggaccaaggaggctctcgatagcgatggctggctccatacgggggatattggaaagtggctgccggctgggacactcaaaattatagataggaaaaagcacatattcaagctggctcagggggaatatgtagcgcctgaaaagatagagaacatttatataagatcccagccggttgcacagatttacgtgcatggagattcgctgaaggcttttcttgtagggatcgtggtacccgatccagaggtgatgccaagttgggcgcaaaagagggggatcgagggtacatacgcggacttatgcaccaataaagacctgaagaaggcaattctagaggatatggtcaggcttggtaaggaatccggactccattctttcgaacaggtcaaagcaattcacatccattcggacatgttttccgtgcaaaacggacttctgacacctaccctgaaagccaagcgccctgagctgagggaatactttaagaaacagattgaagagttatatagcattagtatgtag

SEQ ID NO: 213308 - DNA, 1821 bp, synthetic construct
  misc_feature 1..1821: note = Description of Artificial Sequence: Synthetic coding sequence
  source 1..1821: mol_type = other DNA
atgtaccaggtgtttcggaggggactgtctattagcggaaatgggccttgtttaggcttcagaaagcccaagcagccatatcaatggttaagctaccaggaggtggccgacagggctgagttcctcggcagcggactgcttcagcacaattgcaaggcttgcaccgatcagttcatcggtgtctttgcacagaatagacctgagtggattattgttgagctagcatgctatacctacagtatggtcgtcgtgccactgtacgacactttaggcccaggggctattagatatattattaataccgcagacatcagcacagtcattgtcgacaagccccagaaagccgtccttctgttggaacacgtggaacgcaaagagacacctgggctgaaattgatcatacttatggatccattcgaggaagcactgaaggagagaggacagaagtgcggcgtcgtaattaagtcaatgcaggctgttgaggactgcggccaggagaaccatcaggccccagtgccaccccagcccgatgacctctccatcgtctgttttacctcaggaactaccgggaacccaaagggcgctatgctgacacatgggaatgttgtggcggatttctcgggctttctcaaggtgaccgaaaaggtcatctttcctaggcaagatgacgtgctcatatcattccttcctctggcccatatgttcgaacgtgtaatccaatctgtcgtttactgccatgggggtcgtgtgggcttctttcagggcgacatccggctcctatcagatgacatgaaggctctctgccctacaatcttccctgtcgtgcccagactcctcaatcgtatgtacgataaaatcttctctcaggccaatactccccttaagaggtggctgctcgagtttgccgctaagcggaagcaggccgaggttcggtcaggaatcattcgaaatgactccatttgggatgagctcttctttaataagattcaggccagtttagggggttgcgtgcggatgattgtgactggagcagcacctgcaagcccaaccgtcctggggtttctcagggctgctttaggctgtcaggtttacgaagggtatggccagaccgagtgcactgcagggtgtactttcactactccaggggactggaccagcggacatgtgggggctcctttgccctgtaatcacattaaacttgtcgacgtggaggaactcaattactgggcctgtaagggcgagggtgagatctgcgtgcgtgggccaaacgtgttcaagggttatttgaaggatcccgataggaccaaagaagccctcgactcagatggatggctgcacaccggggacatagggaaatggctccccgcagggaccctgaagattatcgacaggaaaaagcacattttcaaactcgcacaaggagagtatgtagcgcctgagaagatagaaaatatctatattcgctcacagcctgttgctcagatctacgttcacggagacagcctgaaggcattcctcgtgggcatagtggtgcctgacccagaggtcatgccctcatgggcacagaagcgaggaatcgaaggcacctacgccgatctgtgcaccaacaaagatctgaagaaagcaattcttgaagacatggtgcgcctgggcaaggaaagtggacttcatagcttcgaacaagttaaagctatccacatccattccgacatgttcagcgtgcaaaatgggctgttgacgcctaccttaaaggccaaacgacctgaactaagggagtacttcaaaaaacagatagaggagctctacagcatctccatgtag

SEQ ID NO: 213309 - DNA, 1386 bp, synthetic construct
  misc_feature 1..1386: note = Description of Artificial Sequence: Synthetic coding sequence
  source 1..1386: mol_type = other DNA
atgtcccgccaagtggtcagatccagtaaattccgacatgtatttgggcagccagctaaggccgatcagtgctacgaagacgtgagagtctctcagacaacatgggatagtggcttttgtgccgtcaacccgaagtttgtggcccttatctgtgaggcctctggaggaggcgctttcttggttttgccactgggcaaaacagggagggtggacaaaaacgccccaacggtgtgtggtcacaccgcccctgtacttgacatcgcctggtgcccccataacgacaacgtgatcgcatcaggtagcgaggattgtacagttatggtgtgggaaattcctgatggaggattgatgctgcccctgcgggagcccgtcgttaccttggaggggcatacaaaaagggtcgggatagtagcatggcacacaaccgcacaaaacgtactgctctcagccggatgcgataatgttatcatggtctgggatgtcggcacaggagccgcaatgcttacattaggtcctgaggtccatccggacacaatttatagtgtcgattggagtcgggatggaggcctcatatgtacgagttgccgtgataagcgggtcaggattatcgaaccaagaaaggggacagtggtcgcagagaaagaccgcccacacgaaggtacgagacctgtgagggctgttttcgtgtccgaggggaagattttgacaactggattctctaggatgtcagagcggcaggtggccttatgggacacgaaacacttagaggagccactcagtttgcaggagttggataccagctccggagtcctgctgcctttttttgatcctgacaccaacatagtgtatttgtgcgggaagggggatagttccatccggtactttgagatcacttctgaggcaccatttctgcattacctgtctatgttttccagcaaggagagtcaaaggggcatgggctacatgcccaaacggggactggaagtgaataagtgcgagattgctagattttataagctgcatgaacgacgctgtgaaccaatagccatgactgtcccaaggaaatctgacctgtttcaggaggacttgtaccccccaacggctggaccagatcccgctctcaccgccgaggagtggctaggagggcgtgatgccggacccctgttaataagccttaaagacggctacgtgccacccaaatcaagagaactcagagtgaaccggggattagatacggggagaaggagggctgccccagaagcctctggcacacctagttctgacgctgtgtccaggcttgaggaggagatgcgcaaactgcaggccaccgtacaggaactccagaaacgcctcgatcgcctggaagaaacggtgcaagcgaaatag

SEQ ID NO: 213310 - DNA, 1734 bp, synthetic construct
  misc_feature 1..1734: note = Description of Artificial Sequence: Synthetic coding sequence
  source 1..1734: mol_type = other DNA
atgcagtggctaatgaggtttaggaccttgtggggcattcataagtcttttcacaacattcaccccgctccatcacagcttagatgtaggtcactgagtgagtttggcgctccgaggtggaatgactatgaggtgcccgaggaatttaactttgcctcttacgtcctcgattactgggcccagaaagagaaagagggaaaaagaggacccaacccagccttctggtgggtaaacggacagggagacgaagttaaatggagcttccgggaaatgggggatcttacacgcagagtcgcgaatgtcttcacacaaacctgcggactgcagcagggcgatcacctggccctgatgctgccgagggtgcctgaatggtggctggtggctgtggggtgcatgagaaccggcataatattcatcccggctactatcctgctgaaggctaaggacattctgtatagattgcagctgagcaaggcaaaaggaatcgtgactattgacgcccttgccagcgaagtggactcaattgctagccagtgcccttctctgaaaacgaagctgctcgtgagcgaccacagtcgggaagggtggcttgattttcgcagtctggtgaagtccgcatcaccggagcacacatgtgtgaaatcaaagacactcgacccaatggtgatcttctttacatccgggacaaccggattccctaagatggctaagcatagtcatgggctcgccctccagccatcattcccgggttctcgaaagctccgtagcctgaagaccagtgatgtgtcctggtgtctcagtgacagcggatggattgtggctaccatctggacactggtggaaccctggaccgccggttgtactgtctttattcaccatcttccacagttcgatacaaaggtgatcattcagaccttgctgaagtatccaatcaatcacttttggggcgtgtccagcatttacagaatgattcttcagcaagacttcacctctattcgcttcccagccctcgagcactgctataccggcggagaagtcgtcctcccaaaagaccaggaagaatggaagagaagaaccggtctgctgctctacgaaaactatggtcagagcgagaccggcctaatctgcgctacttactggggtatgaagatcaagccaggcttcatgggaaaagccacacccccttacgatgtgcaggtgattgatgataagggaagcatcctgcctcctaatactgaagggaacatcggaattcggattaaacctgtgcgaccggtctccctctttatgtgttacgaaggggaccccgagaaaactgccaaggtcgaatgcggcgatttttacaacacaggcgataggggaaaaatggacgaagaaggctatatctgttttctcggtcgatctgatgacattattaacgcctcaggctatcgaataggccctgcggaggttgaatctgccctggtcgaacacccagcagttgcagagagcgcagtggttgggtctcccgatcctatccgaggggaggtcgtcaaggccttcattgtgctgaccccacagttccttagccacgataaggaccaattgacaaaggagctacagcaacacgtgaaatcagtgaccgcaccatataagtatcccaggaaagtggagtttgttagtgagcttcctaagactatcactggaaaaattgaaagaaaagagctgagaaagaaggaaaccggacagatgtag

SEQ ID NO: 213311 - DNA, 1734 bp, synthetic construct
  misc_feature 1..1734: note = Description of Artificial Sequence: Synthetic coding sequence
  source 1..1734: mol_type = other DNA
atgcagtggttgatgaggttcagaacactgtggggaattcataagagctttcacaacatccatcctgccccatcacagctgaggtgtcggtctctgtccgaattcggtgcaccacgttggaatgactatgaggtgcccgaagagttcaactttgcatcttatgtgttagactactgggcgcagaaggagaaagaagggaaaagagggccaaaccctgccttctggtgggtgaacggccagggcgacgaggtgaaatggtcgttcagagagatgggagatctcacgaggcgggtggcgaacgtgtttacccaaacctgtgggctccagcagggagatcacctcgccctgatgctaccaagagtcccggaatggtggttggtcgcagtgggatgcatgaggacaggcatcatctttattcctgccactatcttgctcaaggctaaggacatattgtacagactacagctttctaaggctaagggcatcgtcactatcgacgccctggcctccgaagtagactctatcgcttcacagtgccccagtttgaagacaaaactgttggtctcagaccactcacgggagggttggctcgactttaggagcctcgtcaagtctgcctcacctgaacacacttgtgtgaagagtaaaaccctggaccccatggtcatcttctttacaagcgggactactggatttcctaaaatggccaagcactcccacggactggcattgcagccatcattccccggtagcagaaagttgaggtccctgaagaccagtgacgtcagctggtgtctctccgatagcggctggatcgtggccacaatttggactctggtggagccctggaccgcaggctgtacagtcttcattcaccatctcccccagttcgacaccaaagtgatcatccagactttactgaaataccctattaaccatttctggggcgtgtccagcatttaccgtatgattctacagcaggacttcacttccatcagatttccagctttagagcattgctacactggcggagaagtggtactgcctaaggaccaggaggaatggaaaaggcgcactggacttctactgtacgagaactatgggcaaagcgaaacaggtctgatctgcgccacgtactggggaatgaagataaagcctggcttcatgggcaaagcgactcccccatacgatgtccaggtgatagacgataaaggtagtattttgcctcccaatacagaagggaatatagggatcagaatcaaaccagtccgtcctgtctcccttttcatgtgttacgagggcgaccccgagaagacagcaaaggtagagtgtggagatttctacaacaccggggaccgcggtaagatggacgaggaaggatatatatgctttctgggccgttcagacgacatcatcaacgcttctggatatcggattgggccagcagaggttgagtctgccttagtggagcatcctgcggtcgcagagtctgccgtcgttggaagcccggaccctatccggggagaggtggtgaaggcttttatcgtgttaacccctcaatttctaagccacgataaggatcagctgaccaaagagttacagcagcacgttaagtccgtaaccgccccttataagtatcctcggaaggtcgaattcgtgtctgaactaccaaaaacgatcaccggcaagatagagaggaaggagctgcgaaagaaagaaactggacagatgtag

SEQ ID NO: 213312 - DNA, 465 bp, synthetic construct
  misc_feature 1..465: note = Description of Artificial Sequence: Synthetic coding sequence
  source 1..465: mol_type = other DNA
atgcagtggcttatgagattcaggaccctttggggcattcataagagctttcataacatacatcctgccccaagccagcttcggtgtcgctccctgagcgagtttggcgcacctcggtggaacgattacgaggtccctgaggagttcaactttgctagctatgtattggactattgggcccaaaaagaaaaggaagggaagcggggtcccaatccagccttttggtgggttaacggtcaaggagacgaggtgaagtggagctttagagagatgggcgacctcacccggcgtgtggcaaacgtcttcacacaaacatgcggccttcaacagggtgaccacctcgcactgatgttgccccgtgtgccggagtggtggctcgtggccgtcggttgcatgcgcactggcattatctttatccctgctacgatcttgctcaaagcaaaagatattctgtacagattgtag

SEQ ID NO: 213313 - DNA, 1533 bp, synthetic construct
  misc_feature 1..1533: note = Description of Artificial Sequence: Synthetic coding sequence
  source 1..1533: mol_type = other DNA
atgcgacccggtctaagctttctcctggcactgctgttcttcctggggcaggcagctggcgatctcggtgatgtcgggccacctataccatcgcccggattctcttcattccctggcgtggattcatcaagttccttttctagcagcagccgatccggttccagcagttcacggtctctgggatctggcggtagcgtgtcacagctcttttcaaacttcacagggagcgtggacgatcgtggcacgtgtcagtgctcagtctctttgccggatacgacctttcctgtggatagggttgaaagattggagttcacggcccatgtgctctctcaaaaattcgaaaaagaactctctaaggtgagagagtacgtacagctgatctcagtgtatgagaagaagctgctgaatctcaccgtccggattgatattatggagaaggacacaatatcttatactgaactggatttcgagctgatcaaggtggaagtaaaggaaatggagaaactcgtcatccagttgaaagaaagtttcggagggagcagtgaaattgtcgatcaacttgaagtagaaatacggaatatgactctgctggtcgagaagctcgagaccttggacaaaaataatgtcttagccatccggagagagattgtagcactgaaaacaaagttaaaagagtgcgaagcatcaaaagatcaaaacacgccagtagtccacccaccccctacccccggttcctgcggtcacggtggggttgtcaatatcagcaaacctagcgttgttcagcttaattggcgcggattttcttacctgtacggcgcttgggggagggattactccccacagcatccgaataaaggactgtattgggtggccccactgaacaccgacggacgccttctcgaatactatcgtttatataatacactggacgatctcctgctgtacattaatgccagagagttgcggatcacatatggccaggggtccgggaccgcggtgtacaacaacaacatgtacgtgaacatgtataacacgggtaacattgcacgggttaacttgaccaccaatacaatcgccgtgacccagacactgcctaatgctgcgtataataaccggttttcctacgctaatgtggcttggcaggacattgactttgctgtggacgagaacggactgtgggtcatatattccactgaggcttctacgggaaacatggtaatatccaaactgaatgatacgaccttacaggtgctcaacacctggtacacgaaacagtacaagcctagcgcgtcaaacgcatttatggtgtgcggagtcctgtacgcaacccgcactatgaacaccagaactgaagagatcttttattattacgataccaatactggtaaagagggcaagctggatatagtgatgcacaagatgcaagagaaggtgcagagcataaattacaacccgtttgaccagaaattgtatgtctataatgacggttatctactcaactacgacctctccgtgctgcagaagccgcagtag

SEQ ID NO: 213314 - DNA, 1734 bp, synthetic construct
  misc_feature 1..1734: note = Description of Artificial Sequence: Synthetic coding sequence
  source 1..1734: mol_type = other DNA
atgcactggctgcggaaagtccagggcctgtgtaccctttgggggacccaaatgagctcccgtactctgtacataaattctcgccagttggtgtctctgcaatggggacaccaagaggtgcctgccaaatttaacttcgccagcgatgttttagatcattgggctgacatggaaaaagctggtaagaggctgcccagccccgctctctggtgggtgaacggcaagggcaaggaactgatgtggaactttcgcgagctgtctgaaaactcccagcaagcagcaaacgtgctttcaggagcatgcggattacagcggggagacagggtagccgtggtactgcctagggtgccagagtggtggttagtaatcttgggctgtatccgcgcaggtctgatcttcatgccaggcaccatccaaatgaagtctaccgacatcctctaccggctgcagatgtctaaagcaaaagctattgtggcgggagacgaagtgatccaggaggttgacaccgtggcatcagaatgcccttctctgaggattaagctgctggtttctgaaaagtcatgtgacggttggcttaatttcaagaagcttcttaatgaggcctccaccacccaccactgtgtggagacaggatctcaggaagcaagcgcaatctacttcacatctgggactagcgggctgcctaagatggccgagcacagctattcgtccttgggtctgaaagcaaagatggacgcgggttggacaggactgcaggcttctgatattatgtggactatcagcgacactggctggatactgaacattctgtgcagcctgatggagccttgggcgcttggcgcatgtaccttcgtccacctcctgccaaaatttgaccctctcgttattctcaagacactgtcctcttaccctatcaagtctatgatgggtgctccaatcgtctatagaatgttgctgcaacaggaccttagtagttacaaatttcctcacctccaaaattgcgtgacagtcggagagagcctgttgcccgaaacgctggagaattggcgcgcacaaactggcctggacattagggagtcctatggccagacagagacggggctgacatgcatggtatcaaaaaccatgaagatcaaacccggatatatgggcacggctgcctcttgttatgatgtgcaaatcattgatgacaagggcaatgtcctccccccaggcactgagggggatattggcatccgggttaaaccaataaggccaataggcatttttagtgggtatgtcgacaatcctgataaaactgcggctaatatcaggggcgatttttggctactgggtgatcggggtatcaaggatgaggacggatactttcagtttatgggtagggcaaacgacattatcaacagtagtggatacagaattggtccttccgaggttgagaacgcactcatggaacacccagctgttgtagaaacagctgtgatctcgtctcctgatccagtaaggggagaagtggtgaaagcgtttgtcgtgctggcgtcacaatttttaagccatgatcccgagcaacttaccaaggagctgcagcagcatgtgaaaagcgtcaccgctccatacaaatacccacggaaaatcgagtttgtgttaaacctgcccaagacggtaaccggaaaaatacaacgtgcaaagttgagggacaaagagtggaaaatgagtggaaaagctagggcacagtag

SEQ ID NO: 213315 - DNA, 1497 bp, synthetic construct
  misc_feature 1..1497: note = Description of Artificial Sequence: Synthetic coding sequence
  source 1..1497: mol_type = other DNA
atgtggaactttagggagctgagcgagaattcccaacaggcggcaaacgttctgagcggagcctgcgggctgcaaagaggggaccgcgtggccgtggtgctgccacgggtgccagagtggtggctggtaatactcgggtgcattcgcgctgggctaattttcatgcctgggacaatccagatgaagagcactgatatactgtatagattgcagatgtctaaagccaaggcaatcgtggcgggtgatgaggtcatccaggaggtggataccgtggcttctgagtgcccaagtctgcgcatcaagctgttggtcagcgaaaaaagctgtgatgggtggctcaattttaaaaagctgttgaatgaggcaagtaccactcatcactgcgtcgaaactggatcccaggaagctagcgccatatacttcactagcggaacatccggacttcctaagatggctgaacatagctacagctctctggggcttaaagccaagatggatgctggatggacaggcttgcaggcctctgacatcatgtggactatttctgacacaggatggatcttgaatattctgtgttcactcatggagccctgggctctgggcgcttgtactttcgtgcatctgctccctaaatttgaccctctcgtgattctgaagaccctgtcctcctaccccatcaaaagcatgatgggcgctcctattgtctaccgcatgcttttacagcaggacctatcaagttataaatttccacacttacagaattgcgtgactgtgggtgaaagcctgctccccgaaaccctggaaaactggcgggcacagacaggtttagatatcagggagagctacggccagactgaaaccgggttaacctgcatggtttcaaaaaccatgaagataaagcctgggtacatgggaacagccgctagttgctatgatgtccagattattgatgacaaggggaacgtgttgccaccaggaactgagggtgatattgggatcagagttaagcctattcgtccaattggaattttttcaggctacgtagacaaccctgacaaaacggccgctaacattaggggagatttctggctgctcggtgacagaggaatcaaggacgaagatgggtacttccagtttatgggacgggctaatgacatcatcaattcttccggctatcgcattggcccaagcgaagtggagaatgctctgatggaacatccagccgtggtcgagacagctgtaatctcttctcccgatcccgtcaggggcgaggtggtaaaggccttcgtggttctggcctcgcagttcttatcacatgatccggagcagcttaccaaagagttacagcagcatgtgaagagcgttaccgcaccatacaagtatccccgaaagatcgaattcgtcctcaatctgcccaaaacggtgaccgggaagatccagagagccaaattacgcgataaggagtggaagatgtctggtaaagccagggcgcagtag

SEQ ID NO: 213316 - DNA, 627 bp, synthetic construct
  misc_feature 1..627: note = Description of Artificial Sequence: Synthetic coding sequence
  source 1..627: mol_type = other DNA
atgcactggctgagaaaagtgcagggcctgtgcaccctttgggggacccaaatgtcgtccagaacgctctatattaattcaaggcagctagtctcccttcagtggggccatcaggaggtaccagctaagtttaatttcgcctccgatgtgctcgaccattgggccgacatggagaaggctggcaagagacttccaagtcccgctctctggtgggttaacgggaaaggcaaagagcttatgtggaattttagagaactcagcgaaaactcccagcaggccgctaatgtcctttccggagcttgcggtctgcagcgaggagatcgggtagctgtagtgctccccagggtccccgagtggtggctagtgattctgggttgtattagagccggactgatttttatgccagggaccatccaaatgaaatctacagatattctgtaccgcctgcagatgtccaaagccaaggccattgtggctggggacgaagtgattcaagaagtggatacagtggcaagcgaatgtccaagtctgaggatcaaactgttggtatcagagaagtcatgcgacggatggctcaattttaagaagttactgaagtataaagtccgacacagagacgtgaagtag

SEQ ID NO: 213317 - DNA, 1050 bp, synthetic construct
  misc_feature 1..1050: note = Description of Artificial Sequence: Synthetic coding sequence
  source 1..1050: mol_type = other DNA
atgcgtcatccacccctcataacagtgtggcgattggaagctaagatggacgcaggctggacagggctgcaagctagcgatatcatgtggactatctccgataccgggtggatcctgaacattttgtgtagtttaatggagccctgggctcttggggcttgtacattcgtccacctgctgcctaagttcgaccccttggtaattctgaaaactctaagttcctatccaattaagagtatgatgggcgctcctatagtatataggatgttactgcagcaggacttgtcttcctataagtttccccacctccagaattgcgtgactgtgggagagtctctacttcctgagaccctggagaactggcgtgcacagactgggctcgacatccgggaatcatacgggcaaaccgaaaccggactgacatgcatggtttccaagacaatgaaaatcaaacctggatacatgggcaccgcagcttcatgttatgatgttcaaatcatcgatgataaaggcaacgtcctccctcccggtaccgaaggtgatattggcataagggtgaagcctatcagaccaattggaatcttttcaggctacgtcgataatccagataagactgcagcaaacatcaggggggatttctggctcctgggagatcgcggaatcaaggacgaagatggctattttcaatttatgggcagggccaatgacatcataaacagctctggctaccggatcggtcccagtgaggtcgagaatgctctgatggagcacccggctgtcgtggagacagctgtgatctcatctccagatccagtgcgcggtgaggttgttaaggcctttgtagtattggcatctcaatttctctcccatgaccccgaacagctcacgaaagagttacaacagcacgtcaagtctgtcaccgccccatacaagtatccacggaagatcgagttcgtgttaaacttgcccaagactgttactggcaagatccagcgagctaaactcagagataaagagtggaaaatgtcaggcaaagctcgcgctcagtag

SEQ ID NO: 213318 - DNA, 1734 bp, synthetic construct
  misc_feature 1..1734: note = Description of Artificial Sequence: Synthetic coding sequence
  source 1..1734: mol_type = other DNA
atgcactggttaagaaaggtccagggcctctgcaccttatggggcacacagatgtcttcccgcaccctgtatatcaactctaggcagcttgtatcattgcagtggggccaccaagaagtgccggctaagttcaatttcgcgagtgatgtcttggatcattgggccgatatggaaaaagctggcaagagactcccatcacctgccctctggtgggtgaacgggaagggtaaagagctgatgtggaatttccgggagctcagtgagaacagccaacaggcagccaatgtgctcagtggtgcgtgcgggttgcaacgaggcgaccgcgttgcagtagtcctgccaagagtccccgaatggtggttagtcatcttgggctgcatacgggctggcctaatctttatgccagggacaatccaaatgaaaagcacagacattctgtatcgcctgcaaatgtcgaaggccaaagccattgtggcaggcgatgaagtaatccaagaagtcgacaccgtagccagtgagtgcccaagcctgcggatcaagctgctcgtgtctgagaagtcctgcgacggttggctcaattttaagaaactgctgaatgaagctagtacaactcaccattgcgtcgaaacaggctcccaagaggcatcggctatctatttcactagcggaacatcaggcctgccaaaaatggctgagcattcttatagttctctggggctcaaagccaaaatggacgcgggatggactggtttgcaggcatcggacattatgtggaccattagtgacacaggatggatactgaatatactctgtagcctcatggagccctgggccctcggggcttgtacgtttgtccacctcctgcccaagtttgaccccttagtgattcttaagacactgagcagttaccccattaagtctatgatgggagcacccatcgtgtatcgaatgctgctgcaacaggatctgagtagctataagttcccgcacctgcaaaactgcgtcactgtgggcgagtctctgcttcctgaaacactagagaactggagagcgcaaaccgggcttgacattcgggagagctacgggcagactgagacaggcttgacctgtatggtgagcaagaccatgaaaataaagccaggatacatggggaccgccgcatcctgctatgatgtgcagatcatcgatgataaggggaatgtgctaccccctggcaccgagggcgacatagggatccgcgttaagcctattaggcctattggcattttctcaggatatgtggacaatcctgacaagacagctgctaatattaggggcgatttctggctgcttggagatcgagggatcaaagacgaggatggttacttccagtttatggggcgtgccaatgacatcattaactcttctggctatagaatcgggccatcagaagttgaaaacgccctaatggagcacccagccgtcgtggaaacagccgtcatcagtagcccagatccagtgagaggggaagtagtaaaggccttcgtggtcttggcctcccagtttctgagccacgatcccgagcaattaaccaaagaattgcagcagcatgtcaagtccgtgactgcaccatacaaatacccaagaaagattgagtttgtgctaaatttaccaaaaacagtgactggtaaaattcagcgagcaaaacttagagataaagaatggaagatgagcgggaaggcgcgtgcccagtag

SEQ ID NO: 213319 - DNA, 1734 bp, synthetic construct
  misc_feature 1..1734: note = Description of Artificial Sequence: Synthetic coding sequence
  source 1..1734: mol_type = other DNA
atgcattggctgaggaaagtgcagggactttgtaccctgtggggcacacagatgagcagtcgcactctctacattaatagccgtcagctggttagcttgcagtggggacaccaggaggtgccggcaaaattcaatttcgccagcgatgtgttggaccattgggcggatatggaaaaagcgggtaaacgcctcccaagtcctgcgttgtggtgggtcaacgggaagggtaaggaactgatgtggaactttagagagctttctgaaaactctcagcaagcagccaacattttatcaggcgcatgtgggctgcagcgaggcgacagagtggccgtgatgctcccgagagtgcccgagtggtggttggtgatcctgggctgtattcgagccggactgattttcatgccaggtactatacaaatgaagagtaccgatattctgtaccgcctgcagatgtcaaaggctaaagccattgtcgcgggtgacgaggtgatccaggaggtggacacagtcgcgtcagaatgtcctagcctcagaatcaagttactagtgtccgagaagagctgcgacggctggctgaattttaagaaactgctgaacgaagcctccaccacccaccactgtgtggaaacaggctctcaggaggcatctgccatctacttcacatctggcactagcggtctccccaaaatggctgagcactcttactcgtctctcggactcaaagccaagatggacgccggatggaccgggctacaggcgtctgacataatgtggaccatcagcgacacagggtggatcttaaatatacttggttccctcctggagtcatggactctcggggcttgcacattcgtgcatttgctgcccaaatttgaccctctggtcattctcaaaactctttccagttatccaattaagtcgatgatgggcgctcccattgtgtatcgaatgctccttcaacaggatctctcttcatataaatttccgcacctacagaattgcctcgcaggtggtgagtctttgctccccgaaactctggagaattggcgtgctcagactggtctggatatcagggagttttatggccagaccgagaccggcctgacctgtatggtctccaagacgatgaagattaagccaggctacatgggaacagctgcgtcctgctacgatgtgcaggtgatcgacgacaaaggcaatgttctgccacccggaacagagggagatataggcatcagggtcaaacccattagacccataggtatattttccggctatgttgaaaaccctgacaagaccgctgccaacatccgaggagatttttggctcttgggcgatagggggatcaaggacgaagatgggtatttccagtttatgggtcgagccgatgatatcatcaactcgagtgggtacagaattggcccttccgaggttgagaacgccctcatgaaacatcctgccgtggttgaaacagctgtgatcagcagtcccgatccagtccgaggtgaggtggtgaaagccttcgtaattctggcgtcccagtttctgagccatgatcccgagcagttgaccaaagaactgcaacagcacgttaaatctgtaaccgcaccttataagtatccacgtaaaatcgagtttgttctcaacctccccaagactgtgacaggaaaaattcaacgcaccaagctgagggataaagaatggaagatgagtggaaaggctcgggcacaatag

SEQ ID NO: 213320 - DNA, 627 bp, synthetic construct
  misc_feature 1..627: note = Description of Artificial Sequence: Synthetic coding sequence
  source 1..627: mol_type = other DNA
atgcattggttgcgaaaggtgcagggcctttgtaccctttggggaacacagatgagttcacggactctgtacatcaacagccgacaactggtcagccttcaatggggacatcaggaggtgcccgctaagttcaacttcgcctcagacgtcctggaccactgggctgacatggaaaaggctggaaagagactcccttccccggcactgtggtgggtcaatgggaagggcaaagaactaatgtggaactttagggagctatccgagaactctcagcaggccgcaaatattctcagtggagcctgtggcctgcagaggggtgacagagtggccgtcatgctgcctagggtcccagagtggtggctggtgatcttaggatgtatacgggcaggtctgatctttatgccgggaactattcaaatgaagtccactgatatcctgtaccggcttcagatgtccaaagcgaaggctatagtggcaggtgacgaggtgatccaagaagtggatacagttgcgtccgaatgtccttccctgcgcatcaaactcctggtgagtgaaaaaagctgcgatggttggctcaatttcaagaaactacttaagtacaaggtgcggcatagggaggtgaagtag

SEQ ID NO: 213321 - DNA, 1761 bp, synthetic construct
  misc_feature 1..1761: note = Description of Artificial Sequence: Synthetic coding sequence
  source 1..1761: mol_type = other DNA
atgcttgctagggtcaccagaaagatgttgagacatgcgaaatgcttccagagactggccatctttgggtccgttagagccctccacaaggacaacaggacagccaccccacagaacttcagcaactatgaaagtatgaagcaggattttaagttgggaatcccagagtatttcaacttcgccaaggatgtgctcgatcagtggaccgataaagaaaaggcgggtaaaaaaccgagtaatcctgccttttggtggataaacagaaatggcgaagaaatgaggtggagctttgaggaactgggttcattgagccgcaagttcgcgaacattctgagtgaggcctgcagcctgcagcggggagaccgcgtgattctaatcctcccgagggtccctgaatggtggctggctaacgtggcgtgtctccggaccggcaccgttctgataccaggcacaactcagctgacacagaaggacatcctgtacagactgcagagtagcaaggccaactgcatcataactaatgacgtgctagctcccgctgtggatgcagtggccagtaaatgcgagaacctgcactccaaactgattgtttctgagaacagtcgcgaggggtggggtaacctcaaagagctgatgaagcacgcgtccgatagccatacatgtgtaaaaaccaaacacaatgaaatcatggccatcttctttacatctggcacttcgggctatcccaagatgactgcccatacccactctagctttggactgggcctgtccgtgaatggccgtttttggcttgacctgacgcccagcgacgtaatgtggaacacgtctgacacgggatgggcaaagtccgcctggtccagcgtattcagcccctggatccagggtgcttgcgtgtttactcaccatcttccacgcttcgagcccacatctattttacagacgctttccaagtaccctatcacagttttttgcagtgctcctactgtttacaggatgctggtgcagaatgacattacctcgtataagtttaagtccctgaagcactgtgtgagcgccggagagccaatcactcctgatgttacggagaaatggcggaacaagacggggcttgacatatatgagggatacggtcagacggagaccgtgctaatctgtggtaacttcaagggcatgaagatcaagcccggatccatggggaagccctcccccgcattcgacgtgaaaatcgttgacgtcaacgggaacgttctccctcctgggcaggaaggggatatcggcatccaggtgctgcctaatcggcctttcggattgtttactcactacgtggacaatccttccaaaacagcatccaccctccgcggaaatttttacatcacgggcgatcgcggatatatggataaagatggctacttttggttcgtggccagagccgacgacgtgattctcagcagtgggtacagaattggacccttcgaggtagagaacgctctcaatgaacaccccagtgtggccgaaagcgctgtggtcagtagcccagaccctataagaggcgaggtagttaaggcatttgtcgtattgaatccagattataagtcccatgatcaggaacagctgatcaaggaaattcaggaacacgtgaagaaaactactgccccttacaagtacccgagaaaagtagagttcatccaggagttaccaaagacaatcagcggcaaaaccaaacgaaacgagctccggaagaaggagtggaagacaatctag

SEQ ID NO: 213322 - DNA, 1317 bp, synthetic construct
  misc_feature 1..1317: note = Description of Artificial Sequence: Synthetic coding sequence
  source 1..1317: mol_type = other DNA
atgcttgccagggtaactcggaaaatgttgaggcacgcgaaatgctttcagcggctcgctattttcggtagtgtgcgtgccttacacaaagataatcggactgccaccccccagaacttttccaactacgaatccatgaaacaggattttaagctgggaatccctgagtattttaacttcgcaaaggatgtgctggatcagtggaccgataaagaaaaggctggcaaaaaaccctcgaaccctgccttttggtggattaaccgaaacggggaggagatgagatggtctttcgaggagctcgggtccctttcccgcaagttcgctaacatcctcagtgaggcttgttccctgcaacgcggagaccgcgtgattctgatactgcctcgagtaccagagtggtggctggccaacgttgcctgcctgcgaacagggaccgtgctgatccctgggactacacaactgacgcagaaagatattctctatcggctgcaaagttccaaggccaactgcataataacaaatgacgtgttagcccctgcagtggatgcagttgcgagtaagtgcgagaatcttcatagcaaactgattgtgtccgagaactcccgcgaaggttggggtaatttgaaggagctcatgaagcacgcttcggattcacacacatgcgtaaagactaagcacaatgagataatggccatcttcttcacaagtggcacgtcaggctaccctaagatgaccgcccacacacattcaagctttgggcttggactgtcagtcaatggcagattctggttagacctcaccccctcagacgttatgtggaatacatcagataccggatgggcgaagtcagcttggtcaagtgtcttttcaccttggatccagggagcatgtgtgtttacacatcacttgcctagatttgagcccacctcgattttgcagacccttagcaagtatccgattaccgtgttctgtagtgccccaactgtctaccgaatgctggtccagaatgacatcacctcttataaatttaagtcattaaagcattgcgtgtctgcaggcgaaccaattacaccagatgtgacggaaaaatggcgcaacaagaccggcctggacatttatgaaggttatggccaaaccgaaaccgtgctcatctgcggcaattttaaagggatgaaaattaaacccggatccatgggtaaaccgtctccggcattcgatgttaaagtgtgcacctcccctagtaggcgaatgtttaacaacccaatctgcaccctcccaacctaccggctgccgccttacaagctgtcattactgtag

SEQ ID NO: 213323 - DNA, 1737 bp, synthetic construct
  misc_feature 1..1737: note = Description of Artificial Sequence: Synthetic coding sequence
  source 1..1737: mol_type = other DNA
atgaaacaagatttcaagctgggcattcctgagtattttaattttgcaaaagatgttctggatcagtggaccgacaaggagaaggctggcaagaaacccagcaacccggctttctggtggatcaatcggaacggcgaggagatgcggtggtcttttgaggaattgggtagtttgtcccggaagttcgcaaacattctctctgaggcttgttctcttcaacggggagacagggtaatcttaatcctacctagagtgcccgagtggtggctcgccaacgtggcttgtctgaggaccggaactgtgctcatccctggaaccacgcagctgacccaaaaagacatcctgtatagactccagtcttccaaagctaattgcatcattaccaacgatgttctggcccctgctgtggacgcagtggccagcaagtgcgagaacctccattctaagttgatcgtgagtgagaacagccgcgaaggatggggcaatctgaaggaactgatgaaggtgtttctgtgccacccgggttggagcaccgtcgcccgatcatggctcacagccacaagcacctccctggtccaggcgattctctcattactttcctcttgggattaccggcacgcttccgattcccatacatgtgtgaagaccaaacataatgagatcatggcgattttctttacaagtggtacctcagggtacccgaaaatgaccgctcacacccacagctcttttggcctgggtctgtccgtgaacggcagattttggctggatttaactccatcagatgtgatgtggaacactagcgatacagggtgggcaaaatccgcgtggtcaagcgtgttctcaccttggattcagggagcctgcgtcttcacccaccatcttccgaggttcgagcctacttctattctacagaccctttctaaatacccaatcaccgtattctgttccgcacccacggtctaccggatgctagtgcagaatgatatcacctcttacaagtttaagtcactgaaacattgtgtttcagccggtgaacctatcacaccggacgtaactgagaagtggcgcaacaagactgggctagacatttacgagggctacggccagactgagactgtactcatctgcggaaactttaaaggcatgaagattaaacccggatccatgggtaagccgagtccagcctttgacgtgaagattgttgatgtaaatgggaatgtgcttcctccagggcaggagggagatatcggcatccaggttctacccaacaggccctttggcctattcacacattatgttgacaacccctctaagacggcatccacactcagaggcaacttttatatcaccggagatcggggatacatggacaaggacggctacttctggtttgtggcgcgagccgatgacgtgatcctcagctccggctacaggattgggccttttgaggttgaaaatgcgcttaacgaacacccgagtgtagcggaaagcgcagtcgtctcaagtcccgaccccattcgcggagaggttgtgaaggcttttgtggtcctgaatccagattacaaatctcatgatcaggagcagcttattaaagaaattcaggagcatgttaagaagaccaccgcaccctacaagtaccctcgcaaagttgagttcatccaggagctccctaagaccatctccgggaaaactaaaagaaatgaacttcggaagaaggagtggaaaacaatttag

SEQ ID NO: 213324 - DNA, 1740 bp, synthetic construct
  misc_feature 1..1740: note = Description of Artificial Sequence: Synthetic coding sequence
  source 1..1740: mol_type = other DNA
atgcggccttggctcaggcatctggtgctgcaggctctgaggaactcaagggccttctgtgggagtcatggcaaaccggctccactcccagtccctcagaagatcgtggcaacatgggaggccatctcactcgggagacaattagtgcctgagtatttcaattttgcccacgacgtacttgacgtttggtctcgtctggaggaagcgggtcaccgtcctcccaacccagctttctggtgggtcaatgggacaggggctgaaatcaagtggtccttcgaggaacttggaaagcagtctcggaaggctgccaatgtgctcggcggagcatgcgggctgcagcccggagacagaatgatgctcgttctgccaagactgcctgaatggtggcttgtttctgtcgcttgcatgcgaactggcactgttatgattcccggagtaacccagctgacagagaaagacctgaagtatagactgcaagctagtcgggcaaagtcgattatcacatctgattccctggccccacgcgtggacgctatctccgctgaatgtcccagcctccagacaaaactgctcgtttcggacagttcacgccctggatggctgaatttccgcgaattgctgagggaggcatctacagagcacaattgtatgcgaacaaagagcagagatcccttggccatctacttcacctccggaaccacaggtgcacccaaaatggttgagcactcacagagtagttacggtttgggatttgttgcgagcgggcgacgatgggtcgctctaaccgaatcagacatcttctggaataccacggacaccggctgggtcaaagcggcttggaccctattttctgcatggcccaatggatcatgcatcttcgtgcatgagctacccagagtagatgcaaaggtgatcctgaatacactgagcaagtttcctatcactactctgtgttgcgtgcccacaattttcagactgctcgtgcaagaggaccttacccggtatcaatttcagtctcttcgacattgtctaaccggaggtgaagctctcaatccagacgtgcgcgagaagtggaagcatcagacaggtgtcgagctctacgaagggtacggacagagcgagacggttgtcatctgtgctaatccgaaagggatgaagattaaatcaggatctatgggaaaagcatcaccgccttatgacgtccaaattgttgacgacgagggtaacgtgctcccaccgggagaggaggggaatgtggccgttcggatacgcccaactcggccattctgcttttttaattgttacctggataaccctgaaaagacagccgcatctgagcagggcgacttctatatcacaggggatagagcaagaatggacaaagatggctacttctggtttatgggaagaaatgatgacgtaatcaactcctcctcctataggattgggccagtcgaggtggaaagtgcactggccgagcatcctgcggtcctcgaatcagccgtggtatcctcaccagatcccatccggggagaggtagtgaaagccttcatagtgctcaccccggcttacagcagccacgaccccgaagccttgacccgggagctccaggaacacgtgaaaagggttacggccccatacaaataccctcgcaaagtggcatttgtgtccgaactgccaaagactgtgtccggtaagattcaacgctccaagctgcgctcccaggagtggggaaagtag

SEQ ID NO: 213325 - DNA, 2070 bp, synthetic construct
  misc_feature 1..2070: note = Description of Artificial Sequence: Synthetic coding sequence
  source 1..2070: mol_type = other DNA
atggcagccaggaccctgggaaggggggtaggcaggcttctaggctcgctgaggggactgtccgggcaacccgctagacccccatgtggagtaagcgccccaaggcgggcagctagcggaccaagtgggtccgccccagcggtcgcggctgccgctgcacagcccggatcttacccggcactgtctgcccaggccgcaagggaacccgcagcattctgggggcctttggccagggatacactggtgtgggacaccccctaccacaccgtgtgggattgcgactttagtactggtaagatcggctggttcttggggggacagctgaacgtctcggtgaattgtctggaccagcatgtaagaaagtctcccgaaagcgtcgccctgatctgggagagagatgaacccggtactgaggtgcggatcacttatcgcgagctgcttgaaacaacatgtagactagccaacacattgaagcgccacggggttcacagaggagatcgggttgcgatttatatgcccgttagccccttagctgttgccgcaatgctcgcttgcgctcgaattggggcagtacataccgtcattttcgctggcttttccgccgagagtttggcaggccgaatcaacgatgccaaatgcaaggtcgtgatcactttcaatcagggcctccgcggaggccgagtggtcgagctgaagaaaatcgttgacgaggctgtgaagcattgtcctaccgttcagcacgtattagtagcccatcgtaccgataacaaggtacatatgggggacctcgacgtccctttagagcaggaaatggcaaaagaggatcccgtttgcgcccctgagtccatgggtagcgaagacatgctgttcatgctctacacttccggctcgacaggaatgcctaaaggaatagtgcatactcaggccggatatttactgtacgcagccctcacccataagctagtattcgaccatcagcctggcgacatattcgggtgcgtcgcagacatcggctggatcacgggccattcctatgtcgtttacggccctctgtgtaatggtgcgaccagcgtgcttttcgagtctacacccgtgtatccgaacgcgggacggtactgggaaaccgttgagcggcttaagattaatcagttctatggagcccctaccgcagtgagactgttgctaaagtatggtgacgcatgggtaaaaaagtatgacaggtcctcccttcggaccttaggctccgtgggcgaacccattaactgcgaagcatgggaatggctccacagagtggtcggggattccagatgtactctggttgacacctggtggcagaccgagaccggtggcatctgtattgctccaagaccttccgaagaaggagctgagatcctgccagcaatggcaatgaggccattcttcggaatcgtcccggtcctgatggacgagaagggctccgttgtggaaggaagcaatgtttcaggggctctctgcatcagtcaggcctggccagggatggccagaaccatttacggagaccaccagagatttgtagatgcatacttcaaggcataccctgggtactatttcacaggcgatggggcatacagaaccgaagggggatattatcaaattacgggaaggatggatgatgtgattaacataagcggacacagactaggtacagccgagatcgaggacgccatagctgaccaccctgctgtacccgagtcggccgttatagggtacccccatgacattaaaggcgaagctgcattcgctttcatcgtcgtgaaagattctgccggtgattccgatgttgtcgtgcaggaactcaaatctatggtcgcaactaaaattgccaagtatgcagttcctgacgagattttagtggtgaagagactgccaaaaacacgctcagggaaggtgatgcgccgactattacgcaagattatcacaagtgaggctcaagaattaggggataccacgactctcgaagacccatctataatcgctgagattctttctgtgtaccaaaagtgtaaggacaagcaggctgctgctaagtag

SEQ ID NO: 213326 - DNA, 462 bp, synthetic construct
  misc_feature 1..462: note = Description of Artificial Sequence: Synthetic coding sequence
  source 1..462: mol_type = other DNA
atggcagcgagaacactgggcaggggagttgggaggctcctgggctccctgaggggtctcagtggacaacctgcacgcccaccatgtggggtctcagcgcctcggagagctgctagcggaccttcaggatctgcccctgccgttgctgctgccgctgcgcagccagggtcttatcctgcactctcagcgcaagctgcgagggaacctgctgccttttggggacccctagccagggacaccctcgtatgggataccccctaccatacagtttgggattgcgacttttcgactggaaagattggttggttccttggaggacaacttaacgttagcgttaactgtctggaccagcatgttcgcaaatcaccggagagcgtggccctgatttgggaacgcgacgaacccggtacagaggtccggatcacatattccccgtggctacagatgccctgcggcccatag

SEQ ID NO: 213327 - DNA, 1455 bp, synthetic construct
  misc_feature 1..1455: note = Description of Artificial Sequence: Synthetic coding sequence
  source 1..1455: mol_type = other DNA
atggcagccaggactctgggaagaggcgttgggagattgctggggagtctgagagggctttcgggacagcctgccaggcctccctgtggtgtcagcgcgcctagaagagccgcttccggaccatccggctccgcccctgcagtcgctgccgctgcggctcagcccggaagctacccagccctgagcgcccaggcggctcgagagccggcagccttctggggacctctggccagagatacactcgtgtgggataccccctatcatacagtgtgggactgcgatttcagcacaggtaaaatcggctggttcctaggaggccagctaaatgtctccgtgaattgtctggaccagcacgttcggaaatcaccagaatctgtggctcttatttgggaacgcgatgagccgggaacagaggttcgcattacctaccgggaactccttgagaccacctgtagactggcaaacacactgaaacgccacggcgtgcatcggggagatcgggtggcaatctatatgcctgtatcccccctggcagttgcagcaatgttggcttgtgcccgtatcggagcagtgcacaccgtgatcttcgccggtttctctgccgaatcactggcgggtcgaataaacgatgtgggggaacccattaactgcgaggcctgggagtggctgcatcgagtggtgggggatagtcggtgtactcttgtggacacttggtggcaaactgagacaggcggtatctgcatcgcccctcgcccttctgaggaaggtgctgagatcctccccgcaatggccatgagaccgttcttcggaatcgtgcccgtgctgatggatgagaaaggcagcgtcgtcgagggatcaaatgtgtccggcgctctttgcatatcccaagcctggcccggtatggctaggacaatatatggtgaccatcagcgcttcgttgacgcctactttaaggcctaccccggttactatttcacaggcgacggggcttatcggaccgagggaggctactaccaaataacggggagaatggatgatgttattaacataagcggtcacagactgggcactgccgagatagaagatgccatcgcggaccatcctgcagtaccagaaagcgctgttattgggtacccccacgacataaagggagaagctgcatttgcctttattgtggtcaaagattccgccggtgattccgacgtggtggtccaggagctcaagagcatggtagctactaaaattgccaaatacgccgtccctgacgaaatcctggtagtaaaaaggctccctaaaacccggagcggaaaggtgatgcggaggctgctcagaaaaattatcacgtcggaggcacaggaattaggcgatacaacaaccctcgaggacccatcgatcattgctgagattctctctgtgtatcagaagtgcaaggacaagcaagcagccgctaaatag

SEQ ID NO: 213328 - DNA, 1728 bp, synthetic construct
  misc_feature 1..1728: note = Description of Artificial Sequence: Synthetic coding sequence
  source 1..1728: mol_type = other DNA
atggcggctaggactctcgggcgtggagtggggcgactgctgggcagcctgaggggcctgagcggacagccggcaagacccccatgcggggtctctgcccctcgtcgggctgcgtcaggcccatcagggtcggccccagccgttgcggcagcagcagcccaacctggctcttatcctgctcttagcgcgcaggcagccagagaacccgctgctttctggggccctcttgcgagggatactctagtctgggacactccttatcataccgtctgggactgtgacttcagcaccggtaagattgggtggtttcttggtggacagctgaatgtcagcgtgaattgtctggatcaacacgtgcggaagtcccccgagtccgtggctcttatctgggagagagacgaacccggtacagaggtgcgtatcacttaccgagaactgcttgagacaacctgcagactggcaaacaccctgaaaagacacggagtgcaccgaggagacagagttgccatctatatgccagtgagtcctcttgctgtagccgcaatgctggcttgcgcccgaatcggcgctgttcatactgtcatttttgcgggattctcggctgagtcactcgcgggaagaattaatgacgcaaaatgcaaggttgtgatcacctttaaccagggactgagggggggtagggtcgttgagctcaaaaaaatcgtcgacgaggccgtcaagcattgcccgaccgtgcagcacgttctggtggcacaccgtaccgacaacaaagtgcatatgggggacctggatgttcctctcgagcaggaaatggccaaggaagacccagtctgtgcacctgagtccatggggagcgaggatatgttgttcatgttatacacctccggctccaccggtatgcccaagggcattgttcacactcaggccggatacctcctgtacgccgcacttacccacaagttggtgttcgaccaccaaccaggcgatatcttcggctgtgtagccgatatcggctggattaccgggcacagctatgtggtgtatgggcctttgtgcaacggagccacaagcgtgttatttgagtcaacccccgtctatccgaatgctggcaggtattgggagacagtcgagcggctgaaaattaatcaattctatggcgctcctaccgcggtgagactgctgctcaaatacggtgacgcgtgggtcaagaagtacgaccgtagtagcttgcgaaccctcggatccgtgggagaacctattaattgtgaagcctgggaatggttgcatagggtcgtaggcgacagtcggtgtacactcgtggatacctggtggcaaacagaaaccggtggaatttgcatcgctcctcggccatcagaggagggggctgagatcctccctgctatggctatgcggccatttttcggaatcgtaccggtgctcatggacgagaaggggagtgtggtcgaggggagcaacgtctcaggggcactttgtatttctcaagcgtggccaggcatggctcggactatttatggagatcaccaacggtttgttgacgcatattttaaggcctatcccggatactacttcactggcgacggcgcataccgcacagaaggagggtactaccagataacagggagaatggacgatgtgattaacatcctccagattgtgggatttttccgagaggccattagaaattcaggcgatctcctagagcattag

SEQ ID NO: 213329 - DNA, 1821 bp, synthetic construct
  misc_feature 1..1821: note = Description of Artificial Sequence: Synthetic coding sequence
  source 1..1821: mol_type = other DNA
atgctgaaaacctttctcttcctcgagaaatatttcccctgcatcaagtattcttcggcctgtttccccggaactggtctggacgtgtacgacatcaagtttgctgtcctcttgcatcctcaaaccgccttgcattttggaccaccaccgtccctaatggccttttcctctctttgctgtcgcgaactgttagaaacgacctgcaggctggccaacactttaaaaaggcatggggtccatcggggagaccgcgttgccatctacatgccagtgtctccacttgccgtggcggcaatgctcgcatgcgcccgtatcggcgctgtccacaccgtaattttcgccggattctcagccgaatccctggctggcaggatcaacgatgctaagtgtaaagtggtgatcacgttcaatcaagggctgcggggtggcagagtcgttgagctgaagaagatcgtggacgaggctgtaaaacactgccccactgtgcagcacgtactggtagcccataggaccgataataaggtgcacatgggggatctggatgtcccgctggaacaagaaatggccaaggaagaccctgtgtgcgctcccgagtcgatgggctctgaggacatgctattcatgttgtacacctcaggttctacaggtatgccgaaaggcattgtgcatacgcaggccggttacttgttgtatgcagccctgactcataagctggtattcgaccatcagccgggtgacatttttggctgtgtagctgacatcggctggataacggggcattcatacgtggtttatgggccactttgcaatggagctacatccgttctgttcgaatcgacacctgtctatccaaacgccggacggtactgggaaaccgtagagcggctgaaaattaaccagttctacggagctccaaccgccgtgcggctgcttctaaaatacggcgacgcctgggtcaaaaagtacgacagaagctctttacggactttgggatcagtcggagaaccaatcaattgtgaggcttgggagtggctgcaccgagtggtgggcgacagtaggtgcacattggtggatacgtggtggcagactgaaactgggggaatatgcatcgccccacggcctagtgaagaaggcgcagaaatcctgcccgctatggcaatgcgccctttctttggcattgtgcccgtgttaatggacgaaaagggttctgtggtggagggctccaatgtgtctggcgctttatgtatcagccaggcctggcctggcatggccaggacaatctacggagaccaccaaagatttgttgatgcctactttaaagcatatcctggttattacttcacaggtgatggcgcttacaggactgagggcggatattatcaaatcacagggagaatggacgacgtgattaacatctcgggccatcgcctggggaccgcagaaattgaagacgccattgccgatcatccagctgtcccagagtcagcggtgattggatacccacacgacatcaagggggaggccgcttttgcattcatcgtggtaaaagattcggcaggggactccgacgtggtggtccaggaactcaaatccatggtggcaactaagatcgccaaatatgcggtcccggatgaaatcctcgtggtgaaacggttgcctaaaacgcgttcaggaaaggtcatgcggcgactccttaggaaaatcatcacctctgaggctcaagaattaggagacacaactaccctggaagatccatctataatagccgaaattttgagtgtttatcagaaatgcaaggataagcaggcagccgcaaagtag

SEQ ID NO: 213330 - DNA, 1707 bp, synthetic construct
  misc_feature 1..1707: note = Description of Artificial Sequence: Synthetic coding sequence
  source 1..1707: mol_type = other DNA
atgaggagacgaaaagagcggcagccctgggataggttccattttttgcactttgccccacacggacgcgagctcctggagaccacttgccggctggcaaacacgctaaaacgccacggggtacatcgaggcgaccgcgtggccatttatatgcctgtttctcctctcgcggttgctgccatgctggcctgcgcaaggatcggagccgtccacaccgtaatctttgccggattttccgcagaatccttagctggcaggattaacgacgccaaatgtaaagtagtgattacgttcaatcagggcctgaggggaggaagggtagtggagcttaaaaagatagtagatgaggctgtgaagcactgccctacagttcagcacgtactagttgctcacagaacagacaataaagtccatatgggcgatctggacgttccactggaacaagagatggctaaggaggatccagtgtgcgcgccagaatcaatgggatcagaggacatgttgtttatgctctacacgtctggttcaactggaatgcctaagggcatcgtccatacacaggccggttacttactctatgcggctctcacacacaagctcgttttcgaccatcaacccggagatatcttcgggtgcgtggccgatattggttggatcaccggacacagctacgttgtgtacggccctctgtgcaacggtgccaccagtgtactgtttgagagcactccggtgtatcccaatgcgggacgttattgggagaccgtggaaagactgaagatcaatcagttctacggggctccaaccgccgttagactcctcttgaagtatggcgacgcttgggtcaagaaatacgaccggagctccctcagaactcttggatctgttggggagcccattaattgcgaggcctgggagtggttgcatagggtcgtgggagacagccgttgcactctcgtagatacttggtggcagactgagaccgggggaatttgcattgcccctcgcccatcagaggagggggctgaaatcctgcccgctatggctatgaggccattttttggcatcgtaccggtgttgatggacgagaaggggtccgtggtcgaagggtctaacgtcagcggcgctttgtgcatctcacaggcctggcccggaatggcacgaaccatctacggagaccatcagcggtttgtagacgcctactttaaggcttaccccggatactattttaccggagacggcgcttaccgcacagagggcggatattatcaaatcacagggagaatggacgatgtgatcaatatatcaggccatagacttggcaccgccgagattgaagatgctattgctgaccacccagcggtgcctgagagtgctgtcattggttatccccacgatatcaaaggcgaggccgcttttgcattcattgtggtgaaggattccgcgggtgatagtgatgtggtagtgcaggaactgaaaagtatggtggcgactaaaatcgctaaatacgctgtacccgatgagatccttgtggtgaaaaggctgcctaagacacgttccgggaaggtaatgcgacgcctattgcgcaagattatcacaagtgaggcacaggaactcggggataccacaactctagaagatccttctatcattgccgagatactttcagtctatcaaaaatgtaaggacaaacaagccgctgccaaatag

SEQ ID NO: 213331 - DNA, 2145 bp, synthetic construct
  misc_feature 1..2145: note = Description of Artificial Sequence: Synthetic coding sequence
  source 1..2145: mol_type = other DNA
atgggactgccagaggaacgggtgcggagcggatctgggagtaggggccaggaagaagcaggcgctggcggacgggctcggagctggagtccccctccagaggtttcacgtagcgctcacgtccctagcctgcaacgttaccgggagttacacaggaggagtgttgaagagccacgagagttctggggcgacattgcaaaggaattctactggaaaactccctgcccaggtccctttttgagatataactttgatgtgactaagggcaagattttcattgagtggatgaaaggggcaaccaccaacatttgctataatgtgctcgatagaaacgtccatgaaaaaaagctcggcgacaaagtggcgttctactgggagggcaatgagccaggcgaaaccacccagattacttatcaccaactcctggttcaggtgtgccagtttagcaacgtcctcagaaagcaaggaattcagaagggagatagagttgccatttatatgcccatgatcccggagctggtggtggcaatgctggcctgtgcacgcatcggggcactgcattctatagtctttgccggatttagtagcgagtcgctctgcgagcgcatcctggacagtagttgcagccttcttataacaactgatgctttttaccggggagagaagctggtgaaccttaaagagctcgctgacgaggccctgcagaaatgtcaggaaaaaggcttccccgtgcgatgttgtatcgtcgtcaagcacctaggcagggcagagctggggatgggcgattcaacaagccagtctccacctatcaaacggtcatgccctgacgtgcagggcaaactgaaggaaaagtcaaaacgcgtgcagccgcaaatttcctggaaccaaggcattgacctgtggtggcatgagctgatgcaagaagctggagacgagtgcgagcctgaatggtgtgatgcggaggaccccttattcattttgtacaccagcggctccacaggcaagcctaagggcgttgtacacacagtcggagggtacatgctctacgttgcgaccacatttaagtacgtatttgattttcatgcggaagacgtgttctggtgcaccgctgacattggatggatcactggacatagctacgtgacctacggtccactcgccaatggggcaaccagtgtgttgttcgagggaatccctacgtatcccgacgtgaatagactgtggagcattgttgataagtacaaagtgactaaattctacactgccccaactgcgataagacttctgatgaagtttggggacgagcctgtgaccaagcactccagggcttccctccaagtgttgggaaccgttggcgaaccgattaacccggaggcctggctgtggtaccaccgagtagtgggcgctcagaggtgtccaattgtggacactttctggcagacagagacaggcggacacatgttgacccctttgcctggtgctactccaatgaagcccggttcggccacttttccattcttcggcgtagccccagccatcctgaatgaatccggggaagaacttgagggggaggcagagggttacttagttttcaaacagccctggcccggaataatgaggacagtgtacggaaaccacgagagattcgagacaacttacttcaagaagttccctggatactatgtgacgggagatggatgtcagcgcgaccaggacggctactactggattacaggccgaatcgacgacatgttgaatgtcagtggccaccttctatccacagccgaggtggagtctgcgctagttgaacacgaagcagttgccgaggctgcagtggtaggccatcctcacccagttaaaggcgagtgcttgtactgttttgtgaccttgtgtgacggccacacatttagtcctaagctgacagaggaactcaagaagcagattagggagaaaataggacctatcgctacccccgattatatccagaatgcccctggcttgccgaagacccgcagcgggaagatcatgagacgggtgctgaggaagatcgcccagaacgaccatgacctcggggatatgtctacggtggccgatccctccgttatctcgcaccttttctcccatcgctgcctgactatccagtag

SEQ ID NO: 213332 - DNA, 1956 bp, synthetic construct
  misc_feature 1..1956: note = Description of Artificial Sequence: Synthetic coding sequence
  source 1..1956: mol_type = other DNA
atgatggtacgttgggccttgctgtgcgagttctggggggacattgccaaggaattctactggaagactccatgcccgggaccatttctccgctacaattttgatgtgactaagggtaaaatatttatagagtggatgaaaggcgcaactactaacatttgctacaatgtgctggaccgaaacgttcacgaaaagaagttgggcgataaagtggctttctactgggagggtaacgagcctggcgaaaccacccagattacctaccaccaactcctggttcaggtgtgtcagttttccaacgtcctgcgtaaacagggaattcaaaagggcgatcgagtggcaatctacatgccaatgatccccgagctcgtggtggcgatgttggcatgcgcaagaatcggagccctccattctattgtctttgcgggatttagtagcgagtctctttgtgaacggattctcgactcaagttgttctctgctgattaccactgatgccttctatcgcggtgagaagctggttaatttaaaggagctcgccgacgaggcgctacagaagtgtcaggagaagggtttcccagtgcgatgctgcatagtagtgaagcacctgggaagagcagagctcggcatgggggactctaccagccaatccccacccatcaagcggtcctgcccggacgtgcagatcagctggaaccagggcattgatctatggtggcacgagttgatgcaggaagccggagacgaatgcgagcctgaatggtgcgatgccgaagaccccctcttcatcctgtacactagtgggtctacaggtaagccaaagggggttgtgcacacggtggggggatacatgctttatgtcgcaactacatttaagtacgtgttcgatttccacgccgaagacgtgttctggtgcaccgccgacattggctggatcaccggtcactcatacgtgacctacggcccactggcgaatggagccacctccgtcctattcgagggcattccaacataccccgacgtaaatagactgtggtccattgtcgataaatacaaggtgacaaagttctacactgcccctacggcaataagactcttgatgaaatttggagacgagccagtgacaaagcactccagagcttccctccaagtgttgggaaccgttggggaacccattaaccctgaagcctggctttggtaccatagagtggttggggcacagcgttgccctattgtagacaccttttggcagaccgagaccggcggacacatgctgactcccctgcccggagctacaccgatgaagccgggatccgcaactttcccattctttggcgttgcacccgcaatccttaacgagtctggagaggagctcgagggagaggccgaggggtacttagttttcaagcaaccatggcccggtatcatgcggacagtctacgggaatcacgagcgtttcgagaccacttactttaagaagttcccaggatactatgtaacaggtgacgggtgccagcgcgatcaagacggctactactggatcaccgggaggatcgacgacatgctcaatgtgtcaggtcacctcctgtcaactgccgaggtagagtccgccctcgtggagcacgaggctgtggcggaggctgccgtggtggggcacccgcaccccgtaaaaggggaatgtctgtactgttttgttacgctctgcgatggccatacgttcagccctaagctgaccgaagagctgaagaagcagatccgggagaaaattggccctattgccacgcctgactatatccagaacgcccctgggctacctaagacacgttccggcaaaatcatgaggagggtactacgcaaaatcgctcagaatgaccacgaccttggagacatgtctaccgtggccgacccttctgtcatatctcacctgttttcacacaggtgccttaccattcagtag

SEQ ID NO: 213333 - DNA, 2106 bp, synthetic construct
  misc_feature 1..2106: note = Description of Artificial Sequence: Synthetic coding sequence
  source 1..2106: mol_type = other DNA
atgggattacctgaggagcgtgtgaggtccggttctggatcccgcggtcaagaagaagccggagccggaggcagagctaggtcctggtccccaccaccagaagtgtctcggtctgcccatgtgcccagcctccaaagatatagggagttgcaccgccgttctgtggaggagccacgagagttctggggcgacatagcgaaagaattttactggaagaccccttgtcccggtcccttcctgcgatacaatttcgatgtgaccaaaggtaagatattcattgagtggatgaagggggcaactacaaacatctgttataatgtgcttgaccgcaacgtgcacgagaagaaacttggcgacaaggtcgctttctattgggagggaaacgaacccggagagaccacacaaattacctaccaccagctgctcgtacaggtctgtcaatttagcaatgttctgcgcaagcagggcatccagaagggggatcgcgtggccatctatatgccaatgatcccagaactggtagttgcgatgcttgcctgcgccagaataggcgctcttcatagtatcgtgttcgctggcttttcgtctgaatccttgtgcgaacgcatcctcgactcctcttgtagcctattaattactactgacgccttctaccgcggtgagaagctggtcaacttgaaagagttggcagatgaggcgctgcaaaaatgtcaggaaaaggggttccctgtgcgatgctgtatcgttgtgaagcatctggggcgtgccgagttgggaatgggcgactctaccagccagagtccgccaataaagcgctcttgtcccgatgtgcagatttcctggaatcaggggatcgacctgtggtggcatgagctgatgcaagaagccggagacgaatgtgaacccgagtggtgcgacgccgaggaccctcttttcatcctctacaccagcggatccactgggaagcccaaaggagtggtgcataccgtaggaggctatatgctgtacgtggctacaacatttaaatacgtgttcgatttccatgccgaagacgtattctggtgcacagccgacattggatggataactggccacagctatgtcacatacggcccactggccaatggcgctacttctgttctgttcgaggggattcctacttacccagacgtgaatcggctgtggtccattgtggacaaatataaagtaacgaagttctacaccgcccctaccgctattcggctgctgatgaagttcggggatgaacctgtgacaaagcactcacgagcctcgctccaggtgctcggtaccgtgggggaaccgattaacccagaggcgtggctttggtatcatagagtcgtcggtgcacagcgctgtcccattgtagataccttctggcagaccgaaaccgggggacatatgctgactcctttgcccggagccaccccgatgaagcctggcagcgccacattccccttctttggcgtggccccagcaattctaaacgagtcgggcgaggaattggagggcgaagctgaggggtatttagtgttcaagcaaccatggccaggcatcatgaggacagtgtacgggaatcacgaacgctttgagacgacctacttcaaaaagtttccaggttactacgtaaccggagatggatgtcagagggaccaggacggctactactggattacaggtcggatcgacgacatgctcaatgtgtctgggcatctcctctctaccgccgaggtggaaagtgcgctagtagagcacgaggccgtggccgaggctgctgtggtggggcacccacacccggtcaagggcgagtgtttgtattgttttgtcacgctgtgcgacgggcatactttttctcccaagttgaccgaggaacttaagaagcaaatccgggagaaaattggtcctatcgccacgccggactacattcagaacgctcctggactgccaaaaactcggagcggcaagatcatgcgaagggtgctccggaaaatcgcacagaatgatcatgatctcggggatatgtcaactgttgccgacccatctgttatctcccatttattttcccatcggtgtctcacgatccaatag

SEQ ID NO: 213334 - DNA, 2100 bp, synthetic construct
  misc_feature 1..2100: note = Description of Artificial Sequence: Synthetic coding sequence
  source 1..2100: mol_type = other DNA
atgggacttccagaggaacgcgtgcgctcaggttctgggagcagaggtcaagaggaagctggagctggaggcagggccagaagttggtcaccccctcccgaggtttcgaggtcagctcacgtcccttcacttcagaggtatcgggagctccatagaaggtctgtcgaagaaccacgtgagttttggggagatatcgcaaaggagttttattggaaaacaccgtgtccgggaccattcctgagatacaactttgacgtgacaaaaggcaagattttcattgagtggatgaaaggcgctacaaccaatatatgctacaacgtccttgatcgcaacgtgcatgaaaaaaaactgggggacaaagtagctttttactgggaggggaacgagcccggagagacgacccagatcacctaccaccagttactggtccaggtgtgccagttcagcaacgtgcttaggaagcaaggtatacaaaagggtgatcgcgtggctatatacatgcccatgattcccgagttggtggtggctatgctggcctgcgctcgcattggggcactgcactccatcgttttcgcaggtttttctagcgaaagtctgtgtgagagaattttggatagctcttgctcccttctgattaccacagatgccttctaccgtggagagaaattggtgaacctgaaggaactggctgatgaggccctgcaaaagtgccaggaaaagggcttccccgttcgctgttgtattgtggtaaagcacttagggagagccgaattagggatgggagatagtacatcgcagtccccgccaatcaaaaggagctgtccggacgtccaaatttcctggaatcaagggatcgatctgtggtggcacgagctgatgcaggaagcaggtgatgagtgtgagccggagtggtgcgatgcagagcatagtagctcgtgcactcccgtagctcctcaagccaaccccagagtctggtttacgcagctcggggctacgtgctatgtggcgaccacattcaagtatgtctttgacttccacgccgaagatgtattttggtgtacggctgacattggatggataactgggcacagctatgtcacatacgggccacttgccaacggtgccacgagcgttctttttgaggggattcccacctaccccgatgtgaacaggctttggagcattgtcgacaagtataaggtgacaaagttttataccgcccctaccgcaatcagattactgatgaaatttggagatgaacctgtgaccaaacattcacgggctagcctacaagtgctgggaaccgtgggcgagcccattaacccagaggcttggctctggtaccaccgggttgttggggcacagaggtgtcctatagtggacaccttttggcagactgaaaccggagggcatatgctcacccccctcccaggggctacccctatgaaaccaggcagcgcaacctttccattttttggggtggctccagcaatcctcaatgagagcggtgaagaactggagggcgaagctgagggctatctagttttcaagcaaccctggcccggaattatgcggaccgtatatggaaaccatgagaggttcgagaccacctactttaaaaagtttccaggatattacgtgacaggagacgggtgtcagagagaccaggatgggtattattggattactggcagaatcgacgacatgctgaatgtatccgggcacctgttgagcaccgcggaggtggagtccgccctggtagaacatgaagctgtggcagaggcagctgtcgtgggacatccccaccccgttaaaggggagtgcctgtattgcttcgtgacgctatgtgacgggcatacattcagccctaagttgactgaggaacttaaaaagcagattagggagaagattggacctattgcaacccccgattatatccaaaatgcccctggcctgccaaagacaagaagcggtaaaattatgcggagggtactgagaaaaatcgctcaaaatgaccacgaccttggagacatgagcactgtggccgatccttcggtgatttctcatctcttctctcatcggtgcctgaccatacagtag

SEQ ID NO: 213335 - DNA, 1230 bp, synthetic construct
  misc_feature 1..1230: note = Description of Artificial Sequence: Synthetic coding sequence
  source 1..1230: mol_type = other DNA
atgcaagaggctggcgatgaatgcgaacccgagtggtgtgatgccgaggatcctctgttcattctgtatacatcaggcagtacaggtaagccaaaaggggtcgttcatacagtgggaggctatatgttatacgtggccactacatttaagtacgttttcgatttccatgccgaagacgtgttctggtgcacagctgatatcggctggattaccggacactcatacgtgacctacggtcctctcgctaacggcgcaacctctgtattgtttgaagggatccccacgtaccctgatgtcaacaggttatggagcatcgttgacaagtataaggtgactaaattttacacagcccctaccgccattcgtcttctaatgaagttcggggacgaaccggtcactaagcactcccgcgctagcctgcaggtgctcggcaccgtcggtgagcctatcaatcctgaggcctggctctggtatcatcgggtcgtgggcgctcagcggtgccctatcgtcgacactttctggcaaaccgagaccggaggccatatgctgactccccttcccggagccacaccaatgaaacctggcagcgccacgtttccctttttcggagtagccccagccatcctcaacgagagcggcgaagagctcgaaggcgaggctgaaggatatcttgtatttaaacagccatggccaggtattatgcgcactgtgtacggaaaccacgagcggttcgagacaacctacttcaaaaagtttcctggctattacgtaactggagatgggtgtcagagggaccaagatggatattattggattaccggccgaatcgatgacatgttaaacgtcagcggacacctgctgtcaaccgctgaagtcgagtcagccttggtagagcatgaggctgtcgctgaggccgctgttgtcgggcacccacaccctgttaaaggcgagtgtctatactgcttcgtgactctgtgtgatggacacactttttcccctaaacttacagaagaacttaagaagcaaattagagagaagattggacccatagccacacccgactatatccaaaacgcacccggacttccgaagaccaggagcggtaagatcatgcgtagagtgttgaggaagatagcacagaatgaccatgatttgggagacatgagcacagtggccgacccttcagtgatcagccaccttttttctcaccgatgtctcactatccagtag

SEQ ID NO: 213336 - DNA, 114 bp, synthetic construct
  misc_feature 1..114: note = Description of Artificial Sequence: Synthetic coding sequence
  source 1..114: mol_type = other DNA
atgatggttcgctgggctttgctgtgcggcgaatgtagaatactgggaaggcattgccaggggatcttgctggaagattctatgccgtggcctatacctagcgtccaactgtag

SEQ ID NO: 213337 - DNA, 2061 bp, synthetic construct
  misc_feature 1..2061: note = Description of Artificial Sequence: Synthetic coding sequence
  source 1..2061: mol_type = other DNA
atgaagccatcttggctccaatgtcggaaagtgacaagcgctggcggactgggcggacccctaccaggatcttcacctgccaggggtgccggtgctgcattacgggctttagtcgtacccggaccccgtggtggcctggggggacggggatgcagagcacttagtagcggatctgggtctgagtacaaaacccacttcgccgctagtgtcacggatcctgaaagattctggggcaaggctgctgagcagataagctggtacaaaccctggaccaagaccctggaaaataagcactccccctctaccagatggtttgtcgagggcatgctaaacatctgttataacgcggtggataggcatattgagaacggtaaaggtgacaagatcgccatcatttatgattcacccgtgactaatactaaggcaacttttacatacaaagaagttttggaacaagtaagcaaactcgcaggagtgctggtcaagcacggtatcaagaagggcgacactgtggtgatttacatgcctatgataccacaagcaatgtacaccatgcttgcatgcgcgagaatcggcgctatccattctctgattttcggcggattcgcgtcgaaagagctcagctcccgtatcgaccacgtcaaacctaaggtagtcgttacagctagcttcgggatcgagcccggaagacgggtggaatacgtccccctcgtggaggaggccctcaagatcggccagcataagcctgataaaattctgatctacaacaggccaaatatggaggccgtcccgcttgccccaggaagagatctggactgggacgaggaaatggcaaaggctcagtcccatgattgtgttcctgttctgtcagaacacccactgtacatactgtacacgagcggtacaacaggcttaccaaaaggcgtgatacgaccaaccggaggttacgccgtaatgctacattggtctatgtcatcaatatatggcttgcaaccaggggaggtgtggtgggctgcttccgatctaggctgggtggtgggccactcttacatttgctacggacccctactgcatggcaataccaccgttctgtacgagggaaaaccagtgggaacccctgatgcaggtgcctactttcgtgttcttgcagagcatggcgtggccgcattgtttacagctcccactgccataagggccatcagacaacaggacccaggagccgctctggggaagcagtacagtctaacccgcttcaagaccctttttgtagcaggtgagcgctgcgacgtggagacccttgaatggagcaagaatgtgttccgagttccagtcctcgaccattggtggcagactgaaaccggctcccccattacagcatcctgcgtcggcctgggaaattccaaaacccctccccctgggcaagcgggaaaaagtgtgcccggatacaatgtaatgatactggatgacaatatgcagaagttgaaagcacgctgccttggtaatatcgtcgtgaagctgcctctgccccctggggcattctcaggcctttggaagaatcaggaggcctttaaacatctgtatttcgagaaattcccagggtactatgacactatggacgccggatatatggatgaggaaggctacctctacgtcatgagccgagtggacgacgtgatcaacgtcgctggccacaggatttcagcaggtgcgattgaggagagcattctgtcccatgggacagtggccgattgtgctgtggtcggcaaggaggacccactgaagggacacgtccccctggccttgtgtgtgctccggaaggacatcaatgccacggaggagcaagttttagaagaaatcgtcaagcatgttagacagaatattggccctgtagctgcatttcgcaatgcagtctttgtcaagcagttgccaaagacccggagtgggaagatcccgaggagtgctctgtcggctattgtgaatggaaagccctacaaaatcacctccaccatcgaagacccttctatcttcggccacgtggaggaaatgctcaaacaagcatag

SEQ ID NO: 213338 - DNA, 1107 bp, synthetic construct
  misc_feature 1..1107: note = Description of Artificial Sequence: Synthetic coding sequence
  source 1..1107: mol_type = other DNA
atgcttcattggtcgatgtcgtccatttacggcctccaacctggcgaagtctggtgggccgcatcggatctcggatgggtggttggccacagttacatctgctacggtcctctgctccacggaaacacaaccgtcctgtatgaaggaaagcctgtcggaacgcctgacgccggagcctactttagagttttggctgaacacggggtagcagcgctgtttacggctcccaccgccatccgcgcaatcaggcagcaggatcccggagctgcgttaggcaaacagtacagcctgacacgctttaaaacacttttcgttgcgggagaaaggtgtgatgtggagaccctggagtggtccaagaatgtttttcgggtccccgtgcttgatcactggtggcagacagagaccggaagcccaatcactgccagctgcgtgggactgggaaactcgaaaacgcccccacccggacaagccggaaaatccgttcccggatataacgttatgatactggacgacaatatgcagaagttgaaagcacggtgcctcggaaatattgttgtgaaactgccattgcctcctggggcatttagcggcctatggaagaaccaggaggcgttcaaacacttgtatttcgagaagttccccggatactatgatactatggacgctggatatatggacgaggagggttatctctacgtgatgagtagggttgacgatgtgatcaacgtggcgggtcatcgcattagcgccggagcaattgaggagtcaattctgtcacatggtaccgtggctgattgcgccgttgtgggaaaagaagaccccctgaaagggcatgtgcccctcgcactctgtgttctgaggaaggatatcaacgcgaccgaagagcaagttctagaggaaatcgtgaagcacgtacggcagaacattgggcctgtggcagcatttcggaacgccgtgtttgtgaagcaacttccgaagacacgctccggcaagattccaagaagcgctttgtctgcaatcgtgaacggaaaaccctacaagattaccagtaccatcgaggatccatccatttttggccacgtggaagaaatgctgaagcaagcttag

SEQ ID NO: 213339 - DNA, 1266 bp, synthetic construct
  misc_feature 1..1266: note = Description of Artificial Sequence: Synthetic coding sequence
  source 1..1266: mol_type = other DNA
atggcggctactctgattctggaacccgcaggcaggtgctgttgggatgagccagtgcggatcgcagtgcgcggtctggccccagaacagcccgtcaccctcagggcctcactgcgggacgaaaaaggtgcactgttccaggcccacgccagatacagggctgacactctgggagaactggatttggagcgggcacccgctctgggcggatccttcgccggactagaacccatgggcctgctctgggccctggaacctgaaaagccccttgttagattagtgaagcgtgacgtccgtaccccactcgctgttgagctggaggtgttggacgggcatgaccctgatcctggccgacttctgtgtcgggtgcgccacgaacggtatttcctaccaccgggagtaagacgcgagcccgttagagcaggccgtgttaggggcactttattcctgcccccagaaccaggtcccttccccggaatcgtcgacatgttcggcactgggggaggcctactggagtaccgagcctctttgctggccggaaaagggttcgctgtgatggcactggcttattataactatgaggacctgcctaagacgatggagaccttgcatcttgaatactttgaggaggcagttaactacctactttcccacccagaggttaagggccctggggtgggactgcttgggatatctaaggggggtgagctctgcttgtctatggctagcttccttaaaggcattacggccgcagttgtgatcaacggttcggtggccaacgtcggagggactttaaggtataaaggggagacattgccccctgtgggagtgaatcggaatagaataaaggtaaccaaagatggatacgccgatatcgtcgatgtgcttaactccccactcgagggtcccgatcagaagtctttcattcccgtcgagcgcgctgagagtacattcctgtttctggttgggcaggacgaccataactggaaatccgagttttacgcaaatgaagcttgtaaaagactgcaggcccacggaagacgcaagcctcagatcatttgctatccagagacgggtcattatatagagcccccatacttccctctttgtcgtgccagcctccacgccctggtgggaagccccattatttggggaggtgagcctcgggctcatgccatggcgcaggtggacgcttggaagcaactgcaaaccttcttccacaaacatctgggcggtcatgagggcaccatcccttctaaagtatag

SEQ ID NO: 213340 - DNA, 1785 bp, synthetic construct
  misc_feature 1..1785: note = Description of Artificial Sequence: Synthetic coding sequence
  source 1..1785: mol_type = other DNA
atgattcagaatgtcggcaatcaccttcgtcggggactcgcttcagtgttttccaaccgcacttcccggaaaagcgctctccgcgcaggcaacgactccgcgatggctgatggagaaggataccgaaatcccacagaagtgcagatgtctcaactggtgctgccctgtcacaccaatcagcggggagagctgagcgttggacagctgctgaaatggatcgataccacagcttgtctctctgcagagcgccatgccggttgcccttgcgtgacagccagcatggatgatatatactttgagcacactataagtgtgggccaggtggtaaacattaaggctaaagtgaacagagcatttaacagctctatggaggtggggattcaggtggccagtgaggatctttgcagtgagaagcaatggaacgtctgcaaggccttggctactttcgtggcccgtcgagaaattacaaaagtgaaactgaagcagattactccaagaaccgaggaggaaaagatggaacactcagtcgcggcagagaggaggagaatgaggttagtgtatgccgacacaatcaaagatttactggctaactgtgccattcagggggatttggagagccgggactgctcgagaatggtgcctgcagagaaaaccagggtcgagtctgttgagctggtgctgccaccacatgcaaaccaccagggcaacactttcggcggacagattatggcctggatggaaaatgttgcaactatcgcggcatctcgcctgtgcagagcccatcctaccttaaaggcgattgagatgttccatttcagaggtccatctcaggtcggggaccggttggtgctgaaggcaatcgttaataatgcatttaaacattccatggaggtaggcgtgtgcgttgaagcgtatagacaggaagctgagacacatcggaggcatataaactctgccttcatgaccttcgtggtgctggatgctgacgatcaacctcagttgctgccatggatccgtccccagcctggggatggtgaacgccgataccgggaagccagtgcgcgaaaaaagattcggttggaccgcaaatacatcgttagttgtaaacagacagaagtcccattgagtgtaccctgggacccatcaaatcaagtgtatctatcatacaataacgtatcctcattaaaaatgttagttgctaaagacaactgggtcctcagcagcgaaatctctcaggtccgtctctacacattggaagatgacaagttcctgtcctttcatatggagatggtggtccacgtggacgctgcacaggccttcctcctactgagtgacctacgacagagaccggaatgggacaaacactatcgctccgtggaattagtgcagcaggtggatgaggacgacgcaatataccatgtgacgtccccagccctcgggggacataccaaaccccaggatttcgtaattttggcatctcgcaggaagccgtgtgacaacggggatccttacgtcatcgctttaagaagcgtgacgttacccacgcatcgggagaccccggagtatcgaagaggggagacgctttgctccggattctgcctctggagagagggagaccagctgaccaaagtgtcatattacaaccaagccacccctggggtgcttaattatgtgactactaacgtggctggattgtcgtcagaattctacaccactttcaaagcatgcgaacagtttttgctggataacaggaatgacctggcaccctcattacaaactctgtag

SEQ ID NO: 213341 - DNA, 1824 bp, synthetic construct
  misc_feature 1..1824: note = Description of Artificial Sequence: Synthetic coding sequence
  source 1..1824: mol_type = other DNA
atgattcagaatgtcgggaaccatttgagacgcggactggccagtgtattcagcaaccgtacctctagaaagtctgccctccgcgcaggcaacgacagtgcgatggcggacggcgaggggtacagaaaccctaccgaggtgcaaatgtcacagctagtcctcccctgtcacaccaatcagcgcggtgaactgtcagttggacaactgctgaaatggatcgataccaccgcttgccttagcgccgagcgccatgcaggctgtccttgcgtgacagccagtatggatgacatctacttcgaacataccatttctgtggggcaggttgtgaatataaaggcgaaagtgaatagagcattcaattcttccatggaggtcgggatccaggtggcgtctgaagatctatgctccgagaagcagtggaatgtgtgtaaggcgctggccacatttgtcgctcggcgagagataacaaaagtaaaattgaaacagatcacacctcggactgaggaagagaaaatggagcactcagtagccgcagagcgacgcaggatgcgcttggtctacgccgacaccatcaaggatctgttggccaactgtgcaatccagggggatttggagtcacgggactgctcccgcatggtccccgcagagaagacccgcgtggagagcgtggagctggtcttacctccccatgctaaccaccaagggaatactttcgggggacagatcatggcctggatggaaaatgtagccacaatagccgcttctcgactgtgccgcgcacatccgactcttaaagccatcgaaatgttccattttcgcggaccttcccaagtgggagatagactggtgctgaaagccatcgtgaacaatgccttcaaacattctatggaagtcggggtctgcgtggaggcctacaggcaagaagccgaaacccaccgaaggcacattaacagcgcatttatgacctttgtggtgttggacgctgacgatcaacctcagctgctgccgtggatccggccacagcctggagatggagagcggaggtaccgtgaggctagcgctcgcaagaagattaggttggatcgcaaatatattgtgtcctgtaaacagactgaggtgcccctgtcggtgccttgggacccctctaatcaagtgtatctctcctataataacgtgtcttctctgaaaatgcttgttgctaaagataactgggtgctttcctcagaaatatcccaagtgcgcttgtacaccctagaggacgataagttcttatcctttcatatggagatggtggtacatgttgacgctgcacaggcctttctgctcctctcggatctcaggcagaggcccgaatgggacaaacactaccggtctgttgaactagtgcagcaggtcgacgaagacgacgcaatctaccacgtgaccagccccgctctgggcggacacaccaaaccccaggattttgtgattctagctagtcggagaaagccatgcgacaacggggatccttatgtgattgccctgcggtctgtgaccctcccaacgcaccgggagaccccagagtacagacggggagaaaccctttgctctgggttctgtttatggcgggagggcgatcaattaacaaagtgttgttgggtgcgtgtaagccttacagaactggtgagcgcgagcggcttttattcatggggccttgaatctcggtccaaagggaggcggtctgatggttggaacggcaagctagccggtggacacctgtccaccctgaaggccatccctgtggccaaaattaacagtcgcttcgggtacttacaggacacctag

SEQ ID NO: 213342 - DNA, 1668 bp, synthetic construct
  misc_feature 1..1668: note = Description of Artificial Sequence: Synthetic coding sequence
  source 1..1668: mol_type = other DNA
atggagagaccggcacccggtgaggtggtcatgtctcaggccatccagccggcacatgctaccgctagaggtgaattatcggctgggcaattgctgaagtggattgatacaacagcgtgccttgccgctgaaaagcacgctggcgtgtcctgtgtcactgcttccgtggatgacatccaatttgaggagacagctcgagtaggacaggtcattaccataaaggctaaggtgacccgcgcatttagtacctcaatggagatcagcattaaggtgatggtgcaggatatgcttactggtatcgaaaagttggtgtcagtggccttctctacgttcgtggctaaacccgtcggcaaagaaaaaattcacctgaagccagtcactctgctgaccgagcaggatcatgtcgagcataacctcgccgctgaacggcgaaaagtgcggctgcagcatgaggacacatttaataacctcatgaaggagagttctaagtttgatgatcttatattcgatgaggaggagggggctgtgagtacccgcggaacatctgttcagtctattgagttagttctcccaccccacgccaatcaccacgggaatacctttgggggtcagatcatggcctggatggagacagtagcaacgattagcgccagtcggctctgctgggcacatcccttcctaaagtccgtcgatatgtttaagttccgcggaccttccaccgtgggcgatcggctggtatttacagccatagtgaacaatacttttcaaacctgtgtggaggtgggagtccgagtggaggcctttgactgtcaggaatgggcagaaggtcggggtagacatattaacagcgcatttctgatatataatgccgctgacgacaaggagaacttgattacttttcctagaattcaacctatttcaaaagatgatttccgcaggtatcgaggcgcaatcgccagaaagaggatacgcttgggcagaaagtacgtgatctcccacaaagaggaagtgccactttgcatacattgggacatctcgaaacaggcgtccctgagcgactctaacgtagaggcactcaaaaagctggctgcaaagagaggttgggaagtgacatctactgtggagaaaattaagatttatactcttgaggaacacgacgtcttgtctgtgtgggttgagaagcacgtcgggagccctgctcatttggcatatagacttctgtctgacttcactaaaagaccattatgggatcctcacttcgtgtcatgcgaggttatagattgggtgtctgaagacgaccagctgtaccacatcacttgtccaatcctgaatgacgataagccaaaggatcttgtcgtcttagtgtctcgtcgtaaaccgctgaaggacgggaatacatacacagtggctgttaagtcagtgattctgccttccgtacccccatctccccaatatattcggtccgagatcatttgtgctggttttctgatacatgcgattgacagtaattcctgcatcgtgtcatacttcaaccacatgtcagcctctatcctgccttacttcgccggaaatctcggcggttggagtaaatccatcgaagagacggccgctagttgtattcagtttctggaaaacccaccagacgatggctttgtcagcacattttag

SEQ ID NO: 213343 - DNA, 1452 bp, synthetic construct
  misc_feature 1..1452: note = Description of Artificial Sequence: Synthetic coding sequence
  source 1..1452: mol_type = other DNA
atgtccaataaactcctcagccctcacccacactcagtggtcctgagaagcgagtttaaaatggcatccagcccggcagtgctgcgagcctcccggctctatcagtggtccctaaaaagctcagcccaattcttggggtctccccagctcagacaggtgggtcagattattagggtgcccgcacggatggcagccacgctgattctggagccggctgggagatgttgctgggacgagccagtacgcatcgcggtccgtggactcgctcccgaacagcccgtcacgctgcgggcttccctccgggatgaaaaaggagccctcttccaggcacatgccaggtaccgggcagataccctgggcgaactagacctggaacgtgctcctgcccttgggggaagtttcgcaggcctggagccaatggggcttctttgggcgctagaacccgagaagcctctggtgaggctggttaagagagacgtgcggacaccactggctgttgaactggaagtgcttgatggccacgatccagaccccggacgcttattgtgccagacaagacacgagcggtacttcctgcctcccggagtgcgacgagagcctgtccgcgtgggcagggttcgcggaacactcttcttgccacccgagccaggtccctttccaggcatagtggatatgttcggaacggggggaggactcctcgagtatcgtgcctctctgctggccggaaaaggtttcgcagttatggccttggcctattataactatgaggatctgcccaagacgatggaaaccttgcacttagagtactttgaagaagccatgaactatctgctgtcacacccggaggtgaaaggcccaggcgtgggcctgctgggcatcagcaaaggcggtgagctctgtctttccatggcatcttttttaaaggggattactgctgccgtggtgattaacggcagcgttgcaaacgtgggcggtaccctgcactacaagggggaaacgctaccacctgtcggggtaaatcggaaccggattaaagtgacgaaggacggctacgcggatattgtcgacgtgcttaactccccactggaaggcccagaccagaaatctttcattccggtcgagcgagccgaaagcaccttcctttttctcgtgggacaggatgatcataattggaagagcgagttttatgcaaatgaggcttgtaaaagactccaggcgcacggcaggcgaaagccacagatcatttgttatcctgaaacggggcattacatcgaaccaccatatttccccctctgccgagcctccctccatgcactagtcggcagccccatcatctggggcggagagccgagagcacatgccatggcccaagtggacgcgtggaaacagttacaaaccttttttcacaagcatctcggtggccatgaggggacgattcctagcaaggtgtag

SEQ ID NO: 213344 - DNA, 1266 bp, synthetic construct
  misc_feature 1..1266: note = Description of Artificial Sequence: Synthetic coding sequence
  source 1..1266: mol_type = other DNA
atgagtgctacgctgatccttgaacctcctggccgatgttgctggaatgagcctgtgagaatcgcggttcgtggactggctcccgagcaacgtgtgaccctgcgtgccagcctgcgagacgaaaagggtgccctgttcagagcccacgcgaggtattgtgctgacgcgagaggtgagctggaccttgagcgtgcgccagcattaggcggaagttttgccggtctggagccaatggggctgttatgggccttggaaccggaaaaacccttttggaggtttcttaagcgggatgtccagataccctttgttgtagaattagaggtgttagatggccatgatcccgagcctggcagactgctgtgccaagcccagcacgagcggcatttcttaccccctggcgtgagaaggcaaagcgtgagagctggaagagtgagagcgacactgttcttgcccccaggtcctggtccctttcctggaataatcgacatctttggtattggaggcggtctgttggaatacagggcctccctgctggccggtcacggctttgctacgcttgctttggcatactacaattttgaagatctgccaaacaacatggacaatatcagtttggagtacttcgaagaggccgtatgctacatgcttcagcacccacaagtgaaaggcccaggaatcggcctcctggggatcagcctgggggctgacatttgtctaagtatggcctctttcctcaagaatgtgtccgcaactgtgtctattaatggttcgggaatatccggcaataccgccatcaattacaagcattcaagtattccccctttggggtacgatttgagacggatcaaggtagcttttagtggcctggttgacatagtggacatcaggaatgccctggtggggggatacaaaaacccatctatgattccaatcgagaaggcacagggtcccatacttttgattgtaggacaggatgatcataactggcgaagcgagctatatgcacagactgtctcagaacgccttcaagcccatgggaaggaaaagccgcagattatctgttacccaggcacaggtcattatattgagccaccctattttccactatgccccgcaagcctgcaccgcctccttaataaacacgtgatctggggcggagaacccagggcacactccaaggcacaagaggacgcatggaagcagatcctggcgtttttttgtaagcatctgggcggaacccaaaagaccgctgttccaaagctttag

SEQ ID NO: 213345 - DNA, 624 bp, synthetic construct
  misc_feature 1..624: note = Description of Artificial Sequence: Synthetic coding sequence
  source 1..624: mol_type = other DNA
atgctccagcatcctaaagttaagggacccagtattgccctgctaggtttcagtaagggaggggacctgtgcctttcgatggcctcgttcctaaagggcatcaccgctacagtcctgatcaacgcctgtgtggctaacacagtcgctccactgcattataaggatatgataattcctaaactggtagacgaccttgggaaggtgaagattacaaagtcaggtttcctgactttcatggatacatggagcaaccctctggaggagcacaaccatcagagcctggttccactggaaaaggcgcaggtcccattcttattcatcgtcggcatggacgatcagtcttggaaaagtgaattctacgcacaaatcgcttccgagcggctgcaggctcatgggaaggagaggccacaaataatctgctatcccgaaaccggtcactgcatcgacccaccctacttccccccttctcgggcaagcgttcatgctgtgttgggggaagcaattttctatggtggtgagccgaaagcccactccaaagcccaggtcgacgcttggcagcagatacagaccttcttccacaagcacttgaacggcaagaaatcagtgaagcatagcaaaatttag

SEQ ID NO: 213346 - DNA, 507 bp, synthetic construct
  misc_feature 1..507: note = Description of Artificial Sequence: Synthetic coding sequence
  source 1..507: mol_type = other DNA
atgctccagcacccaaaagtgaagggaccctctatcgccctcctcggcttcagcaagggaggggacctatgtttatccatggcatcatttctaaaaggcatcaccgccacagtcctcatcaatgcttgtgtggctaatactgttgcccctttacattacaaagatatgatcatcccgaagctcgtagatgacctggggaaggtgaaaataaccaagtccggttttttgacattcatggacacttggagtaaccccctagaggagcataatcaccagtcactcgttcctctggagaaagcccaggtaccctttctgtttattgtaggaatggatgatcagagctggaaatctgaattttacgcccagattgcctctgaaagactgcaggcccacggtaaggagcgcccacagattatctgttatcctgaaaccgggcactgtatagatccaccgtattttcctccaagcagagctagcgtccatgccgtgttgggcgaggcaatttag

SEQ ID NO: 213347 - DNA, 1113 bp, synthetic construct
  misc_feature 1..1113: note = Description of Artificial Sequence: Synthetic coding sequence
  source 1..1113: mol_type = other DNA
atggcaagacctggcctgatccacagcgcccctgggctgcccgacacctgtgccctgctgcagcccccagccgcttcagcagctgccgcaccttctatgagcgggcctgatgtggagacaccaagcgctatccagatttgcagaattatgagacccgatgacgccaacgtcgcagggaatgtgcacggaggcactattctaaaaatgatagaagaggccggagccatcatttccacccgccattgtaacagtcaaaacggagaacgctgtgttgcagccttagcacgagtagagcggacagacttcctctctccgatgtgcatcggagaagtggcgcatgtttcagctgagattacctatacctcaaagcactcagtcgaggtccaagtgaatgtaatgtccgagaatattcttacgggcgctaagaagttgaccaacaaggcaacattgtggtacgtacccttgagcttgaaaaacgtcgataaggtcctggaggtcccacctgttgtctactctaggcaagaacaagaggaggagggcaggaagagatatgaagcgcaaaaactggagaggatggaaacaaaatggaggaacggcgacatagtgcagcccgtgctgaacccggaacctaacaccgtgtcgtacagccagagttcattaatccatctggtaggcccatcagattgtacactccacggattcgtccacgggggagtcaccatgaagcttatggatgaagtggcgggaattgttgccgctcgacactgtaagactaacatcgtaaccgcaagcgtggatgccatcaatttccacgacaagattagaaagggatgtgttattaccataagcggcaggatgacatttaccagcaacaagtctatggagatcgaggtcctggtggatgctgaccccgtggttgatagcagtcaaaaacgctatagggccgctagcgcattttttacttacgtgtctttgtcacaggaagggagatccctacccgttccccagttggtgcctgagacagaggatgaaaagaagcgcttcgaggaaggaaaggggcgttaccttcagatgaaagcgaaacgccaagggcacgcggagccccagccatag

SEQ ID NO: 213348 - DNA, 990 bp, synthetic construct
  misc_feature 1..990: note = Description of Artificial Sequence: Synthetic coding sequence
  source 1..990: mol_type = other DNA
atggctttccagttatcacgtatcatgcgccctgacgatgccaacgtggctggaaacgtccatggcggaactattcttaagatgattgaagaagccggagcgatcatatccacaagacactgcaatagccagaatggtgaaaggtgtgttgcagctctggcacgtgttgaacgcaccgacttcctttcaccgatgtgtatcggtgaggtggctcatgtgagtgcagagatcacgtatacgagcaaacactctgtggaggtccaggtcaacgtcatgtccgaaaatattctgaccggcgcaaagaaactcacaaataaggctaccctgtggtatgtccccctcagtctgaaaaacgtggataaggtcctggaggtgcccccagtcgtttacagccgacaagagcaagaagaagaagggcgtaagaggtacgaggcacagaagctggagcgtatggagaccaaatggcgaaacggggatatcgtgcagccagttttaaatccagagcctaacacggtgtcttactctcaaagctctctgatccacttagtagggccaagcgactgcacattgcatggcttcgtccatggcggtgtcacaatgaaactgatggacgaggtagctgggatcgtggctgcaaggcattgcaagaccaatattgttacggcaagcgtggacgccatcaattttcatgataagattcgcaagggctgcgtgatcacaatctcaggaaggatgaccttcacctcaaataaatccatggagatcgaggttctggtggacgcagaccccgtcgtcgacagtagccagaaacggtaccgggcagcatctgcctttttcacctacgtcagcctgtcacaggaggggagatctctacctgtgcctcagctggtgcccgaaacagaggacgagaaaaaacgatttgaagagggcaagggtagatatctgcaaatgaaggcgaagcgccaggggcacgcagaaccacagccgtag

SEQ ID NO: 213349 - DNA, 1053 bp, synthetic construct
  misc_feature 1..1053: note = Description of Artificial Sequence: Synthetic coding sequence
  source 1..1053: mol_type = other DNA
atgctcctgctgagacggagtctgtctctgaacgttctgagaaaggaggtggacagagcctgctttggcgagaaggctaaacaaatcatgagacctgacgacgctaacgtcgccggtaacgtacatggaggcacaatcctgaaaatgatcgaagaagcaggtgccattattagcacacgtcattgtaattctcagaacggagagcgatgcgtagcagcgctggctcgggtggagcggacggatttcttgagccctatgtgcatcggcgaggtggctcacgtgtccgctgagataacgtacaccagcaagcactctgttgaagtgcaggtcaacgtcatgagtgagaacattctaacaggtgccaagaaactaaccaacaaggcgaccctctggtatgtgcctctctccctcaagaacgtagacaaggtccttgaagttccacctgtggtgtacagcaggcaggagcaggaggaagaggggaggaagcgctacgaggcacagaagctggagcgtatggagacaaaatggcggaacggtgacattgtgcagcctgtactcaatcctgagccgaacaccgtgtcctactctcaatcctccctcattcatctagtggggccatcagattgcacactgcatggtttcgtgcatggaggcgtgaccatgaagttgatggatgaggtcgcaggcattgtggcagccaggcactgtaaaactaacattgtgacagcctccgttgatgctatcaattttcatgataaaatcagaaaaggatgcgtcattaccatctccggtcgcatgacatttacttcgaacaagtctatggaaattgaagttctggtggacgcggatcccgtggtagacagctcccagaaaaggtatcgggcagccagtgcattcttcacatatgtatcactttcacaggaaggcagaagtctgcccgttccgcagttggtgcccgagactgaggatgagaaaaagagatttgaagaaggcaaaggcagatacctgcagatgaaggccaagcgccagggccacgccgagcctcagccctag

SEQ ID NO: 213350 - DNA, 1143 bp, synthetic construct
  misc_feature 1..1143: note = Description of Artificial Sequence: Synthetic coding sequence
  source 1..1143: mol_type = other DNA
atgaaactgctagctcgagccttacgcctgtgtgagttcggcaggcaggcaagctcccgtcggctggtggccggtcaaggctgcgtgggccctcgacggggttgctgtgcccctgtgcaggtggtgggtcctagggccgacctccccccatgtggggcatgcatcacagggcgaataatgcggcctgatgacgcaaatgtggcgggaaatgtgcacggaggcacgatactcaaaatgattgaggaagccggagcaatcatttctactcggcactgcaactcacagaatggcgagcgctgtgtggcggctcttgcacgagtggaaaggactgatttcttaagtcccatgtgtatcggagaggttgcccatgtgtcagctgaaatcacatacacatcgaagcacagcgttgaagttcaggtaaatgtcatgtcagaaaatatcctgactggagccaagaaattgaccaacaaagccacactgtggtacgtgcctctctcgctgaaaaatgtggacaaagtgctggaggtaccacctgtcgtttattctcgccaggaacaggaagaggagggaagaaaaaggtacgaggctcagaaactcgagaggatggagaccaagtggcggaatggcgatatagttcagccagtgctcaatcccgagccaaacacagtttcctattcccagtctagtctgatccatctggtgggcccttccgattgcaccctccacggattcgtgcacgggggagtcacaatgaaattgatggacgaagtggctggaatagtggccgcacgtcattgtaagaccaatatagtgacagcctccgtggacgctattaacttccatgataagatccggaaggggtgcgttatcactataagcggacggatgacatttacatccaacaaaagcatggaaatcgaggttcttgtcgacgccgacccggtggtcgattcctcccagaaaagatatcgtgctgcaagtgcattctttacttatgttagcctgagtcaagaaggaaggtcattgcccgtgccccagctcgtgcctgagaccgaggatgaaaagaaaaggttcgaggaaggaaagggtaggtacctacaaatgaaggcaaaacggcagggtcatgctgaaccccagccttag

SEQ ID NO: 213351 - DNA, 672 bp, synthetic construct
  misc_feature 1..672: note = Description of Artificial Sequence: Synthetic coding sequence
  source 1..672: mol_type = other DNA
atgctgctcctgcgtaggtcactgtctctcaatgtgctgcgaaaggaagtggacagagcttgctttggcgaaaaggcaaaacagattatgcggccagacgacgctaatgtagccggaaacgtacatggaggaactattctcaagatgatcgaggaggcaggtgcgatcatttccactcggcattgcaactctcagaatggtgagaggtgtgtggctgccctcgcacgggtcgaacgaacagactttctgtcgcctatgtgtatcggcgaagtcgcccacgtgagtgcggaaatcacatatacctcaaagcactccgttgaggtccaggtcaacgttatgagcgaaaacatcctaaccggggctaagaaactgactaacaaagctaccctttggtatgtgcctctcagtcttaagaatgtggataaggtgctagaagtgccgccagtggtctacagccggcaggagcaggaggaggagggtagaaagcgctacgaagcccagaagctggagcgcatggaaaccaagtggagaaacggagatatagtccagccagtgctcaatcctgaacctaatacagtcagctacagtcagtcctctttaattcacttggtgggacccagcgattgtactcttcacgggtttgtgcatggcggtggcgtcgactttcactag

SEQ ID NO: 213352 - DNA, 798 bp, synthetic construct
  misc_feature 1..798: note = Description of Artificial Sequence: Synthetic coding sequence
  source 1..798: mol_type = other DNA
atgtgcattggagaagtggcgcacgtgagtgcagaaatcacatacacatctaaacatagtgtagaggtgcaggtaaatgttatgtccgagaatattctcacgggcgcaaaaaagctcaccaacaaggccacgctgtggtacgtgcctctgtctctgaagaacgtggataaagtacttgaagttcctcccgtcgtgtattcgcgtcaggagcaggaggaagaaggacggaaaagatatgaggctcaaaaattggaaagaatggaaaccaaatggaggaacggggacatcgtgcagccagtcctgaatccggagcccaacactgtgtcttacagccaaagtagcctcattcacctggtgggaccaagtgactgtacattgcacgggtttgtgcacggaggggtcaccatgaagttaatggacgaagtggccggtatcgtggctgccaggcactgtaaaacaaatatagtgaccgcctcggtcgacgctatcaattttcatgacaagattcggaagggctgcgttataacaatctccggaaggatgactttcacgtccaataaatctatggagattgaagtgctcgtggatgccgatccagtggttgacagcagccagaagagatatcgtgctgcgagcgcttttttcacttatgtctcactgtcacaagagggcaggagcctacccgtgccccagttggtgcctgaaaccgaagatgagaagaaaaggttcgaagaggggaagggaaggtacctgcagatgaaagccaaaagacagggacacgcagaaccgcaaccctag

SEQ ID NO: 213353 - DNA, 1308 bp, synthetic construct
  misc_feature 1..1308: note = Description of Artificial Sequence: Synthetic coding sequence
  source 1..1308: mol_type = other DNA
atggctgcacccttggtattggtgctggtggtggcagtgaccgtccgagctgctctatttaggtcatcactagctgagttcatctcggaacgggtggaggttgtcagtcccttgagctcatggaagagagttgtggaaggacttagcttgctggatcttggcgtgtcgccttactcgggggcagtatttcacgagactcccttaatcatctatctgttccattttctaattgattatgctgagcttgtgtttatgatcacggatgccctcacagcaatagcgttatatttcgctattcaggacttcaataaagttgtcttcaagaagcagaagctcttactagagcttgaccagtacgcccctgatgtggcagagctcatccgaactccaatggaaatgcggtacattcctttgaaagtcgccctgttttatctccttaacccctacaccattctgtcttgcgtggccaaatcaacctgcgccatcaacaatactctcatcgcctttttcatcttgaccacaatcaagggttcagcctttttgtcagcaatctttcttgcacttgcaacatatcaatcactgtaccctctgacgctctttgttccaggactgctttacctgttgcaaagacaatatattccagtgaaaatgaagagcaaagcgttctggatattctcatgggaatatgcaatgatgtacgtgggcagtctggtagtgattatctgtctttcatttttcctcctgtcctcttgggatttcatccccgcagtgtacggatttatcttgagtgtaccggatctgacaccgaacatcggactgttctggtactttttcgccgagatgtttgaacatttctccctgttttttgtatgtgtctttcaaattaatgtgtttttttacactatcccattagccatcaaactgaaagaacatcctatctttttcatgttcatccagattgctgtcatcgcaatctttaaatcctatcccaccgtgggcgacgtggccctgtatatggcattcttcccagtctggaaccacctttaccggtttctccgcaacatcttcgtactaacgtgtatcatcatcgtgtgttccctcttatttccagttctctggcatctctggatctacgctggcagtgccaacagcaactttttctacgctatcaccctgaccttcaatgtgggccagatcctgttgataagcgattatttttacgcttttctgagacgtgaatactatctgacccacggtctgtacttgacggccaaggatggtaccgaagccatgttagtgctaaagtag

SEQ ID NO: 213354 - DNA, 342 bp, synthetic construct
  misc_feature 1..342: note = Description of Artificial Sequence: Synthetic coding sequence
  source 1..342: mol_type = other DNA
atgagctcaccccaggcccctgaggatggccagggatgcggcgataggggcgacccacctggtgatctgagaagcgtcctggtcaccactgtcctcaaccttgaaccgctggatgaggacctgttccgcggacgacactattgggtgcccgctaaaaggctcttcggcggacaaattgttggtcaagctctggttgccgctgctaaatctgtgagcgaggatgttcacgtacactctctgcactgttactttgttcgagccgaacagatgccatcttgtgttctaaggagaagtcccgctgaaaagagcctgtggacattcacagtttgcgacctctactag

SEQ ID NO: 213355 - DNA, 1320 bp, synthetic construct
  misc_feature 1..1320: note = Description of Artificial Sequence: Synthetic coding sequence
  source 1..1320: mol_type = other DNA
atgcggagggccgcattaagactatgcgccctgggcaaaggacagctgacacccggtcgagggttgacccagggaccccaaaaccccaaaaagcagggaatctttcacattcacgaagtacgtgataagctcagagagattgttggcgcatctacaaattggagggaccatgtcaaggccatggaggagcgcaaactccttcattcattcctggccaagtcccaggacggtttgccccctaggaggatgaaggacagttacatcgaggttctcctcccattgggctccgaaccggagctgcgggagaagtacctcactgtgcagaacactgtgcgctttggaagaatcctcgaggacctggacagcctcggggtgctgatttgttatatgcacaataagattcattccgcgaagatgagtcctctgagtatagtcacggctctggttgataagatagatatgtgcaagaagtccctgtcacctgaacaagacatcaagttctctggtcacgtctcctgggtagggaagacatccatggaagttaagatgcaaatgttccagctgcacggcgacgaattttgcccagtcctggacgccacctttgttatggtcgcgcgagacagcgagaacaaaggaccggctttcgttaaccccctgatccctgagagccccgaagaagaagaactgtttcggcagggggaattaaataaggggagacggattgccttcagttcgacctctctactcaagatggcaccttccgctgaagagagaacaactatccacgaaatgtttctatcaaccttggatccaaagacaatctcctttaggtcccgggtcctaccctcaaacgcagtctggatggagaattcaaagctcaaatctttggagatatgccaccctcaggagaggaacatctttaacaggatttttggcggttttctcatgcggaaggcctatgagctcgcttgggctaccgcctgttccttcggagggtcccggcctttcgtcgtcgctgtggacgacatcatgttccagaaacctgtagaggtcgggtccctgctgttcctgtcctcccaggtctgctttacccaaaataactacatccaggttagggttcatagcgaggtcgcttcccttcaggagaaacaacatactactaccaatgtgtttcactttacattcatgtctgaaaaggaagttcccctggtctttccaaagacgtacggtgagtctatgttgtatctagatggccagcgacactttaattccatgagcggtcccgcaacactgagaaaggattatctggtcgaaccatag

SEQ ID NO: 213356 - DNA, 1140 bp, synthetic construct
  misc_feature 1..1140: note = Description of Artificial Sequence: Synthetic coding sequence
  source 1..1140: mol_type = other DNA
atggaggagcggaaattactgcattctttcttggctaaatctcaggacggccttccaccacgccgtatgaaggacagctatatcgaggtgctgctgccactgggttccgagcctgaacttcgagagaagtaccttaccgtgcagaacacagtacggtttgggcgtatactcgaggatctagactccctcggcgtgctgatttgctacatgcacaataaaattcatagtgccaagatgtctcctctgtcaatcgtgactgcgctagtcgataaaatcgacatgtgtaagaagtccctctctcccgagcaggatataaaattttcaggccatgtctcgtgggttggtaaaacgagcatggaagtaaaaatgcagatgtttcagttgcacggggacgaattctgcccagtactggatgctacttttgtgatggtcgcccgagacagcgagaataagggcccagcctttgtcaacccattgataccggaaagcccagaggaagaggagctgtttcgccaaggggaactgaataaggggcgacgcattgctttttccagtacctccctactcaaaatggccccatccgctgaagaaaggacgactatccacgagatgtttctatccacactcgatccaaagaccattagtttccggagccgtgtgctgccaagtaacgccgtctggatggagaactcaaaactgaaaagcctagaaatttgccacccgcaggagagaaatatttttaatcgtattttcggcggatttttgatgaggaaggcctacgaactggcttgggctaccgcgtgttccttcggagggtccaggccgtttgtcgtggcagtggatgacatcatgtttcaaaagcctgttgaagttggaagcctcttattcctgtccagccaggtgtgttttacccagaacaactacattcaggttcgcgtgcactcagaggtggccagtctgcaggaaaagcagcacaccaccacaaatgtgttccattttactttcatgagtgaaaaggaggtcccgctggttttcccgaaaacttacggcgaatctatgctctaccttgatgggcagagacactttaatagcatgagcggccctgccactctcaggaaagactatctagtcgagccctag

SEQ ID NO: 213357 - DNA, 1347 bp, synthetic construct
  misc_feature 1..1347: note = Description of Artificial Sequence: Synthetic coding sequence
  source 1..1347: mol_type = other DNA
atgcggcgtgctgcccttaggctgtgtgcgcttggtaaaggtcagctgacaccaggacggggtttaacccagggtcctcaaaatccgaaaaagcagggtatattccacattcatgaggcctgctcaagcattcacgtaaaccatgttagggacaaattgcgggagatcgtgggtgcctctactaattggagagatcatgtgaaggccatggaggagcgcaaactattacatagctttttagccaaatcccaggatggtctccccccacggcgaatgaaggatagttacatcgaggtgctgcttcctcttggttccgagccggaactgagagagaagtacttaactgttcagaataccgtgcggtttgggagaatcctggaggatctggactcccttggggtcctgatctgttatatgcataacaaaatccactcagctaaaatgtccccactgagtatagtgacagccctggtggacaaaatagatatgtgtaagaaaagcctgagtccagagcaggacatcaagtttagtggccatgtaagctgggtggggaaaacaagcatggaggtcaaaatgcagatgtttcagctccacggcgacgagttctgcccggttttggatgctacattcgtcatggtggctagagactcagagaacaaaggacccgcatttgtgaaccctctaatccctgagagcccagaggaagaagaactgtttcggcagggagaattgaataaaggccgtcgtattgccttcagttccaccagcttactgaagatggccccatcagcggaggaaagaacaaccatccacgagatgttcctatctaccctggatccaaaaactatctcttttagatcccgggtactgccctctaatgccgtctggatggagaactccaagttgaaaagcttggagatctgtcatcctcaggaaagaaacatcttcaataggatctttggaggctttctgatgcgcaaggcttatgagctggcctgggccactgcatgctcttttggtggctcacggccatttgtagttgccgtggatgatataatgttccagaaaccagtcgaagtgggttccttactgttcctctcctcacaggtgtgtttcacccaaaacaactatatccaggttcgggtgcatagtgaggttgcttccctgcaagagaaacagcacacaacaacaaacgtctttcatttcacctttatgtcagagaaggaagtgccactcgtcttccctaagacttatggggagtcaatgctctatctggacggccagcgccactttaattccatgtcaggccctgcaactttaagaaaggattacctagtggagccctag

SEQ ID NO: 213358 - DNA, 1269 bp, synthetic construct
  misc_feature 1..1269: note = Description of Artificial Sequence: Synthetic coding sequence
  source 1..1269: mol_type = other DNA
atgacagtttttttcaagaccctcaggaaccattggaaaaaaaccaccgcaggactctgtctgttgacctggggtgggcactggttatacggcaagcactgtgacaacttgttgaggagggcagcctgtcaagaagcacaggtttttgggaaccaactcataccccctaacgcccaggtaaaaaaagccacagtcttcttaaacccagctgcatgcaaaggtaaggctcgcactctgttcgagaagaacgccgcacctatactgcacctttccgggatggatgtgaccattgtcaagaccgattatgaggggcaggccaagaagctgctggagctgatggagaacaccgatgtgattatagtagcaggaggcgacggcactctgcaggaagtggttacaggcgtactcagacgtacagacgaggcaacattttccaagattcctattggctttattccactcggagagacgtcatccctgagtcacacactgttcgccgaatccggcaacaaggttcagcatatcactgatgctacactggccatagtgaagggggaaaccgttcctttggatgtgctccaaattaaaggtgagaaagaacagccagtctttgcaatgactggtctccgatgggggtcctttcgcgacgcaggtgttaaagtgtccaaatactggtacctggggcctctaaagattaaggctgcccacttcttcagtacgctgaaggagtggccacagacacaccaggcatctatctcttacactggcccaacagagcggccacctaacgagcctgaagagacccctgtgcaaaggccatccctgtatcgtagaatactccggaggctggccagctactgggcacagccgcaagacgcattgagccaggaagttagtccagaggtctggaaggatgtccagctgtctactatcgaactgtctataactacccgaaacaatcaactggaccctacatctaaagaggacttcctgaatatttgcattgagcctgacactatctcgaaaggagattttatcaccattggcagccgcaaggtgcggaacccaaaactccacgtggaaggaacagaatgtctgcaggcaagtcagtgcacgctactaattcctgagggggcaggtgggtcatttagcattgactcggaagaatatgaggccatgcccgtggaggtcaaactgttgccgcgtaaactgcagttcttctgtgacccaaggaagcgggagcagatgctgacaagcccgacccagtag

SEQ ID NO: 213359 - DNA, 198 bp, synthetic construct
  misc_feature 1..198: note = Description of Artificial Sequence: Synthetic coding sequence
  source 1..198: mol_type = other DNA
atgacggtatttttcaaaacactgagaaatcattggaagaagacgactgctggactgtgcctgctgacctggggaggacactggctgtacggtaagcactgtgataatctgcttagaagggcggcttgtcaagaagcacagcactaccaagacgaaagcagatgggaacccactttgagtcggaccccagggtcatag

SEQ ID NO: 213360 - DNA, 198 bp, synthetic construct
  misc_feature 1..198: note = Description of Artificial Sequence: Synthetic coding sequence
  source 1..198: mol_type = other DNA
atgactgtgttctttaaaactttgcggaatcactggaagaagaccactgctggcctttgcctgctcacctggggcggtcattggttgtacgggaaacattgcgacaacctactgcgcagagccgcatgtcaggaggctcagcactaccaggacgaaagcaggtgggagcccacattgtcccgcactcctggatcttag

SEQ ID NO: 213361 - DNA, 735 bp, synthetic construct
  misc_feature 1..735: note = Description of Artificial Sequence: Synthetic coding sequence
  source 1..735: mol_type = other DNA
atgacagtcttttttaagactctacgcaaccactggaagaagacaacagcgggactatgcctgctgacgtggggaggtcactggctgtatggaaagcactgcgacaatctattacggagagccgcttgccaagaggcccaggtgttcggcaaccagcttatccccccaaacgctcaggtgaagaaggccaccgtattcctgaaccccgctgcctgcaagggcacgctattcgaaaagaacgccgctcctatcctacatctatctggcatggacgtgactatcgtcaaaactgactatgagggccaggctaagaagctgttggaactgatggaaaacacagatgtcatcatcgttgccggaggcgacggaactctgcaggaggtcgtcacgggggtgctccggaggacagacgaagccacatttagcaagatacctatcggatttatcccacttggtgagacctccagtctgagccacaccctgtttgccgagagcggcaacaaggtgcagcacatcaccgatgcgactctcgccatcgttaagggtgagacagtccctctggacgtgctgcaaatcaaaggtgagaaggagcagcccgtcttcgccatgaccggacttcggtgggggagctttcgcgacgccggtgtgaaagtgagcaagtattggtacctgggacccttaaaaattaaggctgcccattttttttctactctgaagccctttcccaagagatag

SEQ ID NO: 213362 - DNA, 1728 bp, synthetic construct
  misc_feature 1..1728: note = Description of Artificial Sequence: Synthetic coding sequence
  source 1..1728: mol_type = other DNA
atgcagtctccttggaaaatactcacggtcgcaccactgttccttctgctgagcctccagagctctgcgtcccctgccaacgacgaccagtctcgcccttccctgtctaacggacatacctgcgtaggttgtgtactagttgtgtcggttatcgagcagctcgctcaggtgcataactccaccgtacaggcgtctatggaaagactctgtagctatctgcccgagaaattgtttctgaaaacaacgtgctaccttgtgatagataaatttggatccgatatcatcaagctcctcagcgcagacatgaacgcggatgtagtgtgtcatactctggagttctgcaaacagaacacggggcagcctttatgtcacctttatccattgccaaaagaaacctggaaatttaccctccagaaagcaaggcagatcgtgaaaaagtctcctattctaaagtatagccggagtggttcagatatctgtagtcttccagttctggccaaaatatgccagaagattaagttggcaatggagcaaagtgttccattcaaagacgtcgattccgacaaatattcagtattccccacacttaggggctaccactggagaggcagagattgtaacgacagtgacgaaagcgtgtaccccggacgcagacctaacaactgggacgtccaccaagattccaattgtaatggtatttggggcgtggacccgaaggacggcgtgccctacgagaagaaattttgcgaaggctcccagccacggggtatcatcctcctgggagattctgctggcgctcactttcacatatcacctgagtggatcacagcctcccagatgtctctgaacagtttcattaacctgccaacggctctgactaacgaattagactggccccagctaagcggggcaacaggattcctcgactctaccgtcggtataaaggaaaaatccatatacctcaggttgtggaaaagaaaccattgtaaccatcgcgactaccagaacatctcccgtaacggggcttctagtaggaacctgaagaagttcattgagagccttagtcggaataaagttttggattaccctgcaatagtaatctacgccatgatcggcaacgacgtgtgttcaggaaaatccgatcccgtgccggctatgaccacaccagagaaactgtacagcaacgtcatgcagactctcaagcatttaaattcacacttgcctaatggttcacatgttatcctgtatggtctgccagacggaacgttcttgtgggacaatctacataaccgttaccaccctctagggcagcttaacaaagatatgacatacgcgcaactgtatagctttctaaactgcctgcaggtgtcgccatgtcacggttggatgtcctccaataaaactctgcgaactctcacctcagagcgggctgaacagttaagtaatacactgaaaaaaattgccgcatcggagaagtttaccaacttcaacctgttttacatggactttgcattccatgagatcatccaggagtggcagaagagaggagggcagccttggcaactcattgagcccgtggatgggttccatcctaacgaagtagctttgctgctgttggctgatcatttctggaagaaagtacaactccagtggccccagatcctgggcaaggagaatccctttaacccacagataaaacaggtcttcggagaccaggggggtcactag

SEQ ID NO: 213363 - DNA, 1632 bp, synthetic construct
  misc_feature 1..1632: note = Description of Artificial Sequence: Synthetic coding sequence
  source 1..1632: mol_type = other DNA
atgcaatctccttggaaaattcttactgtggctcctttgtttctgctcctgtctttgcagtcatccgccagtccagcaaacgacgaccaatctagaccatcactcagtaatggacatacttgcgtggaaaagcttttcctgaaaactacatgctatctcgtgattgacaagtttggatcagacattatcaagcttttaagtgccgatatgaacgcagacgtcgtttgccatactttagaattctgtaagcagaataccggacagcctctttgccacctctatcctctgcccaaggagacttggaaatttacgctgcagaaagccaggcagattgtcaaaaaatctcctatcctcaaatacagccgtagtggtagtgacatctgcagtctgcccgttttagccaaaatttgtcagaaaatcaagttagccatggaacagtccgttccatttaaagatgttgattcggataagtacagcgtcttccctactctgcgcggataccattggcggggaagggattgtaacgattctgacgagtctgtatatcctggaaggaggcccaataactgggatgttcatcaggactcaaattgtaacggcatttggggtgtggaccccaaggatggagttccatacgagaagaaattttgcgagggatcccagccgagagggattatcctgttgggagattctgccggtgcccatttccacatttcccccgaatggatcactgcctcacagatgagtctgaacagtttcatcaacctccctacagcattaaccaacgaactcgattggcctcaattgtctggagccacagggtttctggatagtactgtcggtatcaaagagaagagtatatacctgcggttatggaagaggaatcactgtaaccaccgggactaccagaacattagcagaaatggggcaagtagcaggaacctcaaaaaattcatcgagtccctgtccaggaacaaggtcctggactaccctgctattgtgatctacgcaatgatcgggaatgacgtctgtagcggaaagtccgatcctgtgcccgcaatgacaaccccagaaaagttgtattcaaacgtgatgcagactctgaaacacctaaactcgcacctcccgaacggatcccacgtgatcctgtacggtctcccagacggcacattcctttgggacaacttgcacaatcgctaccatcctctagggcagctaaacaaggacatgacatatgcacagttatacagcttcctgaactgccttcaggtctccccttgtcatggctggatgagctccaataagaccctgagaacccttacttctgaaagagctgagcaacttagcaatacattgaagaaaatagccgcttcggagaagttcacaaatttcaatcttttttacatggatttcgcttttcacgagatcatccaggaatggcaaaagaggggcggacagccatggcagctgattgaacccgtagatggctttcatcctaacgaagtcgctctgctcttactcgccgatcacttctggaaaaaggtgcagctgcagtggccccaaatactcggcaaagagaatcctttcaacccacagattaaacaggtttttggggaccaaggaggacattag

SEQ ID NO: 213364 - DNA, 894 bp, synthetic construct
  misc_feature 1..894: note = Description of Artificial Sequence: Synthetic coding sequence
  source 1..894: mol_type = other DNA
atgaaactgaaaaacagttttattaacttaccaaccgcactaacgaatgagctggattggccgcagctcagcggggctacaggctttctagattcgactgtgggcataaaggagaaatcaatctacttaaggctgtggaaacgtaaccactgtaatcaccgagactatcagaatatttcacgaaatggcgcttccagccggaacctgaagaagttcattgagagtttgagcagaaataaggtgctcgactaccctgccatcgttatttatgccatgatcgggaatgatgtctgcagcggcaagagcgaccccgtccctgctatgactacgccggaaaagctgtactcaaatgtgatgcaaactctgaagcacttgaattctcatctgccaaatggcagccatgtaatcttgtacgggttgccagatggtacttttctatgggacaatctccacaatcggtatcacccccttggacaactcaataaggatatgacatacgctcagttatactcctttctgaattgcctgcaggtctctccttgtcatggatggatgagtagtaataagaccctgcgaaccctcaccagtgaacgtgctgagcagctgtcaaacactctgaaaaaaattgccgcttctgaaaagtttactaatttcaatctgttctacatggatttcgcttttcatgagatcattcaggagtggcagaagaggggcggtcagccctggcagctgatagaaccagtggatggatttcacccaaatgaagtagctctgctgcttctggctgaccacttctggaagaaggtgcagctacagtggcctcagatcctgggaaaagagaatccgtttaatccgcagatcaagcaggtgttcggcgatcagggtggtcactag

SEQ ID NO: 213365 - DNA, 2061 bp, synthetic construct
  misc_feature 1..2061: note = Description of Artificial Sequence: Synthetic coding sequence
  source 1..2061: mol_type = other DNA
atgcaatcgccttggaaaatcctcaccgtggcaccccttttcctcctgcttagcttgcagtcctctgcctctcctgcgaatgacgaccagagccggccatctctgtcaaacggtcacacctgcgttgggtgcgtgctggtggtgagcgtaattgagcagttagcgcaggtccataacagcactgtgcaggcatccatggagcggttatgttcatacctgccagaaaaactgtttctgaaaacgacctgctatttggtgatagataagttcggctcggatataatcaaattgctcagcgcggacatgaatgcagacgtcgtatgccacacattagaattttgtaaacagaataccggccagccactttgccatctgtacccactgcccaaagagacgtggaagtttaccctccagaaggctcgccagatcgtgaaaaaaagtccgatcctgaagtattcgaggtcaggatctgacatttgttccttacccgtcctcgccaaaatctgccaaaaaatcaaactggctatggagcagagtgtcccctttaaggacgtggatagcgataaatactcagtttttcctacgctgagagggtatcattggcgtggaagagattgtaatgacagtgacgaaagtgtttaccccggtaggagaccgaacaactgggacgtgcatcaggattccaactgtaacgggatctggggagtggaccctaaggacggcgtcccttacgaaaagaaattctgtgagggttcccagcccaggggaattattcttctcggagatagtgccggagcccacttccatattagtcctgagtggataaccgccagtcagatgagcctgaacagttttattaatcttcccaccgctctcaccaatgaactcgattggcctcagctctcaggtgcaacaggattcctggacagcactgttggaatcaaggaaaagtccatttacctgcggctgtggaagcgtaaccattgtaatcacagggactaccaaaatatcagcagaaatggtgcctctagtcgcaacctgaagaaattcatcgaatccttatcacgcaacaaagtactggactatccagcaatcgtgatctacgctatgattggtaatgatgtttgctctggcaaaagtgatccggtcccggctatgaccacacctgaaaaattgtattctaacgtgatgcagactctcaagcacctcaattcccacctcccaaatgggagccacgtgatcctatacggactgccagacgggaccttcctttgggacaatctgcataatcgctatcatcctctgggtcagctgaataaagacatgacatacgctcagttatacagcttcctgaactgtctgcaggtttccccttgccacggctggatgtcttctaacaagacactgcggacgctgacatcagagagagccgagcagctgtcaaacacactgaagaagatcgcagcttcagagaagttcactaatttcaatttgttttacatggacttcgcgtttcatgagatcatacaagagtggcagaaaaggggaggtcaaccttggcagctgatagaacccgtcgacggcttccaccctaatgaacgcaagtcaatcctgctcaaagggatcctgatgacatcccagactttagacaatcaggaatggacacagttgacaagctggataaagggcaatcttacgtgtgactcccggaccagagagtggctgtgttgctgttggaggatcatctctggaaaacgatgttcatcctcaggcccaaaatcatgggagagacgcatccggagcacccctagacttaatcgctgtcttgagacaaaggcaggcactgagccgttgaggtccatgcacccatggggggctcaaggtggccgaggacttggtaagcttattccgcagctctggggcctccctagacacagacctaagggccttttcttcagctcgatttttaaatgtttgtcacttaatgaagagcacatctggaccaccgtccagtgctgcgtgctacccggatccgtgacgctgccactgttcctcaaatag

SEQ ID NO: 213366 - DNA, 1992 bp, synthetic construct
  misc_feature 1..1992: note = Description of Artificial Sequence: Synthetic coding sequence
  source 1..1992: mol_type = other DNA
atgcagtccccctggaagattctgaccgtggctcccctgtttctgctgctttcgctgcagagcagcgcgtctccggctaacgacgaccagtccagaccaagtctaagcaatggccacacatgcgtcgggtgcgtgctagttgtgagtgtaatcgagcagctcgctcaggtccacaattccaccgtgcaggcaagcatggagaggctttgctcttaccttcccgagaagctgtttcttaaaaccacatgttacctagtgattgataaattcggaagtgacattatcaagctgctctcagccgacatgaatgctgacgttgtgtgccacacgctggaattctgcaaacagaatactggccagcctctgtgtcatttgtaccccctcccgaaggaaacttggaagttcaccctacagaaagcacgacagatcgttaagaaatctccaattttgaaatacagccgttccggaagcgacatctgtagtctccctgtgctggctaagatctgtcagaagattaaactggccatggaacagagtgtgcccttcaaagacgttgacagtgacaagtatagcgtcttccctacgctgagaggataccattggcggggacgcgattgtaacgatagtgatgagagcgtgtatcctgggcgacggccaaataactgggatgttcatcaggatagcaactgcaatggcatttggggggtggatcctaaggatggagttccatacgaaaagaagttctgtgagggcagccaaccacgcggaatcatcttgctgggcgactccgcgggagcccactttcacataagtccagaatggataaccgcctcccagatgagtttgaatagctttattaatttgcccaccgctttgactaacgagttagattggcctcagctgtccggtgccacaggttttctcgactctaccgtcggtattaaggaaaagtcgatttaccttagattatggaaacgcaatcattgcaatcacagagactaccagaatatctcacggaacggggcatctagccgaaatttaaagaagtttatcgaatctctctcccgcaacaaagtgctggactatcccgcaattgttatttatgcaatgatcggcaacgatgtctgtagcggtaaatcagaccccgtgcccgcaatgaccaccccagagaagttgtacagcaatgttatgcagaccctgaaacatctaaactcccaccttcccaacggctcacacgtcatcttatacggactgcctgacggaacctttctctgggacaacctgcataatcggtatcatcccctggggcagctgaacaaggatatgacatatgcgcagctatactcttttctcaattgcctgcaggtgagtccttgccacggctggatgagctccaataagaccttgcgcactctcacttcggaacgggcagaacaattgtcgaataccctcaagaaaatcgctgcgagtgaaaaattcaccaactttaacttgttctacatggatttcgcttttcacgagataatccaggaatggcaaaagagaggaggacagccatggcagttgatagagcccgtggacggattccatcccaatgaaagaaagtccatccttcttaaagggattctgatgacctcccagaccctcgacaatcaagaatggactcagctgacttcctggattaagggtaaccttacctgtgacagcagaacccgagaatggttgtgttgttgttggagaattatttccgggaaaagatgttcttcttctggaccgaaatcttgggagcggaggatacggtctacccctcgcctgaacaggtgcttggagacaaaagccggtaccgaacctctgcgatcaatgcacccttggggagcccaggggggaagaggactcggaaaattgatcccgcagccctatggcggatgtcacgtcaccggaccaaaggactctagctctgcagcctccctccagatgtcgttcagtcagtag

SEQ ID NO: 213367 - DNA, 300 bp, synthetic construct
  misc_feature 1..300: note = Description of Artificial Sequence: Synthetic coding sequence
  source 1..300: mol_type = other DNA
atggctgagggtaacactctcatttcagtcgattatgaaatctttggcaaggtacaaggcgtattcttccgtaaacatacacaggcggagggtaaaaaactgggattagtgggctgggtacagaatacagatcgcggaaccgttcaaggacagttgcagggtccgatttcaaaggtgaggcacatgcaggagtggctggagactcggggtagcccaaaatcgcatatcgataaggccaattttaataatgaaaaagtgatcttgaaattggattactcagacttccaaatcgtcaaatag

SEQ ID NO: 213368 - DNA, 168 bp, synthetic construct
  misc_feature 1..168: note = Description of Artificial Sequence: Synthetic coding sequence
  source 1..168: mol_type = other DNA
atggctgaaggtaataccctcatctcggtcgattatgagatctttggtaaggtgcagggcgtgttttttcggaagcatactcaggagatgacagtcgaaaatcgaattgccgaaacccacagcaagtcatgtgtgcctgtgtccttcgctacgagctacgctggatag

SEQ ID NO: 213369 - DNA, 300 bp, synthetic construct
  misc_feature 1..300: note = Description of Artificial Sequence: Synthetic coding sequence
  source 1..300: mol_type = other DNA
atggcggaggggaacaccctgatttccgtagattacgagatttttgggaaagtgcagggggtgtttttcagaaagcacactcaggcagaagggaagaaactgggcctggtgggttgggttcagaacacagatcgagggacagtgcagggccaactccaaggcccaatcagcaaggttcgacatatgcaggagtggctggagacccggggtagtcccaagagccacatcgacaaagccaactttaacaatgagaaggtcattctgaagctggactattctgacttccagattgtcaaatag

SEQ ID NO: 213370 - DNA, 300 bp, synthetic construct
  misc_feature 1..300: note = Description of Artificial Sequence: Synthetic coding sequence
  source 1..300: mol_type = other DNA
atgtcaactgcccagagcctgaaatctgtggactacgaggtgttcggcagggtgcagggcgtgtgcttccgaatgtacaccgaggacgaggcccgtaagatcggcgtggttgggtgggttaagaacacgagcaaaggaaccgttacaggacaagtgcagggcccagaggataaggtgaacagtatgaagagttggctgagtaaggtgggcagtccctcctcaagaatagacagaaccaattttagcaatgaaaaaacaataagcaaactagaatattctaattttagcatcagatattag

SEQ ID NO: 213371 - DNA, 294 bp, synthetic construct
  misc_feature 1..294: note = Description of Artificial Sequence: Synthetic coding sequence
  source 1..294: mol_type = other DNA
atgtgtcctctgcccttagcagctgcagccgtggcagcgcctcgtgccccacttagattactgaatcgtggcctggctgcggcaatgagcaccgcccagagcctgaagtctgtcgactatgaggtgtttggcagagttcagggggtctgttttcgaatgtacactgaggacgaggcccgaaaaattggtgtggtaggttgggttaagaacacttccaagggcaccgtgacagggcaagtgcaagggccagaagacaaagtgaattctatgctcgaatgcagcggtttaatttag

SEQ ID NO: 213372 - DNA, 2247 bp, synthetic construct
  misc_feature 1..2247: note = Description of Artificial Sequence: Synthetic coding sequence
  source 1..2247: mol_type = other DNA
atggtgctcctccgcgtcctcatcctgctcctgtcctgggctgcaggaatgggagggcagtatggaaatcctctgaacaaatatattaggcactatgaaggtctgtcgtataatgtggatagcctccaccagaaacaccagcgcgcaaaaagagctgtgtctcacgaagaccaatttttgcgactggattttcacgcgcatggacgtcattttaatctcagaatgaaaagggacacttccttatttagcgatgaatttaaagtggaaacgtctaataaggtgctggactatgatacatctcacatctacaccggtcatatctatggagaggaggggagtttctcacacggctcagtgatcgacggcagattcgagggttttattcaaactagaggcggaaccttctatgtggaacctgccgagcgatacataaaggaccggaccctgccgttccatagtgtgatctatcatgaggacgatataaattacccccataaatatggtccccaggggggttgcgcagaccactccgtattcgaaaggatgcgcaagtatcagatgacgggagtagaagaagttacccaaattccacaggaagaacacgccgcaaatggcccagagctcttaaggaagaaaaggactaccagcgccgaaaaaaatacctgtcagttgtatatacaaacagaccacttattcttcaagtactatggcacccgggaggccgttatagcccagatctccagccacgtgaaggcaattgacaccatctaccagaccacggatttctccgggatcagaaacatttccttcatggtaaagcggatccgcattaatacaaccgccgatgaaaaagatcccacaaatccattccggttcccaaacattggggtggaaaagttcttagaactaaatagcgagcagaatcacgacgattactgtctcgcctacgtattcaccgaccgcgatttcgatgacggagttctgggcctcgcttgggtcggagccccatctggcagcagcggcggaatttgcgagaagtctaagctgtatagcgatggcaaaaaaaaaagtctgaatactgggattattactgtgcagaactatggctcccacgttccgcctaaggtaagccacatcactttcgcacacgaggtaggacataactttgggagcccccacgatagcgggaccgaatgtaccccgggtgagtctaagaacctgggccagaaagaaaatggtaactatatcatgtatgctagagcaacctccggtgacaagctgaataacaacaagttctctctatgtagcatacgcaatatctcccaggtcctagaaaaaaagcggaacaactgtttcgtcgagagtggacagccaatttgtggaaatgggatggtggagcagggggaagaatgcgactgtggttactctgatcagtgtaaggacgaatgctgcttcgacgccaaccagcccgaaggtagaaagtgtaagctgaagcctggaaaacagtgcagcccctcacagggcccatgttgcacagcgcagtgtgcttttaagtccaagagcgagaagtgccgagacgacagtgattgcgcccgtgaaggaatctgtaacggctttaccgccctttgccccgcaagcgaccccaaacctaactttaccgactgtaatcgacatacacaagtatgcattaacggccagtgtgcaggctctatctgcgagaagtacggcctcgaggaatgcacctgcgcctcctccgacggcaaggacgataaggagttgtgccatgtctgttgcatgaagaaaatggacccaagcacttgcgccagtactggtagtgtgcaatggagtcggcatttctcaggcagaaccataacactgcagccgggatcaccctgtaacgattttagagggtactgtgatgtcttcatgcggtgcaggctggtggacgccgatggccctctggcaaggctgaaaaaggctatcttttccccagaattgtacgaaaacattgccgaatggatagtcgcccattggtgggctgtcctccttatgggcatagccctgattatgctgatggccggttttatcaagatttgttcagtccataccccctcctcgaatcccaagctgccaccccctaaaccacttcctgggactctgaagagacggagaccgcctcagcccattcagcagccacagcggcaaagaccaagagaatcctatcaaatggggcacatgaggcggtag

SEQ ID NO: 213373 - DNA, 1344 bp, synthetic construct
  misc_feature 1..1344: note = Description of Artificial Sequence: Synthetic coding sequence
  source 1..1344: mol_type = other DNA
atggtcctccttagagtgctgattctgctgctgtcatgggctgctggtatgggcgatagagactttgacgacggggttctcggactggcctgggtcggagctccctctggcagctccggtggcatttgcgagaaatcaaagttgtactcagacggcaaaaagaaaagtttgaataccgggataataacggttcagaactatggctcacacgtgccacccaaagtgagccatatcacgtttgcccatgaggttggccataatttcgggtccccccacgatagcggaaccgaatgcaccccaggcgagtctaaaaatttgggtcagaaggagaacggcaattacataatgtatgctcgcgctactagtggtgacaaactaaataataacaaattcagcctttgctccatacgaaacatcagtcaagttcttgaaaagaaaagaaataactgcttcgtcgaaagtggacagcccatttgtggtaatggcatggttgaacagggcgaggaatgtgactgtggctacagcgaccagtgcaaggatgaatgttgctttgacgccaaccagcccgagggacgtaaatgcaaactgaagcctggcaagcagtgcagtccatcgcaaggaccgtgttgtacagctcaatgtgcattcaaatccaagtctgagaagtgcagagatgactccgactgcgctagggagggtatatgtaatgggtttactgcactgtgccctgctagtgatcccaaaccaaattttacagattgtaacaggcacacgcaggtttgtataaacggacagtgcgcaggcagcatctgtgagaaatatggcctagaggaatgcacgtgcgcctcctccgatggaaaagatgataaggagctctgccacgtttgttgtatgaagaaaatggatccctccacttgcgcatctaccgggagtgtgcagtggagcagacatttcagcggaaggactatcactcttcagcccggaagcccgtgtaatgacttccgtggctattgcgacgtgttcatgagatgccgattggtggatgcggacgggccactggctagattaaaaaaagccatcttctcccccgagctttatgagaatatcgcagagtggattgttgcccattggtgggccgttctactcatggggatcgcattaattatgctaatggcaggattcatcaagatttgttcagtgcatacacccagtagcaaccccaaacttcctccaccaaaacccctcccagggacgctcaaacgcagacgcccaccccagccaattcagcagccacagcgtcaacgtcctagggagtcttatcaaatgggtcatatgcggagatag

SEQ ID NO: 213374 - DNA, 2310 bp, synthetic construct
  misc_feature 1..2310: note = Description of Artificial Sequence: Synthetic coding sequence
  source 1..2310: mol_type = other DNA
atgaggcttctgagacgatgggctttcgccgcactcttactctccctgctgccaactccaggtctgggtactcagggtccagctggagccctcagatgggggggtctgcctcaactggggggtcccggtgccccagaggtaaccgaaccctcccggcttgtgagagagagttcaggtggtgaagttcgcaaacaacaactggacacccgagtgcgtcaggaacccccaggaggtcctcccgtacacctcgctcaggtttctttcgtgatccccgcattcaatagcaacttcaccttagatcttgagctcaaccaccatttactctccagccaatatgtagagaggcatttcagccgcgaaggcacaacacaacacagcacgggcgctggcgaccattgctactaccaaggcaagttaagagggaacccacactcattcgccgcactcagcacgtgtcaaggactgcatggtgtgtttagtgatggtaatctcacgtacattgtggagcctcaagaggtcgctgggccatggggagcaccacagggacccttgccacacctgatataccgcacaccactgctgccagatcctttaggttgcagagaacccggttgtctgtttgcagtgccggcacagagcgcaccgccaaatcgcccaagactcagacgcaagagacaggtccggagaggacacccaacagtgcactcggaaacgaaatacgtcgaactgatagtgatcaacgaccaccagctgttcgagcaaatgaggcagagtgtggttctgacatccaacttcgccaaatcagtggtcaatctcgccgacgtgatctataaggaacagctgaatacgcggattgtcctggtcgctatggaaacctgggccgacggggataaaattcaggtccaagacgatctccttgagaccctcgcgcgacttatggtctatcgaagagagggtctgcccgaacctagcgacgccacccacctgttttccgggcgaactttccagtctaccagttcgggagcagcgtatgtgggaggtatctgcagtctatcccatggaggtggtgttaatgaatacggcaatatgggggcaatggccgtcaccctcgcccagaccctgggtcaaaatctcggtatgatgtggaataagcatagatctagtgcaggagattgcaaatgtccagacatttggctgggctgcatcatggaagataccggattttacctgccacgaaaattttctaggtgttctatcgatgagtacaatcagtttctccaagagggaggaggatcttgtttgtttaacaagcccctgaagctgctcgaccctccagaatgtggcaatggatttgtggaggccggagaggaatgcgactgtggctccgtgcaggaatgtagccgggctgggggaaactgctgcaagaagtgcaccctgacacatgatgctatgtgttcagatggactgtgctgccgcaggtgcaaatacgagcctcggggtgtttcctgtcgtgaggctgtcaacgagtgtgacatcgctgagacttgtactggagacagttcgcaatgcccccctaatctgcataagctggatgggtactactgcgaccacgagcaaggccgttgctacgggggtcgctgcaaaactcgcgaccggcagtgtcaggtgctgtgggggcacgccgctgccgatagattctgctacgagaagctgaatgtggagggcactgagcgtgggtcctgtggcagaaagggctctggatgggtgcaatgttccaagcaagacgttctttgtgggtttctgctttgtgtcaacatttccggagccccacgtttgggtgatctggttggcgatatttcctccgtcacgttttaccatcagggcaaggagctggactgccgcggagggcatgttcaactagctgacgggtccgacctgtcttacgtcgaagacgggacagcgtgcggacccaacatgttgtgcctcgaccataggtgcctccctgcttctgcattcaatttcagcacgtgcccgggaagcggagagcggaggatttgctctcaccatggcgtctgtagcaacgagggcaagtgtatttgccagcctgactggacagggaaagactgtagtatccacaatcctcttccaacgagccccccaaccggtgagacagagcggtataaaggcccttccggtacgaacattatcatcggctccattgcaggagccgtgctggtggctgcaattgttcttggagggaccggctggggttttaagaatatccgacggggaaggagtggaggagcttag

SEQ ID NO: 213375 - DNA, 1572 bp, synthetic construct
  misc_feature 1..1572: note = Description of Artificial Sequence: Synthetic coding sequence
  source 1..1572: mol_type = other DNA
tgctggggaagcgggcatcttctgagcagtcagtacgtcgagcgccactttagcagagaaggaactacccaacacagtaccggcgctggcgaccattgttattaccagggaaaattaagaggtaacccccattcttttgccgctttgtccacctgtcaggggctgcatggcgtattttcggacgggaacctgacttacattgttgaaccacaagaagttgcgggtccctggggagcgcctcagggaccattgccccacctcatctaccgaactcccttgctgcctgatccactgggatgtcgcgagcccggatgtctgttcgctgtcccggcacagtccgccccacctaatagacctcggttaaggcgtaagagacaggtccgcagagggcatcccaccgtacactccgaaacaaagtatgtcgagctgatcgtcattaacgaccaccaacttttcgagcagatgcgccaatcggtggttctcaccagtaatttcgctaaaagcgtggtgaatttggcggatgtgatttacaaggaacagctaaacacacgaatcgtccttgtggccatggagacttgggctgatggggataagatacaagtgcaggacgacctcttggaaaccctggccagacttatggtgtatagaagagaggggctgcccgagccaagtgatgctacccacctcttttccgggaggaccttccagtcaacgtccagcggggcagcctatgtagggggtatatgcagtctcagtcacggagggggagtcaatgagtacggcaacatgggcgctatggcggtgacactagctcagacactcggccagaacctcggaatgatgtggaataaacatcgaagctccgccggagattgtaagtgccctgatatttggttgggatgcatcatggaagacacaggcttctacctgcccaggaaattctcaaggtgcagtatcgacgaatataaccagttccttcaggaaggaggaggttcctgcctctttaataaaccgctgaagctgttggaccccccagaatgtggaaatggctttgttgaggcaggcgaagagtgcgactgcgggtctgttcaagaatgcagtagagcgggaggaaattgttgtaagaagtgtacattaacacacgatgcaatgtgctcggacggcctatgttgcaggagatgtaagtacgagcctaggggtgtgtcctgtagagaggcggtcaatgaatgtgatatcgccgagacctgtaccggagatagcagtcagtgccctccaaacttacacaagcttgatggctattattgcgatcatgagcagggtcgatgttacggaggaagatgtaagactagagatagacagtgtcaagttttatggggccatgccgcagccgacaggttctgctacgaaaagctaaacgttgagggaactgaacgcggttcttgcggcaggaaaggatcaggttgggtgcagtgttccaaacagccccagcagggccgagctgtgtggctcccaccattatgccagcacctctggtcgagctctgcaaggggccctggagggcgacatcagtag

SEQ ID NO: 213376 - DNA, 1710 bp, synthetic construct
  misc_feature 1..1710: note = Description of Artificial Sequence: Synthetic coding sequence
  source 1..1710: mol_type = other DNA
atgcaaggtacaaggttacccgtctgttgcgcttgccccgtggggtcttcgaagcctgctgaggctgagaaggagaaagtgcgcaggggccacccgaccgtgcactccgagaccaagtacgtagagctgatcgtgatcaatgaccatcagctgttcgagcagatgcgtcagtccgtggttctgacctcaaactttgcaaaaagcgtggtgaacctggcggatgtgatctataaggagcaactaaacactagaatcgtactagtagccatggagacatgggctgatggcgacaaaatccaggtccaagatgatctgctggagacattggctagattaatggtgtatcggagagagggtttgccagagccctccgacgccacacatctgttttctggcagaacatttcagtccacctcctccggcgctgcatacgtcgggggtatatgtagtctcagccacgggggtggggtgaacgagtacgggaatatgggcgctatggcagtgacactcgcccaaaccctgggccagaatctgggcatgatgtggaataagcaccgctcctctgccggagattgtaaatgtccagatatctggctggggtgcatcatggaggatacagggttctatcttcctcgtaagttcagtcgatgcagcatcgatgagtacaaccagtttttgcaagagggcggagggtcctgtctgttcaataagccccttaaattactggatcccccagagtgcggcaatgggtttgttgaagctggcgaagagtgtgattgtggctccgtgcaggagtgctcacgcgctggagggaactgttgcaaaaagtgcacgctgacacatgatgccatgtgtagcgatggcctgtgctgtcgacgatgcaaatacgaaccacgaggggtgtcctgcagggaagctgtgaacgagtgcgatattgcagagacctgcaccggagactcttcgcaatgcccaccgaacctgcacaaactcgatggctactactgtgaccatgaacagggaagatgttatggagggcgttgcaaaactcgcgaccgacagtgccaagtcctgtggggccacgccgctgccgacaggttctgctacgaaaagttaaacgtggaaggaaccgagcggggtagttgcgggagaaagggctctggttgggtgcaatgctctaagcaagacgtgctctgcgggttccttttatgcgtgaacataagcggtgctcccaggcttggagacctagttggagatattagttctgtgactttttaccatcaaggtaaagaactggattgccggggaggacacgtacagctcgcagacggaagtgatctgtcatacgtggaggacggaactgcgtgcgggccaaatatgctgtgtttggaccaccggtgtctacctgcatccgctttcaacttttccacctgtccaggcagtggagagcgacgcatctgttctcaccatggggtctgctccaatgagggaaagtgtatctgtcagcctgattggacaggcaaggactgcagtattcataatccactccccacatccccacctactggcgagacagagagatataagggaccctccggtacaaacataataatcggctctatcgcaggtgcggtacttgtggcggctattgtgttgggagggactggatggggattcaagaatattcgacggggacgcagtggcggagcatag

SEQ ID NO: 213377 - DNA, 2217 bp, synthetic construct
  misc_feature 1..2217: note = Description of Artificial Sequence: Synthetic coding sequence
  source 1..2217: mol_type = other DNA
atggccgcacgaccgctgcctgtctctccagccagggcccttctccttgcgttggctggagcactcctggcaccctgtgaggccagaggtgtctctctttggaaccaagggcgagctgacgaagtggtgtccgcctctgtcgggagcggggatctgtggatccccgtgaaaagctttgactccaagaaccatccggaggtactgaacattagactgcagcgggagtccaaggagctgattataaacctggaacgcaacgaagggctcatagccagtagtttcacagagacacactaccttcaggacggaactgatgtctcacttgctagaaattataccgtgattctgggtcactgctattatcacggtcacgtgagaggctatagcgactccgctgtctctctcagtacatgttctgggctccgcggtcttatcgtgttcgaaaatgagtcatatgtgctggagcctatgaagtcagccaccaatagatataagcttttccccgctaaaaagcttaaaagcgtgagaggctcgtgcgggtcacaccataatactcccaatctagccgctaaaaatgtgttcccgcctccttcccagacctgggcccgacggcacaaaagagagaccctgaaagcgacgaaatatgtcgaacttgtgattgtggccgataatcgggagtttcagagacagggaaaggacctcgagaaagtcaagcagcgcctcatcgaaatcgcaaatcacgtggacaagttttatcgtcctttgaatatccgaattgtgttagtgggcgtggaagtgtggaacgacatggataagtgctcagtgtctcaggatccctttaccagcttgcacgagtttttggattggagaaagatgaaactgctccctcgcaaatctcatgataatgcacagctggtctccggagtctatttccagggtacaactattggcatggctcctatcatgtccatgtgcaccgcggaccagtcaggcggaatcgtgatggaccactctgacaaccctttgggtgccgctgttacgctagctcacgagctgggccacaactttgggatgaaccacgatacactcgacagaggctgttcgtgtcagatggcggtggagaaaggcggttgtataatgaacgccagcaccggataccctttccctatggtgttctcaagctgctcccgaaaagacttggagacgtcccttgaaaaaggaatgggagtctgtctattcaatctgcccgaggtaagggaatcttttggtggacaaaaatgtggaaatcgcttcgttgaggagggtgaagagtgcgactgcggggaaccagaagaatgcatgaatcgctgctgtaacgcaacgacgtgtacattaaagcccgacgccgtgtgtgctcacgggctgtgctgtgaagattgccagctaaagcccgctggcacagcctgccgggatagttcgaactcctgcgacctgcctgaattctgtaccggggcttcgccacattgcccggcaaacgtctatctgcacgacggccacagctgtcaggatgtggatggttactgttataacgggatctgccagacacatgaacagcagtgtgtcaccctatggggcccaggcgctaagccagcccctggcatttgtttcgagagggtcaacagcgcgggtgacccctatggcaactgcgggaaggtctcaaagtcttcattcgcaaaatgcgagatgcgagacgcaaagtgcgggaagatccagtgtcagggcggagcctctagacccgttattgggacaaatgctgtgtctattgaaaccaacatccctctccagcaggggggacggattttgtgtcgtgggacacacgtctatttgggcgacgatatgcctgatcccggattggttctggccggaacaaaatgcgcagacggcaaaatctgcctcaaccgtcagtgccaaaatatatccgtcttcggagtccacgaatgcgcgatgcagtgccacgggaggggggtctgcaacaaccggaagaattgtcattgcgaagcccattgggcccctcccttctgcgacaaatttgggtttggcggttcaactgattccgggccaatcagacaggccgaagccaggcaggaggctgccgaaagcaaccgggagagaggacagggccaggagcccgtggggtcccaggaacacgcttctacagcgtccctgacgttaatctag

SEQ ID NO: 213378 - DNA, 2730 bp, synthetic construct
  misc_feature 1..2730: note = Description of Artificial Sequence: Synthetic coding sequence
  source 1..2730: mol_type = other DNA
atggcagcacgacccctaccggtttccccggcaagggcgctgctgctggctctggcaggcgctctcctggctccatgcgaagccagaggagtctctctttggaaccagggcagggctgatgaggttgtgtcagcctctgtgggttctggggacctctggatcccagttaagagcttcgattccaagaaccatccggaagtgcttaatatacgtctgcagagggaatctaaggaactgattatcaacctagaacgaaacgagggactgatagcatcatcgttcactgaaactcactatctacaagacggtactgacgtgagtctcgcccgaaattataccgtcattttgggacactgttactaccacggccacgtgcggggatattctgactccgctgtgagcctgtcaacttgctcaggattgcggggactgatcgtttttgaaaacgagtcctatgtgctagaaccaatgaaatcagccaccaacaggtataagttattcccagcaaagaaactgaagtccgtccggggaagctgcgggagccaccataacacacccaacctggcggcaaaaaatgtctttccaccaccgtctcagacatgggctcggaggcacaaacgagagacacttaaagctaccaaatacgttgaactggtgatagtggccgacaaccgcgaattccaaaggcaggggaaggacctggaaaaggtcaaacagcgacttatcgaaatagcaaaccacgtggataagttttataggcccttgaacatccgcatcgtacttgtaggcgtagaggtgtggaacgatatggacaaatgttcagtgagccaggatccatttacgagcctgcatgagttccttgactggcgaaagatgaagcttctgccacgcaaaagccatgacaacgcccagcttgttagcggtgtttatttccaaggaacaacaatcgggatggcccctatcatgtccatgtgtaccgcagatcagagtggtggcattgtgatggaccacagtgacaacccattgggagcagccgtcacactggcacacgagctgggccacaacttcgggatgaaccacgacacattggataggggatgcagctgccaaatggccgttgagaaaggcggatgcataatgaacgcgtcgactgggtaccctttccccatggtgttttctagctgctccagaaaggaccttgagacaagcctagaaaaggggatgggggtctgtctattcaatctgccagaagtccgcgaatcttttggcggacagaagtgcggcaaccggttcgttgaggagggagaggagtgcgactgcggggaaccggaagagtgtatgaatcggtgctgtaatgccacaacctgtactctgaaaccggatgcagtgtgcgcacatggactgtgctgcgaggattgccagctgaagcccgctggaactgcctgccgtgattcgagcaattcctgcgacctcccggagttttgtactggtgcaagcccccactgtcccgctaatgtgtaccttcacgacggtcacagctgtcaggacgtcgacggctactgctacaacgggatctgccaaacacatgagcagcaatgcgtaacactctggggccctggagctaagccagcacctggcatttgcttcgagagagtgaatagcgcaggagacccctacggaaactgtgggaaggtctccaagtcatcattcgcaaagtgcgagatgagggacgccaagtgcggaaagatccagtgccaagggggtgcctctagacctgtgatcggcacaaacgccgtatctatcgaaacaaatattccacttcagcaaggtggtaggatcctgtgtcggggtactcacgtgtacttgggggacgacatgccagatcccggactggtgctggccggtacaaaatgcgccgatggcaagatctgcctgaacagacaatgtcagaacatatccgtgtttggggtgcatgagtgcgccatgcagtgccacgggaggggcgtctgtaacaaccgcaaaaattgccactgtgaagcccactgggcccctcccttttgcgataaatttggctttggtggctccactgactccggacctatacgacaagccgataaccagggactcaccatcggcattttggtgacgattctttgtttgctcgcagccggattcgtggtatatcttaagcgtaagactttgattagattactgttcaccaataagaaaacgacgatcgagaagttaaggtgcgtaagaccctccaggccccctaggggatttcagccatgtcaggcccaccttggacacctgggaaaaggcctcatgcggaagcccccagactcttatccccctaaggacaaccccaggagactgttgcaatgccagaacgtcgacattagcagacctctcaatggactcaatgtaccacagcctcagtccacacaacgagtacttccccctttgcaccgtgcgccacgggctcctagcgtgccagcaaggccactgcctgctaagccggcactccggcaggctcaaggcacttgcaaacctaacccaccacagaagcctctgcccgctgacccgttggctcggactacgagactgacacatgcactggcacggacacccggacagtgggagactggccttcgcctggccccactgaggccagccccacaatacccccaccaggtcccacggagtacacacaccgcctatataaagtag

SEQ ID NO: 213379 - DNA, 837 bp, synthetic construct
  misc_feature 1..837: note = Description of Artificial Sequence: Synthetic coding sequence
  source 1..837: mol_type = other DNA
atggcagcccgtcctctgcctgtgagccccgctagagctctcctgttggcactggctggcgcattactcgctccatgtgaggcgcgtggtgtgagtctgtggaaccagggtcgggctgacgaggttgtgtcggcctcagtgggctccggcgatctctggattcctgttaagtccttcgactctaagaatcaccccgaggtcctgaatatccgcttacaacgcgaatctaaagagctgattatcaacctggagagaaacgagggcctgatcgctagttcattcacggaaacacactacttacaggacggtacagacgtctcactggcgaggaattacaccgggcactgctactaccacggccacgtgagaggctactctgacagcgccgtaagtctttctacttgttcaggtctccggggactgattgtgtttgaaaatgaatcttacgtccttgagccaatgaagagcgccactaataggtacaaattgttcccagccaaaaaacttaagagcgttcgagggtcttgtggatctcaccacaacacacctaacttggccgctaagaatgtatttccccctccctcgcaaacttgggcaagacgacacaagagggagacactgaaagctactaagtatgtggagttggtgattgtggccgataacagggaattccaacggcaaggcaaggatcttgaaaaagtgaagcagcggctgatcgaaattgctaaccatgtcgacaaattttatagaccactgaacattcgaatagtgctcgtaggagttgaggtgtggaacgacatggataagtgctcagtttcgcaggaccccttcacctag

SEQ ID NO: 213380 - DNA, 2445 bp, synthetic construct
  misc_feature 1..2445: note = Description of Artificial Sequence: Synthetic coding sequence
  source 1..2445: mol_type = other DNA
atgagactggccctcctttgggccctagggctgttgggggcagggtcaccactccctagctggccactccctaacatcggcggtacagaggagcaacaggctgaatctgaaaaggcacccagggagcccctcgaaccacaggtcctgcaggacgacctacccatatctttgaagaaggtgctccagacatccctccctgagccactgcgaattaagctggagctggatggcgatagtcacatcttggaactcctgcagaatcgcgagctcgtgcctggcagaccaacactggtctggtaccagcctgatggcacccgtgtggtgtccgaaggacacaccttggagaattgctgttaccagggacgcgtgagggggtatgcaggcagctgggtttcaatatgtacctgttccggacttcggggactcgtcgttctgacaccagagcggtcatacacccttgagcaggggccaggcgacctgcagggcccaccaattatttcacgcatacaagacctgcacttgcctggccatacctgcgcattatcatggcgtgaaagtgtccacacgcagaagcctccagagcacccactggggcagcgacatatacgaagacgaagagacgtggttaccgaaaccaagaccgtggaactggttattgtagccgatcatagtgaagcgcaaaaatatcgtgacttccagcacctgctgaataggaccctagaagtggctcttcttctggacacattcttccgcccactgaatgtccgggttgcgctggtgggcttagaagcctggacgcagcgcgacctggtcgagatctccccaaatccggctgtcacactcgaaaattttctgcactggagacgcgctcatttgctgcccagacttccgcatgacagtgcccagctcgtgacaggtaccagcttctctggcccaacagtgggcatggctatccagaattctatctgctctccagacttctccggcggagtgaatatggatcatagcacttctatcctgggtgtggcctcaagtatcgcccatgagctggggcacagtttaggtctcgatcatgatctcccagggaatagctgtccctgcccaggtccagcccctgcgaaaacatgcatcatggaggcatctactgacttcttgccagggctgaacttctccaactgtagccggcgtgccctggaaaaagctttgcttgacggtatgggatcctgtctgttcgaaaggcttccctccctacccccaatggctgcattttgcggcaacatgttcgtcgaacctggggagcagtgtgactgtggctttttggatgactgtgtggatccatgctgcgacagcctgacatgccagcttcgaccgggagcccagtgcgcaagcgacggcccatgttgtcagaattgccaattaaggccttctggctggcagtgtcgacctacccgcggagattgcgatcttcccgaattctgtccaggggattcaagtcagtgcccccctgacgtgtccctgggtgatggtgaaccttgcgcaggaggtcaggctgtgtgcatgcatgggaggtgtgcctcctatgcacagcaatgtcaatctttgtggggcccaggcgctcagcccgcagcaccattatgtctgcagactgcaaataccaggggtaacgcattcgggagctgcggacggaatccttccggctcttacgtgagttgcacgccccgagatgccatatgcgggcagttgcagtgccagacaggccgaactcagccactgctgggatcaatccgcgaccttctgtgggagaccatcgatgtaaatgggacagaattaaactgcagttgggtgcaccttgatctgggtagcgacgtcgcccagcctctgctgacgctgcctggaaccgcttgtgggccagggctagtctgcatcgaccatagatgtcaacgagtggacctcttgggcgctcaagagtgtcggagcaagtgccatggtcacggagtgtgcgatagtaatagacactgctactgcgaagaaggatgggccccaccagattgcactacacaactgaaggctacgtcctcgctgaccacaggccttctcctgtcattgctggtattgttggtgttagtgatgctgggtgcctcttactggtatcgggcaaggttgcaccaaagactttgtcagctgaaagggcctacatgtcaatatcgcgcagctcagtctggcccttccgagcgccctggcccaccacagcgggcactcctcgctcggggaacaaagagtcagggaccagcgaagccccctccaccacggaagcctctgccagccgatccacaaggaagatgtccgtccggcgacttaccaggacccggagccggaattcccccactcgttgttcctagtcgcccagctcctccccctccaaccgtctcttcgctatatctgtag

SEQ ID NO: 213381 - DNA, 2520 bp, synthetic construct
  misc_feature 1..2520: note = Description of Artificial Sequence: Synthetic coding sequence
  source 1..2520: mol_type = other DNA
atgaggctggccttactctgggcccttggcctgctaggagctggatcccccctccccagctggccactcccgaacattggcggtactgaagagcaacaagccgagtccgagaaagcccctagagagccactcgaaccacaggtcttgcaggatgacctgcctatcagcctcaaaaaggtgttacagacatccctgcccgaaccactgcggatcaagctggagctggatggggactctcacatactcgaactgttgcagaatagagaactggtgcccggtcgacctaccctagtgtggtatcaacctgatggcaccagggtagtgtctgaagggcacacattagaaaactgttgttatcagggccgagtccggggatatgccggttcctgggttagtatttgcacttgctccgggctgaggggtttagtggtgctgacaccggaacgttcatacactctggagcaaggccctggcgatctccaaggacccccaatcatctccagaattcaagaccttcacctgccaggacacacttgcgccctctcttggagggaatcagtccacacacagaaacctcctgagcatccccttggacaacgacacatacgacgcaggcgcgacgttgtgacagaaacaaagactgtggaactggtcatcgtggccgaccactctgaggcacaaaagtaccgggacttccagcacctcttgaaccggacactggaagtcgctctgctcctggacacgttttttcggcctttgaacgtgcgcgttgcacttgtcggtctcgaggcgtggacccagcgcgatctggtggaaatttcccccaacccagctgttacactggaaaacttcctgcattggagacgcgctcatctactcccccgtttgcctcatgattcagctcagctggtgacaggtacatctttcagtggtccaacagtgggaatggcaattcagaatagtatctgctctccggacttcagcggcggagtgaacatggatcactctacgtctatactgggagtggcgtcctctatcgcccacgaacttggccacagcttgggccttgatcacgacctgcccggtaactcatgcccttgtcctggtcccgctcccgctaagacctgtatcatggaggcctctacggacttcctccctggcctgaacttctcaaactgttccagaagagcactggagaaagccctgttggacggaatgggaagctgtctgttcgagaggctgccgtctttgccaccaatggctgcattttgcggcaatatgttcgtggagcctggggagcagtgtgactgcggatttttggatgactgtgtggacccctgttgcgattccttgacatgtcagctgcgtccgggagctcagtgcgcttcggatggcccttgttgtcagaattgtcaactgcgaccctcggggtggcagtgtaggcccacccgcggtgactgcgacctccctgaattctgcccgggagattcctcccagtgtcctcctgatgtctccctgggagacggcgaaccatgcgcagggggtcaggctgtgtgcatgcacggcagatgtgcatcttacgcccaacagtgtcagtccctctggggtccgggagcacagccagcagcacctctctgcctgcaaactgccaatactcgagggaacgcctttggttcctgcggcaggaatccatccggatcatacgtgtcttgtacacccagagacgcgatctgcggccagctccagtgccaaaccggccgtacccagcccctcttgggatctatcagggacctcctttgggaaacaatcgacgtcaatggaacagagctaaattgttcttgggtacatctggacctggggtccgatgtggcacagcccttactgacactcccgggtacagcctgcgggccaggcctcgtatgcatcgaccatagatgccagcgagtggacctccttggggctcaggaatgccgctcaaagtgtcacggacacggcgtctgtgacagcaaccgtcactgttattgtgaggaagggtgggcccctcccgattgtaccactcagctaaaggccacctcctctctgaccacaggtctactgctgagtttactggtcttgctggttctggtcatgttgggggcttcctattggtatcgcgcaaggctgcatcagcgcctctgccagctgaagggtcctacctgccagtatagagcagcccagtccgggccatccgagagacccggtcctcctcagagagctctgcttgcccgaggtaccaagcaggcatccgctctgtcctttccagctcctccttcccggccattgccacctgatccagtttctaagcggctacaaagccaggggccagctaagcctccccctcccaggaaacccctcccagccgacccacaaggcaggtgtcccagtggggacctccctggtcctggggctgggattccccctctggttgtcccgagtcggccagctccccctcctcctactgtttcctcattgtatttatag

SEQ ID NO: 213382 - DNA, 2592 bp, synthetic construct
  misc_feature 1..2592: note = Description of Artificial Sequence: Synthetic coding sequence
  source 1..2592: mol_type = other DNA
atgagattggcgctgctatgggcccttggcctgctcggcgctgggagcccactgccatcctggccactgcccaatattggaggcacagaagagcagcaggcagaatcagagaaagcgcctcgcgaacctcttgaaccccaggtgctgcaggatgacttacctattagcttgaagaaggtgctgcagacctccctccccgagcctttaaggatcaaactcgaacttgatggcgactcgcatatactagagctactgcagaatcgcgagttggtccccggaagacctaccctcgtgtggtaccagccggacggaactcgggtcgtctctgaaggccacacgctcgagaactgttgctaccaaggacgtgttcgtgggtatgcagggtcatgggtcagtatttgcacgtgtagcgggcttcgagggctcgtcgtgttgacccccgaacgctcctacacactggagcagggacctggcgatctgcagggcccaccaattattagtaggattcaggacttacatttacctggacacacctgtgcactttcatggcgggaaagcgtgcatactcagaagccaccagaacatcccctgggccaaagacatattcgcagacggcgagatgttgtaaccgaaaccaagaccgttgaactcgtgatcgttgcagatcacagcgaagcgcaaaaatatcgggactttcagcaccttttaaatcgaaccttggaggtggcccttcttctggatacgttcttccgcccactcaacgtccgggtagccttggtgggcctggaggcttggactcagcgggatctggtagagatatcacctaacccagcagtaacactagaaaactttctgcattggcggagggcccacttgctgccacgcttaccacacgatagcgctcagctagttactgggacttccttctcaggaccgacagtcggaatggctattcagaattccatctgctcccccgacttctccggcggtgtgaacatggaccactccacttcaatcctgggcgtggcctcatcaatcgcgcacgaactgggccattctttggggctggaccatgacctccctggcaatagctgtccttgccccggtcccgctcctgccaagacctgcattatggaagcgagcactgactttctgcccggactcaacttttccaattgtagtcggagagccctcgaaaaggccctgctcgatggcatggggagttgccttttcgaaaggctgccttcgttgccccctatggctgctttctgtggaaatatgtttgtcgagcctggagagcagtgtgactgtggcttcctagacgactgcgttgatccatgttgcgacagccttacatgccagctgcggcctggtgcccagtgtgcaagcgacgggccatgttgtcagaattgtcaactgcgccctagcggttggcagtgtcggccaactcgtggggactgcgaccttccagagttttgtcctggagactcgtcacagtgtccaccagacgtatccctgggcgatggcgagccctgtgcaggtgggcaggccgtgtgtatgcatggacgttgcgcctcttatgctcagcagtgccagtctctgtggggacccggtgcccaacctgcagcgcctctgtgtctacagacggcaaatacccggggtaacgccttcggctcctgtggccgaaatccctctggctcctacgtatcatgcacccctagagatgccatttgtggtcagttacagtgccagacagggaggacccagccgctgctgggttccattcgggacctcctctgggagacgatcgacgtcaacggcacggagcttaactgttcgtgggttcatctcgatcttggctccgatgtggcccaacctctgctaactctgcccggaactgcctgtggacctgggctcgtgtgcatcgaccatcggtgtcaaagagtggacctgctgggtgcccaggagtgtagatccaagtgtcacggtcacggcgtctgtgactcaaaccggcactgttattgcgaagaaggctgggctcctcctgactgcaccacccagctgaaagcaacgagttcactcaccacggggttgctgctgagcctcctggtattgcttgttctcgtcatgctcggggcatcttattggtaccgggctaggttgcatcagagattatgtcaactcaaggggcctacctgccagtacagagcagcccagtcaggcccttccgaacgccctggcccaccgcagcgggctctccttgcacggggaactaagcaggcttctgctctgtcgttccccgcaccaccaagcagaccacttcctcctgatcccgtgagtaagcgcttacaggccgagctcgccgacaggcctaacccgcctaccagaccccttcccgcagatcctgtcgtgcggagccccaaaagccaggggcctgctaaaccccctccaccacggaaaccccttccggctgaccctcagggcaggtgtccaagcggtgatctgccaggccctggggcaggcatcccacctctggtcgtccctagtagacccgcaccaccaccccctaccgtgagttctctttatctatag

SEQ ID NO: 213383 - DNA, 2517 bp, synthetic construct
  misc_feature 1..2517: note = Description of Artificial Sequence: Synthetic coding sequence
  source 1..2517: mol_type = other DNA
atgagactggccttgttgtgggcccttggcctgctcggtgctgggtctccactcccctcctggcccttgcccaacatcggaggcacagaggagcagcaagcggaaagcgagaaagcgcctcgggagcccctcgagccacaggtcttgcaggacgatttgcccatctcactcaagaaggtgcttcagacctctttgccagagcccttgagaatcaaacttgaattagatggtgactctcatatcttggaactcctgcagaaccgggagttggtgcccggacggccaaccctggtttggtaccagccagacgggacaagggtggtgtccgaggggcacaccttggaaaactgttgctaccagggacgtgtcagggggtacgctggcagctgggtctctatctgcacttgtagcggactgaggggtctggtggtccttactccagagagaagctatactcttgagcagggaccaggtgacttacagggaccacctatcatctcacggattcaggatctgcatctgcccggacacacttgtgctctgagctggcgcgagagcgttcatactcagaagccgccagagcatccgctgggacagaggcacatacgaagacgccgtgacgtcgtaacagagaccaaaacggtggaactggtcatcgttgcagatcattctgaggcgcaaaaatacagagacttccagcatttgctgaatcgcactctggaggtcgccctcttactggacactttttttcggccattaaacgtgcgagtagctcttgtcggcctcgaggcctggacccagagagatcttgtcgagatttctccgaatcccgctgtgacactggaaaactttctacactggcgcagggcccacttgctccccaggctgcctcacgacagtgctcaactggtgacagggacaagttttagcggacccacagtcggcatggctatccagaattctatctgctcacccgatttttcgggtggcgtaaatatggaccatagtacaagtatattaggcgtggcaagcagcattgcacacgagcttgggcactcactcgggttggaccacgaccttcctggcaactcgtgcccttgtccagggcctgctcctgccaaaacatgtattatggaagcatcaactgatttcctgcctggcctcaacttttctaactgctccaggagagctcttgaaaaggctctgctcgacggcatgggcagctgccttttcgagagactgccgtcacttcctcctatggcagctttctgtggcaacatgtttgtggagcctggcgagcagtgcgattgcggcttcttggatgactgtgtcgatccgtgttgcgacagcctgacttgccaactgcgcccaggggctcagtgcgcaagcgatggtccttgctgccagaattgccaactcagaccaagtgggtggcagtgccgaccaactagaggcgattgtgaccttcccgagttttgtcccggagactcctcgcaatgtcctcccgacgtatcactgggggatggggaaccttgtgctggaggccaggccgtgtgcatgcacggtagatgcgcctcatacgctcagcagtgccagagtttgtggggacccggagctcagcctgctgccccactatgcctacaaaccgccaacacccgcggaaatgctttcggatcatgcgggcgaaaccctagcggtagctacgtgagctgtaccccacgggacgcaatatgtggtcaactgcagtgccagaccggcaggacccagccgctgcttgggagtattcgcgatctgctttgggaaactatcgacgtgaacgggacagagctgaactgctcatgggtccacttagatctgggttccgatgtggcccagcccctcttgactctgcccggtactgcatgtggccctggccttgtgtgcatcgatcatcgatgtcagcgagtggatctgctgggcgctcaggagtgcaggagcaagtgccatgggcatggcgtctgcgatagtaacagacattgttactgtgaagagggctgggctcctccagactgcaccacacagctgaaggcaacctcttctctaaccacgggactcctgctctctcttcttgtacttttggtgctcgtcatgcttggagcctcctattggtatcgcgcacggctgcatcagcgtctctgtcagctgaagggacctacttgccagtaccgcgcagcccagtctggcccttcggaacgccctggccctccccagagggcactgctggcaaggggcactaaagccgaactcgccgaccggccaaacccccctacacggccactgcctgcagacccagttgttcggtcccctaaatcacaggggccagcaaaacccccaccaccgagaaagcctctgcccgctgatccacaggggagatgtccaagtggggatcttcctggccctggggcaggaattccacccctggtggtgcctagtcgacctgctccccctcctccaactgttagctccctatatctgtag

SEQ ID NO: 213384 - DNA, 2319 bp, synthetic construct
  misc_feature 1..2319: note = Description of Artificial Sequence: Synthetic coding sequence
  source 1..2319: mol_type = other DNA
atgcggttagcactgctgtgggcactcggcttgctgggcgctggctctccactgcctagttggcctcttccaaatatcgggggaaccgaggaacagcaggccgagagcgaaaaagcccctagagagcctttagaaccgcaggttctgcaggacgatctgcctatatcccttaagaaagtattgcagacgtctctacctgaacctttaaggattaaactagagttagacggggacagccacatactggaactcctgcagaatagggaactcgtgcccggtcgcccaaccctggtgtggtaccaaccagatggaacgagagtggtctctgagggacatactctggaaaactgctgctatcagggaagagtgaggggatatgccggaagttgggtcagtatctgcacttgttccggcctaaggggtctagttgtgttgacacccgagaggtcatacactctggagcaggggccaggggatctgcagggccctccaatcatatcccgcatacaggacctccacctgcccggtcacacctgcgccctgagctggcgggaaagcgtgcatacacagaaacccccagagcacccacttgggcaacgccatattcgcaggcgcagggacgtagttaccgaaacaaaaacagtcgagctggttattgtcgcggatcactctgaagcacagaaatatcgcgattttcagcaccttctcaacagaacacttgaagtagcactgttgctggacaccttcttcaggccgttaaatgtccgggtagccttagtgggcctggaagcatggacccagagagacctggtagagatcagccccaatcctgcagtcaccctggagaacttcctgcactggagaagggcccatttactgccccgtcttccgcacgacagcgcgcagctcgtcaccggaacttcttttagtggacccacggtgggcatggcaatacagaattccatctgcagccccgacttctctggaggggtgaacatggaccattcaaccagcattctgggcgtagcctctagcattgctcacgaactcggccacagcttaggactggaccacgacctgccaggtaacagttgcccgtgtcccggaccggctccagctaagacatgcattatggaggcgtctaccgactttctgcccggactgaattttagtaattgctctaggcgcgcactggagaaagcgctgctggacggcatgggctcttgcctttttgaacgtctccccagtcttccccctatggccgcattttgcggcaacatgttcgtggagccaggcgagcaatgcgactgtggctttctggatgactgcgtcgatccatgttgcgatagcctgacgtgccagttgagaccaggcgctcagtgcgcctcagacggtccttgttgccagaactgtcagctcagaccttcaggatggcagtgtcgacccaccaggggagattgcgacctcccagagttttgcccaggcgactcctcacaatgtcccccagatgtctctctcggtgacggagagccatgcgccggaggtcaagctgtctgtatgcatggcaggtgcgccagttatgcccaacagtgtcagtcgctctggggacccggtgctcagccagcagcaccactctgcctgcagacagctaacaccagggggaatgcgtttggatcatgtggcaggaacccttctggcagttatgtgtcgtgtacacccagagatgcaatctgtggtcagctccaatgtcaaaccggtcggactcagccactgctggggagtatccgtgacctcctctgggagaccattgacgtcaacggaaccgagttgaattgttcctgggtccatcttgatctcgggtctgatgtggcccaaccactcttgaccctgccagggactgcttgcggcccaggattagtttgtattgaccatagatgtcagagagttgatctcctgggggcacaggagtgcaggagcaagtgtcacgggcatggagtttgtgattccaatagacactgttactgcgaggaaggctgggcccctcctgactgcaccactcagctgaaggccaccagttcccttacaactggactccttttgtcactgctggtgttactcgttctggttatgctgggtgcctcctattggtacagagccagacttcaccagcgcctctgtcagctgaagggtcccacctgccagtatagtctcagaggacaaccctccccccatcctcagggatcccattgtctgcctacacccagggcaggtgcccaccgagtaacctgccctgctcagggactcgaatctcgcccttag

SEQ ID NO: 213385 - DNA, 1563 bp, synthetic construct
  misc_feature 1..1563: note = Description of Artificial Sequence: Synthetic coding sequence
  source 1..1563: mol_type = other DNA
atgaggctcgcactgctgtgggcccttggtctgctaggagccggttcgcccctgccctcatggcccttgcctaacatcggcggtaccgaagaacagcaggcggagagcgagaaagcccctcgcgagcctctggagccgcaagtgctacaagacgacctgccaatcagtctgaaaaaagtattgcagacgagcctccctgagcctctgagaataaagctggagctggacggagactctcatatcctggaacttctacagaaccgaagcttcttgccgggactgaatttcagcaactgttcacggagagccctggaaaaggccctactggacggaatgggatcctgtctgtttgaacgcctgcccagcttgccaccaatggccgctttctgcgggaacatgtttgtggaacccggtgagcagtgtgattgtgggttccttgatgattgcgtggacccctgctgtgactctttaacatgccagctccgtcccggagcgcagtgtgcatccgacgggccatgctgtcagaattgccagctcagaccatctgggtggcagtgccgcccaacacgaggagactgcgacctacctgagttctgccctggggattcttcacaatgtccgcctgacgtgtctcttggagatggcgagccgtgtgccggtgggcaggctgtgtgtatgcatggtcgctgcgccagctatgctcagcagtgtcagagcctttggggaccaggtgcacagcccgcagccccactgtgcctccagacggccaacactagggggaacgcttttggaagctgtggacggaacccttctggaagctacgtgagctgcacacctcgcgatgctatttgcggacagttgcagtgtcaaaccggacgcacacagccactcctggggtcaatccgagatctcctttgggagactatcgatgtcaacgggacggagctgaactgtagctgggtgcacctcgatctgggaagcgatgtcgcccagcccctactgactctgcctggtaccgcatgtggaccgggattggtgtgcatagaccatcgttgtcagagagtcgaccttctgggggcacaagaatgccggtctaaatgccacggccacggagtgtgtgactctaatagacattgctactgtgaggagggctgggctccacctgactgcacaacccagctgaaggctacctctagcctgaccactggacttctgttgtctctcctcgtgctgctggtgctggtgatgttgggagcaagctactggtaccgggctcggttgcatcagaggctgtgtcagcttaaaggacctacgtgtcagtacagggcggcacagagcggaccaagcgagagaccaggcccaccccagcgagctctgctcgccaggggcacaaaatctcaaggtcccgcaaagcctccacctccccgtaaaccacttcctgctgacccacaggggaggtgtccatccggtgacttgccgggacccggtgcaggaatccctccattggtggtccccagtcgtcccgctccgcctcctcccactgtaagtagcctttatctgtag

SEQ ID NO: 213386 - DNA, 2589 bp, synthetic construct
  misc_feature 1..2589: note = Description of Artificial Sequence: Synthetic coding sequence
  source 1..2589: mol_type = other DNA
atgaggttggcactgctgtgggccctggggctcttgggcgcaggctcaccgctgcctagctggcctcttcctaacattggcggtaccgaggagcagcaggcggagagtgagaaggctccaagggagccattggaaccacaggtgctgcaagacgacctcccgatctctctcaagaaggtcttgcagaccagcttacccgaacctctgaggatcaagttggaattagacggagactctcacattctggagctgctacagaacagggagcttgtgcccggtcggccaacacttgtttggtaccagccagacggaaccagagtagtttctgaagggcatacgcttgaaaactgctgttatcaaggcagagtgagaggatacgccggatcttgggtaagtatctgcacctgctctggcttacgcggtctcgtagtactcaccccagagaggtcatatactcttgagcaaggcccaggtgaccttcaggggcctccaataattagccggatacaggacctgcacctacctgggcacacatgcgctctttcttggagagagtccgtccacactcagaaacccccagagcatccactggggcagaggcacatccggcgtcgccgtgacgtggtgactgaaaccaagaccgtggagctcgttatcgtcgctgaccatagcgaagcccaaaagtatagagacttccaacacttactgaacaggaccctggaggtagcgctactcctggataccttcttcaggcccctcaacgtgagagttgcgcttgttggtctcgaggcttggacacagcgggacctggtggagatctcacctaaccccgctgtcacactggaaaactttttgcattggagacgggcacacttgctgccccgtctgccacacgattctgctcagctggtcactggaacatcgttctccgggccaaccgtgggcatggctatccaaaactcaatttgcagtccagacttcagtggtggggtgaatatggatcattctaccagtatccttggcgtggcttcttccattgcacacgagctgggacatagtctgggcctagatcatgacttgccgggaaacagctgcccctgtcctggcccagctccagccaaaacttgtatcatggaggcgagcaccgactttctgcccggattgaatttctctaactgctcacggagggccctagagaaagcccttctcgatggtatgggaagttgcctgtttgaacggctaccttcactccccccaatggctgctttttgcggaaatatgttcgtcgagcctggggaacagtgcgattgcggattcttagacgactgcgtagacccttgctgcgacagcctgacttgccagctccggccaggggcacagtgtgcctctgacggtccttgttgccagaattgtcaactgagaccctcaggctggcagtgtaggccaacaaggggagactgcgaccttccggagttctgccccggtgacagctctcaatgcccgcctgacgtcagtctaggagacggcgagccttgcgccggtggccaggccgtctgtatgcatggcagatgcgcctcctacgcccaacagtgtcagtcactctgggggccaggcgcacagccagccgctccactgtgcttacagactgccaatactcggggtaatgcattcgggagctgcggacgcaatccatctggatcttacgtgtcttgtacccctcgggatgcaatctgcggccagctccagtgccaaaccggacgcacgcaaccgctgttaggttctatcagagacttgctctgggaaacaatcgatgtcaatggaactgagctgaactgtagttgggtgcacttagaccttggtagcgatgtggcccagccgctgctgaccttaccaggcactgcatgcggtcctggactggtgtgcatcgaccaccggtgccagagggtcgatctgctgggggctcaggagtgtagatcaaagtgtcatgggcacggggtatgcgacagcaaccggcactgttattgtgaggagggttgggccccaccagattgcaccacacaacttaaagcgacctcttctcttacgaccggtctcctgctctcactgctggtcctcctagtactggtcatgctgggtgcttcatactggtatcgcgctagactacaccagcgcctgtgtcagctgaaaggacctacttgtcaatatcgcgctgcccagtctggtccatccgagcgacctggcccaccacagcgcgctttgctcgccaggggcaccaaggccagcgccctgagctttccagcccctccatctaggcctctgccacctgatcccgtgtctaaacgactccaggccgagttggcagaccgtccaaatccgcctacccgaccgctcccagctgaccctgtcgtgagatcccctaaaagccaggggccagcaaagcctccaccccctagaaagcctctgcccgcagacccacagggtcgctgcccgagcggtgatctcccgggacctggtgccggtattcctcctctcgttgtgcctagtcgccctgcacctcctccgccaacggttagctctttgtacctctag

SEQ ID NO: 213387 - DNA, 2391 bp, synthetic construct
  misc_feature 1..2391: note = Description of Artificial Sequence: Synthetic coding sequence
  source 1..2391: mol_type = other DNA
atgcggctggctctcttgtgggcactgggattgctgggcgcaggctccccccttccatcctggcccctaccaaatatcggcggaaccgaagagcaacaggccgagagcgagaaggcaccgagagaacctctggagccgcaggtgcttcaagatgacctgcctatctccttaaagaaggtactccagacatcccttcccgaaccccttaggattaagctcgaactggacggcgactcccatattctagaactgctgcagaatagagagctcgtgccaggacgacccaccctggtgtggtaccaacccgatggtactcgtgtggtgagcgaaggccataccctcgagaactgctgttaccaggggagagtgagaggctatgccggttcctgggtctctatttgcacttgcagcggtttgcgaggactcgtggtccttacccccgagcgaagttacaccctcgagcaagggccaggagacctgcagggtccccctatcatcagccggatccaggatctgcacttacctgggcacacctgcgcgctttcgtggagggagtccgtgcacacccaaaagcctcccgaacaccctctggggcagcgacatatcagacggcgacgagacgtagttaccgagacaaagacggtcgagctggtcatcgttgctgaccatagtgaggcccaaaagtatcgcgatttccagcacctgctgaatcgaacactagaggttgcacttctgttagatactttcttccgccctctgaatgtccgagtggccctggtcggcctggaggcatggacgcaaagggatttagttgaaatctctcctaatcccgcagtgacactggagaacttcctccactggcgaagagcccacctgttgccaaggcttccccacgacagcgcacagcttgtcacaggaaccagtttctctggaccaaccgtcggcatggctatccagaattctatctgttcgcccgacttttctggcggtgtcaatatggaccattcaacaagcattttgggagtcgctagcagcattgctcacgaacttggccactctctaggccttgatcacgatctgcctggcaatagctgcccttgtcccggtcctgcccctgctaaaacatgcatcatggaggcatccaccgacttcctccctggtctgaacttctccaactgtagccggagagctttagaaaaggccttactggacggcatgggtagttgtctgtttgagcgccttccgagtctaccacctatggctgcattttgtggaaatatgtttgtggaacctggcgagcaatgtgattgcgggtttctggacgattgcgtagacccttgttgcgatagtctgacctgccagctgcgtcccggtgcacagtgtgcatctgacggcccttgctgtcagaactgccagctgcgaccaagcggctggcagtgccggcctacccgcggagattgcgacctgccagagttttgtccaggtgatagctctcagtgcccccctgacgttagccttggggacggcgaaccatgcgctggagggcaagccgtctgcatgcatggcaggtgtgcatcttacgcccagcagtgtcagtcactgtgggggcctggcgcacagcctgcagcccctctatgtctgcagacagccaacacacgaggcaatgcgttcggatcctgtggacggaaccctagtggctcctatgtgagctgtaccccccgtgacgccatttgtgggcaacttcagtgtcagacaggaaggacgcagcctctgctggggtcgatccgggatctgttatgggagactatagatgtgaatggaaccgagctcaattgctcttgggtccacttggatctcgggtcagacgttgcccagcctttactgaccttgcccggtaccgcctgtgggcctggactggtctgtattgatcatcggtgtcagagagtggacctgctgggggctcaagagtgcaggagcaagtgccatggccacggagtgtgcgatagtaatcggcactgctactgtgaggaagggtgggctccccctgactgcactactcaactaaaagctactagctcccttacaacgggactgcttctgagcctgctggttctgctggtgcttgtgatgttgggcgcaagctactggtacagagctaggcttcatcagaggctgtgccagctaaaggggccaacgtgccaatataggctggtcttgagtgcaagcaggcccccactgcccggaagatgccggctgaccttatgccccagagattccagccttcgagggcagccttccccccacccccaaggcagccactgccttccaacaccccgagctggagcccatagagtgacttgccccgcacaaggtttggaatcccggccatag

SEQ ID NO: 213388 - DNA, 2475 bp, synthetic construct
  misc_feature 1..2475: note = Description of Artificial Sequence: Synthetic coding sequence
  source 1..2475: mol_type = other DNA
atgagacttgccctcctgtgggcgctagggctcctgggcgctggtagcccacttccttcctggcctctccctaatatcgtcttgagctggggcgtcctgggacctgctgggggtacagaggagcagcaggccgaatcagaaaaggcacctcgggagccactggaacctcaagtcttgcaggacgatttgccaatcagcctgaaaaaagtgctccagacctctctgcctgagcctctccggatcaagctggaactggatggagatagccatatcctcgaactgctacagaatcgcgagctggttcctggcaggcctactctggtgtggtatcagccggacgggaccagagtagtttcagaggggcacaccttagaaaactgctgctatcaaggccgtgtgaggggatatgctggcagttgggtgtcgatctgtacttgcagcggcttacgtggccttgtggtgctgacgccggagaggagctacaccctcgagcagggtccaggggacttgcagggaccaccaatcatatccaggatacaggacctccacctgccaggacatacctgtgctctttcctggagagaaagtgtccatacccagaaaccacccgagcatccgctggggcagaggcacattagacgcagacgcgatgtggtgacagagacgaaaacagtggagctggtgatcgtagctgaccatagcgaggcccagaaatatagagactttcagcacctgctgaaccgcactctcgaggtcgcattacttctcgatacattttttcgtccattgaatgtgcgggtggcactcgtcggtctggaagcctggacacagagggacctggtggagatctctcccaatccggcagtgactctggagaactttctgcactggcggagagcacacctgctgcccaggttgcctcatgattctgcgcagttggtaaccggaacctctttctctggacctactgtcggtatggcaatccagaatagcatctgctccccagacttctcagggggtgtgaatatggaccactcgacatccatactcggcgtggccagcagtatcgcccacgagttgggacattccctcggcctagaccacgatttaccaggcaactcatgtccctgtccgggaccagctcctgcaaaaacctgcattatggaagcctcaacagattttctccctggcttaaatttcagtaactgctctcggagggccctggagaaagccctgctagatggcatggggagctgtctcttcgagcggctccctagcctcccgcctatggctgctttttgcggcaacatgttcgtcgaaccaggcgagcagtgcgactgcggcttcctggatgactgcgtggatccttgctgcgacagcctaacctgccagttgcgacccggagctcagtgcgcaagcgatggcccatgctgtcaaaactgtcagttgcggccatctggctggcaatgtcggcctactcgaggggactgcgatctgcctgagttttgccccggagactcatcccaatgccctccagacgtgagtctgggcgatggcgagccgtgcgctggaggacaagccgtatgtatgcacggacgttgcgcctcatacgcccaacagtgtcagagcctttggggtcctggcgctcagcctgccgcaccactgtgcctgcagacggctaacaccaggggcaacgcgtttggaagttgtgggagaaacccctcaggctcttacgtctcctgcaccccccgagacgccatctgcggacagctacagtgccagaccggccgaacacagcccctcttggggtcaatacgggacctgctctgggaaacaatcgatgtcaatgggaccgaacttaattgtagttgggtgcatctggatcttggttctgatgtggctcaacctctgctgaccctccctggaaccgcctgcgggcctggcctcgtttgtatcgatcacagatgtcagcgcgtggacctcctgggggcacaggaatgccgctccaaatgccacggccatggcgtgtgtgacagtaacagacattgctattgcgaagaggggtgggctcctcccgattgtactacacaactcaaagctacaagctcactgaccacgggattgcttctgagtctgctcgtgttactggtcctggtgatgctgggcgcttcttattggtaccgggctcggctgcatcagcggttgtgtcagctgaaaggccctacatgtcaatatagagccgcacaatccggcccttcagagagacccggaccccctcagcgagcgcttctggctaggggcaccaagagtcaggggcctgctaaaccaccacctccgagaaagcccctccctgcagacccgcagggcagatgcccaagcggagatcttccaggccctggggctggcatcccaccactcgtggttccaagtcggccagcaccaccgccaccaaccgtgtcatctctttatttatag

SEQ ID NO: 213389 - DNA, 2757 bp, synthetic construct
  misc_feature 1..2757: note = Description of Artificial Sequence: Synthetic coding sequence
  source 1..2757: mol_type = other DNA
atgccaggcggagcgggagctgcgaggctgtgtctcctcgcattcgctcttcagcctttgcgacctcgagccgcacgcgaaccgggttggactcgcggttctgaagaaggatcacccaaactgcagcatgagctgataatcccgcagtggaagacgtctgaatctcctgtccgggagaagcacccactgaaggccgagctgcgtgtcatggccgaaggcagggagctaatcctcgatctcgagaagaacgaacaattgttcgctccatcttacactgagacccactacacctcctctggaaaccctcagacaacaacccgcaagctggaagaccattgcttttaccacggaacagttagagaaaccgaactgagctctgtgacactgtctacctgtagaggaatccgcggactgattactgtgagtagtaacctgagttacgtgattgagcctctgccagattctaagggtcagcacctgatttacagatctgaacatctcaaacccccacccggaaattgcggcttcgagcactcgaagcccacaactagagattgggccctgcaattcacacagcagacaaagaaacggccacgccgaatgaaaagagaggacctaaacagcatgaagtacgtggagctctacctggttgccgactaccttgaattccagaaaaataggagggatcaggatgctactaagcacaagctgatcgagatcgcgaattacgtggataaattttaccgctctttgaatatacggatcgcccttgttggactcgaggtctggacacacggaaacatgtgcgaggtgtcagagaacccttattccactctctggtctttcctctcatggcgtcgcaaactgcttgcgcagaagtaccatgataatgcccagttgatcacaggtatgtctttccatggcaccaccatcggtctcgcaccattaatggctatgtgcagcgtgtaccagtctggtggagttaacatggaccattcagaaaatgcaatcggcgtggcagctacaatggcacatgaaatgggccacaactttggaatgacccacgattctgcagattgttgcagtgcctctgctgcagacgggggatgcatcatggctgccgctaccgggcacccgtttcctaaggtcttcaacggttgtaatcgcagagagctggatagatatctgcagagtggcggagggatgtgtctctccaacatgccagatacgagaatgctgtatggcggacggaggtgcgggaacggctatctggaagacggcgaagagtgcgactgtggcgaggaggaagagtgtaacaacccctgctgcaatgcctctaattgcacacttcgtcccggtgcggagtgtgctcacggtagctgttgtcatcagtgcaagctgttggcacccggaaccctctgccgtgagcaggcgagacagtgtgatctgcccgagttctgcaccggtaagtctccccattgtccaacaaacttctaccagatggatgggaccccttgcgaaggcggtcaggcttattgctacaatgggatgtgcctgacctatcaggagcaatgtcaacagctttggggcccaggagccagaccagcacctgatttgtgttttgaaaaggtgaatgttgccggagacacttttggtaactgcggaaaagatatgaatggagagcacaggaagtgcaatatgcgcgacgccaagtgcggaaaaatacagtgtcaatctagcgaagccagaccgctggagtccaatgccgtcccgatcgatactacaataatcatgaacgggcgtcagatccagtgcagaggtactcatgtatatcgaggaccggaagaggagggcgacatgctcgaccctgggttggtcatgaccggcaccaaatgtggatacaaccacatatgcttcgaaggccagtgtcgcaacacctccttttttgaaacagaagggtgcggcaaaaaatgcaatggccatggggtctgcaacaacaaccagaactgtcactgtctgccgggttgggctccccctttctgcaacacgcctgggcatggaggttccattgatagtggcccaatgccccctgagtccgtagggcctgtagtggccggagtgttagtggccatccttgtccttgccgtcttaatgctaatgtactactgttgcaggcaaaacaataagctgggacaactgaaaccatctgccctgccatcaaagctgaggcagcaatttagttgtcccttccgagtctcccagaattccggaacaggccatgcaaacccgacattcaagctccagaccccacagggcaagcggaaggtgattaacactccagaaattttgcgcaagccgtcccagcctccaccgaggcctccccctgactatctccgagggggaagcccgcctgcgccactgcccgctcatctctcgagggcagccagaaatagccccggtcctgggtcgcaaatcgagaggacagaatcttctcgtcggccaccaccgagccgcccaatccccccagccccaaactgtattgtatcacaggatttcagccgtccccgaccaccacagaaggctctacctgccaatcctgtacccggaaggagaagcttacctagacctggaggcgcatctcctcttcgccctcctggcgctgggccacagcagtcgcgccctcttgcagctctggctcctaaatttcccgagtatcgttctcagagggctggcggaatgatctcttctaaaatctag

SEQ ID NO: 213390 - DNA, 2763 bp, synthetic construct
  misc_feature 1..2763: note = Description of Artificial Sequence: Synthetic coding sequence
  source 1..2763: mol_type = other DNA
atgcctgggggtgccggagcagctcgtttgtgcctgctggctttcgccttacaacccctgcgcccacgtgcagcacgcgagcccggatggaccatctctaggggatctgaggagggcagccccaagctgcagcatgaactgattattccgcaatggaagaccagcgagtcgcccgtgcgggagaaacatcctcttaaggcggagctgagggtgatggcagaagggagggagctgatccttgacctggaaaagaatgagcagctgtttgccccttcttatacagaaacgcattataccagctcaggcaatcctcagactactacgagaaaactggaggatcattgtttttaccacggtaccgtccgcgaaacagagctgtcttccgtgactctgtcaacctgtcgcggtatccgcggtttaattacagtgagtagtaacctatcctacgtgatagaaccactcccagattcaaaaggacagcacctgatctatagaagcgagcacctaaagcccccacccggaaactgcggtttcgaacattctaagccaactactagagattgggctttgcagtttacccaacagacaaaaaagcgtcctcggagaatgaaacgggaggatcttaatagcatgaaatacgtcgagctgtacctagtagctgactacctagaattccagaaaaatcggagagaccaggatgcaaccaaacacaagttaattgaaattgctaactatgtggataagttctatagatctctcaacatccgtattgctcttgtgggccttgaggtgtggacccatggaaatatgtgtgaagtttcagagaacccctattccacattgtggtctttcctgagttggagaaggaaactgcttgcccaaaagtatcacgacaatgcacagcttattaccggaatgagttttcatggcaccaccatcggcttagctcctctcatggccatgtgtagtgtttaccagtcaggcggtgttaacatggatcacagcgaaaatgcaattggggttgcggctacgatggcccatgagatgggccataacttcggaatgacccacgattcagcggactgctgctcagcttcggcagcagacgggggatgcatcatggctgcagcaaccggacatccttttcccaaggtgttcaatggatgtaacagaagagagttggaccggtacctgcagagcggaggcggaatgtgtctctcaaatatgccagacacgcgtatgctgtacgggggacggcgttgcgggaacggatatctggaggacggggaggagtgcgattgcggggaagaggaggagtgtaacaacccctgctgcaatgcatcaaattgtactttacggccaggcgcagagtgtgcacacggttcttgctgccaccagtgtaagctcctcgcaccaggcaccctgtgtcgagagcaggccagacaatgcgatctccccgagttttgtacgggcaagagcccccattgccctaccaacttctaccagatggatggcacaccgtgtgaggggggacaggcttactgttacaacgggatgtgcctaacatatcaggagcagtgtcaacaactgtggggcccaggtgctcggcctgcccctgatctgtgctttgagaaggtcaatgtggccggagacacgttcggtaattgcgggaaggacatgaacggggagcaccggaagtgtaatatgagagacgcaaagtgcggcaagatacagtgccagtccagcgaagcccgacccttggagtcaaacgcagtacccattgataccacaatcataatgaacggaaggcagattcaatgccgcggaactcacgtgtacagaggcccagaggaagagggcgacatgcttgatcccggactggtgatgactgggacaaagtgtggttacaatcatatctgcttcgaagggcagtgccggaatacgtctttcttcgagacggaggggtgcggaaaaaaatgcaatggtcatggtgtctgcaataataaccagaactgccattgtctccctggttgggcgcctcccttctgtaacacacctggacacggtggctccatcgattccggcccaatgccccctgaatcagtggggcctgtggtggccggtgttcttgtcgccatactagtgctggcggtcctcatgctcatgtattattgttgccgacagaataacaaactgggccagctcaaaccatccgctttgcccagcaaactccggcagcagttcagctgccccttccgcgtgtcccagaatagtgggactggtcatgccaatcctacatttaagctgcagactccgcagggcaagcgcaaagtgattaatacccctgagattctgcgcaagccctctcagccacctccacgaccaccacctgattaccttcggggtgggtctccacccgctcctctcccagcccacctatcccgggctgctagaaatagtcccggaccagggtcccagattgagagaacagaatcctcgcgacgcccaccacccagcagacctatcccacctgcgcctaattgcatagttagtcaagacttttcccgaccccgacccccacagaaggctctccccgctaaccccgtgcctggaaggcgctccctaccgaggcccggaggtgcttccccgctgcgaccccctggcgctggtccacagcaatctcggcctctcgcggctctggcacctaagttcccagagtaccggtcgcaaagagcgggtggcatgattagctcaaaaatatag

SEQ ID NO: 213391 - DNA, 1917 bp, synthetic construct
  misc_feature 1..1917: note = Description of Artificial Sequence: Synthetic coding sequence
  source 1..1917: mol_type = other DNA
atgtgtgaagtgtccgaaaacccgtactccacattgtggtcattcttatcgtggcggaggaagctgcttgcccagaagtaccacgataatgcccagctcatcacaggaatgagcttccacggcacaacaatcggcctagcgcctctgatggcgatgtgttctgtgtaccagagtgggggagtgaacatggatcattcggagaatgcaatcggagtcgcggctactatggctcatgagatggggcacaacttcggaatgacacacgattccgcagactgctgttccgcttccgcggctgacgggggatgtattatggccgctgctactggccaccctttccctaaggttttcaatggctgtaaccgaagggagcttgaccggtatctacaatctgggggaggaatgtgcttgtctaacatgccggacacccggatgctgtacggcggacgcaggtgcggtaacggttacctcgaggacggagaagagtgcgattgtggcgaagaagaagaatgcaataacccgtgctgcaatgcctctaactgcaccctgcgccctggagctgagtgcgcacacggttcatgctgtcaccaatgtaaacttttggcgccaggcactctctgtagagaacaggccaggcagtgcgatctcccggagttttgtacagggaaaagtccacactgtcccactaatttctatcaaatggacggcacgccatgcgaagggggacaggcctattgttacaacggcatgtgtttgacctaccaggagcagtgccaacagctctggggtccaggggctcgtcccgctcctgatctctgcttcgaaaaggtaaacgtggcaggcgatacattcgggaattgcggcaaggacatgaatggggagcacagaaagtgtaacatgcgggatgccaagtgcggcaagatccagtgccagtcctccgaagcacgccctcttgaatccaacgctgtgcctatcgacacaaccatcatcatgaatggacggcagattcagtgtcggggaacacacgtgtacaggggacctgaggaagagggtgatatgctggacccaggtttggtgatgacaggcactaagtgcgggtacaaccacatctgctttgagggacagtgtcggaacacctcctttttcgagaccgaaggttgtggtaaaaaatgcaacggtcatggggtctgcaacaacaatcagaactgccactgccttcccggatgggctcctcctttttgcaacacacccggtcacggcggaagcatcgatagcggcccaatgcctcccgaatctgtgggcccagtcgtcgccggagtcctcgtggccattctggttcttgcagtgctgatgttaatgtattattgctgccgacaaaataacaaacttggacaactcaaaccttcagcgctaccttctaagctgaggcagcagttctcctgtccatttagggtctctcagaatagtggcacaggccatgccaacccgacctttaagctccagaccccccagggtaagagaaaggtgataaacacacctgaaatcctgaggaagccttctcagccccctcccaggccacctcctgattatcttagaggcggaagtccccctgcccctctgccggcacatctgagccgggcagctaggaactcccctggaccaggttcccagatagaacgaactgagtcatccagaagacctccgcctagtagaccaatccccccagcgccaaactgcatagtgtcccagaaatgtttattgcccccagccatgattctccgggcaccccaaccttctggaaccgtggtgtgccttgtgatttctttcaatatggctttctaccggtcaatgaggatccgcatcgagcccggaattaaaactaaattactggtcttactggtctggaaacagttctag

SEQ ID NO: 213392 - DNA, 2868 bp, synthetic construct
  misc_feature 1..2868: note = Description of Artificial Sequence: Synthetic coding sequence
  source 1..2868: mol_type = other DNA
atgcccggaggtgccggagctgctcggttatgtctgctcgccttcgccctgcagccactaagacccagagctgcaagggagcctggctggactcgcggttctgaggagggcagccctaagctacaacatgaactgataataccccagtggaaaacctccgaaagccccgtccgcgagaagcacccattgaaggctgagctaagggttatggcagaagggagggaattgatactggaccttgagaaaaacgagcagctgttcgccccatcctacaccgagacccactatactagcagcggcaacccacaaaccaccacccgcaagctagaggaccattgcttttatcacgggaccgtcagggaaaccgaactgagctctgtgactctgagtacctgtcggggtatacgcggactcatcactgtgtcgtccaacttgtcatatgtgattgagccactcccagacagcaagggacagcatctgatttataggtcggaacatcttaaaccaccccctggaaactgcggttttgagcatagcaagccaacaacgcgggactgggcccttcagtttacacagcagaccaagaaacgccctagaaggatgaagcgggaagacttgaattccatgaagtatgtggagctatatctggtggcggattatctggaattccaaaaaaaccgccgagatcaggacgcgactaagcacaagcttatcgaaatcgctaattatgtcgataaattttatagatctttgaatattaggattgccctggtggggttggaggtctggacacacggcaatatgtgcgaggtgagcgagaacccctactcaactctgtggagttttctatcttggcgaaggaaattgctggcacagaagtaccacgacaacgcacagttgattactggcatgtcctttcatggaacaaccatcggccttgcccctcttatggctatgtgtagtgtctaccagagcggtggagtgaacatggatcattctgaaaacgctatcggagtagccgctactatggcccacgagatggggcacaatttcggtatgacccacgacagcgccgattgctgcagcgctagtgccgcagacggtggatgcatcatggctgcagccacgggacacccgtttccaaaagtgttcaatgggtgcaatagacgcgagctagacaggtacctccaaagcggcggaggaatgtgcctctctaacatgcctgacaccagaatgctgtatggcggtcggaggtgcggtaatggctatttggaggacggtgaagaatgcgattgtggcgaagaagaggaatgcaacaacccatgctgtaatgcatccaactgcacactgcgcccaggcgctgaatgtgcccatggcagttgttgtcaccagtgcaagctcctcgcgcctggaaccttatgtcgagagcaggccaggcagtgcgacttgcctgaattctgcacaggaaagagcccccactgtccaacaaacttttatcagatggacggcaccccctgtgaaggtggccaggcttactgctataatgggatgtgtctgacctatcaggagcagtgccaacagttgtggggtcctggcgctcgccctgcccctgatctatgctttgagaaagtgaatgtggctggcgacacattcggcaattgtggcaaggatatgaacggtgaacaccgcaagtgcaacatgagggacgccaaatgcgggaaaatccaatgccaatcatctgaggccaggcccctggaatctaatgccgtgccgatcgataccactatcatcatgaatggtcgtcagattcaatgccgaggaacacacgtgtaccgcggacccgaagaagagggcgacatgctcgaccccggactggtcatgactggaacgaaatgcggctataatcatatctgttttgaaggacagtgtagaaacacctcattcttcgagacggaggggtgtggtaagaagtgcaacggacatggggtgtgcaacaacaaccagaactgtcattgtcttccaggttgggcccctccattctgtaatactcctggtcacggaggctcaatcgactctgggccaatgcccccagaatctgtaggacctgtagtagccggagtgctggtggcaatcctggtacttgcagtattaatgctgatgtattattgctgtcggcagaacaacaaactcggtcagctcaaaccctcggcactgccaagtaaattgcgtcagcaattctcttgcccattcagggtctcacagaattccggaaccggtcacgctaatcctaccttcaagctgcagacaccacaagggaaaagaaaagtgataaacacccccgagattttgaggaagcctagccaacctccacctcgccctcccccagattacctgcgaggcggttctcctccagcaccactaccggcacatctgagtcgggctgctcgcaattcccctggtccaggaagtcagatcgagaggacagaaagcagccgacggcctccgccatcgcgtcccattcccccagcgccaaattgcatcgtttcccaggacttctcccgccctcggccacctcagaaagcgcttccggctaatcctgtgccgggaagacgtagtctacctaggcccggaggagccagtccattacggcctcctggagccggaccccaacaaagtaggccacttgcagccttggcaccaaaggtgtccccaagggaagctctgaaggtgaaggcagggactagagggctgcagggaggacgctgtagagttgagaagaccaagcagtttatgctgctggtggtctggaccgaactcccagagcaaaaaccaagagccaaacattcctgcttcttggtgccagcctag

SEQ ID NO: 213393 - DNA, 2208 bp, synthetic construct
  misc_feature 1..2208: note = Description of Artificial Sequence: Synthetic coding sequence
  source 1..2208: mol_type = other DNA
atgtggcgcgtcctctttctgctctcaggacttggaggcctgagaatggactctaattttgactctcttcccgtgcagatcaccgttccagagaagatccgctccatcatcaaagaggggatcgaatcccaggcctcctataaaatcgtcatcgaaggtaaaccttacactgtcaatctgatgcagaaaaattttcttccccataatttcagagtctactcatattctggaacaggcatcatgaaacccctggatcaggatttccagaatttctgccactatcagggctatatcgagggctatcccaagtccgtagtgatggtgagcacttgtactggactgcgaggcgttctgcagttcgagaacgtgagttacggaatcgaaccactcgagtccagtgtgggcttcgaacatgtgatataccaggtaaaacataaaaaagccgacgtaagcctgtacaacgagaaagacattgagagcagagacctctcatttaaactccaatctgtggagccacagcaagactttgccaaatatatagagatgcacgtcatagtggagaagcagctctacaatcacatgggttcagacacgacagtagtagcccagaaagtttttcaactgatcggcctgacgaacgctatcttcgtctctttcaacatcacaattattctatctagtctggagctttggattgatgagaataagatcgcgaccacaggggaggctaatgaacttcttcacaccttcctaagatggaaaacgagctatctagtgctgcgcccacacgatgtagcattcctgctggtatacagagaaaaatccaactacgtaggcgcaacttttcaaggtaagatgtgtgatgcgaactacgcaggcggagttgttttacaccccaggacaataagcctcgaaagtcttgcagtgatattagctcagctgctgagcctgtcgatgggtatcacctacgatgatatcaataaatgtcagtgcagtggcgctgtatgcataatgaatcctgaagccatccacttttctggggtgaagatcttttcaaactgcagctttgaggactttgcgcactttatctccaaacaaaagtcccaatgcctacataatcaaccacgactcgatccgttcttcaagcagcaagctgtgtgtggcaacgcaaagttagaggccggtgaggagtgcgactgtggcactgagcaggattgtgcgctcattggcgaaacctgctgcgacatcgccacatgcaggttcaaggccggtagcaattgcgcagaaggcccttgctgtgaaaactgtctattcatgtctaaggagcgcatgtgtaggccaagcttcgaggagtgcgacctaccagaatactgcaatgggtcttctgcctcttgtcctgaaaaccattatgttcaaacagggcatccatgcggcctgaatcagtggatctgcatcgatggcgtgtgcatgagcggcgacaaacaatgcacggatactttcggaaaagaggtcgaatttggcccatctgagtgttactctcatcttaactctaagaccgacgtgtccggtaactgcggaatctcagattccggctacacacagtgcgaagccgataatctccagtgtggcaagctaatttgcaagtacgtaggcaaattcctgctgcaaattccaagagcaaccatcatctacgctaatatttcaggtcacctttgtatagccgtggagtttgcctccgaccacgctgattcacagaagatgtggatcaaagacgggacatcctgtggcagtaataaggtgtgtcgcaatcagcgctgcgtgtcttcaagctacctcggatatgactgtactaccgacaagtgtaacgacaggggcgtgtgcaataataagaaacattgtcactgttctgcaagctatctgcccccagattgcagcgttcagtccgatctatggccaggaggttccatcgattcagggaattttcccccagtggctattcctgcacggttgccggaacgcaggtacatagaaaatatctaccactccaagccaatgcgctggccattctttctattcatcccattcttcatcatcttctgtgtgctgattgccatcatggtgaaggtcaatttccagcggaagaaatggagaacagaggactattcaagcgacgaacaacctgaaagcgagtcagaacctaaggggtag

SEQ ID NO: 213394 - DNA, 2151 bp, synthetic construct
  misc_feature 1..2151: note = Description of Artificial Sequence: Synthetic coding sequence
  source 1..2151: mol_type = other DNA
atgtggcgggttctcttccttctgagcggtttaggcggattgagaatggatagcaacttcgactccctgcctgttcagattaccgtccccgaaaaaatcaggtctatcattaaggaaggcatagagtctcaggcgtcatacaagatcgttattgaaggaaagccctacacagtgaaccttatgcagaaaaatttcctccctcataactttcgcgtttactcctacagcggaacaggcatcatgaagcccctggatcaggacttccagaatttttgtcactaccaagggtatatagaaggctaccccaaatcagtggtgatggtcagcacctgtactggactgcgcggagttctgcagttcgaaaacgttagctatggcatagagcccttagaatcctccgtcggctttgaacatgtcatttatcaggtgaagcacaagaaggccgatgtgagtctctacaacgaaaaggacatcgagagccgcgacctgtcatttaaactgcagtccgtggaatacaatcatatggggagcgacactaccgtcgtggcccagaaagtattccaattgatcggcctcacgaacgcaatttttgtttccttcaacattacaatcattcttagctcccttgaattatggattgatgagaataaaatagctactacaggagaggccaacgagctcttacacacattcctgcgttggaagaccagttacctcgtcctcaggccccatgatgtggcttttttactcgtgtatcgagaaaagtcaaattacgtgggggcaacatttcagggtaagatgtgtgatgccaactacgctggcggagtggtgctccacccgagaaccatttctctggagagcctcgctgtgatcctggcacagctgctctcattaagcatgggaatcacatatgacgacatcaataaatgccagtgctccggcgctgtttgcatcatgaacccagaagcaattcacttcagcggagtgaaaattttttccaactgtagtttcgaagactttgcacatttcatatccaagcagaagtcccaatgcctccataaccagccacgtctggacccgttttttaaacagcaggctgtctgcggcaacgccaaattagaagctggagaggagtgtgattgcggtacagaacaggactgtgccctgattggggagacctgctgtgacatcgctacgtgccgttttaaagctggcagtaactgcgccgaagggccatgttgtgagaattgtctgttcatgagcaaagaaaggatgtgtcggccaagctttgaagaatgcgacttacctgaatactgtaatggatcaagcgcgtcatgtcctgagaaccattatgtgcagaccggccacccctgcgggctaaaccaatggatctgcatagatggggtgtgcatgtccggggataagcagtgtaccgatacgtttggcaaagaagtggagttcggcccaagcgaatgctactctcacctaaactcgaaaaccgatgtgtcggggaactgtgggatctcagactctgggtatacacagtgcgaagcagataatctccagtgcggtaagctgatctgcaagtacgtgggaaagttcctcctgcagatccccagggccacaatcatctacgcaaatatctctggccacctctgcatcgcagttgaattcgcgtccgaccacgcagattctcagaagatgtggatcaaggatgggacatcttgtggctccaataaagtgtgtcggaatcagcgatgcgtaagcagcagctacttaggatatgattgcacaacagacaaatgtaacgatagaggagtgtgtaataacaaaaaacactgtcactgttctgcttcttacctaccccctgactgctccgtacaatccgacttgtggccaggaggttctattgattcaggaaattttcctccagtggccatccccgcaaggctccccgagcgacgttatatcgagaatatctaccattcaaaaccaatgcggtggccttttttcttattcattccgttcttcatcatcttttgcgtcctgattgctatcatggtaaaagtgaactttcagcgaaagaagtggcgaactgaggattattcctccgacgagcaaccagaaagcgaaagtgagcccaaaggatag

SEQ ID NO: 213395 - DNA, 2331 bp, synthetic construct
  misc_feature 1..2331: note = Description of Artificial Sequence: Synthetic coding sequence
  source 1..2331: mol_type = other DNA
atggtgcaactccaccaagacactgatccacagatccctaaaggacagccctgtaccctgaattccagtgagggaggggctcggcctgccgtacctcacactctcttttcatcagcacttgataggtggttgcataatgacagttttatcatggccgtcggggaaccactagtgcatatcagggttaccctgctgcttttgtggtttggcatgttcctttcaataagcggacatagccaggccagaccgagccagtatttcacctcccccgaggtcgtgataccactgaaggttatatcccgaggcagaggggcaaaggcccctggttggcttagctattctctgcgatttggaggccagcgctacatagtgcacatgcgcgtgaataaattgctcttcgcggcacatctgccagtcttcacatatactgagcagcacgccctccttcaggatcagccatttattcaggacgactgctattaccatggctatgtggaaggtgtgcccgaaagtctcgtggcgctgagtacttgcagcggcggatttctgggcatgctccaaatcaatgatctcgtatacgagataaagccaatttccgttagcgctactttcgagcacttagtgtacaagattgactccgatgacactcagtttccacccatgaggtgcggcttgacagaagagaagatcgcccaccaaatggaactgcaactctcctataattttactttgaagcagtctagcttcgtgggctggtggacccaccaacgtttcgttgagctggtggtggtagtcgacaacatcagatatctcttctcccaatccaatgctacaaccgtacaacacgaggtttttaacgtggtgaacattgtggacagcttctaccatcctttggaggtggacgtgatcctcaccgggattgatatttggaccgcaagcaaccctctcccgacatccggcgacttggacaacgtactggaagacttctccatttggaaaaattacaacctcaacaatcgactgcagcacgatgtggctcatctttttattaaggatacacagggtatgaaactgggcgttgcatacgtgaagggtatttgccagaacccattcaacaccggtgtggatgtgtttgaagacaataggctggttgtcttcgccatcacacttgggcacgagctgggccacaatctgggaatgcaacacgatacacagtggtgcgtatgcgaacttcagtggtgcattatgcacgcgtatcgaaaggttaccactaagttcagtaactgctcttacgcacagtactgggattccacaatctcttccggactctgcattcagcctcccccttaccccggtaacattttcagactgaagtactgcggcaacctggttgtagaagagggcgaggaatgtgactgcggtactatcagacagtgtgcaaaggatccctgctgcctgttgaattgtaccttgcacccgggtgctgcctgcgcgttcggaatttgttgtaaagactgcaagtttctaccgagcggcaccttgtgtagacagcaggtcggagaatgtgatctgcccgagtggtgcaacgggaccagccaccagtgccccgacgacgtgtacgtccaggacggaatcagctgtaatgttaatgcattctgctacgaaaaaacgtgtaataaccacgatatccagtgcaaagagattttcggtcaggacgccaggtcagccagtcagagctgctaccaggaaatcaacactcaaggcaatcggttcggccactgcggcatcgtaggcacaacatacgtcaagtgctggacacccgatatcatgtgtggccgtgtacagtgcgaaaacgtgggcgtgattccgaatcttattgaacactcaacagtgcagcagtttcatctgaatgacactacttgctggggcactgactaccatctgggaatggctatccccgacataggagaggtcaaagacggaaccgtttgcggtcccgaaaaaatctgtatccggaagaagtgtgcgagcatggttcacctgagccaggcctgccagccaaaaacctgcaacatgaggggcatctgtaacaacaaacagcactgccattgtaaccacgagtgggctcccccatattgtaaagataaggggtatggtgggagtgccgattcgggcccaccgccaaagaacaatatggaaggacttaacgttatgggaaagcttcgatacctgagcctcttgtgtctccttcctctggtggcttttctcctgttctgcctgcatgtgctgttcaaaaagagaactaagagcaaggaagatgaagaaggctag

SEQ ID NO: 213396 - DNA, 2169 bp, synthetic construct
  misc_feature 1..2169: note = Description of Artificial Sequence: Synthetic coding sequence
  source 1..2169: mol_type = other DNA
atggcggtggatggaacgttggtctacatacgagttaccttgctgctgctgtggctgggggtgtttttgtcaatttccggatactgtcaggccggtcccagtcagcatttcacgagcccggaggtcgtgatacctttaaaagtgatcagtagaggcaggagtgccaaagccccaggctggctgtcatatagcctgcgcttcggcggacagaaacacgtagtacacatgagagttaagaaactcctggtatcccgacacctgcctgtatttacatacacagatgaccgagctcttctcgaggaccagttattcatccccgacgattgctactaccacgggtacgtcgaagcggcacctgaatcgctcgtcgtgttctcagcctgtttcggcggattccgcggagtcctgaagatttccggcctgacatacgaaatcgaacccattcgacactccgcaacatttgagcacctggtctacaagattaatagcaatgagacacagttccccgcaatgcgctgtgggctgacagagaaggaagttgctcgccagcaacttgagttcgaggaggccgagaacagcgccctggagccaaagagtgctggtgactggtggactcacgcctggttcctggagctagttgtggtggtaaaccatgacttttttatctattcccagtcaaacatctccaaagtacaggaagacgtgtttctcgttgtgaacattgtggatagtatgtataagcagctaggtacctatattattcttatcggaatagagatttggaatcaggggaacgtgtttcctatgacatccatagaacaggttctgaatgatttcagccagtggaaacagatttccctgagccagttacagcacgacgccgctcatatgtttattaagaatagcctaattagtatcttgggtctcgcctatgtggccggtatttgtagaccaccgatcgactgcggcgtagacaactttcagggtgatacatggtccctatttgcgaacactgttgcccacgaactgggacacacccttggcatgcagcacgatgaggagttctgcttctgcggcgagcgaggctgtattatgaacacttttcgtgtacctgctgagaaatttacaaactgttcctatgctgactttatgaaaacaacactcaatcaaggctcctgtctgcataatccacccaggctgggtgaaattttcatgctgaaacgctgtggcaatggcgtggtcgagcgggaggagcagtgtgactgcggttcagtacagcaatgcgagcaggatgcatgttgtttactgaattgtacattgagacctggcgctgcctgtgcttttggactgtgctgtaaagattgcaaatttatgccctctggagaactctgtcgacaggaagtgaatgaatgtgacctgcccgagtggtgtaacggaacatcccaccagtgtcccgaagatagatacgtacaagatggaatcccttgctcggatagcgcttactgttatcaaaaacgatgtaataaccacgaccagcactgccgggagatttttggaaaagatgccaagagcgcttctcagaattgctacaaagagattaattcgcagggtaaccggttcgggcattgcggaattaatgggacaacatacctgaagtgccacatatctgacgtattttgcggtcgtgtacaatgcgaaaatgtcagagatattcccctgctgcaggaccactttaccttgcagcacacacacatcaacggtgtgacttgctggggtatagattaccacttgcgaatgaatatctccgacatcggagaggtgaaggacggaacggtttgcggcccaggtaaaatttgtatccacaagaaatgtgtgagcctgtcagtcctgtcacatgtgtgcctacctgagacttgcaatatgaaagggatttgcaataacaaacaccactgtcactgcggatatggctggtctccaccgtattgtcaacatcgagggtatggagggagtatcgacagtggcccagcatcggcaaagcgaggcgtctttttgcccctgattgttataccaagcttgtctgtactgacattcctgtttaccgtaggattgttaatgtatctgcgtcagtgctcagggcctaaagagactaaggcgcacagttccggctag

SEQ ID NO: 213397 - DNA, 2721 bp, synthetic construct
  misc_feature 1..2721: note = Description of Artificial Sequence: Synthetic coding sequence
  source 1..2721: mol_type = other DNA
atgcaggcagccgtcgctgtatccgttccattcctgctgctgtgcgtgttgggtacttgtcccccagcacgttgcggacaggcgggtgacgcatcactaatggagctagagaagcgtaaagagaatcggtttgtagaaaggcagtccattgtgccactccggctaatctataggagtggcggagaagacgaatcacggcacgacgcactcgacacacgcgtgcgcggtgatctgggcggaccccagctcactcacgtggaccaggcttctttccaagtagatgcctttgggactagttttattctggatgttgtgctgaaccatgatcttctgagctctgaatatattgagagacacatcgaacacggcggaaagaccgtcgaagtgaagggaggggagcattgctactaccagggacacatcagaggaaatcctgactcattcgtggctctgagtacgtgccatggactccatgggatgttctatgatgggaatcacacctacctcattgaacctgaagagaacgatacaacccaggaggattttcattttcactcagtgtataagagcaggctgtttgagttttctctggacgatctgcctagcgagttccagcaggtcaatattacaccgagcaagtttattctcaagccacgacccaagcgctccaagaggcaactgcggaggtatcctagaaatgttgaggaagagaccaagtacattgagctgatgattgtaaatgaccaccttatgttcaagaaacaccgtctgagtgtagtgcatacgaacacctacgccaagtctgtagtaaacatggcagatctcatttacaaggaccagctgaagacccggatcgtgctggtggctatggagacatgggcgacggataacaagttcgccatctcggagaatcccctgatcactctccgggaattcatgaagtatagacgagactttatcaaagagaagtccgatgccgttcacctatttagtgggtcccaatttgagagctccaggtcaggcgcagcctatatcggcggtatttgtagtttactcaaaggcggaggagttaacgagttcgggaaaaccgaccttatggccgtcaccctggctcaaagcctagctcacaatatcgggatcatctcggataaacggaagcttgcgagtggagaatgtaaatgcgaggacacctggtcaggttgcattatgggagatactgggtattacttgcctaaaaagttcacccagtgcaatattgaggaataccatgacttccttaattccggcggaggcgcatgcctctttaacaagccttccaagctgttagacccaccagagtgcgggaatggcttcattgagacgggcgaagagtgtgactgtggcacaccggcagaatgcgtattggaaggagccgagtgctgtaaaaagtgcacactgacacaggattcccagtgttctgacggcttatgctgtaaaaagtgcaaattccagcccatggggaccgtgtgccgggaagctgtcaatgattgcgacatacgcgaaacatgtagtggaaactcctcccagtgtgccccaaatatccacaagatggatggatactcttgcgatggcgtccaaggtatatgctttggaggcagatgcaaaacaagagatcgacagtgcaagtacatatggggtcagaaggtcacagcctccgataagtattgttacgagaagttgaacatagaaggtacagagaagggcaactgcgggaaagacaaggacacctggatccaatgtaacaagcgcgacgttctgtgtggctacctgctgtgtaccaacattggaaatatccccaggctgggggagctggacggagaaataacctccactctggtggtgcagcagggcaggactctgaactgttctggaggacacgtcaagctggaggaggacgtagatctcggctatgtggaggacggaacgccttgcgggcctcaaatgatgtgcttggaacaccgctgccttccagtggctagtttcaatttctctacgtgcctcagctccaaggagggtacaatatgcagcggcaacggagtttgcagcaatgagcttaaatgcgtgtgtaaccgtcactggatcggctccgattgcaatacctattttcctcataatgatgatgctaagactggcatcacactcagtgggaacggcgtggcgggtacaaacatcatcattgggataattgctggcacgattttagttctggctcttatcctgggcatcactgcctggggctataaaaactacagggaacagcgacagttgcctcagggagattatgtgaagaagcctggcgacggcgattcattctacagcgatattcctccgggagtgagtacaaattcagcctccagctccaaaaagcgtagcaatgggctgtcgcactcctggagtgagcgcatcccagataccaaacacatctccgacatctgcgagaatgggcgtccacgaagtaacagctggcaggggaacttgggcggtaataagaagaagatccgtggcaagagattcaggccgaggtcaaacagcacagaaaccctgtcccccgctaagagcccttcaagcagcaccggcagcatagcctcgtctaggaagtatccctatcccatgccgccacttcctgatgaggacaaaaaagttaaccgccagtcagctagactgtgggaaacttcaatctag

SEQ ID NO: 213398 - DNA, 2700 bp, synthetic construct
  misc_feature 1..2700: note = Description of Artificial Sequence: Synthetic coding sequence
  source 1..2700: mol_type = other DNA
atgcaggctgctgtggccgtgtccgtcccttttttattgttatgcgtactgggtacgtgcccaccagcgaggtgtggccaggccggagacgcttcgcttatggaactggagaagagaaaggagaacaggtttgtggagcgtcagtcaatcgtccctctcagattaatttatcggtccggaggtgaggacgagtcaaggcacgatgctttggacacacgcgtgaggggcgacttggggggaccgcagctgactcacgtggaccaggcaagctttcaggtggacgctttcgggacttccttcatcctagacgttgtcctgaatcatgacctacttagctctgaatatattgaacgccatatcgagcacggaggcaagactgtggaagtgaaaggaggagaacattgctactaccaggggcacattagaggaaaccctgacagtttcgtagcactgtccacctgtcatggcctgcatggaatgttttatgatggcaaccacacctacttgatcgagccggaggaaaacgacaccacccaggaggactttcactttcactccgtatataaaagccggctgtttgagttttcccttgacgatcttccctcagagttccaacaagttaatataacaccttcgaaatttatcctcaaacctagacctaagcgctcaaaacgccagttgcggaggtatcctcggaatgtggaagaggagactaaatatattgagcttatgattgtgaacgatcacctcatgtttaagaagcacagactgtctgtggtgcatacaaacacttacgctaaatccgtggttaacatggccgatttaatctataaggaccagttgaagactaggatagttctggtcgccatggaaacatgggccacagacaacaaatttgccatttcagagaaccccttgatcaccttgcgcgagtttatgaaataccgcagggactttattaaggaaaagtcggatgctgtacacttgttctcggggtcacagtttgaatcttcacgctccggcgctgcctacataggcggtatttgtagtttactgaagggcggtggcgtgaacgagttcggcaagactgatctcatggctgtaacactggcccagagccttgcccacaacataggcataatctctgataagagaaagctggcctccggggaatgtaagtgtgaggacacctggagcggctgtattatgggtgacactgggtactacctgcctaaaaaattcactcagtgcaacattgaggaataccatgactttctgaactccggaggcggagcctgcctgttcaacaagcctagcaaactcttggaccccccagagtgcggcaacggatttatcgaaacaggcgaagagtgtgactgcggcaccccagcagaatgtgtcctggaaggggcagagtgctgtaaaaaatgtacactgacccaggacagccagtgctccgacgggctctgttgcaaaaaatgcaaatttcaacccatggggacagtatgccgagaggctgttaacgactgtgacatacgggaaacatgcagtgggaatagtagtcagtgcgctcccaatatccacaaaatggatggttattcttgcgacggcgtgcagggaatttgttttggcggaagatgtaagacccgcgatcgacagtgcaagtacatttggggccaaaaggttacggctagcgacaagtactgctacgagaagctaaatatcgaaggaaccgagaaaggcaactgcggcaaagacaaagatacgtggattcagtgtaataagcgagatgtgctgtgcggctatctgctttgcaccaatattggcaacattccaaggttgggtgagttggacggcgaaatcacttccaccctggtcgtgcagcaggggagaacccttaattgcagcggcggtcacgtgaagctagaagaagacgtagacctgggctatgtcgaggatggaacgccgtgcggaccgcaaatgatgtgtttggaacacagatgcctccctgtggcctcctttaatttttccacatgtctgagttcaaaagagggtacaatttgctctgggaatggagtgtgcagcaatgaactcaaatgcgtgtgcaatcgtcactggatcgggtccgattgcaacacctattttccacacaatgacgacgccaaaaccgggattacgctctcaggcaacggcgtcgctggcacgaacatcattattgggatcattgccggaaccattctggtgcttgcccttatcctcgggataaccgcatggggctataataacatctttaactttcgcagcaatggcctgagccatagctggagtgaacggattccagatactaaacatatttccgatatttgcgagaatggccgtcccagatctaactcctggcagggaaacctgggaggcaacaaaaaaaagataagaggtaaaaggttccgacctaggagtaattctaccgagtatctgaatccctggtttaagagagactataacgtcgcaaaatgggtggaggatgttaacaagaatacagagggtccatatttcaggacactcagtcctgccaaaagcccatctagcagcactggtagtattgccagcagccggaagtacccctaccccatgccgcctctcccagatgaagacaaaaaggttaacagacagtcagctagactttgggaaacttccatctag

SEQ ID NO: 213399 - DNA, 2580 bp, synthetic construct
  misc_feature 1..2580: note = Description of Artificial Sequence: Synthetic coding sequence
  source 1..2580: mol_type = other DNA
atgcaggcggctgtggccgtcagtgtgcctttcctgctgttatgcgtgctgggtacctgtccaccggctagatgtggtcaagctggagacgccagcctcatggagttagagaagcggaaggagaatagattcgtggagcgacaatccatagtgcctctgcggttaatctatcggtcaggaggagaggatgagtccagacatgatgccttagacactcgtgttcggggtgaccttggcggaccccaactgacccacgtcgaccaggcttcatttcaagtagatgcctttggaacctcattcattcttgatgtggttctcaatcacgaccttctttcgtccgaatacatcgagaggcatatagagcacggtgggaaaactgttgaagtaaaagggggagagcattgttactatcaaggtcacatccggggaaatcctgactctttcgtagcattgtccacctgtcacgggttacacgggatgttttacgatggaaaccatacttatctgattgaacctgaggagaatgacacaacacaggaagactttcattttcacagcgtgtataaatcacgcttgttcgaatttagtctggatgacctgccttctgagttccagcaggtaaatataacaccttcaaaatttatcctcaaacccaggcctaagcgttccaagagacagctcagaagatatcccaggaacgtggaagaagaaacaaaatatatcgaacttatgatcgtaaacgatcacctgatgttcaagaagcaccgtctgtctgttgtgcacacgaacacgtatgccaagtctgtggtgaacatggctgacttaatttataaagaccagttgaagaccaggattgtgcttgtagcgatggaaacctgggccaccgataataaatttgcgatctccgagaaccctctcatcacactcagagaatttatgaagtaccggagagatttcattaaggagaaaagtgacgctgtgcatttgttttctgggtctcagttcgaatcatccagaagcggggctgcctacataggcggtatctgctccttgctgaagggaggcggagtaaatgagtttggtaaaaccgacctcatggccgtgaccctagctcaatcactggcgcacaacatcggtataatctcggataaaagaaagttggctagtggcgagtgtaagtgcgaagacacctggtcaggctgtatcatgggcgatacaggctattatctgcccaagaaatttacccagtgcaatattgaggaataccacgattttctgaacagcgggggtggcgcttgcctattcaataagccatccaaactgctcgatcctccggagtgcgggaatggatttatcgagaccggagaggagtgcgattgtggtacacctgctgaatgcgtgctcgagggcgctgaatgctgtaaaaagtgcacattaactcaagactcccaatgcagtgacggactctgttgtaaaaaatgcaaattccaacccatgggaacagtttgtcgtgaggctgtgaatgactgtgatatccgtgaaacctgtagtgggaactcctcccaatgcgcacccaacattcataagatggacggttattcatgtgacggcgtccagggcatctgcttcggcggtaggtgcaagacccgcgatcgccaatgtaagtacatctggggccagaaagtgactgcctccgacaaatactgctacgagaagctgaacattgaaggaaccgaaaagggcaattgtggcaaagataaagacacgtggatccagtgcaataagcgcgatgtcctgtgtggttatctcctgtgcacgaatattggtaatatcccccgacttggagagctagacggagagattacatccacgctggtcgtccaacaggggaggacccttaactgtagtggcggacacgttaaactggaggaagatgtggaccttggctacgtggaggacggtactccgtgcggtcctcaaatgatgtgccttgagcaccgctgccttcccgtggcttccttcaatttctcaacttgcttgagcagcaaggaggggactatttgcagtggaaacggggtgtgctctaatgagctcaagtgcgtttgcaaccgccactggattggttcggattgcaacacgtatttcccgcataacgacgatgctaagaccggtatcactttatctgggaatggcgtggccggaactaacataatcattgggataattgcaggcacaattctggtgctcgcactgatcttgggcattacggcctggggatacaagaattaccgtgagcagcgccagctccctcaaggcgactacgtgaaaaagccaggtgacggcgattctttttactccgacatccctcccggagtgtccacaaattctgccagtagctctaaaaaaagaagcaatggactgagtcattcatggagcgagaggatacccgacacaaaacatatctcagatatctgtgagaacggcaggccaagatccaactcctggcagggcaatttagggggaaacaagaaaaagatcagagggaagcggtttaggcccaggtcaaatagtactgaatag

SEQ ID NO: 213400 - DNA, 2613 bp, synthetic construct
  misc_feature 1..2613: note = Description of Artificial Sequence: Synthetic coding sequence
  source 1..2613: mol_type = other DNA
atgcaggctgcagtggccgtgagcgtgccatttctgctgctgtgtgttctggggacatgtccaccagcacgctgcggacaagcgggagatgcttcactcatggagttggaaaaaagaaaggaaaatcgctttgtggagcggcagtcaatcgtgccattaaggctgatctaccgcagcgggggagaagacgaaagtaggcatgacgcactagacaccagagttaggggggacctgggcggaccacagttgactcacgtggatcaggcctcgttccaggttgatgccttcggtactagtttcatcctcgatgtggtgttaaaccacgacctcctttctagtgaatacattgaaagacacatcgaacacggaggtaagaccgtggaagtgaaggggggtgaacactgttactaccaaggacatatccgcggaaaccctgacagctttgtcgccctgagcacttgccacggacttcatggcatgttttatgacgggaatcacacatatctgattgaaccagaagagaacgataccacacaggaggacttccattttcattccgtgtacaagtccagactgttcgagttctccctggacgatctgccctctgagtttcaacaggttaatattacccctagcaagttcatcctcaagcctcgcccaaagcggagcaagagacagctgaggagataccccaggaatgtggaggaagaaacaaaatatatcgaactgatgattgtcaacgatcacttgatgtttaaaaagcaccgcctgagcgtcgtgcataccaatacttatgctaagtccgtggtgaatatggccgatctcatctacaaggatcagttaaagacaaggatcgtcttagttgctatggagacatgggctaccgataacaagtttgctatttccgagaatcctctgattaccttgcgtgaattcatgaagtacagacgcgattttattaaggaaaaatccgacgcagtgcacctgttttcaggatcccagttcgagtctagtagatcaggagctgcatatattggtggaatatgttccctcttaaaaggcggaggcgtaaatgaatttggcaagaccgatctgatggctgtgacactggcacagagtctcgcccataatattgggatcattagtgataaaagaaagttggcctcaggagaatgcaaatgcgaggacacctggtccggctgtatcatgggagacaccgggtactacttgcctaagaagtttacacagtgcaacatagaggagtatcacgatttcctgaatagcggcggaggagcctgtctgttcaacaagccctctaagctcctggatccacctgaatgcggaaacggcttcatcgagaccggagaggagtgcgattgcggaacgcccgctgagtgtgttctcgagggagccgagtgctgtaagaagtgtaccttgacccaggactctcagtgttcagatggcttgtgttgcaaaaagtgcaagtttcagccaatgggtacagtgtgccgagaggccgtgaacgattgcgatatcagggagacctgtagcggcaattcctcacagtgtgccccaaacatccacaaaatggatgggtacagctgcgatggcgtccagggtatctgctttggaggccgttgcaagacacgtgaccggcagtgcaaatacatatggggtcagaaggtaaccgcatccgacaaatattgctacgaaaagctaaatattgaaggaacggagaaagggaactgcggcaaggataaggatacttggatccagtgtaataagcgtgatgttctgtgcgggtacctgctctgtaccaacattggaaatattcccaggctcggggagctcgacggtgagataaccagcaccttagtggtgcaacaaggcagaacactcaactgttctggtgggcacgtcaagctcgaggaggatgtggacctgggctatgtggaggatggcactccatgcggccctcagatgatgtgcctggaacatcggtgcctccctgttgcatcatttaactttagtacctgcctatctagtaaagagggaaccatttgttccggcaacggcgtctgttcaaacgagttgaaatgcgtctgtaatcgacactggattggaagcgactgcaacacttacttcccacataatgatgacgctaaaaccggaattaccctctctggcaacggggtggctggaaccaatataataataggcattatagccggtacaatcttggtgctcgctctaatcctgggaatcaccgcctgggggtacaagaattatcgggagcagcgaagcaacgggctgtctcactcctggagcgagcgtatcccggatacgaagcacatttcagacatttgcgagaacggaaggccgaggagtaacagctggcaggggaatctaggtggtaacaaaaaaaagatcagaggcaaacggttccggccacgcagcaacagtactgaaactcttagcccggctaagagccctagttcctcgactggttcaatcgcttcatccaggaaatacccttacccaatgcctccactgccagacgaggacaaaaaggtgaataggcaaagcgctaggctatgggaaacaagcatttag

SEQ ID NO: 213401 - DNA, 2700 bp, synthetic construct
  misc_feature 1..2700: note = Description of Artificial Sequence: Synthetic coding sequence
  source 1..2700: mol_type = other DNA
atgcaggcagctgttgccgtgagcgtaccgttcttacttttgtgtgtgttgggaacttgccccccagctcggtgtgggcaggcgggtgatgcttcgttaatggagctcgaaaagcgaaaagagaaccggttcgtggagcgccagagtattgtacccctgcgtctcatatatcggtctggcggtgaagacgaatcgcgccatgatgccctcgacactcgggtgcggggagatttaggcggacctcaacttacccatgtcgatcaggcatcattccaagtagacgcgtttgggacctccttcattctggatgtcgtgctgaaccatgatctcctatcctccgagtacatagaacgacatattgagcatgggggaaagacagttgaagtgaaaggaggggagcactgctactatcagggccacatccggggtaaccccgactcctttgttgcactcagcacgtgtcatgggttgcatggcatgttctacgacggaaaccacacctaccttatcgagccagaagaaaacgacactacccaggaggatttccacttccacagcgtatacaagtcacgactctttgaattctccctggacgatctccccagtgaattccagcaggtaaacatcacaccctccaaatttattctaaagccccgacccaagaggagtaagcgccagctgcggaggtacccccgtaacgtggaagaagagacaaagtatattgagctgatgatcgtgaatgatcacttgatgtttaaaaaacaccgcctatcggtcgtccacacgaacacctacgccaaaagcgttgtgaatatggctgatttaatttacaaggaccagctgaagactcgcatagtgctggtggcaatggagacttgggcaacggataataagtttgcgattagcgaaaacccactgatcacactgagggagtttatgaaatatagaagggacttcatcaaggagaaatcagatgccgttcacctcttctccggtagccagtttgaatcctcccgatccggcgcagcttatattggagggatttgttccctgttaaagggcggaggcgttaatgagtttgggaaaacagacctgatggccgtgaccctggctcagagtctcgcacacaacattgggattatctcagataaaagaaagcttgcctccggagaatgtaagtgtgaagacacatggtccggatgcataatgggggatacgggctactatttgcctaaaaaatttacccaatgtaatatcgaggaataccacgacttcttgaattccggtgggggtgcctgcctttttaacaagccaagcaaacttctggatcctccagagtgtggcaacggcttcattgagacaggcgaagagtgtgattgcggtactccggctgaatgcgtgcttgagggagcggaatgctgcaaaaagtgcactcttacccaggactcacagtgctcggatggcctgtgctgcaagaaatgcaaattccagccaatggggactgtttgtagagaagctgtgaatgattgcgacattagggagacctgttctgggaatagcagtcagtgtgcccctaatatccacaagatggacggctactcctgtgatggcgtgcaagggatttgcttcggcggtagatgcaaaacacgggaccgccagtgcaaatacatatggggacagaaagtgaccgcgtctgacaagtattgttatgaaaagcttaatatcgagggcaccgagaaagggaattgtggtaaggacaaggacacttggatccaatgcaataaacgggatgttttatgtggctaccttctgtgcacaaacattggcaacatcccacgcctcggagaactcgacggagaaattacaagtaccctcgttgtgcagcagggaagaaccctgaattgtagcgggggacacgtcaagctggaggaagacgtggaccttgggtacgtggaggatggtactccctgcggaccacagatgatgtgcttggagcacaggtgtctgcccgtggcctcatttaacttttctacctgcctttcctccaaggaagggacaatttgcagcggtaatggcgtatgctccaacgaattgaagtgcgtgtgcaatcgccactggattggtagcgactgcaatacctattttcctcacaacgacgatgccaagacaggtatcacactcagtgggaacggggtggctggcaccaatatcataatcggaatcatcgcaggaactatcctggtcctagccttaattctaggcattaccgcatgggggtataaaaattatagggaacagcggagcaatggacttagccattcatggtctgagcggataccagatactaagcatattagtgatatatgtgaaaacggccgtcctcggtcgaactcatggcagggaaacctcgggggaaacaagaagaagattcggggaaaacggtttcggcctcggagtaattctaccgagtatttgaatccttggtttaagcgcgattataacgtggcaaaatgggtggaagatgtgaacaaaaacactgaaggcccttatttccggacacttagccccgcaaaatccccctcctcctccacaggctccattgctagtagtcgcaagtatccatatccaatgccacctctcccagatgaggacaaaaaagtcaatcgacaatccgctcgcctgtgggaaacctctatttag

SEQ ID NO: 213402 - DNA, 2328 bp, synthetic construct
  misc_feature 1..2328: note = Description of Artificial Sequence: Synthetic coding sequence
  source 1..2328: mol_type = other DNA
atgctccaggggctccttcccgtgtcactgttgctctcggtagctgtgtcagctattaaggaactccctggagttaaaaaatacgaggtggtgtatcctatacggttgcaccccctgcacaagcgagaggccaaggagccagaacagcaagaacaatttgagacagagctcaaatacaagatgactatcaacgggaaaattgcagtactttatttgaaaaagaacaagaatctcctggcccctggatataccgaaacctattacaacagcaccggaaaagaaattacaacctctccccaaatcatggacgattgctactatcagggccatattttgaacgagaaagtttctgatgctagtatatctacctgcagaggtttgagaggatacttctctcagggggaccagcgttacttcatagaaccactgagcccgatccaccgcgacggccaagagcatgcgctgtttaagtacaaccctgatgagaaaaactacgactcgacgtgcggcatggatggagtgctgtgggctcacgacttgcagcagaatatagctctgccagcgacaaaactcgttaagctgaaggataggaaggtccaggaacatgagaagtacatagagtactatctcgtcctggataacggggaattcaagagatataacgagaaccaggatgagattcgaaaaagagtctttgagatggctaactacgtgaacatgctctacaaaaagttgaatactcacgtggcactggtcggcatggagatttggaccgataaggacaaaataaagatcacccctaatgcttcgttcacccttgagaacttctctaaatggcgaggctccgtcctgtctagaagaaaacgccatgacatcgcccaactgatcactgcaactgagctggccggtaccaccgtaggactcgctttcatgtcgactatgtgctcaccatactctgtgggtgtcgttcaggatcacagtgataatctcttaagagtcgctggtaccatggctcatgagatgggtcataactttggtatgttccatgatgattacagttgcaaatgcccctcaactatttgcgtgatggacaaggcgttatccttctatattcctactgacttctcaagctgctccaggctctcttacgataaattcttcgaagacaagctttcaaactgtttgttcaatgcgcctttacctacagacatcattagcacccccatctgcgggaatcagctggttgagatgggtgaggactgtgactgcgggaccagtgaggaatgcaccaacatctgctgcgacgcaaaaacctgtaagattaaggccacctttcagtgcgcccttggggagtgttgtgaaaaatgccagttcaagaaggctggcatggtatgtcgacccgctaaggacgaatgtgatttgcccgagatgtgcaacgggaagagcggaaactgtccagacgaccggttccaagttaatggatttccatgtcatcatggaaagggacattgcctgatgggcacctgtcccactttgcaggagcagtgcacggagctttggggtcctgggactgaagtagcagacaaatcttgttacaaccgaaatgaaggcggatcaaagtacggctactgtaggcgcgtcgatgacacactgataccatgcaaagccaatgacactatgtgcgggaaactcttctgtcagggtggatccgataatctaccatggaaaggacggatagtcaccttcttaacgtgcaagaccttcgaccccgaggatacaagtcaagagatcgggatggtagcaaacggtaccaagtgcggggataacaaagtctgcataaatgcggaatgcgtagatattgagaaagcttataaaagcaccaattgtagtagcaagtgtaaaggccatgcggtatgcgaccatgagctgcaatgccagtgcgaagagggatggatcccccctgactgcgacgattcctcagtggtgttccacttctctatagtggttggagttctgtttcctatggccgttatcttcgtagtggtcgctatggtcatcaggcaccagtctagtagagaaaaacagaaaaaagaccaaagaccactttctactacagggacccgtcctcacaaacagaagcgcaaaccccagatggtcaaggcggtgcagccccaagagatgtcccagatgaagccccatgtgtacgatctacccgtagaaggaaatgagccacccgcatctttccataaagacacaaatgcgctccctcccacggtgtttaaggataatccagtgtccacgcctaaagacagcaacccaaaagcttag

SEQ ID NO: 213403 - DNA, 1452 bp, synthetic construct
  misc_feature 1..1452: note = Description of Artificial Sequence: Synthetic coding sequence
  source 1..1452: mol_type = other DNA
atggaaatttggactgataaagacaaaatcaaaattactccaaacgcttctttcactcttgaaaacttttccaagtggcggggatccgtcctgagcagaaggaagcgccacgatattgcacaacttattacagccacggagctggccggaactactgtggggctcgccttcatgtccaccatgtgttctccctatagtgtgggcgtcgtgcaggaccacagcgacaatctgctaagagtcgctggcactatggctcacgaaatgggacacaacttcggaatgttccacgacgattactcctgcaagtgcccctctacgatctgcgttatggataaggctctttcattctacattccgacagatttctcttcttgctcgcgattgtcctacgataagttctttgaagataagctgtccaattgtctcttcaacgccccactcccaaccgatataatctcaacacccatctgcgggaaccaacttgtggagatgggtgaggattgtgattgcgggaccagtgaggagtgtacaaacatttgctgcgacgcaaagacctgtaagataaaggcaactttccagtgtgcactgggcgagtgctgtgagaagtgtcagtttaagaaggctggcatggtgtgccgaccagctaaggatgagtgcgatttacccgaaatgtgcaacgggaaatccggaaactgtccagatgatagatttcaggtgaacgggtttccatgtcaccatggcaagggccattgtctgatgggcacatgcccaacactgcaagagcaatgtacagagctgtgggggcctggcaccgaggtggctgacaagtcttgctacaataggaatgagggaggtagcaaatacggctactgcaggagggtggatgacaccctcatcccttgtaaagctaacgataccatgtgtggaaagttgttctgccagggaggatcagacaaccttccgtggaaaggcagaattgttaccttccttacatgtaaaactttcgatcccgaagatacgagtcaggagatcgggatggtggcaaatggtaccaaatgcggcgataacaaggtttgtatcaatgctgaatgtgtggacatagagaaggcctacaaaagcactaactgttctagcaagtgcaaaggacacgctgtgtgcgatcacgagctccagtgtcagtgtgaggaggggtggattccaccggactgcgacgattcttcggttgtgttcaggcgattactccactgtgggtggggcgctgtccccaatggcggtcatttctgcggtggttgctacggcaatccagctccagaactgcagcgcaaagctgaagagcggtctgaggccactatttaccactggcaccaagctacacagaccgaggaagaaaccccagacggaaaggggtgctctacacctcgagatgagtccgacgaagcaccatgtgtgtag

SEQ ID NO: 213404 - DNA, 1623 bp, synthetic construct
  misc_feature 1..1623: note = Description of Artificial Sequence: Synthetic coding sequence
  source 1..1623: mol_type = other DNA
atgttgcagggcctgcttccagtgagcctcctgttgtccgtggccgtcagtgctatcaaggagctgccaggcgtaaagaagtatgaagtggtctacccgatccgcctgcaccctctgcataagcgggaggcaaaagagccagaacagcaggagcagtttgagacggaactgaaatacaagatgaccattaacgggaaaattgccgtcctgtacctaaagaagaacaagaacctgcttgcaccaggttacaccgagacatattataatagcactggaaaagagattactacaagcccccagataatggatgactgctactaccaaggccacattctgaatgagaaggtaagcgacgctagcatctcaacttgtcggggtctgagaggatatttcagtcagggggaccagcgctatttcattgaacccctatcacctatccaccgggatggccaggaacacgccctgtttaaatacaaccccgatgagaaaaattacgactccacatgcgggatggatggcgtgttgtgggcccacgacctgcagcagaatattgcgctacctgccacaaagctggtgaagctaaaggacaggaaggtacaggaacatgagaaatatattgagtattatttggtgctggacaatggcgaattcaaaagatacaacgagaaccaagacgaaattaggaagagggtgtttgaaatggctaattatgtgaacatgctatacaaaaaattgaacacccacgtggccctggtcggcatggagatctggaccgacaaggataagatcaaaattactcccaatgcatcattcacgctggagaacttcagcaaatggcggggaagcgtgctcagccgaagaaaacgacatgacatcgctcagctaatcacagcaactgagttggccggtacaactgtcggtctggccttcatgtccacaatgtgcagcccatactccgtgggagtggttcaggaccattcagataaccttttgcgagtggccggaacaatggcgcatgaaatggggcacaacttcggcatgtttcacgatgattacagctgcaaatgtcctagcaccatctgtgtgatggacaaagcactttctttttatataccaacagacttctcatcatgtagccgattaagctacgataagttcttcgaggacaagctgtccaactgtctttttaacgccccactccccactgatataatttccacacctatctgcggaaatcagcttgtggagatgggcgaagattgtgactgcggcacttctgaggagtgcactaatatctgctgcgatgcgaaaacatgcaagatcaaagctaccttccagtgtgccctcggcgagtgttgtgagaagtgccaattcaagaaggcaggaatggtgtgccggcctgccaaggacgaatgtgatctcccagagatgtgcaacggcaagtccggaaattgtcccgatgaccgtttccaggtgaatgggttcccatgtcaccacggaaagggacactgcctaatgggcacgtgccccacattacaagaacagtgcacagagctgtgggggcctggacgtcgcacaaaccctttcccttgcgcatgcgctaaggagaaccactttaggtag

SEQ ID NO: 213405 - DNA, 924 bp, synthetic construct
  misc_feature 1..924: note = Description of Artificial Sequence: Synthetic coding sequence
  source 1..924: mol_type = other DNA
atggcaaactatgtgaatatgctttataagaagctcaacacccatgtcgccctagttggtatggaaatttggacggacaaggataagataaaaatcacccctaacgcaagtttcaccctggaaaatttcagcaaatggcgcggatcagtgttgtctcgcagaaaaaggcacgacattgctcagctaatcactgccactgaattggccggaacaaccgtgggcctggcatttatgagtactatgtgctcaccttattcggttggcgtggtgcaggatcatagcgacaatctattgcgggtggcaggtactatggcccacgagatggggcataactttggaatgtttcatgacgactacagttgtaaatgcccttccaccatttgcgttatggataaggctctgagtttctacatcccaacagacttcagttcatgcagcaggctgagctacgataaattctttgaggataaactcagcaattgtctgttcaatgcgccattaccgacagacatcatcagtactccaatatgcggcaatcagctcgttgagatgggcgaggactgtgactgcggtacgtctgaagagtgcactaatatctgctgtgatgcgaagacgtgcaagattaaggccacttttcagtgcgctttaggtgagtgctgcgagaaatgccagtttaaaaaagctgggatggtgtgtcgtccagctaaggatgagtgcgatctcccagaaatgtgtaacggcaagagcggcaactgtccagatgatcggtttcaggtcaacggttttccctgccatcacggaaaaggccactgcttgatgggcacttgcccaacccttcaagaacagtgcaccgagctgtggggacctggccgacggactaacccgttcccctgtgcgtgtgccaaagagaatcatttccgctag

SEQ ID NO: 213406 - DNA, 2463 bp, synthetic construct
  misc_feature 1..2463: note = Description of Artificial Sequence: Synthetic coding sequence
  source 1..2463: mol_type = other DNA
atgaaaatgctgctacttctccactgtctgggagtatttctcagctgttcgggccacatccaagacgaacacccgcagtaccactctccccctgatgtggtgattcctgtgaggatcacgggaaccacgcggggaatgacaccgccaggttggctctcatatatccttcccttcggcggtcaaaagcatattatccacatcaaagtgaaaaaactgctgttttcaaaacacctacctgtgttcacatatacagaccaaggagcgatcctggaggatcagccttttgtccagaataattgctattatcatggctacgtcgaaggagatcctgagagcctggtgagcctgagtacatgtttcggcggatttcaggggattctacagatcaacgacttcgcttatgaaatcaagccactcgcgttcagtaccacctttgaacaccttgtctacaagatggactctgaggagaagcagttctccacgatgaggtcggggttcatgcagaatgaaattacgtgcagaatggaattcgaagaaattgataacagcacacagaagcagagtagctacgttggatggtggatccactttcgtattgtggagatcgtggtggtcattgataattatctgtatatcagatatgagcgcaacgacagtaaattactggaagacctgtatgtcattgtgaatattgtggactccatccttgacgtgataggcgttaaggtgctgctgtttgggctggaaatctggactaacaagaaccttatcgtggtggatgacgttcggaagtctgttcacctgtattgcaagtggaagtccgagaacatcaccccgcgaatgcaacatgatacttctcatttgtttactaccctgggtttacgaggcctgtcaggtataggtgctttcaggggcatgtgtactcctcacaggtcctgcgccatcgtcaccttcatgaacaaaacactcggcactttttctatcgcagttgctcatcacctaggccataacctgggaatgaatcacgacgaagatacttgcagatgttcccagcctaggtgcatcatgcatgaaggtaacccacccataaccaagttcagtaactgtagctatggcgacttctgggagtatactgtagaaagaactaagtgcttattagaaaccgtgcacaccaaggacatttttaacgttaaacgctgtggcaacggagttgtcgaagagggagaagagtgtgactgcggacctctaaaacattgtgccaaagatccctgctgtttatccaactgcacgctgaccgacggctcaacctgcgcctttgggttgtgctgtaaggattgcaagttcctgccttctggaaaggtgtgcagaaaagaggtcaacgaatgcgacttgcccgagtggtgcaacggcacgtctcataagtgtccggatgatttttatgtggaggacgggattccttgtaaggagagaggatattgctatgagaagtcttgccatgacaggaatgaacagtgcagaaggattttcggggctggtgctaataccgcctccgagacatgctataaggagctgaataccctaggcgaccgagtaggccactgtggtataaaaaatgctacttatatcaagtgcaatattagtgatgtccagtgcgggaggattcagtgcgagaatgtcacagaaatccccaacatgtcagaccacaccactgtgcattgggcgcgttttaacgacatcatgtgctggagtacagattaccatctcggcatgaaaggtccagatatcggcgaggtgaaagacggcacagaatgtgggattgaccacatctgcattcaccggcattgtgtccatatcaccatcctaaacagcaattgtagccctgctttctgtaacaagcgcggtatctgtaataataaacaccactgccactgtaactacctgtgggaccctcccaattgcctgattaagggctacggtggcagcgtggattctggaccaccacccaagcgaaagaagaaaaaaaagttctgctacctgtgcattctgctcctgatcgtcttgttcattttactgtgctgtttgtataggctgtgtaagaaatctaagccaatcaaaaagcagcaggacgtgcaaactccaagtgccaaggaggaagagaagatccagcgcaggccccatgaattacccccacagagccaaccatgggttatgcctagccagagccagccgccagtaacgcctagccagagtcatccacaagttatgccttctcagtctcaacctcctgtgaccccatcccagagccaaccacgtgtgatgcccagccagtcccagccacccgtcatgccctcccaatctcacccccagctgactccgtcccagagtcagccacctgtgacaccgtcacaacggcagcctcagctgatgccgtcccagagccagccacctgtcaccccctcttag

SEQ ID NO: 213407 - DNA, 2463 bp, synthetic construct
  misc_feature 1..2463: note = Description of Artificial Sequence: Synthetic coding sequence
  source 1..2463: mol_type = other DNA
atgaaaatgttactccttctgcactgtctgggagttttccttagctgttccggtcatatacaggatgagcatccgcagtatcacagtccacccgatgtcgtcattcctgtccgtatcaccgggaccacccgaggtatgaccccccctggatggttaagttatattctgcctttcggcggacagaagcacattatccatattaaagttaagaaactcctgttcagtaaacatttgccagtctttacttacaccgatcagggcgcaattctggaagaccagcctttcgtccagaataactgttactaccatggctatgtggagggcgacccagagtctctggtctcgctgtccacatgtttcggtggcttccagggtatcctccagattaacgacttcgcttacgagattaaaccactggctttcagcacgacctttgagcacctggtttacaagatggatagcgaagaaaaacagttttctactatgaggtcaggcttcatgcagaatgaaatcacttgccggatggaattcgaggaaatcgacaacagtacccagaagcagtctagctatgtgggatggtggatccacttccgaatcgtggaaattgtggttgtgatagacaattatctgtacattagatacgagcgaaatgactctaagctgctcgaagacctctacgtgatagtgaatatcgttgatagtatactggatgtgatcggcgttaaagtgcttctgttcgggttggagatctggactaacaaaaacctgatcgttgtcgacgatgttcggaaatctgtccacctgtattgcaaatggaaatccgaaaatataacgcccagaatgcaacacgatacttctcacctgttcacaaccctaggactaaggggtctttcaggtattggggcattccgcggaatgtgtactccgcaccggtcctgtgctatcgttacttttatgaacaaaactttgggcactttctcgatcgccgtcgcacatcatttgggccataacctcggaatgaaccacgatgaggacacgtgtaggtgtagtcaaccacggtgtatcatgcacgaaggcaacccaccgattacaaagttctcaaactgctcttatggggatttctgggaatatactgtggaaaggactaaatgcttactggaaacggtgcatacaaaagacatctttaatgtgaagcgctgcggaaatggagtcgtggaggaaggcgaagaatgtgattgtgggccattgaaacactgcgctaaagatccatgctgcctgagcaactgtacgttgaccgacggctctacttgcgcctttggactgtgttgcaaagattgtaaatttctcccatccgggaaagtgtgccgaaaggaagtgaatgaatgcgacttgccagagtggtgcaacgggaccagccataagtgtcccgacgacttctacgtggaggatggtattccttgtaaggaacgcggttactgctatgagaagagctgccacgaccgaaacgaacaatgtaggcgaatttttggagcaggggctaacaccgccagtgaaacctgctataaggagctgaacacactgggggatagagtgggccactgcggcattaagaacgctacctatatcaagtgcaatatatccgacgttcagtgcggcaggattcagtgtgaaaatgtcaccgagatccctaatatgtcagatcataccactgttcattgggccagattcaacgacattatgtgctggtcaaccgattatcatctcgggatgaagggccctgatatcggggaggtgaaggacggcacagagtgcgggattgaccatatctgcatacacaggcactgcgttcacatcacaatactgaactccaattgctctcctgccttttgtaacaagcgcggtatatgtaacaataaacatcattgtcactgtaattatctgtgggatcctcccaattgtctgatcaagggctacggaggttctgtggattctggacccccacctaagaggaagaagaaaaaaaaattctgttacttgtgcatactactgctgattgttcttttcattcttctgtgttgtctttaccgattatgcaaaaaaagtaagcccatcaaaaagcagcaggacgtgcaaacaccgagtgccaaagaggaggagaagatccaacgccgtccgcatgagctccctccacagtcacagccttgggttatgccgtcacagtctcagcccccagtgacgccgtctcagagtcatcctcaagtgatgccaagtcaatcccaaccgcctgttacacctagtcagagccaaccacgcgtcatgcctagccagagtcagccaccagttatgccctcccagagtcaccctcagttaaccccctctcagagccagccccctgtgacaccttcccagagacagcctcagctcatgcccagccagtcccaaccaccagtcacaccttcttag

SEQ ID NO: 213408 - DNA, 2463 bp, synthetic construct
  misc_feature 1..2463: note = Description of Artificial Sequence: Synthetic coding sequence
  source 1..2463: mol_type = other DNA
atgaaaatgttgttgctgttgcactgcctaggagtgttcctctcctgctcaggtcatatccaggatgagcatccgcagtaccactcgcccccagatgttgtgatcccagtgcgtatcacaggcacaacacgtggcatgactcccccaggctggcttagttatattctcccattcgggggacagaagcatattatccatatcaaagtcaagaagttgctgttttccaaacatctccctgtgttcacatacaccgatcagggggcaatcctggaggatcagcctttcgttcaaaacaactgctactatcatggctacgtcgagggagaccccgagagcctggtatctctgtccacttgtttcggaggttttcagggaattctccaaattaatgacttcgcatatgaaataaaaccattagcattcagtaccacattcgaacacctggtgtacaagatggacagcgaggagaagcagtttagcaccatgagatccgggtttatgcagaatgagattacttgtcgaatggaattcgaggagatcgataattccacgcagaaacagtcatcttacgtgggctggtggatacactttaggatcgtggaaatcgtggtcgtaatcgacaattatctttacataaggtatgaacgaaacgattccaagcttcttgaggacttgtatgtcattgtgaacatcgtggattcgatacttgatgttatcggtgttaaggtccttctatttggactcgaaatttggacaaacaagaacctaatcgtggttgatgacgtgcggaagtctgtccacttgtactgtaagtggaagtctgaaaatattacccctagaatgcagcatgatacatcgcaccttttcaccactctgggcctccgaggcctgtcagggatcggagctttcaggggaatgtgcacaccccatcgatcctgtgctatcgtcaccttcatgaataaaacgctcggaacgttttccatcgcagtggcacatcatctgggccataacctcggcatgaaccatgatgaggatacctgtcggtgtagtcagcctcggtgcattatgcacgaaggcaaccccccaattacgaagttcagtaattgctcttacggtgatttctgggaatacacagtagaaaggactaagtgtctgctggagaccgtgcataccaaagatatttttaatgtaaagagatgcgggaacggagtcgttgaggagggagaggagtgcgactgtggacccctcaagcactgtgcaaaagatccgtgctgtctttcaaactgcactcttactgatggatctacctgcgctttcgggctgtgttgtaaagattgcaagtttctccccagcgggaaggtttgtaggaaagaggtgaatgaatgtgacctccccgaatggtgcaacggaacctcacacaagtgtcccgatgacttttatgtggaagacgggatcccctgtaaagagcgcggatattgctacgaaaaatcctgccatgatcggaatgaacagtgcaggcgcatttttggcgcaggtgctaatacagcctccgaaacttgttataaggaactgaatacgctgggcgaccgagtgggacattgtggaatcaaaaacgctacatatatcaagtgcaacatcagtgacgtccaatgcggaagaattcagtgcgagaatgttaccgagattccgaatatgagcgatcacacaacggtgcattgggcaaggtttaatgacattatgtgttggagcaccgactaccacctcggcatgaagggaccagatatcggggaggtgaaggacggaaccgagtgtggtatcgatcacatttgtattcacaggcactgtgtgcacataacgattctgaacagtaattgcagtcccgctttctgcaataagaggggcatctgcaacaataagcaccactgccattgcaattacctctgggatccccctaattgtctcatcaaagggtatggtgggtccgtcgactctggacctccccctaagcgaaagaaaaaaaaaaagttttgctacctctgtattcttctgctgatagtgcttttcatcctactctgttgtctgtaccggttgtgcaagaagagcaaacccatcaagaagcaacaagatgtacagacacctagcgccaaagaggaagagaaaattcaacgcagaccacacgagttgccaccccaaagtcagccctgggttatgccctcccaaagtcagcctcccgttacacccagccagtcgcatccccaggtgatgccatctcagtctcagccacccgtcaccccttcccaaagccagccccgtgtcatgccttcacagtctcaacccccagtgatgccatcccaatcacatccacagctcactccttcccagtcacagcctccagtgacaccgtcccagcgccagccacagctgatgccttcccagagccagccacctgtcactccaagttag

SEQ ID NO: 213409 - DNA, 135 bp, synthetic construct
  misc_feature 1..135: note = Description of Artificial Sequence: Synthetic coding sequence
  source 1..135: mol_type = other DNA
atgaagatgttgctcttacttcactgtttgggagtcttcctgagctgcagtgggcatatccaggacgaacacccacaataccatagcccacctgacgtggtgatccctgtgcgcatcacagggacaacccgttag

SEQ ID NO: 213410 - DNA, 273 bp, synthetic construct
  misc_feature 1..273: note = Description of Artificial Sequence: Synthetic coding sequence
  source 1..273: mol_type = other DNA
atgaagatgcttctccttttacattgtcttggggtcttcctgagctgcagcgggcacattcaggacgagcacccccagtatcattccccccctgacgtggtaatccccgtgaggatcacggggaccactagaggaatgactcctcctggttggctgagttatatcctccctttcggtggccaaaaacatattattcacattaaggtgaagaagctgttattctcgaaacatttgcctgtcttcacatataccgaccagggcgctatactatag

SEQ ID NO: 213411 - DNA, 45 bp, synthetic construct
  misc_feature 1..45: note = Description of Artificial Sequence: Synthetic coding sequence
  source 1..45: mol_type = other DNA
atgaaaatgctcctgctcctgcattgcctcggagttttcctttag

SEQ ID NO: 213412 - DNA, 2463 bp, synthetic construct
  misc_feature 1..2463: note = Description of Artificial Sequence: Synthetic coding sequence
  source 1..2463: mol_type = other DNA
atgaaaatgctcctccttctccattgcttgggtgtgtttctatcatgctcgggccacattcaggacgagcacccacagtaccactcgcctcccgacgtcgtgatccccgtacggattacagggaccacccgcggaatgacgcctcctggatggctcagctacatattgccatttggaggtcagaagcacattatccatataaaagtgaagaagctattattcagcaaacacctgcccgtgtttacctacacggaccagggggcaattctcgaagaccagcccttcgtccagaacaattgctattaccacggatatgttgaaggagacccagagtctcttgtctctttatctacttgtttcggcggatttcagggaattctgcaaatcaatgacttcgcgtacgaaatcaaacctttggctttcagtacgacctttgagcatctcgtctacaaaatggactcagaggagaaacagtttagtacaatgcggagcggctttatgcaaaacgaaatcacgtgtcggatggaattcgaagagatcgacaatagcacccagaagcagagttcttacgtgggatggtggatccacttcagaatagttgaaatcgtggtggtcattgacaactacctgtacattcgatacgagcgcaatgattccaaactgttagaggacctgtatgtaatcgtcaacattgtggactccatccttgatgtgattggtgtaaaggtcttactgttcggccttgaaatatggactaataaaaacttgatcgtggtagacgacgtacggaagagcgtgcacttgtactgtaagtggaaatccgagaacatcactcctcgaatgcagcacgatactagtcatttgttcactactctcgggctccgaggccttagcgggatcggcgctttcaggggcatgtgcacgccacacaggagttgtgcaatagtgacgtttatgaacaagactctgggcaccttctccatagccgttgcccatcacttagggcacaacctcggaatgaaccacgacgaggatacctgtagatgctctcaacctaggtgcatcatgcatgaaggaaatccccctatcactaagttttcgaactgctcctacggggacttctgggaatacaccgtggaacgcacaaagtgcctgttggaaacagtccacacaaaagacatttttaatgtgaagagatgtggaaacggggtggtggaggagggcgaggagtgtgactgcggcccactgaaacattgcgcaaaagatccgtgctgcctgagcaactgtaccctgaccgacggaagtacttgcgcttttggcttgtgctgtaaggactgcaagttcctaccatcaggtaaggtgtgccgcaaggaggtgaatgagtgtgatctgcccgaatggtgtaacgggacatctcacaagtgccccgatgacttctacgtagaagacgggatcccctgcaaggagagaggctactgttacgagaagtcgtgccatgataggaatgagcaatgcagaagaatcttcggcgcaggcgctaacaccgcttcagaaacatgttacaaggagctcaatacgttgggagatcgcgtcgggcactgtggtatcaagaatgcgacttacattaagtgcaatatctctgacgtacagtgtggacgcattcaatgcgagaacgttacagaaatcccgaatatgagcgaccataccactgtccactgggccagattcaacgacatcatgtgttggagcactgattatcatctgggcatgaagggtccggacatcggggaagtgaaagacgggaccgaatgcggcatcgatcatatctgcattcaccggcactgcgtccacatcactatcttgaactctaattgctcccccgcattctgtaacaaacgcggtatctgtaacaacaaacaccactgtcattgtaattatctttgggacccgcctaattgtctcatcaaaggttacgggggatccgtggacagtgggcctccacccaagcgcaaaaagaaaaagaaattctgctacctgtgcattctgcttctgattgtgctcttcatcctgctttgctgtctgtacagactctgcaagaagagcaaacccatcaagaaacagcaagacgtgcaaactccttcggcaaaggaagaggagaagatccaaaggagaccccacgaactaccaccgcagtcacagccctgggtaatgccctcccagagtcagccacctgtgaccccctcacagagtcatccccaagtgatgccatcacagagccaacccccagtgacccctagtcaatcacagcccagagttatgcctagccagtctcaacctcctgtgatgccatcccagtcccatccccagctgacacccagccagagccagcctccggtaaccccttcccagcgccagcctcaactgatgcccagtcagtcccagcccccagtaacccccagttag

SEQ ID NO: 213413 - DNA, 2373 bp, synthetic construct
  misc_feature 1..2373: note = Description of Artificial Sequence: Synthetic coding sequence
  source 1..2373: mol_type = other DNA
atgcgctcagttcagatatttctgtcccagtgtaggttgttactcctgttggtacctacgatgctcctgaagtccttgggtgaggacgtaatctttcaccctgagggtgaatttgactcatatgaggtcactataccagaaaaactgtcatttcgcggagaggtgcagggcgtcgtgagcccggtcagctatttactgcagctgaaggggaagaaacacgttttgcatttgtggcccaagcggcttcttctgcctcgccacttgagggtgttctctttcacagaacatggcgaactgctcgaggatcacccatacattcccaaggactgcaattatatgggcagcgtgaaggaatccctggacagcaaggcgaccatctcgacttgcatgggcggactgaggggagtcttcaatattgatgccaagcattaccagattgagccactcaaagccagcccatcctttgaacatgtcgtgtatttgctaaagaaggagcagttcgggaatcaggtgtgcggcctgtccgatgatgagatcgagtggcaaatggcaccctatgaaaataaagcccgactgagggattttcccggatcttacaagcatcctaaatacttggagctgattctccttttcgaccaatccagataccgattcgtgaataataatttatcccaggtcattcacgacgctatcctcttaactggcattatggatacttacttccaggacgtgaggatgaggattcatcttaaagctcttgaagtctggacagactttaataagattagagtgggttacccagagctcgctgaggtactgggacgcttcgtgatttacaagaagtcagtgttgaatgctcggctgagtagtgactgggctcacctttacttgcaaaggaagtacaatgacgcattggcctggagtttcggcaaagtgtgttcgctggagtatgccggatccgtttctacactgcttgatactaatattctagcccctgcaacctggtctgctcacgaactggggcacgcagtgggcatgtctcacgatgagcaatactgccagtgtcgcggtcgactcaattgtatcatgggcagcggcagaaccggattctccaattgttcctacattagcttcttcaagcatatctcgtcgggagcaacatgcctgaataacatccccggattaggttatgtactgaagcggtgcggaaacaagatcgtcgaggataacgaggaatgcgattgtggatctacggaagagtgtcaaaaagaccggtgttgtcagagcaactgtaagctccaaccgggtgccaactgtagtattggactatgttgtcatgattgtcggttccggccttccggctacgtctgccggcaggaaggaaatgagtgcgatctggcagagtattgtgacgggaattccagcagctgccctaacgatgtgtacaagcaggacgggactccttgcaagtatgagggtcgctgcttcaggaaggggtgtaggtcacggtatatgcaatgtcaatccatctttggcccagacgctatggaggcgccatcagagtgctatgatgcggtaaacctgattggagatcagttcggcaactgcgaaattactggcatccgtaactttaaaaagtgtgagtccgcgaatagcatctgtggcaggctccagtgtattaatgtggagactatcccagaccttccagagcacactactatcattagcacgcatctccaggccgagaaccttatgtgctggggaactggctaccacctgtctatgaagcctatgggaatccccgatttggggatgatcaatgatggtaccagctgtggggagggtagagtgtgcttcaagaagaattgcgtaaatagcagtgtgctgcagtttgactgcttacccgagaagtgcaacactcgcggagtgtgcaacaatcggaaaaattgtcactgcatgtatgggtgggcacctccattttgtgaggaagtaggttacggaggatccattgatagcggaccacctggcctgcttagaggagcgatcccttctagtatttgggtcgtatctattatcatgtttaggctgatccttctgattctgtccgtggtgtttgttttctttcgacaggtcatagggaaccatctaaaacctaaacaggaaaagatgcccctgtctaaagcaaaaactgagcaggaggagtcaaagactaagactgtgcaagaagagtctaagacgaaaaccggccaagaggagtccgaggcaaagacagggcaagaggagtccaaggctaaaacaggacaggaggagtccaaggccaacatagagtcaaagaggccgaaggcaaagagcgtcaaaaagcaaaaaaaatag

SEQ ID NO: 213414 - DNA, 2346 bp, synthetic construct
  misc_feature 1..2346: note = Description of Artificial Sequence: Synthetic coding sequence
  source 1..2346: mol_type = other DNA
atgaggtccgttcagattttcctctcacaatgtcgtctcctcctgctgctggttcctaccatgttgcttaagagcctgggtgaggacgtcatttttcatcccgagggcgagttcgattcctacgaagtgacgatcccagagaagctgagctttcgtggcgaggttcagggagtggtgtctcccgtgagttatctccttcagcttaaaggtaagaaacacgtgttgcacctctggcccaagaggcttttactgccacgccacctccgcgtatttagttttacagaacacggtgaactgctggaggaccacccctacatccctaaggattgcaactacatgggatcggtgaaagagtctctcgatagtaaggccacgatcagcacctgtatgggtggtttacgtggagtctttaatatcgacgccaagcactatcagattgagccactgaaggcatctcccagctttgagcatgttgtgtacctgctcaagaaggagcaatttggcaaccaggtgtgcggtctgtctgacgatgagattgagtggcaaatggctccatatgaaaacaaggcacggctgcgggattttcctgggtcttataagcaccctaaatatcttgagctaatcctattgttcgaccagtcacgctatcgtttcgttaataacaacttaagccaagtcattcacgatgccattctgctgaccgggatcatggatacctacttccaggacgtgcggatgaggatacatctgaaagccttagaagtgtggaccgatttcaacaaaatccgggttgggtaccctgaactggctgaggtgctgggacggtttgtgatctataaaaagtctgtgctgaacgccaggctatccagcgattgggcccatctgtacctgcagcgaaagtacaacgatgctctggcctggagcttcgggaaggtctgttcgctggagtacgcgggatctgtctccactctccttgacacaaatatactcgcacctgctacatggtctgcccatgagctgggtcatgcagtgggcatgtcacatgacgaacagtactgccagtgccggggacggcttaattgcatcatgggcagtggcaggacgggctttagcaattgttcatatatctcctttttcaaacacatcagttccggtgctacatgtcttaacaatatccccggactgggctacgtgctcaaacgctgcggcaacaagatcgtcgaggacaacgaagagtgtgactgcgggtcgaccgaagagtgtcagaaagacagatgttgtcaatctaactgcaagctgcagcctggggcaaactgtagtataggcctgtgctgtcacgattgcaggtttaggccaagtggttatgtgtgtagacaggaaggaaacgagtgcgacctggcagaatattgcgatggaaatagcagttcctgccccaatgacgtgtacaagcaggacggcacaccctgtaagtacgaggggagatgtttccggaaaggctgtaggtcacggtatatgcagtgccagtccatcttcggaccagacgccatggaagctccctctgagtgctacgatgcggtgaacctaatcggcgatcagttcggcaattgtgagataacgggcatccggaacttcaaaaagtgtgaatccgccaactccatctgcgggagattgcagtgcataaacgtggagacgatccccgatcttccggaacatacaaccattatttccacccaccttcaggccgaaaacctcatgtgctggggcaccgggtaccacctgagcatgaagccgatggggatccccgacttggggatgattaatgacggtacttcctgtggggagggcagagtatgcttcaagaagaattgcgttaacagttccgtactccagtttgactgtcttcctgagaagtgcaatacccggggagtttgtaacaatagaaaaaactgtcattgtatgtacggatgggcacccccattctgtgaagaggtgggttatggcggatctatcgacagcggccctccagggctgcttcgcggagccatccccagtagcatttgggtagttagtattatcatgttccgcctcattttacttattttgtcagtcgtgttcgtgttcttccgccaggttattggcaaccacctcaagccgaagcaagaaaagatgcctctgagtaaggccaagactgaacaggaggagtcgaagacgaagaccgtgcaagaggaatccaagaccaagactggccaggaggaaagcgaggcgaagacaggacaggaggaaagcaaggcaaatatcgaatctaaacggcctaaggctaagtccgtaaagaaacagaagaaatag

SEQ ID NO: 213415 - DNA, 540 bp, synthetic construct
  misc_feature 1..540: note = Description of Artificial Sequence: Synthetic coding sequence
  source 1..540: mol_type = other DNA
atgggttggagacctcgtagggccagagggaccccgctcttgctattgctgctgctgttattattgtggcctgtcccgggagctggcgtgcttcaaggacacatccctggacagcctgtgacaccacattgggttttggacggccagccatggagaaccgtgtcccttgaggagccagtgagcaaaccagacatgggactcgtggctctcgaagcagaggggcaggaattgctgcttgaactcgaaaagaaccagcttctggctccaggctatatcgagacacattacggtcctgacggtcagcctgttgtgctcgcgccaaaccataccgtccgttgtttccatggtctgtgggacgctccacccgagggtcgcagggaggcgcgacgcacgagaaaatacttagaactgtacattgtggccgaccatacactgttcttgacccgacatcgcaatctaaatcacacgaagcagaggctgctggaagtggctaattatgtggaccaggttgtgaactcagccggtgacgcccatgggtag

SEQ ID NO: 213416 - DNA, 336 bp, synthetic construct
  misc_feature 1..336: note = Description of Artificial Sequence: Synthetic coding sequence
  source 1..336: mol_type = other DNA
atgggatggcgccctcgacgcgctcgagggacgccattgcttctgctcctccttttactgctcctctggcccgtaccaggcgctggtgtgctgcaaggccatattccaggtcaacctgtgacgccacactgggtcttagacggacagccctggcgtaccgtatccctagaggaacccgtctctaaaccggatatgggccttgtggccttggaagctgaaggccaagagcttctcctcgaactggagaagaaccagctgttagctcctggctatatagaaacccattatgggccagcccaggagtgcagagacctttgttgcttcgcccacaattag

SEQ ID NO: 213417 - DNA, 2364 bp, synthetic construct
  misc_feature 1..2364: note = Description of Artificial Sequence: Synthetic coding sequence
  source 1..2364: mol_type = other DNA
atgggatggagacccaggcgggctcggggtacacctctgctcctgctactgctcctgctgctcctctggcctgtgcccggtgctggcgtcctccaaggtcacatccccggacagcccgtgaccccacattgggtgctggacgggcagccctggagaactgtgagccttgaggagcccgtatctaagccagatatggggctggtcgccctggaggccgagggtcaggaattgctgctcgaacttgagaaaaaccaccgacttcttgctccgggttatattgaaacgcactacggaccggacggccaacctgtagtcctagcccctaatcacaccgaccactgtcactaccaagggagggtccggggattcccagactcatgggtggtgctttgcacttgttctgggatgagtggtctgattacacttagtcgaaacgcttcctattatctaaggccgtggccacctaggggcagtaaggatttctcaacccacgaaatatttagaatggagcagttgttaacatggaaagggacgtgtggacaccgggatccaggtaataaggcaggcatgacttctctgcccggaggtccccagtctcgtggacgcagagaggccaggcgcacaagaaagtatttggagctgtacatcgttgcagatcacaccttattcttaacgcggcatagaaaccttaaccatacaaagcagaggctgctggaggtcgctaattatgtcgatcagctgctgcgaaccctggatatacaggttgcactgactgggctcgaagtctggacagaacgagacaggtccagggtgacccaggacgctaatgcaacgctgtgggcatttctccaatggaggagaggcctatgggcccagcggccacatgacagcgcgcagctgctgactggaagagcatttcaaggtgcaacagtggggctcgcacccgttgagggaatgtgtcgcgcagagtcctctggaggcgtcagtactgaccactcagagctcccgatcggtgctgcagcgaccatggctcacgagattggccacagtctgggattatctcacgacccagatggctgctgcgtggaagccgctgcggaaagcggcggatgcgttatggccgctgctactggccatccattcccccgtgtcttttcagcttgttcacggaggcagctccgcgcatttttccgaaagggagggggagcctgcctgtcgaacgctccagacccagggctgccagtaccacccgctctatgcgggaatggatttgtggaggccggagaagagtgtgattgcggccctggacaggaatgtagagacctgtgttgtttcgcccataactgctcactgcgacccggagcacagtgtgcccacggcgactgctgtgtgcgctgtctactgaagccagccggagccctctgcagacaggccatgggagattgtgacctgccggagttctgtacgggaaccagttcccactgccccccagatgtttacctgctggacgggtccccctgtgctcggggaagcggatattgctgggacggagcctgccccaccttagagcagcaatgtcagcagctgtggggacccggatcacacccagccccagaagcttgcttccaggttgtgaactccgctggagatgctcacggaaattgtgggcaagatagtgagggacatttcctgccctgcgcaggtcgggacgcactctgcggcaagttacaatgccaggggggtaagccatctttactggcgccacatatggtccctgtggactcgaccgttcatcttgatggccaggaggtgacttgcagaggggctcttgcccttccatctgcccaactcgatctcctggggcttgggctcgtcgagcccggtacccaatgtggccctcgcatggtgtgcaactccaatcacaactgtcactgcgcccctggctgggcccctcctttttgtgataagccaggcttcgggggtagtatggactcagggccagtgcaagccgaaaatcatgacacctttctgctggcaatgctgctgtctgtgctgctcccactgctcccaggcgctggcctagcctggtgctgttatcggttgcctggcgctcacttgcagagatgctcatggggatgcagaagggatcctgcctgctctgggcctaaggacggcccacatcgagaccacccattgggtggcgtccaccccatggagctgggccctaccgcaaccgggcagccatggccgctggaccccgagaactcacatgaacccagctctcaccctgagaaacctctaccagccgtttctccagaccctcaggcggatcaggtacagatgccccgatcatgcctttggtag

SEQ ID NO: 213418 - DNA, 2442 bp, synthetic construct
  misc_feature 1..2442: note = Description of Artificial Sequence: Synthetic coding sequence
  source 1..2442: mol_type = other DNA
atgggctggagaccgcgaagggcaaggggaacaccactcctgcttctcctcctactcctgctcctgtggcctgttccaggcgcaggagtgctccaggggcacatccccggacagcctgtgactccacactgggtgttggatgggcaaccatggcgcactgtctctctcgaggagcccgtgtccaaacctgatatgggtttggttgccctggaggcagagggtcaggagctcctgttagagctggagaaaaaccacagactcctcgcacctggatacatagagactcattacgggccagacggtcagcctgtagtcttagcccctaaccatacagaccactgtcactaccaaggcagagttcgcggattccctgattcatgggtggtgctgtgcacatgttctgggatgtcgggcctgataacactgtccagaaacgcgtcctattatctgagaccttggccacccagagggagtaaagacttcagcacccatgaaattttccgcatggagcagctgctcacatggaaggggacatgcggccatcgagatccagggaacaaagccggtatgacgagcctgcccggtgggccacagagccgcggacgacgggaagcccgtcgcactcggaagtatctggaactgtacatcgtggccgatcatacattattcctgacaaggcaccggaatctgaaccataccaagcagcgcctgctggaggttgcaaactatgtggatcagctgctgaggactctggatattcaggttgctttaacaggactcgaagtgtggactgagagagatcgcagccgtgtgactcaggacgccaatgctaccctctgggccttcttgcagtggaggaggggcttatgggcccaaagaccgcacgattccgcccagttgctaaccgggagggccttccaaggcgcaacggtggggctcgcacctgttgagggcatgtgtcgagccgaaagtagcggaggcgtctccacagaccactccgagttgcctattggcgctgcagccacaatggctcacgaaattggccacagcctgggtctgagtcacgaccccgacggatgttgcgtggaagctgctgcagagtccggcggatgcgtgatggccgcagccactggccacccctttccacgcgtattttcagcctgcagccgacgccagctccgcgctttcttccgaaaggggggaggcgcttgtcttagcaacgcaccagaccccggactccccgtgcccccagcactgtgtggtaacggttttgtggaggcaggcgaggaatgtgattgtggccctggccaggaatgtagggacctctgctgctttgcgcataattgttcactccgcccaggagcccagtgtgcccacggggactgttgcgtgaggtgtcttctaaaacccgctggggctctgtgccggcaggcaatgggagattgtgaccttcctgagttctgtacaggtacctcttctcattgccccccagacgtatatctgcttgacggttccccatgcgctcgaggcagcgggtattgctgggatggcgcttgtccgaccctggagcaacagtgccagcagctgtgggggcctggaagccaccctgctccagaggcatgctttcaggtcgttaactccgcaggagatgctcacggtaactgtgggcaagattcggagggccatttcctgccttgcgcagggagggacgctctctgtggcaagctacagtgccagggaggcaaaccaagcctgcttgcgccacacatggtgcctgtcgactccacagtgcacctagatggtcaggaggtgacttgcagaggtgcgctggctttgcctagcgcacagctggacctgctgggactgggtcttgtcgagccgggtacacagtgtggaccgaggatggtgtgccagagtcggaggtgtagaaaaaacgcattccaggagctccagaggtgtctgaccgcctgtcattctcatggcgtgtgtaattctaatcacaactgccattgtgctccaggctgggcgcctccattctgtgataagcccggtttcggtggcagcatggactcaggacccgtccaagcagaaaatcatgatacattcttattggccatgttactgtccgtgttattgcccttgctgccaggagctgggctcgcctggtgttgctacagattgccaggagcacatctacagaggtgttcttgggggtgtagacgggaccccgcttgcagcgggcctaaggacgggcctcatagggatcatcctttgggtggagtgcatccgatggaattggggcctaccgctaccggacagccttggcccctcgacccagaaaactcccacgaacccagcagccatcccgaaaagccactacctgctgtgagccctgacccgcaagccgaccaggttcagatgccacgaagctgtctgtggtag

SEQ ID NO: 213419 - DNA, 417 bp, synthetic construct
  misc_feature 1..417: note = Description of Artificial Sequence: Synthetic coding sequence
  source 1..417: mol_type = other DNA
atgggatggagacccaggcgggcaagaggcacccctctgctgctgctactgttgctcctgctactctggcctgtgcctggagctggcgtgctccaggggcatattcccggacagccggtgacaccacactgggtcctggatggccagccatggcgtaccgtgagcttggaggaacctgtctccaaacccgatatgggtttagtggctcttgaggctgagggccaggaactgctcctggaactcgaaaaaaatcaccgactcttagcgcctggctacatcgagactcactatggccctgatgggcagccggtggtcctggcccctaaccataccgtgcggtgcttccacggcctctgggacgcacctcccgaggtcccaccccaccatagctacccctatagttctctgcattcatag

SEQ ID NO: 213420 - DNA, 543 bp, synthetic construct
  misc_feature 1..543: note = Description of Artificial Sequence: Synthetic coding sequence
  source 1..543: mol_type = other DNA
atgggatggagacctagaagagccaggggtactccgctgttgctgcttctgcttctgctcctgctgtggcctgtgccaggggcaggcgtgctgcaaggccatatccctggccagcctgtgacaccacattgggtgctggatgggcaaccttggaggacagtgtctcttgaagagccagtttcaaagccagacatgggcctggtggctctggaagccgaggggcaggagctacttctcgaactggagaagaatcagctgttggctcctggttatatagaaacccactacggacccgatggtcaacccgtagtcctggcacctaaccatacggtgagatgcttccatggattgtgggatgcacccccagagggtcgccgagaggccaggcgcacacgaaagtacctcgagctgtatatcgtggccgatcacactcttttcttgactcggcacaggaacctgaaccacaccaagcaaagactcttggaagtggccaattacgtggatcaagagtgccgcgacctgtgctgctttgcacacaactag

SEQ ID NO: 213421 - DNA, 2439 bp, synthetic construct
  misc_feature 1..2439: note = Description of Artificial Sequence: Synthetic coding sequence
  source 1..2439: mol_type = other DNA
atgggatggcgcccacgcagggcacggggtacaccactgctgctgctgttgctactgctgcttctgtggcccgtgcccggtgcaggggtgctgcaagggcatatccctggacagccggtgactccccactgggtattggacggccagccttggcggacagtttctcttgaggaaccagtatccaaaccagatatgggacttgtggcgctggaggccgaagggcaggagctcctgctggagctcgagaagaaccacaggcttctggccccaggatatatcgagacccattacggtcctgacggccagcccgtagtgcttgccccaaaccataccgaccactgccactatcaaggaagagtccggggttttccagatagctgggttgtcctgtgtacctgctccggtatgagcgggttgatcaccctcagccgcaatgcttcatactaccttaggccgtggccgcctcggggatccaaggatttcagtacacatgaaatctttcggatggagcaactgttgacttggaaagggacatgtggccatcgcgaccccggtaataaggcaggcatgacgtcactacccggtgggcctcaatcccggggtcgtcgggaggcccgacgaaccagaaagtacttggagctctatatcgtagctgatcacactctgttccttacacggcatcgcaacctgaaccacacaaagcagcgactcctggaagtcgctaactacgtggaccagctcctgcgtacgctggacattcaggtggcgctgacaggactcgaagtgtggacagagcgggacagaagtcgagttacccaggatgccaatgccactctttgggccttcctgcagtggagaaggggcctttgggctcagaggcctcatgacagcgctcagctgttgaccggccgagcattccagggtgcaaccgtcggcctcgcacccgtggaggggatgtgccgtgccgagagctctggtggggtgagcacagatcatagtgagctcccaataggggcagcggctaccatggcccacgaaatcgggcacagtttggggctgtcacacgaccctgacggctgctgcgtggaagccgctgctgaaagtggaggctgtgtgatggccgcagccaccgggcatccatttccgagagtcttctctgcctgcagcagacgtcagctgagggcctttttcaggaaggggggaggggcatgcctcagcaatgctcccgaccccggtctgccagtccctccggctctttgtgggaatgggtttgttgaggccggtgaagaatgcgactgtggcccaggccaggagtgtcgcgacctctgctgctttgcccataattgtagcctacggccaggagcccaatgcgcccacggggactgttgtgttcggtgcctcttgaaacccgctggggctctctgccggcaggccatgggcgattgcgacttaccggagttttgcactggtactagttctcactgtccacctgacgtgtaccttctagacggctcaccctgcgctaggggatcaggttattgttgggacggcgcttgccccaccctcgaacagcagtgtcagcagctgtggggcccaggttctcatcctgcacccgaggcatgctttcaggtggtcaactcggccggagatgctcatggtaattgcggtcaagacagcgagggacacttcttaccttgcgcaggcagagatgcgctctgtggcaaactacagtgtcagggcggaaaacccagtctgctggctccacacatggttcctgtggactctaccgtgcatctggacgggcaggaagtaacttgcagaggggctctcgccctgccctcggcccagctggacttgcttgggctggggctggttgagccaggtactcagtgtggacctcgcatggtgtgccagagccgcagatgtcggaagaatgccttccaggagctgcaaaggtgtttgaccgcttgtcattctcacggagtgtgcaactccaatcacaactgtcactgtgccccagggtgggccccacccttctgcgataaacctggattcggaggtagcatggactccggtcccgtgcaggcagagaaccacgacacctttctgttggccatgctgctgtcagtcctgctgcctctcctgcccggtgcgggtttagcttggtgctgttaccggcttcccggagctcatctgcagcgatgttcatggggttgcagaagggatccagcctgctcaggccctaaggatggccctcatagggaccaccctctcgggggtgtccaccccatggagctgggcccaacagctacaggccaaccatggcctctggaccccgagaacagccatgagccatcaagtcatccagaaaagcctctaccagcagtatcccctgatcctcaggatcaggtgcagatgccgaggtcttgtctttggtag

SEQ ID NO: 213422 - DNA, 456 bp, synthetic construct
  misc_feature 1..456: note = Description of Artificial Sequence: Synthetic coding sequence
  source 1..456: mol_type = other DNA
atggggtggaggcctaggcgtgccaggggtacccccctgttgctgctgctgctattactgttattatggcccgtaccgggtgccggtgtgctgcaaggccacatccctggtcaaccggtaaccccacattgggttctcgacggacaaccctggcgcacagtttctctggaggaaccagtgagcaaacctgatatgggcctggtggccttagaagctgaaggtcaggagctgctgttggagctcgagaagaaccaggacgccctgtgtggaaaattacagtgtcaggggggaaaacccagcctcctggctccccacatggtgcctgtcgacagcaccgtgcacctcgatgggcaagaggtgacttgcaggggggcactggccctgcctagtgcccagctggacctcttgggacttggattggtcgagcccggaactcagtgtggaccgaggatgtag

SEQ ID NO: 213423 - DNA, 2079 bp, synthetic construct
  misc_feature 1..2079: note = Description of Artificial Sequence: Synthetic coding sequence
  source 1..2079: mol_type = other DNA
atggggtggcgaccgagacgggctagaggaaccccactgttattactgttactgcttctcctcttatggcccgtccccggagctggggtgcttcaaggccacattccaggacagccagtcaccccccactgggtcttggacggccagccttggagaactgtgtccttggaggagcccgtgtctaaacccgatatgggtctcgtggctcttgaagctgaggggcaggagctcttgttggagctagaaaaaaatcacaggttgctggctccgggatatattgagacccactacggacccgacgggcagcctgtggtgctggcgcctaatcacactgatcattgccactaccagggcagggtaagaggtttccccgactcctgggttgtcttatgtacctgctctggaatgtccggactaattaccctctcccgcaacgcaagttattacctgaggccttggcctccaaggggatctaaggactttagcacacacgaaattttccgcatggagcagctgctgacctggaaaggaacgtgtggccacagggatcctggcaacaaggcaggcatgacttcactcccaggcggtccacagtcgcgcggacggcgagaggccagaaggacccgcaaatatttagaattgtacattgtggcagaccacaccctgtttctgactagacataggaaccttaaccacaccaagcagcgcttgctggaggtggctaattacgtggaccagttacttcgcaccctcgacattcaggtggcattaaccgggcttgaggtgtggacagaaagggaccgctcgcggcgtcaattgcgcgcttttttccggaaaggcggtggagcctgtctgtccaacgcccctgatccaggcctgcctgtccctccagcactttgcggcaatggtttcgtagaggctggcgaggagtgcgattgcggtccaggtcaggaatgcagggatctctgctgtttcgcacacaactgctcactacggcctggagcacagtgcgcacacggggactgctgtgtccgttgtttgttgaagcctgcgggtgccctgtgtcgccaagcaatgggtgattgcgacctgcctgaattttgcacaggtacttcttcacactgcccacctgacgtgtacttgcttgatggctccccgtgtgcaaggggtagtggttattgttgggacggagcatgtcctaccctcgagcagcagtgccaacagctctggggcccaggtagccaccccgctcccgaggcctgtttccaagtggtgaacagtgccggtgacgcgcacgggaattgcggccaggattccgagggacacttcctaccctgcgctggccgtgatgctttgtgcggaaagctgcagtgccaggggggtaaaccatcccttctggcaccccatatggtgccggtggattctacggtccacctcgacggtcaagaggtaacttgtagaggggctctcgccctcccgagcgcccagcttgatttgcttggtctggggctggtagagccaggcacccagtgtgggcctaggatggtctgtcaaagccggagatgcagaaaaaacgcctttcaagagttgcagcgttgcctgacggcctgccactcgcacggcgtctgcaacagcaatcataattgccactgtgcgcctggctgggcgccaccattttgcgataaaccaggattcggcggtagcatggactcaggtccagtacaggctgagaatcatgacacgtttctgctggccatgctgttaagtgtcttgctccctttgctcccgggagccggacttgcatggtgttgttataggctgcctggcgctcatctgcaacgctgctcttggggctgtcgcagggacccagcatgtagcggccctaaagatggtccacacagagaccatcctctgggcggagtccacccaatggaattgggtccaaccgccactgggcagccttggcccctggatcctgaaaactcccatgaaccctcatcccaccctgagaaacctctccccgctgtttcccccgatccccaggatcaggtgcagatgccaaggtcatgcctgtggtag

SEQ ID NO: 213424 - DNA, 522 bp, synthetic construct
  misc_feature 1..522: note = Description of Artificial Sequence: Synthetic coding sequence
  source 1..522: mol_type = other DNA
atgggttggaggccaaggcgcgctaggggaacccctctgttgctgctgcttcttctgctgctgctttggcctgtgcccggtgccggagtgctgcagggtcacattcctggacagcccgtcacccctcattgggttctcgatggccagccttggaggactgtttctctggaggaaccagtctctaaaccagatatgggccttgttgcgctagaagcagaggggcaggaactgttactagaattggagaaaaaccatcgactgctcgcaccaggatacattgaaacccattacggcccagacggtcaaccagtggtcctggctcctaaccacacggtgcgatgctttcacgggctatgggacgcccctcctgaagatcactgccactatcagggcagagtccggggattccctgatagttgggtggtattatgtacttgctccgggatgagagccggtgagaagcgtgccggacccggttccacttggaactgcaccctgtggcagacgaccccatgctcatag

SEQ ID NO: 213425 - DNA, 291 bp, synthetic construct
  misc_feature 1..291: note = Description of Artificial Sequence: Synthetic coding sequence
  source 1..291: mol_type = other DNA
atgggctggaggcccagacgcgctcggggtacgcctttgctcctgctgctcctgttgctgctgctctggcccgttccaggtgccggagtcttgcaggggcacatcccaggccaacctgtgactccacactgggttctggatggtcagccttggcgaactgtgtctcttgaagaacccgtcagcaaaccagacatgggtctagtagctctggaagcagagggacaagaattgctgttggagctagaaaagaaccaatttgcgatcgccaccataaccgccacagtactttag

SEQ ID NO: 213426 - DNA, 2265 bp, synthetic construct
  misc_feature 1..2265: note = Description of Artificial Sequence: Synthetic coding sequence
  source 1..2265: mol_type = other DNA
atgctcccagggtgcattttcttgatgattcttctgatcccccaagtaaaggagaagttcattttgggagttgagggacagcaactggtgcgccctaagaaactccctctgattcagaagcgcgatactggccacacacacgacgatgatattctgaagacttacgaagaagagctcctttacgaaattaaactgaatcgaaaaacgctagtgctgcacctgctccggagccgagaattcctaggctcaaattattctgaaactttttactctatgaaaggggaagcttttaccagacatccacaaattatggatcactgtttttaccagggaagcatagtccacgagtacgattcggccgcttccatatccacttgcaacgggctgaggggctttttccggattaatgaccagcggtacctgattgagccagtgaagtatagtgacgaaggagaacatctggtctttaagtacaatctgcgagtaccatatggtgctaattactcatgtacagaactgaatttcacaagaaagactgtgcctggggacaatgaaagcgaagaggacagcaagatcaaaggcatccacgacgagaaatatgttgaactattcattgtagctgacgataccgtatacagaaggaatggacacccccacaataagttgaggaaccgaatatggggtatggtaaatttcgtgaatatgatatacaaaactctgaatattcacgtcaccctagtcggcatcgagatttggacccacgaggacaaaatcgaactgtacagcaacattgaaactacccttttacgattttcattttggcaggagaagatcctgaaaacccggaaggatttcgaccacgtcgtcctgctttctggtaaatggctgtatagtcatgttcagggaatatcttacccgggaggcatgtgtctgccctattattccacatcaatcattaaagacctgctgccagacaccaatatcattgcgaacaggatggctcatcagctgggccataatctgggcatgcagcacgacgaattcccctgcacatgtccgagcgggaaatgcgtgatggattcggacggctctattccagcattgaaattctctaagtgctctcagaatcagtaccaccagtatctcaaggattacaaacctacctgcatgctgaatatcccctttccttacaacttccatgactttcagttttgcggcaacaagaagctggatgaaggcgaagaatgtgactgtgggccagctcaggagtgcaccaacccatgctgcgacgctcacacttgcgtgctaaagccgggtttcacatgcgcagagggtgagtgttgcgagtcatgtcagatcaaaaaggccggttcgatttgtcgacctgctaaagacgagtgtgacttccccgaaatgtgtaccgggcacagtcccgcttgtcctaaggatcaattccgagtgaacggctttccgtgcaagaactccgaaggatactgctttatgggaaagtgccctacccgcgaagaccagtgctctgagctgttcgatgacgaagcgatcgaaagccacgacatttgctataaaatgaacacaaaaggcaataaattcggatattgcaagaacaaagaaaaccgattcttgccttgtgaagaaaaagatgttcggtgcggaaaaatttactgtacaggcggtgagctatcctcgctgctgggagaggataaaacgtaccacctgaaggatccacagaagaatgcaaccgtcaagtgcaagacgatattcctctaccacgacagcaccgatatcggacttgttgcttccggtaccaagtgtggcgaggggatggtgtgtaacaatggcgagtgcctgaacatggaaaaagtgtatatctcgaccaactgcccatcccagtgcaacgagaatcccgtggatggacacggcctgcagtgtcactgtgaggagggccaggccccagtggcttgtgaggagaccctgcacgtcaccaatattacgatcctcgtggtggtgttggtcttggtcatcgtcggcatcggcgtcctgattcttctggtcagataccggaaatgcattaaactgaaacaggtacagtcgcccccaactgagaccctgggggtagagaacaagggctatttcggcgatgaacagcagattaggaccgaaccaattctgcccgagatacactttctgaacaagcctgcgtctaaggattcccgcggaattgcagatccgaaccaatccgcaaagtag

SEQ ID NO: 213427 - DNA, 1656 bp, synthetic construct
  misc_feature 1..1656: note = Description of Artificial Sequence: Synthetic coding sequence
  source 1..1656: mol_type = other DNA
gtctgtcccagaagttattttctcgaagggagaggatcctattctttcctttcccttttcagcactagtcctgcaccatacaggcgcaacggtcatccccacaataaattaaggaaccggatttgggggatggttaatttcgtgaatatgatttataagacattgaacatccacgtcaccctcgttgggatagagatctggacacacgaggataagatcgagctgtatagtaatatcgaaacgaccctcctgcgattcagtttctggcaagagaagatcctcaagaccagaaaggacttcgaccacgtcgtcttgctcagcggcaaatggctctattctcatgtgcaaggaattagctacccaggcggtatgtgcctaccatattactccaccagcatcattaaagacctacttccagacaccaatattatcgctaatcggatggcccaccaactcggccacaacctcgggatgcagcacgacgaattcccttgcacctgcccatctgggaagtgtgtgatggacagtgatgggtccatacccgcattaaaattcagcaagtgcagccagaatcagtatcatcagtatctgaaagactacaagcctacttgtatgctgaacatcccctttccgtacaactttcacgacttccagttctgtggaaacaagaaactcgacgaaggcgaggaatgtgattgtggcccagctcaggagtgtacaaatccatgctgcgacgcacacacatgcgtgctcaagcctgggtttacgtgtgcagaaggggaatgttgcgaaagttgccagataaagaaggcaggatcaatttgcagacccgcaaaagatgaatgcgacttcccagagatgtgtaccggtcactcgccggcatgtccaaaagaccagtttcgagtcaatgggtttccctgcaagaacagcgagggatattgttttatgggcaagtgtccgactagagaggatcaatgctccgagttgtttgatgacgaagctatcgagtcccacgatatctgctacaaaatgaatactaaaggtaacaaatttggctattgtaaaaataaggagaatcgtttcctcccatgcgaagaaaaagacgttcggtgtggcaagatctattgcaccgggggtgaactgagcagtctcctaggtgaggacaagacatatcacctaaaggacccccagaaaaacgctactgttaaatgtaaaactatattcctgtaccatgacagtaccgatattggactggtggcatcaggaaccaaatgcggggagggaatggtttgtaacaatggggagtgtctaaacatggaaaaggtatatatttccacgaactgcccatctcagtgtaatgagaatccggttgatggccacggcctccagtgccattgtgaagaagggcaagcacctgtggcatgtgaagagacacttcacgtgacaaatataaccatcctggtggtggtacttgttctagtgatagtcggaattggggtgctgatcctgctcgtgcggtataggaaatgtatcaaacttaagcaggttcagtctccacctacagagaccctgggggtggaaaacaagggctatttcggagacgaacagcagatccggacagaacccatattgccagagattcacttcctgaattag

SEQ ID NO: 213428 - DNA, 2475 bp, synthetic construct
  misc_feature 1..2475: note = Description of Artificial Sequence: Synthetic coding sequence
  source 1..2475: mol_type = other DNA
atgcgcggacttggcctgtggctgctaggggctatgatgctccccgcaatcgctccaagccgaccttgggccttgatggagcagtatgaagtagttctcccctggaggctgcccggtccacgagtgcggagggctctcccttctcatttggggctgcatccagaaagagtaagctatgttcttggggctacaggacacaactttacactgcacctgagaaagaacagggacctcctcggcagtggctacacagagacatatactgccgctaacgggtcagaagttactgagcagcctagaggtcaggaccactgcttctaccaaggccacgttgagggctaccccgacagcgcagcatcactgagtacctgtgcgggactcagaggattctttcaagttggaagcgacctacatctgattgagccactggacgaaggcggagagggtggcaggcacgccgtgtaccaggctgaacatctgctacagacagctggcacatgcggcgtcagcgatgattccctcggcagtctgcttggtcctcggaccgcggcagtgttccgccctagacccggtgacagcctgccctcacgcgagactcgatacgtcgagctatacgtcgtcgtcgataatgccgagttccagatgctcggcagtgaagccgctgtccggcatagagtcctagaagttgtgaaccacgtagacaagctgtaccagaaactgaacttccgcgtggtcctagtcggcttggaaatctggaactcacaagatcgcttccacgttagtcctgacccctccgtcacactagagaatctgttgacgtggcaggcccgtcagcggaccagaaggcatctgcatgacaacgtccagcttattaccggcgtggactttaccggcaccactgttgggttcgctcgggtctctgccatgtgctcccatagctcgggggcagtcaaccaggaccactctaagaatcccgtgggggtggcctgtactatggctcatgagatgggccataacctcggtatggaccatgacgaaaacgtgcaaggatgtcggtgtcaggaaaggtttgaggcaggaagatgtatcatggcagggtctatcggttctagcttccctagaatgttttcagattgttcacaggcttacttagagagctttctcgagaggccgcagagtgtttgtttggccaacgcaccagacctaagccatctcgttggcggacccgtgtgtggtaacctatttgtcgagcgcggagaacagtgcgactgtggaccacccgaggactgtcgcaaccgctgttgcaactccaccacatgccagctcgcagagggtgcccagtgcgctcacgggacatgttgccaggaatgtaaggtgaagcctgccggagaactctgcaggccgaaaaaagatatgtgtgatttggaagaattttgcgatggcagacacccggaatgcccggaggatgctttccaggagaatggcacaccctgctccgggggatactgttacaacggagcatgccccactctggctcagcaatgccaggccttttggggaccagggggtcaggctgctgaagaaagctgcttctcctacgatattctgcctggctgcaaagcgtcgaggtaccgagccgatatgtgcggcgtgctgcaatgcaaggggggtcagcagcctcttggtcgagccatttgtatcgttgacgtgtgtcacgccttgacaacggaagacgggaccgcgtacgagcctgtccccgaaggaacccgttgtggtccagagaaggtgtgctggaaaggtagatgtcaagacctgcatgtgtatcggtcctcgaattgtagcgctcaatgccataaccacggagtctgcaaccacaagcaggaatgccactgccacgcagggtgggctccaccacattgtgctaagctgctgacagaggtccacgccgcaagtgggagcctccctgtcttcgtagtagtagtacttgtcttactggctgtggtgcttgtgactctcgcgggtatcatcgtgtataggaaagccaggtctcgcatcctgtcccgcaacgttgctcccaagaccacgatgggtagatcaaaccctttgttccatcaggctgcatctcgagtcccagccaaggggggagcaccagctccatcgcggggacctcaggagctggtgccaactacccaccctggacagcctgccagacatcccgcttcaagcgttgccctgaagcgacccccaccggcacctcccgtgacagtgtcatctccaccctttcctgtgccagtgtacacacgacaggccccaaaacaggtgatcaaaccaaccttcgcaccacccgtgccccctgttaagcccggagccggagctgccaatcctgggcctgcagaaggggctgttggacccaaggtggctcttaagccacccatacaacggaagcagggtgccggagctccaaccgcaccttag

SEQ ID NO: 213429 - DNA, 2202 bp, synthetic construct
  misc_feature 1..2202: note = Description of Artificial Sequence: Synthetic coding sequence
  source 1..2202: mol_type = other DNA
atgaggggtttgggcctctggctcctgggagcgatgatgctgccaggcccagctcctagagagggggaacttagaccatggggccatcgcgctcagttgcatccccctcctgcagaggaacagggacccgcaggtctccgtctccacagggacctgtacggttgtcagtggctgaggggcgacggagcggcaagtagagccggtccactgctgctgccgggacccagacgcggagtcccaggactttcaaggcagccacagcatctatgtcggcctcaggtaggatctgatctgcacctcatagagcctctggacgagggaggagagggcggtaggcacgccgtgtaccaggcagaacacctcctgcaaaccgccggtacctgcggtgtgtcagatgactccctaggctcgctcctaggacccagaacagcagccgtttttcgccctagaccaggcgatagtttgcccagtagagaaacacgctacgtggagctgtacgtcgtggtagataacgccgagtttcagatgctcggatccgaagctgcagtgagacaccgggtgttagaagtcgtgaatcatgtggacaaactgtaccagaaactgaatttcagggtcgtgttagtaggcctcgagatctggaatagccaggatcggtttcatgtgtcaccggatccttcagtgacgctggagaacctcctgacgtggcaggccaggcagcggacccggaggcatctacatgacaacgtccaactgatcaccggcgtggactttactggcacgaccgtgggcttcgcccgagtttccgctatgtgttctcacagctccggggctgtcaaccaggaccattcgaagaatcccgtgggtgtggcatgcaccatggctcacgagatgggccataatctgggcatggatcatgatgagaacgtacaaggctgtagatgtcaggaacgattcgaggccggacggtgtataatggccggttccattgggtcttcatttccccgtatgttttccgattgttcccaggcttatctggaatcgttcttagaaagacctcaaagcgtatgtctggcgaatgccccagatctgagccaccttgtgggtggacccgtttgtggtaacctgtttgtggagagaggcgagcagtgtgactgcgggccacctgaggactgcagaaaccgttgttgcaacagtaccacgtgtcagttggctgaaggggctcagtgtgctcacgggacatgttgtcaggagtgtaaagtgaaacctgcaggtgaactgtgcagacccaagaaggatatgtgtgatttagaggagttttgcgacggtcgccaccctgaatgtcccgaggacgcgttccaggagaacggcaccccttgcagcggaggatactgctacaacggtgcttgtccgactctggctcagcagtgccaggcgttttgggggccagggggacaggccgcagaggagagttgtttttcctatgacatcctgccagggtgtaaggcttcccgatacagagctgacatgtgcggagtcctacagtgcaaaggcggtcaacagccattgggaagagctatctgtatcgttgacgtctgccatgccttgacgacggaagatggcactgcgtatgaacctgttccagagggcactagatgcggaccagagaaggtttgcaaccataaacaggagtgccactgccacgccggatgggcgcctcctcactgcgccaaactgctgaccgaggtgcacgccgcttccggcagcctgcctgttttcgtcgttgtcgtgctggtgctccttgccgtggtgctggtcaccttggccggaataatcgtatatcggaaggctaggagcaggatcctgtcaagaaatgttgccccaaagacgacaatgggcaggagtaacccactgtttcatcaggctgccagccgcgtccccgcaaaggggggtgcccctgctccttcccgcggaccgcaagaattagtccccaccacgcacccaggacagcccgcaagacatcccgcttcctccgtggcccttaagaggccccctcctgcacctcccgtcaccgtgtcatctcccccatttccggtgcctgtttacacacgacaggctcccaagcagggggctgtcggaccgaaagtggctctcaaacccccaattcagcgaaagcaaggcgctggagcacctacggcaccctag

SEQ ID NO: 213430 - DNA, 2229 bp, synthetic construct
  misc_feature 1..2229: note = Description of Artificial Sequence: Synthetic coding sequence
  source 1..2229: mol_type = other DNA
atgcgaggactcgggctgtggctattaggagccatgatgttacccgcaatagctccatctcgcccatgggcacttatggagcagtacgaggtcgtgctgccttggagattgcccggaccacgtgttcgcagggccctgccatcccatctgggattgcatcccgagcgggtgtcgtatgtgctcggggcaaccggtcataacttcactttgcacctcaggaaaaatcgagatctgcttggcagcggttacactgagacttacacagccgctaacggcagcgaagtgacagaacaaccacgagggcaagaccattgtttctaccaggggcacgtggaaggttaccctgactctgccgctagcttaagtacgtgcgctgggctgcgaggttttttccaggtgggctccgacctacacctgatcgaacctctcgatgaagggggagagggcggacgccacgccgtgtaccaggccgaacatctgctacagactgcaggtacgtgcggcgtatctgatgatagtttggggagtttgcttggacccaggacggcggctgttttccgcccaagacctggggactcgctgccttctcgcgagacgagatatgtggaattgtacgtcgttgtagataacgccgaatttcagatgctggggtcagaggcagcagtgcgacacagggtgctggaagtggttaatcatgttgacaagctctaccagaagctcaattttcgagttgttctcgtgggtctcgagatatggaatagtcaggacaggtttcacgtgtccccggatccatcagttacactggagaacctgctaacatggcaggctcgccagagaacgaggagacatctgcatgataacgtccaactgatcaccggagtggactttactggcactaccgtggggttcgcaagagtcagcgccatgtgttcacacagctcaggggcagtgaaccaagatcatagtaagaatccggtcggggtggcttgcaccatggcccatgagatggggcacaatttgggtatggaccatgatgagaatgtgcagggttgcagatgtcaggaacgctttgaagcaggcaggtgcataatggcgggttcaatcggtagttccttccccagaatgttctctgattgctcccaagcttatctggagtcattcctggaaagacctcaatccgtgtgcctggccaacgccccagacctgagccacctcgttggtggacctgtttgtggcaatctcttcgtcgagcggggtgaacaatgcgattgcggcccaccagaagattgtaggaatcgatgttgcaattctacaacatgccagttagccgagggagcacaatgcgcccacgggacgtgctgccaagaatgtaaagtgaaacctgcaggcgagctgtgtcgacctaaaaaggatatgtgtgacctggaggagttttgtgatggtcggcaccccgagtgtccggaggacgcctttcaggagaatggcacaccctgttcagggggatattgctacaatggtgcttgtccaacactggcccagcagtgccaggctttctgggggccaggcggtcaggcggctgaggagagctgtttttcgtacgatattttacccggttgcaaagcttcaagataccgagccgacatgtgcggtgtcctgcagtgcaagggcggtcagcagccactgggacgtgctatttgtatagtcgatgtttgccacgctcttactacagaggatggaactgcttacgagccggtgccagagggcacacgatgtggccctgagaaagtgtgttggaagggcaggtgccaggacttgcatgtctaccgatcttctaattgctccgctcagtgccacaatcacggggtctgcaaccataagcaggaatgccactgtcatgcaggctgggcccctccacactgtgctaaacttctgactgaggtccacgcgggatgtcagccgagagccggacagggcagaggcagcagtccgatccagggacctcctcgcgctggccctcaccatcctcccggtcctgcccgtcctaccccaggtctgttaggaggttcagaggaagccgctccttgctcatccggtcactgtgtgcagccgacactgccctcttcatgcctgcacccagccggaactaaagccggacatcaggctaacgtgcgcacaccttcagctcccagtcaaaccaggggctggtgtgggcaaccatggagcagctag

SEQ ID NO: 213431 - DNA, 2460 bp, synthetic construct
  misc_feature 1..2460: note = Description of Artificial Sequence: Synthetic coding sequence
  source 1..2460: mol_type = other DNA
atgggatccggagctcgctttccctctgggacactcagagttcggtggctgttgctgctcggactagtggggccagttctcggcgcagcccgtcccggtttccagcagacctcacacctatctagctatgaaattataacaccatggcgtctcacgagggaaaggcgggaagcccctagaccctattcaaaacaggtgtcttatgtcatccaggcagagggaaaggagcatatcattcacttagaaagaaacaaagacctgcttccagaagattttgtggtgtacacatacaataaagagggtacactcataaccgaccacccaaacatccagaaccactgtcattaccggggttatgttgagggggtgcataactcttccatagcactcagcgactgcttcggtttgaggggcttattgcacctggagaacgcatcctatgggattgaaccgctgcagaatagcagccacttcgaacacatcatctataggatggatgacgtctacaaggagcccctgaaatgtggggtgtccaacaaggatatcgagaaggagacagctaaagacgaagaagaagagcctcccagtatgacccagctgcttaggcgtagaagagccgtcctgccacagacccgttacgtggagctcttcatcgtcgtagataaagagcggtatgacatgatgggtcgtaaccaaacagcagtgagggaggaaatgatattactcgcaaactatcttgattccatgtacatcatgttgaacatccgcatcgtcctggttggcctggaaatttggacaaatggcaatctcatcaatatcgttgggggtgctggcgacgtgttgggaaatttcgtgcagtggagggaaaaattcctgataacacggcgacgacacgacagcgcccaactggtcctgaaaaaaggttttggcggtactgctggtatggcctttgtgggaactgtgtgctcccggagccatgcaggcggaattaatgtattcggccagattaccgttgagaccttcgcatccattgtagcacacgagttgggacataatctcggtatgaatcacgatgacggcagggactgttcctgcggggcaaaatcttgcatcatgaattctggggcttcaggctcaaggaacttttccagctgctccgctgaagattttgaaaagctgacgctcaataaaggagggaattgtctcctcaacatacctaagccggatgaagcgtatagcgcgcctagctgtggcaataagttagtcgatgcaggagaggaatgtgattgcggcacgccaaaagagtgtgagctggacccatgctgcgagggctcaacatgtaagttaaaaagcttcgccgaatgcgcatatggcgactgctgcaaggactgtcggttcctgcccggaggcactctctgtcgaggcaaaacatcggaatgcgacgtgcctgaatattgcaacggaagctcccagttctgtcagccggatgtgtttattcagaatggttatccatgccaaaacaataaggcttactgctataatggcatgtgtcaatattacgacgctcagtgtcaggttatttttggcagtaaggctaaagcagcgcctaaagattgttttatagaggtaaactccaagggcgaccgatttggcaactgtggctttagtggtaacgagtacaagaaatgtgcaaccggcaacgctctctgcggcaagctgcagtgtgagaacgtacaggagatacccgtctttggcatagttcccgctataatccagacaccctcgcgcggaactaaatgctggggggtcgacttccagctgggttcagatgtgccagaccctggcatggtcaatgagggaactaagtgtggggctggcaaaatctgtcggaacttccaatgcgttgacgcctcggtgctgaactatgattgcgacgttcagaagaaatgccatgggcacggcgtgtgcaattctaataagaattgtcactgcgagaatgggtgggccccaccaaactgtgaaaccaaagggtacggagggtccgttgattccggacccacatacaatgagatgaatactgccttgcgggacggattacttgtttttttttttttaatcgtgcctctcattgtgtgcgcaatttttatcttcataaaaagagatcaactctggagaagttactttcgaaagaagagatcccagacttacgaatctgacgggaaaaatcaggccaatcctagtaggcagcccggaagcgtgccaagacacgtgtcacctgtcacgccgcctcgagaggtcccaatttacgctaaccgcttcgctgtccccacttatgcggctaaacagccccagcagttccctagccgtccaccccctcctcagcccaaagtgtcatcacagggcaacttaatccctgcaagacctgcccctgctccacctctgtactcctccttaacctag

SEQ ID NO: 213432 - DNA, 2904 bp, synthetic construct
  misc_feature 1..2904: note = Description of Artificial Sequence: Synthetic coding sequence
  source 1..2904: mol_type = other DNA
atgcagagagccgtaccagagggtttcgggcgtcggaagcttggtagcgatatgggtaatgcggaaagagcgcctgggtcacggtcttttggccctgttcccacactcttgctcctcgctgcggcattattggcagtctcagacgccctgggacgaccttccgaggaagacgaagagctcgttgtgccagaattggaacgggctcccggtcatggaacaacgagactcagattgcacgcctttgaccaacagctggacctcgagctgcgtccagattctagcttcctggccccaggattcactcttcagaacgttggaagaaaaagtggttcagaaacccccttgcccgagacagacctggctcactgtttctacagtggcactgtaaacggagacccctcttcagctgcagcattgtccctttgtgagggggtgaggggagctttctacttgctcggtgaggcttacttcatacagcctctgcctgcggcatccgaaagacttgctaccgcagctcccggtgagaagcctcctgcacccttgcaattccacctgttgcgccgaaataggcaaggagacgtgggcggaacatgcggcgtcgtggacgatgaaccacgacccacaggaaaggcagagacagaggatgaagatgaaggcacagaaggagaagacgagggcgctcagtggagccctcaggatcccgcacttcagggagtcggccaacctacaggcactgggagtataagaaagaaacggttcgtttcttcacacagatacgtcgaaacaatgcttgttgctgatcagtcaatggctgaattccatggatccggcctgaagcattacctgcttactctgttttctgtcgccgctcggctctacaagcatccctccattagaaactctgtgagccttgttgtggtgaagatcctggtcattcatgacgaacagaaggggcctgaggtgaccagcaatgccgctctgaccttacggaatttctgcaactggcaaaaacagcataacccaccatctgaccgcgacgccgagcattacgacacggcaattttatttacacggcaggacctttgcgggtctcaaacatgtgacacactgggcatggccgacgtggggactgtgtgtgatccaagccgctcttgttctgtaattgaagacgacggcctgcaggccgcatttaccacagcgcatgaactcgggcatgtattcaacatgcctcacgacgacgccaaacagtgcgcgagcctaaacggtgtcaaccaggatagccacatgatggcttctatgctaagcaatttggaccactcccagccttggtcaccttgctctgcttacatgattacgagtttcctggataatggacatggagagtgcttaatggacaaaccgcagaatcctatccaacttcctggcgacctgcctggtacctcatatgacgccaaccgacagtgtcagttcacatttggagaggatagcaagcactgccctgacgccgcatcaacatgctcaactctttggtgcacgggtactagtggcggtgttttggtgtgccagaccaagcattttccgtgggctgacggcacgtcctgcggggagggcaaatggtgtatcaacggtaaatgcgtgaacaaaaccgacagaaaacacttcgatacaccctttcacggctcgtggggaatgtggggaccttggggagattgctccagaacttgcggagggggagtgcaatacactatgcgagaatgcgacaatcctgttccgaagaatggcggtaagtattgcgagggaaaacgcgtccggtatagaagctgcaatctggaagactgcccggacaacaatggaaaaacatttcgcgaagaacaatgcgaagcacacaatgaattctccaaggccagtttcggatctggtccagccgtcgagtggatcccaaaatatgctggcgttagtcccaaggaccggtgcaagctgatttgtcaggcaaaaggtatagggtatttttttgtcctccagcctaaggtggtagacgggaccccatgcagtcccgacagcacttcggtctgcgtgcaaggccagtgtgtgaaagccggttgtgaccggatcattgactcaaagaaaaagtttgataagtgtggagtatgtggtgggaatggttcaacctgcaagaaaatatcaggttccgtaaccagcgccaagcctggataccatgatattataacgatccctaccggcgctacaaacatagaagtcaagcagagaaatcagcgaggaagtaggaataacggaagctttctagccatcaaggccgctgacggcacctacattctcaatggcgattacacactgtccactcttgagcaggatattatgtataagggggttgtgctccgatacagcggctcctctgccgcactcgaacggatccgttctttcagtccactgaaagagccattaactatccaggtactgacagtggggaatgcgttaagaccgaagattaaatacacatatttcgtgaagaagaagaaggagagttttaacgccatacccacattctccgcctgggtgatcgaagagtggggtgagtgcagtaagtcctgcgagcttggctggcagcgaaggctggtggagtgtcgggacattaatggacagcccgcatcagaatgtgctaaggaggttaagcctgccagcactaggccctgtgctgaccatccctgcccacaatggcagttgggggaatggtcaagctgctctaagacctgcggcaaaggttacaagaaacggtcactcaaatgcttgtcccacgacgggggagttctctcccatgagagctgtgatccattgaagaagcctaaacactttatcgatttttgtaccatggccgagtgtagttag

SEQ ID NO: 213433 - DNA, 3312 bp, synthetic construct
  misc_feature 1..3312: note = Description of Artificial Sequence: Synthetic coding sequence
  source 1..3312: mol_type = other DNA
atggcgccagcctgtcaaattctccggtgggccctggcgcttggcctggggctaatgtttgaagtgacacatgcattcaggagccaggatgaattcctctcctctctggaaagttacgagattgccttccccactcgcgttgaccataacggcgcactactggcattctcgccccctccacctagacgtcaaaggagagggacgggtgctactgcagagagtcgcctcttctataaggtggcgagcccatcgacccactttctcttgaacctgaccaggtcttcgaggttgctggctggtcatgtgtctgtggaatattggactcgggaaggcctggcatggcagcgggcagcccgaccacattgcctctacgccggacacctccagggtcaggccagcacgtctcatgtagccatatctacctgtggaggtctgcacgggctgattgtggccgacgaagaagagtatttaatcgagcctcttcacgggggtccaaaaggatcccgtagccccgaagagagcggcccacatgtcgtatataaaagaagcagcctgaggcatccccacctggatacagcttgcggcgtacgcgatgagaagccctggaaaggccgaccttggtggctaagaaccttaaagcccccaccagcgaggccattaggaaatgaaaccgagagaggtcaacctgggttgaaacggtctgtctcaagagaaagatatgtggagactctggtggtagcggacaagatgatggttgcctaccatggccgacgagacgttgagcagtatgtcctcgccatcatgaacatcgtcgccaagctgttccaggattcatctctgggctccacagttaatatcttggtcaccagactcatactgctgactgaggatcagcccactctcgaaataacacaccatgcgggaaaatccctggatagtttctgcaaatggcagaaatccatcgtgaaccacagcggacacggaaatgctattcctgagaatggtgttgctaaccatgatactgccgtgctgataaccaggtatgacatctgcatctataaaaataagccttgtggaaccctgggattggctcccgttggcggaatgtgcgaaagggagcggtcttgctcagtgaacgaggacataggccttgctacagctttcacaattgcgcacgagataggacatactttcgggatgaatcacgacggagtgggaaattcatgtggagcgagaggacaggacccagctaagctcatggcagcccacatcacaatgaagaccaatcctttcgtctggtcttcttgttcccgcgactacattacatccttcttggattctggtctgggcctatgtctgaacaatcggccacccaggcaagacttcgtctatccaactgtggccccaggtcaggcttacgatgccgatgaacagtgccgcttccaacatggcgtgaagagccgccagtgcaagtatggtgaagtgtgctcggaactgtggtgcctgagcaagagcaataggtgcattacaaacagcatcccggctgccgagggcacactgtgccaaacacatacaatagataaaggatggtgctataagcgcgtatgcgtgccgttcggttcccggccagaaggagtggacggcgcatgggggccatggacaccatggggcgattgctccagaacatgtgggggaggggtgtctagcagcagtcgtcattgcgactcaccacgaccaactattggaggaaagtattgtctcggagaaagacgaagacatcggtcatgcaataccgatgactgtcccccaggcagccaagatttcagggaggtgcagtgttcagagtttgattcgattccatttagagggaaattttacaaatggaagacataccggggagggggagtaaaagcctgcagcctgacttgcttagcagaaggctttaatttttatactgaacgtgcagccgcagtggtggacggcacgccctgtcggcctgacaccgtcgatatctgtgtgtccggcgagtgtaagcacgtgggctgtgatcgagtgctcggctctgacctgcgagaagataaatgccgcgtttgtggaggggacggatcagcatgtgaaaccatcgagggtgtattcagtccagcatcccctggggcagggtacgaagatgttgtctggatccctaaagggagtgtgcatatatttatacaggatctgaatctgtccctttcacaccttgcccttaaaggggatcaggaatcgctgctcctggaggggcttcccggaaccccacaacctcacagactcccactcgcaggcactaccttccaactacggcagggccctgaccaagtccagtcactcgaagctctgggcccaataaatgccagtctcatcgtgatggtcttagccaggactgagcttcccgcactgaggtaccggttcaatgcccctatagcacgagattcgctgccaccttactcgtggcattacgccccatggactaagtgctcagcccagtgcgccggaggaagccaggttcaggccgtcgagtgtagaaaccaactcgatagcagcgccgtagctccacactactgtagtgcccatagcaagctgcccaagcgacaacgggcttgcaacacagagccttgcccaccagattgggtcgtgggaaactggagcctatgttcaagatcctgcgacgcgggtgtgcgcagcaggtccgtagtgtgtcagagacgcgtctctgctgccgaggagaaagccctggatgattcagcatgcccccagccaaggccccctgtgctggaggcttgccatgggccaacttgccctcccgaatgggccgcattagactggagcgagtgcaccccaagctgtggacccggactccgccatagggtcgttctatgcaaatctgccgatcaccgggctacactcccgccagcacattgctcaccggcagcgaagcctcccgctactatgcgctgtaacctacgacggtgccctcctgctcggtgggtggccggtgaatggggagagtgtagcgcacaatgcggcgtgggtcagcgtcagagaagtgtaagatgtacaagccacaccggacaggctagccacgagtgcaccgaggctctgaggcccccaactacacagcagtgcgaggccaagtgcgacagccccactcccggagatggtccagaggaatgcaaggatgtgaataaggtggcctattgcccccttgtgttgaaatttcagttttgctcgcgcgcatattttcggcaaatgtgttgtaagacgtgtcacggtcattag

SEQ ID NO: 213434 - DNA, 2544 bp, synthetic construct
  misc_feature 1..2544: note = Description of Artificial Sequence: Synthetic coding sequence
  source 1..2544: mol_type = other DNA
caagacgatggcggtctatctcgggcacccggatgcggagctgtctgtcccggacaccacgagcattgtcaggtggcgaagctattccaggacagctctttagggagcactgtgaatatactcgtgacacggttgattttactcacggaagatcagcctactctcgagatcactcaccatgcgggaaaatccctggattctttttgtaagtggcagaaaagcatcgtgaatcattccggtcatgggaacgcaattcccgagaacggggtggccaaccacgacactgccgtgctgattacacgatatgacatttgtatttacaaaaataagccttgcgggacattgggcctcgcccctgtaggcggaatgtgcgagcgagagcgatcatgctctgtgaacgaggacattggattggcaacagcctttactattgcccatgagatcggccatacattcggcatgaaccatgacggagtgggtaactcgtgtggcgcaaggggtcaggatcccgctaaactgatggcagcccacattactatgaagaccaacccctttgtctggtctagctgttccagagactacataacctctttcctcgatagcggactcggcctgtgtctgaacaacaggccacctcgccaggactttgtgtatcccaccgtggctcccggtcaggcctatgacgccgacgagcagtgccgtttccagcatggcgttaagtccaggcagtgcaaatatggagaagtgtgcagcgagctgtggtgcctcagcaaaagtaacaggtgtattacgaacagtattcctgctgcggagggcactttatgccaaacacacaccattgataagggatggtgctataagagggtctgcgtcccttttgggtccaggccagaaggagtggatggcgcatgggggccatggacaccgtggggtgattgcagtaggacatgcggcggaggcgtgtcatcaagtagccgccactgcgatagcccacgccctaccattgggggtaagtactgtctgggagagcggaggcgccacaggtcttgcaatactgatgactgcccacctggctcacaggatttcagggaagtccagtgttccgagttcgattccataccttttcgcggtaagttttataaatggaaaacatatcgcggaggcggtgtgaaggcctgttcactcacgtgcctggcagaaggatttaatttctacaccgaaagagccgcagcagtggtggatggcacgccttgccggccagacactgtagacatttgcgtaagcggtgagtgcaagcatgtgggttgtgatagagtcctgggttccgatttgcgagaggataagtgtagggtgtgtgggggtgacggtagcgcctgcgagaccattgaaggtgtattctcccccgcttcaccgggagctggttacgaggatgtcgtgtggatcccaaaaggctcggttcacatcttcatccaggacttaaatctgtccctgtcccacctcgccctcaagggtgatcaggagtctttactgctggaggggctccccggtaccccccagccacatcgactgcccctggccggtacaactttccagttgcgccagggcccagatcaggtgcagtcgttggaggctttgggccctatcaacgcttctctcattgtaatggtgctggctaggactgaactgccagccctacgctaccggtttaatgccccaatcgctagggatagcctgcccccttacagctggcattacgcgccttggactaaatgcagcgctcaatgcgcaggtgggtcacaagtgcaggctgtagagtgtaggaaccagctcgattcgagtgccgttgcaccacattactgttccgctcactcaaaattaccgaagagacaaagagcttgtaataccgaaccatgcccgcctgattgggtggttggcaattggtcactatgctctaggagctgcgatgctggtgtccgctccagaagcgttgtgtgccagagacgtgtgtctgcagcagaggagaaggcattggacgacagcgcctgcccccagccaaggccaccagtgcttgaagcctgccacggccctacatgcccgcctgaatgggctgctctggactggtccgaggtgtcacgacccctgccttctaggcccttaggatgccctggaggggttagtacagaaacaccattacgcggtctgcaagtgagctgtccacttctgaccagtcactgggggagtaccctctcaacaaagcgaccattccagctgcagtgcactccgtcttgcggccctggacttagacatagagtggtcctgtgcaagtcagcagatcaccgtgctaccctgcctcctgcccattgtagccccgcagccaagcctccagcaaccatgcgttgtaaccttagaaggtgccctccagctagatgggtcgcgggagagtggggggaatgttccgcacagtgcggagttggccagcgtcagaggtccgtgcgttgcacttctcacaccggccaggccagtcatgaatgtacagaggcctag

SEQ ID NO: 213435 - DNA, 4530 bp, synthetic construct
  misc_feature 1..4530: note = Description of Artificial Sequence: Synthetic coding sequence
  source 1..4530: mol_type = other DNA
atgccatgtgctcaacggagctggctggccaacctgagcgttgtggcccagttactcaatttcggtgcgctgtgctatggcaggcagcctcagcccggaccagtgcgttttccagaccgccgacaagagcattttattaagggcctcccagaatatcacgtggtcggcccagtgcgcgtcgacgcctcaggccacttcctgtcctacggtctgcactatcctatcacttcctcaaggcggaagcgcgacctcgatggatccgaagattgggtgtattaccgcatatctcacgaagaaaaagatctcttcttcaatctgacagtgaatcaggggttcctgagcaactcttacataatggagaaaaggtacggcaatctttcccacgtgaagatgatggccagctccgcacccctgtgtcatctcagtggcacagtgctgcagcaaggtacaagagtgggcacagctgcactcagcgcttgtcacggcctgactggcttcttccaactcccccatggcgatttcttcattgagccggtcaagaagcaccctctggtcgagggcggatatcacccccatatcgtgtataggagacagaaggtgccagagaccaaggagccgacctgcggcctgaaagattctgttaacatttcacagaagcaggaattgtggagggaaaagtgggagaggcacaacctgccctcccggagtctttctaggaggtctatctccaaggagaggtgggtggagacgttggtcgtagcagatacaaaaatgattgagtaccacggctccgaaaatgttgaatcatacattctgactattatgaacatggtgactggcctgttccataatcccagtatcgggaatgctattcatatcgtggtggtgcgattgatactcctcgaggaagaggagcagggattgaagatcgtgcaccacgcagaaaaaaccctgtccagcttctgcaaatggcaaaaatctatcaatccaaagagtgatctgaacccggtgcaccacgacgtggccgttctgctcacccgcaaggacatttgtgccggatttaacaggccctgtgagacgctggggctctcacatctgtccgggatgtgccaaccccacaggagctgtaatataaacgaggatagcggcctcccattagcctttaccattgcacatgagctgggccattcattcggaattcagcatgatgggaaggagaacgattgcgaaccagtgggaagacatccatatatcatgtccagacagcttcaatacgaccccacacctctgacttggtccaagtgctcagaggaatacatcactcgcttcttggatcgagggtggggcttctgcctggacgacatccccaagaaaaaagggctgaaaagcaaagttatcgctcccggtgttatctacgacgtgcatcaccaatgccagttgcaatatgggcctaacgcaaccttctgccaagaggtggaaaacgtgtgccagactctgtggtgctccgttaaaggcttctgcagaagcaagctggacgcagctgcggatgggacccagtgcggagagaagaaatggtgtatggcgggtaaatgcattacagtaggaaagaagccagaatctattcctgggggttggggacgctggagcccttggtctcactgctccagaacttgcggagccggagtgcagtctgccgagaggctctgtaataatcccgagcctaaattcgggggtaagtattgcacgggggagcgaaaaaggtaccgcttatgtaacgtgcacccatgtagatccgaggctccaacattccgtcagatgcagtgcagcgaatttgacactgtcccatacaagaacgaattgtaccattggtttcccattttcaatcccggatatgttgacattggcctgatacccaagggagcgagggatattcgcgtcatggagatagagggcgctggcaacttcctggccattcgttcagaggatcctgagaaatactacctcaatggcggttttataattcagtggaacggaaactacaaactggctggtacggtgtttcagtatgatcggaagggggatctagagaagctgatggctactggacctacaaacgagtcagtctggatccagctgcttttccaagtaaccaatcccggaatcaagtacgagtacaccattcaaaaggacggtctggacaacgatgtggagcagcagatgtacttctggcaatacggccactggaccgaatgctctgtgacttgcggcactggaatccggcgacagaccgcccactgtattaaaaaaggtcgtggcatggtgaaagctacattttgtgatccagagacacagccaaatgggaggcagaaaaagtgccacgagaaggcgtgcccgccacgctggtgggctggggagtgggaggcttgttccgctacctgtggcccacatggggaaaaaaaaagaacggttttgtgcattcagacaatggtgtccgacgagcaggcactgcctcctacggactgccagcatctgctcaagcctaaaacattactctcttgcaatagagatattttgtgcccatctgactggactgtggggaactggtccgagtgctccgtgtcatgtgggggtggggtgaggattcgctctgtcacatgcgctaagaaccacgacgagccatgcgatgtcaccaggaagcccaattctcgcgcattgtgcggcctccagcagtgcccttccagcaggcgggtgttgaagcccaataaaggcacaataagcaacggaaaaaatcccccaactctcaagccagtgccccctcctacctccaggcccaggatgttgaccacccctacaggaccggagagtatgtctacctccaccccagctatatccagtccctcgcccaccaccgctagcaaggagggcgacctcggagggaagcagtggcaggactcgtccacccagccggagcttagtagcaggtatttgatctctactggttccacaagccaaccaatactgacctcccagtccttaagcattcaaccatcagaggagaacgtaagcagttcggacacaggtcctacatccgagggcggtctggtggccaccaccactagtggctcaggcctgagttctagcagaaatcctatcacctggccagtgacccctttctataataccctgaccaagggacctgaaatggagattcattccgggtccggggaagagcgtgagcaaccagaagataaagatgaaagtaatcccgtaatttggacaaaaatccgcgtgccaggcaacgacgcacccgtggagtccacagagatgccactcgctccgccattgaccccagatttgagccgtgagtcctggtggcccccattcagcacagtgatggagggactgctgcccagccagcggccaacaacttcagaaactgggacccccagagtggagggcatggtgacagagaagcctgccaataccttattgccgctgggcggagaccaccaacctgagccttcagggaagacggctaaccggaaccatctgaagttaccaaacaacatgaatcaaaccaagagttcagaacccgtcctgaccgaggaagatgctacaagtcttattaccgagggctttttgctaaacgcaagcaactataagcagctgacgaacggacatggatcagcccactggatcgtgggcaactggtcagaatgctccacgacctgtggattgggcgcttactggcggcgtgtcgaatgttccacacagatggattctgactgtgccgcaattcagaggccagaccctgcaaagaggtgtcaccttaggccttgcgccggatggaaagtaggcaactggtccaagtgttcccggaactgttctggtggattcaaaatccgtgagatccagtgcgtggactctcgcgaccatcgtaaccttcggccattccattgccagtttctggccggtattcctccgcctttgtccatgtcttgtaatcccgagccgtgcgaggcgtggcaggtggagccttggtcccagtgctcacgcagttgtggagggggagtgcaggagcgcggagtgttctgtccgggaggcctgtgcgattggactaagcggccaacgtctacaatgtcatgcaacgagcacctgtgttgccattgggcaacagggaactgggacctttgctccacatcctgtggcggagggttccagaagaggactgtccaatgcgtccccagtgaggggaataagacagaggaccaggaccagtgcttgtgtgaccacaaaccacggcctccagagtttaagaaatgtaatcagcaggcctgcaagaagtcagccgatctcctgtgtactaaggacaagctttccgcctctttctgtcaaactctcaaagctatgaaaaaatgcagtgtgcccacagttagggctgagtgttgcttcagctgtccccagacacacatcactcatacacagagacagcgacgtcagcggctcctccagaaatcaaaggagctttag

SEQ ID NO: 213436 - DNA, 4784 bp, synthetic construct
  misc_feature 1..4784: note = Description of Artificial Sequence: Synthetic coding sequence
  source 1..4784: mol_type = other DNA
atgccatgcgctcagaggtcctggctggcaaacctgtccgttgtagcgcagctgcttaactttggggctctgtgctatggaaggcagccacagcccggtcctgttaggttccccgaccgcaggcaggagcatttcatcaagggcttgcccgaatatcatgtcgttggacctgtccgagtggacgcgtctggacactttttaagctacgggctccactaccccattacctccagccggaggaaaagggatctcgatgggagcgaggattgggtgtactacaggatctcacatgaagagaaggatctgttcttcaacctgacagtaaaccaagggttcttaagtaattcatacatcatggaaaagcgatacgggaacctgagccatgtgaagatgatggccagctcggccccattatgtcatctgtccggcaccgtcctgcaacaggggaccagggtgggcacagctgccctgtccgcttgccacgggttgaccgggtttttccagttgcctcatggagacttcttcatcgaaccagtcaagaagcaccccttggtagaaggtggctatcacccacatatagtgtatcggagacaaaaggtaccagaaacaaaggagcctacatgcggactcaaggactcagtcaatattagtcagaaacaggagctgtggagagagaaatgggagcggcataacttaccttccaggtccctctccagacgctcgatctccaaggaacgatgggtcgagaccctggtggttgcggacactaaaatgatcgaataccatggatcggaaaatgtggagagttacattttgactatcatgaatatggtgacaggtctgttccacaacccgtctattggaaacgcaatccatatcgtggtggtgagattaatcctgctggaggaggaggagcagggtctgaagatcgtgcatcacgcagaaaaaacactatcatccttttgcaaatggcagaaaagcattaacccgaaaagcgaccttaatccagtccatcacgacgttgccgtacttttgaccaggaaggatatctgcgcgggattcaatcgaccttgtgagaccctgggacttagccacctgtcgggaatgtgtcagccacataggagctgcaacataaacgaagacagcggcttaccccttgcttttacaatcgcacatgagctaggacattcatttggcatccagcacgatggcaaggaaaacgattgcgagcccgttggccgacacccatacataatgtcccgacagttgcaatacgatccaacacctctaacgtggagtaagtgttcagaggagtacattactaggttcctcgatcggggatgggggttctgcctcgacgatattcccaagaagaaggggctcaaatcaaaagtgatcgcccctggagtgatctatgacgtccaccatcagtgtcagcttcagtacgggccaaacgcaacgttctgtcaggaggtagaaaacgtgtgtcagaccctatggtgcagtgtgaagggattctgtcgctccaagttggacgcagccgctgatggcacccagtgtggtgaaaaaaagtggtgtatggctggaaagtgtatcaccgtggggaagaagcccgaatccattcctggtggctggggtcgctggagcccctggagccattgcagcaggacttgtggcgcaggggttcagtcggcagaacgtctatgcaacaatccggaaccgaagttcggcggtaagtattgcactggcgagaggaagcgatatcggctgtgtaacgttcacccttgcagatctgaggcccctacattcaggcagatgcagtgttccgaattcgacactgttccctacaaaaacgagctttaccattggtttcccattttcaaccctgcccatccctgcgagctgtactgcagaccaatcgacgggcagtttagcgagaaaatgctcgatgcagtcatcgacggcacgccttgcttcgaggggggaaacagcaggaacgtttgcattaacgggatctgcaagatggtggggtgcgattatgagatcgattcaaacgccacggaagatcgatgcggtgtctgtttgggggatggctcttcttgccagacagtccgcaaaatgttcaagcagaaggaagggtcggggtacgtcgacattggcttgatacccaagggcgctagggatattcgcgtgatggagatcgagggtgccggtaatttcctggcaattaggtccgaggaccctgaaaaatactaccttaacgggggtttcataatacagtggaacggcaattataagctcgcgggtaccgtgttccagtacgaccgcaagggtgatctggagaaactgatggcaaccggtccaaccaatgaatctgtgtggattcagctgctgtttcaagttaccaatccaggcatcaaatacgagtataccattcaaaaggacggtctggataacgatgttgagcagcagatgtacttttggcagtatggacactggacggagtgcagcgtgacatgtggtacagggatacgtaggcagaccgcccattgcatcaaaaaaggcaggggcatggtgaaagcgaccttctgtgaccccgagactcagcctaatggtcgtcagaagaaatgtcatgaaaaagcatgtccaccacgatggtgggctggcgaatgggaagcctgctctgcaacctgtgggcctcatggtgaaaagaagcgcacagtgctctgcatccagaccatggtaagtgacgaacaggccctgcctccgactgattgtcagcacctcctaaagccgaagacgcttctcagctgcaaccgggacatcttgtgcccatccgattggaccgtgggaaattggtcggagtgcagcgttagctgcggcggtggggttaggattcgctctgtcacgtgtgcgaaaaaccacgacgaaccatgcgatgtgacacgtaaacccaatagtcgcgctctctgcgggcttcagcaatgcccaagttctaggcgggtactgaagccaaataaaggcactatcagcaacgggaagaacccacccaccttgaagccagtcccacctcctacgtctaggcctcggatgctgactacgcccactggccctgagtctatgtccaccagcactccagcgatctcatctccatctcccactacagcctcaaaagagggagatcttggcggaaagcagtggcaggattctagcactcagcctgaactgtcttcacgctaccttatctcaacaggatctacttcccagccaatcctgacatcacagtcactgtctattcaaccttcagaggaaaacgtctcctcctctgacacggggccaacctctgaaggcggtcttgtggccaccacaacaagtgggtccggactctcctcttccagaaatcccatcacctggcctgtcacacctttctataacaccctgactaagggacccgagatggagatacactcggggagtggggaggaacgcgagcagccagaggacaaggatgagtctaatcctgtgatttggaccaaaatccgcgttcccggaaatgacgcgcctgtagaatctactgagatgccactcgccccacctctcaccccggacctctcaagagaatcctggtggcccccattctccacagtgatggagggactactacccagccagagaccaacgacatctgagaccggaacgcctagggtggagggcatggtgactgagaaacccgcaaacactctcctgcccctcggaggtgaccatcagccagaaccctctggaaagaccgcaaatagaaaccacttgaaactccccaataacatgaatcagactaagtcgtcagaaccagtgctgacagaagaagacgccacatctctcataaccgaagggttccttctgaatgcttcgaactacaagcagcttacaaacggccacggatctgcacattggatcgtaggcaattggagtgagtgcagcactacttgtggcttaggcgcatattggcgtagggttgagtgcagtactcagatggattccgattgtgctgcaatccagcgcccagaccccgctaaacgttgtcatctccgaccatgcgccggatggaaggtgggaaattggtcaaagtgtagtcgaaattgcagcggaggctttaagattcgcgaaatacagtgcgtggacagccgcgatcaccgaaatctacggccttttcactgtcagtttctggcgggaatcccacctcccctctcaatgtcgtgtaaccccgagccttgcgaggcatggcaggtggaaccgtggagccagtgcagcaggtcttgtggtggcggagtccaggaaaggggagtgttctgccccggtggcttatgcgattggaccaaacgaccaacctccaccatgtcttgcaatgaacatctgtgttgtcactgggccacaggcaattgggacctctgctccactagctgcggtgggggtttccagaaaaggaccgtccagtgtgttccgtccgagggaaataaaaccgaagatcaggatcaatgtctctgcgaccataagcctcgcccacctgaattcaaaaaatgcaatcagcaggcatgcaaaaaatctgccgatcttctctgcacgaaggataagctgtcggcatccttctgccaaaccctcaaagcaatgaaaaagtgcagcgtgcccaccgtaagagcggagtgctgtttttcttgccctcagacccacattactcacacacagcgtcagcgcaggcagagactgctccagaagagcaaagaactata

SEQ ID NO: 213437 - DNA, 699 bp, synthetic construct
  misc_feature 1..699: note = Description of Artificial Sequence: Synthetic coding sequence
  source 1..699: mol_type = other DNA
atgccttgcgcacagagatcatggctggctaatttgagcgtagtagcccagctgcttaacttcggagcactatgctacggccgacagccacaacccggaccagtgaggttccctgaccgtaggcaggaacattttatcaagggattgccagaatatcatgtggttgggcctgtccgtgtggacgcgtccggacatttcctgtcatacggcctgcattatccgatcacttcctctcgtcgcaagagagacttggacggttctgaggactgggtgtattaccggatcagccatgaggaaaaagatctgttctttaatctaacagtcaatcagggcttcctgtcaaacagctacattatggagaaacggtatggcaatctgagtcatgtgaagatgatggcttcctccgcgccactctgccatctttctggcacggtattgcagcagggtacaagagtgggcacagcggctctgtctgcatgccacggattgacgggcttcttccagttgcctcacggagattttttcatcgaaccggtcaagaaacaccccctcgtcgagggaggctaccacccacatatcgtctaccgcaggcaaaaggttcctgagacaaaggaacctacctgtggcctgaagggtattgtgactcacatgagttcctgggtggaggagagtgtgctgtttttttggctgttttattag

SEQ ID NO: 213438 - DNA, 3675 bp, synthetic construct
  misc_feature 1..3675: note = Description of Artificial Sequence: Synthetic coding sequence
  source 1..3675: mol_type = other DNA
atgaaaccccgagccaggggctggcggggtctggcggctttatggatgttactggctcaggtcgccgaacaggcaccagcctgcgcgatgggcccagctgctgctgccccaggaagcccttccgtcccgagaccgccacctccagcggaaaggcccggttggatggagaagggcgaatacgacctggtttcagcttacgaggttgatcaccggggagactacgtgtcccatgaaattatgcaccaccagcggaggcgtcgtgcggtaccagtgtccgaggtcgagtccctgcacctccgccttaaaggctcacggcacgacttccacatggacctgcgaacaagtagctctctggtggcccctggatttatcgtacagacattgggtaaaacgggaacaaagtccgtccagaccctgccccctgaagacttttgtttttaccagggctctcttaggtcacacagaaacagctcagttgctttatccacatgtcagggactgtccggtatgattcggaccgaggaagctgactacttcctccggccactgccgtctcatctctcgtggaagttgggcagagcagctcagggttctagcccgagccacgtattgtacaaacgatccaccgagccgcacgctcccggtgcctctgaagttctcgtaacttcccgtacttgggagctggcccaccagccactgcacagctccgatctgcgtttaggactgccccagaagcagcatttttgtggccgaagaaaaaagtacatgccacagccccctaaggaggatctgtttatcctgccagacgaatataaatcctgcctgcggcataagcggagcctgcttcgctctcataggaatgaagagctcaacgttgaaacgttggttgttgtggacaaaaaaatgatgcagaatcatgggcacgaaaatatcaccacatacgtcttgacaatactcaatatggtcagcgccttattcaaggacggtactattggcggaaatattaacattgccatcgtcggactgatcctcctcgaggacgaacagccgggactggtcattagccaccatgccgaccacaccctcagctcgttctgccagtggcagtccggcctcatgggaaaagacggtacccggcatgatcacgcgatactacttacaggattagatatatgtagttggaaaaatgagccctgtgatacactggggtttgcacccatttccgggatgtgctccaagtatcgcagctgcaccatcaatgaagatactggactgggcttagcctttacgatcgctcatgagagtgggcacaattttgggatgattcatgatggcgaaggcaacatgtgtaagaagagcgagggaaacataatgagtcctaccctcgccggtaggaacggcgtattcagctggtcaccctgttcgcgccagtacctccacaagtttctttccacggcacaagctatttgcttggccgatcagccaaagcccgttaaggagtacaaatacccagagaagttgcctggtgagctgtatgacgcaaatactcagtgcaaatggcagttcggggagaaggctaaactgtgcatgctggatttcaaaaaggatatttgcaaggctctttggtgtcaccggatcggcaggaaatgtgagaccaaattcatgcccgcagcagaaggcacgatttgcggccatgacatgtggtgcagaggaggccagtgcgtgaagtatggagacgagggccctaagccgactcacggtcactggtcggattggagttcttggagtccgtgctctaggacttgcggtggcggagtctctcaccgatctaggctttgcacaaatcctaaaccaagccatggcggaaagttttgtgaaggctcgacacggactctgaaactatgcaacagccagaagtgcccaagagactctgtcgatttccgagccgcacagtgtgccgaacataattcaaggagattccggggaagacattataaatggaagccttacacacaagtggaggaccaggatctctgcaaactttactgcatcgctgaggggttcgactttttcttctccctgagcaacaaagtaaaagatggtacaccatgctctgaagatagtcgcaacgtctgtattgacggaatttgcgaaagggtaggttgtgataacgtgctcggcagcgacgcagtggaggatgtttgcggagtgtgtaacggcaacaacagcgcatgtactatccatagaggcctttataccaaacaccatcacaccaatcagtactaccatatggtcacgatcccttccggcgcaagatcaattcgcatttacgaaatgaacgtgtccactagttacatatccgtgcggaatgccctcagacgctattatcttaacggccactggacagtcgactggccaggacgatataaattctctgggacaacgtttgattatagaaggtcttataacgagcctgaaaatctgatcgctaccgggcctaccaacgaaacgcttattgtcgagcttctttttcaagggagaaatccgggtgtcgcttgggaatacagcatgccccgtctgggaactgagaaacagccaccggcacagccgtcttatacctgggctatagtaagatccgagtgctccgtctcttgcggtggagggcaaatgaccgtgagagagggttgctaccgagacttgaaatttcaggttaacatgagtttctgcaacccaaaaactcggccagttacaggactggtgccttgtaaggtttccgcttgtcccccatcatggagtgtgggaaattggtcagcctgctcccgcacttgcggtgggggagcgcagtctcgtccggtccaatgcacaaggagagttcattacgattccgagcccgtgccagctagtctgtgccctcaacccgctccttctagcaggcaggcctgtaactcacagtcctgtccccctgcctggagcgccggaccctgggcagaatgctcccacacatgcggcaaaggatggcgcaagcgggcagtggcatgtaaatcaaccaatccaagtgcacgggctcagctgttgccagatgccgtttgcaccagtgagcccaagccccgtatgcacgaggcatgtctcctgcagaggtgccacaagccaaagaagctacagtggttggtgtccgcatggtcccagtgctccgtcacctgcgaacgaggtacccagaagcggttcctgaagtgtgccgagaaatatgtgtcagggaagtaccgcgaactcgcaagtaaaaagtgctctcatcttcccaagccttctctggagctggagcgtgcctgtgccccactgccctgcccaaggcacccgccattcgccgctgctggtccttccagaggctcgtggttcgcgagcccctggtcccagtgtacagctagttgcggtggcggagtgcaaactagatctgtgcagtgcctcgcagggggtcggccagcgtctggctgcctgttgcatcagaagccgagtgcttctctcgcatgcaacacccatttttgtccgattgccgagaagaaagacgctttttgtaaggactacttccactggtgttacctcgttccacagcatgggatgtgctctcacaaattttatgggaaacagtgctgcaagacctgtagcaagagcaatctgtag

SEQ ID NO: 213439 - DNA, 2787 bp, synthetic construct
  misc_feature 1..2787: note = Description of Artificial Sequence: Synthetic coding sequence
  source 1..2787: mol_type = other DNA
atgaagcccagggcccgaggatggcggggtctggctgctctgtggatgttgctcgcccaggttgcagagcaggctcccgcttgcgccatggggccagccgctgccgcacctggttcgccctcggtgcccaggccgcctcctcctgccgagagaccagggtggatggagaagggggaatatgatctggtgagtgcttacgaagtggaccataggggtgactacgtaagccacgagatcatgcaccatcagcggagaagacgcgctgtgccggtcagcgaagtggagtcactgcacctgaggttaaaagggtcacgccacgacttccacatggatttacgcacgagctcctcccttgttgctcctgggtttatcgtgcaaacgctgggaaagacagggaccaaatcggtccagactttaccaccagaagatttctgtttttatcagggatctctccgtagccatcgcaatagtagcgttgccttgtctacttgtcagggtctatcaggaatgatccgaaccgaggaagctgattacttcctgcgccctctacctagccacctcagttggaagctgggcagagcggctcaagggtcctccccttcacatgtgctctacaagaggtctaccgaaccccacgcacccggtgccagcgaggtgctcgtgacatctaggacctgggaactcgcccaccaaccgctgcatagcagtgacctccgcctggggctgccacaaaagcagcacttctgtgggaggagaaagaaatatatgccccagccccctaaggaagatttattcatccttcccgacgagtataaatcctgcttaagacacaagcggtcactgttgcgttcacacaggaatgaggaacttaatgtcgaaacacttgtcgtcgttgataagaaaatgatgcaaaaccatggccacgagaacatcacgacttacgtgctgactatacttaatatggtatccgcattattcaaagatggcaccatcggaggaaatattaatattgccatcgtcgggcttattctcctcgaagacgaacaaccaggactggtgatatcgcatcatgcagatcatacactgagtagtttttgtcaatggcagtccgggctcatgggcaaggatgggactcgccatgatcacgccatcttgcttaccgggctggacatatgcagctggaaaaacgagccatgtgatacattggggttcgctccaatctcaggtatgtgttctaaatacaggagttgtaccattaacgaggacacgggtcttgggctcgcgttcacaatcgcacacgaaagcggccataactttggcatgattcacgatggggagggcaacatgtgcaagaagagtgaaggcaacatcatgagccctactctcgcagggagaaatggagtcttcagttggtccccatgttcccgacagtacttgcacaagttcctctcaactgcacaggccatctgtttagctgatcagcccaaacccgtaaaggagtacaaatacccggagaaactgcctggcgaactgtatgacgcgaacacccagtgtaagtggcagttcggggagaaggccaagctgtgtatgctggactttaagaaggatatctgtaaagccctctggtgtcatcggattggccgtaagtgtgagaccaagtttatgcctgctgccgaggggaccatctgtgggcacgatatgtggtgccggggtggccagtgcgtcaaatatggtgacgagggccctaagcccacccatggccactggagcgattggagttcgtggagcccttgttctagaacatgcggtgggggtgtctcacaccgcagtcggctgtgtactaatcccaagccaagtcatggcggtaagttctgtgaaggctcaactcgcacactgaaactgtgcaactcacagaaatgcccacgggactccgtggactttcgtgccgcacagtgcgcagagcataatagccggagatttagaggtaggcattacaaatggaagccgtacacccaagttgaggaccaggatctctgcaagctgtactgtatcgctgaagggtttgacttctttttttctttgtctaacaaggtcaaggacggaacaccttgttctgaagattcccggaatgtgtgcattgacggtatctgcgaaagggtggggtgtgataatgtgctcggcagcgacgctgttgaggacgtatgtggcgtatgcaatggcaacaatagcgcgtgtacaatccatcgcggactgtacactaaacatcaccataccaaccagtactatcatatggtgaccattccgagtggtgcaaggtcaattcggatttacgagatgaacgtgtctacctcatatatctctgtgcgcaatgccctaagaagatattaccttaacggccattggaccgtggactggccaggtcgctacaaattcagcggcacgacattcgattacaggaggtcatacaacgagccagagaacctgattgctaccggcccaaccaatgaaacactcatagtggagctcctgtttcagggacgcaacccgggtgttgcatgggagtacagtatgcctcggctcgggacggagaagcagccacctgcccagccctcctatacctgggcgattgtgcgttctgaatgctcagtgtcatgtggagggggacagatgaccgtcagggaaggctgttaccgggacttcctgtatttcatgttctacctctcccagctttttgcttctgagtgccccttcaaaaacacattgcttcatgcattcctgtgtaaatag

SEQ ID NO: 213440 - DNA, 3288 bp, synthetic construct
  misc_feature 1..3288: note = Description of Artificial Sequence: Synthetic coding sequence
  source 1..3288: mol_type = other DNA
atgtgtgatggcgctctgctgccacccttggtcctgcctgtactgctccttctggtgtggggactggatccaggcaccgcagttggagacgccgcagctgacgtggaagttgtgttaccttggagggtgaggccagatgatgtgcacctaccccctctgcccgctgcgccaggtcccaggcgcagacgcaggcctcgcacccctccagcagccccaagagcacgtcccggagaaagagcgctgctgctccacctcccagcctttggacgagacctgtacctgcagctccgccgagatcttcgttttttaagccgtggtttcgaggtggaggaggccggtgctgccaggaggcgtgggaggcccgcagagctgtgcttttactcaggtagggttctcgggcatccagggtcactcgtgagtctcagtgcttgtggagcagccggtggattggtaggactgatccagcttgggcaggagcaggttctgatccagcccctgaataattcccagggcccattcagcggcagagagcacctgatccgacggaagtggtctctgacaccgtcaccctccgctgaggctcagaggcccgagcagctctgcaaagtattgacagagaaaaaaaagcccacctgggggaggccctctcgggattggcgggagaggaggaacgccattcgattgacatccgagcacaccgttgagacactggtggtcgccgatgccgatatggtccaataccacggagcggaggccgcacaacggttcatcctgaccgtgatgaacatggtatacaacatgtttcagcatcagtccttggggatcaagataaacatccaagtcactaaattggtgctcctcagacagcggccagctaagctctctattgggcaccatggtgagagatctctcgagtccttttgccactggcagaacgaagaatatggcggagctcggtatctcggtaataatcaggtcccgggaggaaaggatgaccccccattggtcgacgcggctgtgtttgtgaccaggacggacttctgtgtgcacaaagatgagccctgcgatacagtgggcatagcatatctcggcggagtgtgctcagccaaaagaaagtgcgtgctagctgaggataacggcctgaatcttgcttttaccatcgcccatgagctgggccataatctcggaatgaatcacgatgacgatcactcctcctgtgcgggtagaagccatatcatgagtggagaatgggttaaggggagaaatccatccgacctgagctggagttcgtgttctagagatgatctcgaaaactttctgaaatccaaggtgtcaacctgcctgctagtgactgatccacgctcccagcacacagttagactgcctcataaactgcctggtatgcattattccgccaatgaacagtgccagatactgtttggcatgaacgcaacattctgcagaaacatggagcatctgatgtgcgcaggtttgtggtgtctggtggaaggggacacgtcatgtaaaaccaagttggacccaccgctcgacggcaccgaatgtggtgccgacaaatggtgccgggctggtgagtgcgtatcaaagaccccaatcccggagcacgtggacggcgactggtcaccctggggagcttggtctatgtgcagccggacctgtgggactggggcacgcttcaggcagaggaaatgtgataatccccctccagggcctggcggaacacattgtccgggagccagtgtcgagcacgcggtctgtgaaaacctgccctgcccaaagggtctgccatcatttagagaccagcagtgtcaggcccatgaccgactttcaccaaagaagaaaggccttctgacagctgtggttgtggacgataagccttgtgagctctattgcagccccttaggtaaggaaagccctctgctcgttgcggatcgcgtgcttgatgggacgccctgtgggccttatgaaacagatctgtgcgtccacggaaagtgccagaagatcggttgtgacggcattatcggttctgctgcaaaggaggacaggtgtggagtctgttctggggacggaaagacctgccatctggtaaagggcgactttagccatgccagaggcactgcgctcaaggattcaggaaagggtagcataaactctgactggaagatcgagttaccaggggagttccagatagccggaaccacagtacgctatgtcaggcgaggactatgggaaaaaatttctgctaaaggccctaccaaactgcccctccatctcatggtgctgctgtttcatgaccaagattatgggatccattatgaatacactgtgcccgttaacaggaccgctgagaaccagagtgaaccagaaaaaccacaggactccctgtttatctggactcactctggctgggagggatgctccgtacagtgcggtgggggagagagacgtactatagtgtcatgtactaggattgtgaataagaccactaccctcgtcaatgattcagactgccctcaggcctcacgccctgaaccgcaggtgcgaaggtgtaatctccacccttgtcagagtcgatgggtcgccggaccatggtcaccatgctccgcgacgtgcgagaagggatttcaacaccgggaggtcacttgtgtgtatcagctgcagaacggtacacatgtggccactcgccctctgtactgtcccggtccacgtcctgcggctgtgcagtcatgtgagggccaggactgtctctccatatgggaggctagcgaatggagccagtgttctgcaagttgcgggaagggcgtgtggaagcgcaccgtggcatgcacaaacagtcaaggcaagtgtgacgcaagcacacgcccaagggcagaggaggcttgtgaagactactctggctgctatgagtggaagacaggagattggtcaacttgttcaagtacctgtggcaagggtcttcagtctcgagtggtccaatgcatgcataaggtgactggcagacacggatctgaatgtcccgctttatctaagcctgctccatacaggcagtgttaccaggaggtatgtaatgaccgcatcaatgcgaacaccatcacatctcccagactcgctgctctaacctacaagtgtacccgtgaccagtggacagtttactgtcgcgtgattcgagagaaaaatctgtgccaggacatgcggtggtaccaacgctgctgccagacctgtcgagatttttatgctaacaaaatgcgccagccccctcccaacagttag

SEQ ID NO: 213441 - DNA, 3666 bp, synthetic construct
  misc_feature 1..3666: note = Description of Artificial Sequence: Synthetic coding sequence
  source 1..3666: mol_type = other DNA
atggaatgcgcactgctgctggcttgtgcatttccggctgcgggatctggcccaccacgcggattggctgggctcggtcgcgttgccaaggccctccagctgtgctgtctctgctgcgcaagtgttgcagcagcactggccagtgactctagtagtggggcatccgggctcaatgatgactacgttttcgttacaccagtggaggtggacagtgccggttcatatattagccacgatatcctgcacaacggcaggaagaaacgctctgctcagaacgctcgttccagcctacattaccggtttagtgccttcggccaggaactgcacctagagttaaaacccagcgctatcctgagcagtcactttatcgtgcaggtgctcggtaaggatggggcatctgagactcaaaaaccggaagtccagcaatgcttttaccagggctttatacgtaacgactcatcttccagcgtcgcagtctctacctgtgccggactctcggggcttatacgcaccaggaaaaacgagtttctcatctcccccctcccacagcttctggctcaggagcataactatagctcccccgctggccatcatccacacgtgttgtacaaaaggactgcggaagaaaaaatccagcgctacagaggataccccggatcagggagaaactaccccggatactcccccagccacattccacacgcttctcagtcacgagagacagagtatcaccatcgtcgcctgcagaagcaacatttctgcgggaggagaaagaagtacgcccctaagccccctactgaggatacttatctcaggtttgacgaatacggctctagtgggaggccgcgtaggtccgcaggaaaaagccaaaaagggcttaacgtggagacgctggttgtcgctgacaaaaaaatggtcgaaaagcacggcaagggcaatgtgaccacatatattctgactgtgatgaatatggtgagcggcctatttaaggatggcactatcgggtccgatataaatgtcgtggtcgtcagtctcatcctgctggaacaggaaccaggaggcttgcttataaaccaccatgctgaccagagtctcaacagcttctgtcagtggcagtcagccctaatagggaagaacggcaagcgccacgatcacgccattctcctcacaggtttcgatatttgtagttggaagaatgagccctgtgatactctcgggttcgccccaattagcggtatgtgttcaaaatatcggtcatgtaccattaacgaagataccggactgggtttagcattcaccatcgcacatgagtctgggcataatttcgggatgattcacgatggcgaggggaatccgtgtcgcaaggccgagggaaacataatgtctcccaccctgacaggcaataacggcgtatttagttggtccagctgcagccggcagtacctgaagaagtttcttagtacccctcaggctgggtgccttgtcgatgagccgaaacaagccggtcagtataaatatcctgacaaactgccaggtcagatttacgatgctgatactcaatgcaagtggcagttcggggctaaggcaaaactttgttccctggggtttgtgaaggacatttgtaagagcctttggtgccacagagtcggccacaggtgcgagaccaaattcatgcctgctgccgagggtacagtttgcggacttagcatgtggtgtcggcagggacagtgcgtaaaattcggcgagctgggcccacgtcccattcatgggcagtggtcagcctggtccaagtggtctgagtgctcacgaacctgcggaggaggtgtgaaattccaggagaggcactgtaacaacccaaagccccaatatggaggactgttctgccctggtagttccagaatttaccagctgtgtaatattaatccctgtaatgagaacagtctcgacttcagagcccagcagtgtgccgaatacaattccaaacccttccgcggttggttttaccagtggaagccatataccaaggtcgaagaggaagacaggtgcaaactgtactgtaaagctgagaacttcgaatttttcttcgccatgtccggcaaagtcaaagacggaaccccctgttctccgaacaagaatgatgtgtgtatcgatggggtttgcgaactcgtcggatgcgaccacgagttaggctctaaagccgtgagcgacgcttgcggagtgtgtaagggcgacaactccacctgcaagttctacaaaggcctatacttaaatcaacacaaggctaacgaatactaccctgtcgtcctcattcctgcgggagccaggagtattgaaatccaggaactgcaggtttcaagttcctacttggccgtcaggtctctgtctcagaagtattatctcactggaggctggtcgatcgattggccgggagagttcccattcgccggtacaactttcgagtatcagcggtccttcaaccgacccgagcggctctacgcacccggtcctactaacgagaccctcgtttttgaaatcctgatgcagggtaaaaatcccggaatcgcctggaaatacgcgttacctaaggtcatgaacggaacaccccctgccaccaaacgccctgcctacacatggagtattgtccagagcgagtgtagcgttagttgcgggggagggtatatcaacgtgaaggctatttgcttgagggaccagaacacccaggtgaacagctccttttgctcagctaagactaaacccgtgaccgagccaaagatctgtaacgctttctcatgccccgcttattggatgcccggtgaatggtctacatgttccaaggcttgcgcaggcggacagcagtcacggaaaattcagtgcgtgcagaagaaaccatttcagaaagaggaggccgtgctacacagcctgtgtcctgtgagcacaccaacccaagttcaggcctgtaactcacacgcgtgccccccacagtggagccttggcccatggtctcagtgcagcaaaacttgcggtagaggggtaagaaagagagaactcctgtgtaaggggtccgccgcagaaaccttaccagaatctcagtgcacatctctccctcgaccagaactgcaggagggttgcgtgctgggacggtgtcccaaaaactcccgtctccagtgggtggccagcagctggtcagaatgcagcgccacctgcggcctaggtgttcggaaaagagagatgaagtgtagcgaaaaaggttttcagggtaaactgatcacattcccagaacgaaggtgccgtaacattaagaaaccaaacctggatctcgaggagacttgcaatcggagggcctgccccgctcaccccgtctacaatatggtggccggttggtactccctcccctggcagcaatgtactgtcacttgtgggggaggcgtccagacacgatctgtccactgcgtgcagcagggcaggccaagtagcagctgtctactgcaccaaaagccaccagtcctgcgcgcatgcaacacaaatttctgccctgccccagagaaaagagaggacccttcatgcgttgacttctttaactggtgccatcttgttccacagcatggagtctgcaatcataagttttacggtaagcaatgctgcaagtcctgcaccagaaaaatttag

SEQ ID NO: 213442 - DNA, 825 bp, synthetic construct
  misc_feature 1..825: note = Description of Artificial Sequence: Synthetic coding sequence
  source 1..825: mol_type = other DNA
atggagtgcgctctactcctcgcatgcgcattccccgcagctggaagtggccctccgagaggactagccggactcgggagggtggctaaggccttacagctgtgttgtctctgctgcgcatccgtggccgcagcactggctagcgattcgagtagcggagctagcggtctgaacgatgactatgtttttgtcaccccagtcgaggttgactctgccggaagctatatttctcacgacatcctgcataacggtcgaaaaaagaggagtgctcaaaatgcaagaagcagtttgcactacagattctcggcctttgggcaggagctgcacctggagctaaaacctagtgcgattctcagctcccacttcatcgtccaggtcctgggcaaggatggcgcatcagagactcagaaaccggaggtacagcaatgtttctaccagggtttcattcgtaatgacagttcttcttctgttgcagtctctacctgtgctggattaagcggcctgatcagaacccggaaaaacgagtttctcatctcccccctcccgcaactgcttgctcaggagcacaattactccagtccagccggacaccaccctcatgttctgtacaaacgtaccgccgaggagaagatccagaggtaccgtggatatcccggatcaggcaggaactatcctggctatagtccctcgcatatacctcacgcatctcagtcccgcgagacggaataccaccatagaagactgcagaaacagcatttctgtggcagacgcaagaagtgcatctgttcacaagctagtcaccgaggacacctgagtaaggtgtag

SEQ ID NO: 213443 - DNA, 3636 bp, synthetic construct
  misc_feature 1..3636: note = Description of Artificial Sequence: Synthetic coding sequence
  source 1..3636: mol_type = other DNA
atggacccccctgccggagccgctaggaggctgctctgccctgccctgttgctgcttttgctgctcctgcctccccctctgctgcctccgccacctcctcccgctaacgcgcgactagcagctgcagcggaccctcctggcggaccccttgggcatggcgcagaacgcattctggctgtgcctgtgcgaactgacgcccagggtcgtctggtgtcccatgtggtcagtgcagccacctctagagccggagtgcgggctaggagagctgctccagtgcgcacgcctagttttcctggaggcaacgaagaggaacccggaagtcacctcttctacaacgttactgtgtttgggagggatctgcacctgcgccttaggcccaacgcgcgtttggttgccccaggcgctactatggaatggcaaggggagaagggcacaactcgagtggagcccctgcttgggtcttgtttgtacgtgggcgatgtcgcaggtctggcagaggcttcctcagtagccctctctaactgtgatggactggcaggtcttattcgaatggaggaggaagagttcttcatcgaacccctagaaaaaggactggccgcacaagaggctgaacagggcagggttcacgtggtgtataggagaccacccacaagccctccattgggcggtccacaggcactagatactggtgcctcactagacagcctggactcactttcacgcgcactgggcgtgttggaggaacacgccaacagttctagacgcagagcacgaaggcacgccgctgatgatgattataatatcgaggtgcttctgggtgtggacgactccgtggtccaattccatggtaaagaacacgttcagaaatacctcctcacacttatgaacatcgtgaatgagatctatcacgacgaatctttgggggcacatatcaacgttgtgctagtgcggatcatcctcttaagctacggcaagtccatgtctctgatcgagatcgggaatccttcgcagtctttggaaaacgtgtgccgctgggcctatctccagcagaaaccggacaccgggcatgatgagtatcatgaccacgcaatatttctcacacgccaggattttggacccagcgggatgcagggatatgcgcctgttacagggatgtgtcatcctgtgaggtcttgtaccttgaaccacgaggatggcttttcatcagcctttgtcgttgctcatgaaacgggtcatgtgctcggaatggagcacgatggccagggcaacagatgtggggacgaggtccgtctcggatccatcatggcaccacttgtgcaggcagcgtttcaccgatttcactggtcgcgatgctctcagcaggaactcagtcgttatctgcactcttacgactgcctgctggatgatcccttcgcccacgactggcctgcattaccccagttaccaggcctccactactcaatgaatgagcaatgccggttcgacttcggattgggatacatgatgtgtaccgccttccggacattcgatccatgtaagcagctgtggtgctctcaccctgataatccttatttttgcaagacgaagaaaggccctccactcgacggaaccatgtgcgcccctggcaagcactgtttcaaaggccactgcatctggctcacccccgatattctcaagagggatggctcttggggcgcttggagccccttcggttcgtgctctagaacctgtggcactggcgtcaagttccgaacccgccagtgcgataatccccatccagctaacgggggtcgcacttgcagtggcctggcatatgatttccagctctgtagtcgccaagactgtcccgacagccttgccgactttcgggaggagcagtgccgccagtgggacttgtatttcgagcacggagatgcgcagcatcattggctaccacatgaacaccgggacgctaaagaacgttgccacctgtactgtgagagccgggaaactggcgaagtggtctctatgaaacggatggtccacgacggtaccaggtgctcttacaaggacgcgttcagtctctgtgtacgtggcgattgcagaaaggtgggctgcgacggagtgatcgggtcttccaaacaggaagacaagtgcggagtgtgtggcggtgacaatagccactgcaaggtggtgaagggtacatttacacggtctccaaagaaacatggctacattaaaatgttcgaaatccctgccggtgctcgacacctccttatccaagaggtggacgccacatcccatcacctagcagtgaagaatcttgagactggaaagtttatccttaacgaggagaacgatgtggacgcgtcatctaaaaccttcatcgccatgggcgtggagtgggaatacagggatgaggacggaagagagacccttcaaacaatggggcctctccatggcaccattactgttctagttatccctgtcggagatacacgggtcagcctgacctataagtatatgatccatgaagactcgttgaatgtcgacgacaacaatgtgctggaggaggattctgtcgtttatgagtgggcgctgaagaaatggtccccatgttcaaaaccatgcggcggagggagccagttcacaaagtatggctgccggagaaggctggaccataaaatggtccaccgtggcttctgtgccgcactatccaagccaaaggccattcggagggcttgcaatccacaggaatgtagccagccagtctgggtcactggggagtgggagccttgctcccaaacttgcgggcgaacagggatgcaggtgcgctcggtcaggtgcattcagcccttgcatgataacacaacacgcagcgttcacgcaaagcactgcaatgatgccaggccagagtctcgacgggcatgctcacgggagctgtgccccggtcgctggcgcgcaggaccctggtctcagtgctcagtgacttgcggaaacggtacccaagaacggccagtgctatgcagaacagctgacgatagcttcggaatctgtcaagaggagagaccagagacagcccgaacttgtcgcctggggccatgccctagaaacatcagcgacccctccaaaaagtcttacgtagtccaatggttaagccggccagacccagatagcccaattcgtaagatcagcagtaagggacattgtcagggtgacaagagcattttctgtcgtatggaggtgctgtcaaggtattgtagtatacctggttacaataagctgtgctgcaagtcctgcaatctgtacaacaatctgacaaacgtcgaaggacgaatcgagccgccacccggaaaacacaacgatatagacgtatttatgcctaccctgcccgtgccaacagtcgcaatggaggtcagaccgagccccagcacaccactagaagtgccactaaatgcaagttcaacaaatgcaactgaagatcatcccgagaccaacgcggtggatgagccatataaaattcatgggctggaagacgaggtgcagccgccaaatctcattcctcggagacctagcccttacgagaagaccagaaaccagcggattcaggagctgatcgatgagatgagaaagaaagaaatgctcggcaagttttag

SEQ ID NO: 213444 - DNA, 1701 bp, synthetic construct
  misc_feature 1..1701: note = Description of Artificial Sequence: Synthetic coding sequence
  source 1..1701: mol_type = other DNA
atggatccaccagcaggcgctgctcggcgactgctttgtcctgcactcctcctcctgctccttttgctgcccccaccactgctcccccctcctcccccacctgctaatgcccgacttgcagcagcggcagatcccccagggggtcctttagggcatggtgccgaacggatccttgctgtaccagttagaacggatgcccagggacggctggtgagtcacgtggtgtcagccgctacatctagggctggggtgcgagccaggcgcgctgctccggtgaggacaccttcatttccaggagggaatgaagaggagcccggttcccacctgttctacaacgtaaccgtgtttggtcgcgatctgcatctgcgccttcgcccaaacgctcggcttgtagcgcctggcgcaacgatggaatggcagggagagaagggaaccacgcgggtggaaccacttctgggaagctgcctgtatgttggcgacgtggcgggactggctgaagctagttccgtggccctgtctaattgcgatggcctggcaggactcataagaatggaagaggaggaatttttcattgaacccttagagaaaggtctggcagcccaagaggccgagcaagggagagtgcacgttgtgtaccgcagacccccaacctccccccctcttggcggaccacaggccctggacactggagcaagccttgattccctggactcactgtctcgagccttaggggtgcttgaagagcacgctaattcttctcgacgtcgcgcacgacggcatgcagctgatgacgactacaacatcgaggtgctgctgggagtagacgacagcgtcgtgcagtttcatggaaaagagcacgtgcagaaatatcttctcacgctgatgaacatcgttaacgaaatttatcacgatgaatcactgggcgctcacattaatgtagtgctggtccgcattatccttttgtcttacggcaaaagcatgtcacttatcgagattgggaatccctcacagagcttagagaacgtctgtcggtgggcatacctgcagcaaaagccagatactggccacgacgaatatcatgaccatgcaatttttttaacgcggcaggacttcggcccatctggaatgcagggatacgcccctgtgactgggatgtgccaccccgtacgctcttgcacactcaatcacgaggacggcttctcttccgctttcgttgtcgctcatgagacaggccacgtgctcggcatggagcatgatggacaggggaatcgctgcggggatgaagtcaggctaggatcgattatggctcccctcgtacaggctgcattccaccgtttccactggtcccggtgcagccagcaggaactcagtaggtacctgcactcttacgactgcctgttagacgatccatttgctcacgactggccagcacttcctcagctgcctggactgcattactccatgaacgagcaatgccgcttcgacttcggtctgggctacatgatgtgcacagcatttaggacttttgatccatgtaaacagctctggtgcagccatccagataacccttacttttgcaaaactaaaaagggaccaccccttgacggcaccatgtgcgcccctggtaagtttaggcctggggctgtagcccacgcttgttatccttccactctaggcggacaaggaaggtggattgcttag

SEQ ID NO: 213445 - DNA, 4515 bp, synthetic construct
  misc_feature 1..4515: note = Description of Artificial Sequence: Synthetic coding sequence
  source 1..4515: mol_type = other DNA
atgtgggtcgcgaagtggctgacggggctgctttaccacttgtccttgttcatcaccagaagctgggaggtggactttcatcccaggcaagaagctcttgtcaggactctgaccagctacgaggtggtcatcccagagcgggtcaatgagtttggcgaagtgttccctcagtctcaccatttcagcaggcagaagcgctcaagcgaagcactcgagcctatgccttttaggacgcattaccgcttcacggcttatggacagctgttccaactgaacctcacggccgatgcatctttcctcgccgctggttacacagaagttcacctgggcacaccagaacggggagcctgggagtcagacgccggaccctccgacctgagacattgcttttacagaggccaagtgaacagccaggaggactacaaggccgtggtgagtctctgtgggggattgaccgggacgttcaagggccagaacggagaatatttccttgagccaattatgaaggctgatggtaatgaatatgaggatggccataacaaaccgcacctgatctacagacaggatcttaacaatagctttctgcagactttgaagtattgtagtgtgtccgaaagccagattaaggagacatcacttccattccacacgtattcaaacatgaacgaagacctcaacgtaatgaaagaacgagtcttgggccacaccagcaaaaacgtgcctctgaaagatgagaggagacatagcaggaagaaaagactcatctcttatccaaggtatattgaaatcatggtaacagcagacgctaaagtcgtctctgcccacgggtcaaatcttcagaattacatattgacccttatgtccattgtggccacaatttataaggaccctagcattgggaatctgattcacattgttgtggtaaagctggtgatgattcacagagaggaggaggggcctgtcataaacttcgatggcgctacaactctgaagaacttctgcagctggcagcagacacagaacgatctcgacgatgttcaccctagccaccacgatactgcagttctgattacacgagaggacatctgcagctccaaagagaaatgtaatatgcttggactttcttacttgggcacaatctgtgatcctctccagagttgtttcatcaatgaggagaagggcttgatctcggcgttcaccatcgctcacgagctggggcacaccctcggagttcagcatgacgataacccaaggtgcaaggaaatgaaagttaccaaataccacgtgatggccccagccctctcattccacatgtccccctggagctggagtaactgcagcagaaagtacgtgaccgagttcctcgataccggttacggagaatgcctgctggacaaaccggacgaggaaatttacaacctaccctccgagctgcccggtagcaggtacgatggtaataagcagtgtgagctggccttcggccctggttcacagatgtgcccccatattaatatatgcatgcacctgtggtgtacaagcactgagaaactgcacaaaggttgtttcactcagcacgttccaccagccgacggcacagattgtggacccggaatgcattgcaggcacgggttatgcgtaaacaaggagaccgaaaccagaccagtcaatggtgagtgggggccatgggaaccgtactccagctgctcacgaacatgcgggggagggatcgagtcagctactaggaggtgcaatagacctgagcctagaaatggcggtaactactgtgttggtagaaggatgaaatttcgatcctgtaatacagactcatgccctaaaggcacccaggactttcgagaaaaacagtgctccgactttaacgggaagcacttggacatctccggtatccctagcaacgtgcgttggctcccgcgatattccggcataggcacgaaagatcggtgtaagctctattgccaggttgctggaaccaactatttttatctgcttaaagatatggtggaagacggaacaccctgtggaactgaatcttacaatattgactgcaactgcgttctcaaggccgcagggtgcgatcacgttttgaacagcagtgccaaaatcgataagtgtggcgtgtgcggaggtgacaactcctcatgcaagactataaccggggtattcaattccagccactatggctataacgtggtggtcaaaataccagctggcgctaccaacgttgacattaggcaatattcatatagcggccagccagacgactcttacctggccctgtccgatgcagaggggaacttcctgtttaacgggaactttctgctctctacatcaaagaaagaaataaacgtgcaaggcaccagaactgtgattgaatactcagggtctaataacgcggtcgagcgcatcaattctactaacaggcaagagaaggaaatacttatcgaagtcctgtgcgtaggcaatctgtataacccggacgttcactatagcttcaatattccactggaagaaagatctgatatgtttacatgggatccatatggtccctgggagggttgcacaaaaatgtgtcaaggtctccagcgacgcaacataacctgcattcacaagagcgaccatagcgtggtttctgacaaggaatgtgaccacctgccccttccgtcattcgtcacacaatcatgcaacacggattgcgagcttcggtggcacgtgattgggaaatctgaatgttcctcgcaatgtgggcaggggtatagaacacttgatatccactgtatgaaatactcaatccatgagggacagaccgtgcaggtggatgatcattattgcggagaccaacttaaacctcccacccaggaattgtgccatggcaactgtgtgtttactaggtggcactattcagaatggagccagtgtagccgcagctgtggaggcggtgagagaagtcgcgagtcctactgcatgaacaacttcggccaccgcttggcggacaacgagtgccaggagctgtcacgtgtgactcgagagaattgcaatgagttttcttgccccagttgggccgcaagtgaatggagcgaatgtctagttacctgtggtaaaggcaccaagcaacgccaggtgtggtgtcaactgaacgtcgatcacctgtccgacggtttttgcaatagctcaaccaaacctgagagcctctcaccatgtgagctccatacctgcgcttcatggcaggtgggtccatggggcccttgcaccactacgtgcggacatggttatcaaatgagagatgtgaagtgcgtgaacgaactggcatccgccgtcctggaggatacggaatgtcacgaggcttcacgacctagtgacaggcagagttgtgtgctgaccccctgtagcttcatcagtaagttggaaacagctttgctgccaaccgtcctaataaaaaagatggctcaatggcggcacggctcctggaccccatgttccgttagttgtggcaggggaactcaggcccgatacgtgtcatgcagggacgccctggaccgcatcgccgatgagtcttattgtgcacacctgccccgacctgcagaaatctgggactgctttactccttgtggagagtggcaagccggtgactggagtccttgcagtgctagctgcggtcatggtaagactacgcggcaggtactctgcatgaattaccaccaaccaatcgacgagaactattgtgatccagaggttaggcctctaatggaacaggagtgcagcctcgccgcttgcccaccagcccacagccacttccctagctccccagtgcagccttcctactacttatcaactaatttgcctctcacacagaagttagaagacaacgagaatcaggtggttcacccctccgttcgcggaaaccagtggaggaccgggccttggggaagttgctcctcctcatgtagcggaggccttcagcaccgggctgtagtgtgccaagacgagaacgggcagtccgcctcatactgtgacgcagcatcaaaacctcccgaacttcagcaatgtggccctgggccatgtcctcagtggaactatggaaactggggggagtgctctcagacctgcggcggagggataaagtcgcgtctggtcatctgccagtttcccaacggccagatcctagaagaccacaattgcgagatcgtgaataagccccctagcgtcattcagtgccatatgcacgcttgtcctgccgatgtgtcttggcatcaggagccctggaccagtgaggatctgaaggtgaagttgcttccccagcggactataatattgtgggaactgatgaaaaacattttctgtcacggcaagcactcacacatgtatctgatcaatgtggtgaccgatcatctcctgtaccctcgccactgtgatccagagacgattgaaacatacttcttaagcctgtggagtcttcagttcacctggggcgatctgaaatattacaagaattcactgtag

SEQ ID NO: 213446 - DNA, 5732 bp, synthetic construct
  misc_feature 1..5732: note = Description of Artificial Sequence: Synthetic coding sequence
  source 1..5732: mol_type = other DNA
atgtgggttgccaagtggttaacagggctgctttatcatttgtctctgttcataacacggtcctgggaggtagattttcatcccagacaagaagctctagtacgcacactgaccagctacgaggtggtgataccggagagagtgaacgaatttggcgaggtatttccccaatctcaccatttctcgcgccagaaacggagctctgaggcccttgagcctatgccctttaggacccattacaggtttacggcgtatgggcagctgttccagctgaacttgaccgcagacgctagctttctcgccgcaggatacacggaagtgcacctcggaacacctgaaaggggcgcttgggaaagcgatgcaggaccctccgacctccggcattgcttctatcgaggacaggttaatagccaggaagactataaagcggtcgtctctttgtgtgggggactcactgggacatttaagggccagaacggggagtactttctcgaacctattatgaaagcagacggcaacgagtacgaagacgggcataataaacctcacctgatttatcgccaagatcttaacaacagcttcttacaaactctgaagtattgtagtgtgtcagagtcacagattaaggagacctcactgcccttccatacatatagtaacatgaacgaagacctgaacgtgatgaaagagcgcgtcttgggacacaccagcaaaaatgtgccactgaaggacgaaagaagacatagccgtaaaaagagactcatttcttaccctagatacatcgagattatggtcacagcagatgccaaagtcgtctctgcccacgggtcaaatctgcagaattatattctgactttgatgagtattgtcgcaaccatttataaagatccatccataggaaatctcattcacattgttgtcgtcaagcttgtaatgattcacagggaagaagagggccctgtgatcaattttgacggagccactaccctcaagaacttttgtagttggcagcagactcagaatgatctggatgatgtacatccctcacaccacgacaccgctgtgttaatcacaagggaagatatttgttctagtaaagaaaagtgcaacatgctcgggctgtcctatcttggtactatctgcgacccactacagtcatgcttcattaacgaggaaaaggggctgataagcgcatttaccattgcccacgaattaggacacactctgggcgtacagcacgatgacaatcctaggtgcaaagagatgaaagtgacgaaatatcacgtcatggcgcctgccctgtcattccacatgtctccatggagctggtccaattgttctagaaagtacgttactgagttcttggacaccggttacggagaatgtctcctcgataagcctgacgaggaaatttacaatctccctagcgaactgcccggatctcggtatgatgggaataagcagtgcgagctggcatttgggccaggcagtcagatgtgcccacacataaacatctgtatgcatttgtggtgtacttcaaccgagaagcttcacaagggctgttttactcagcacgttccaccggctgacggcacagattgcggaccaggtatgcattgccgacacggcctatgtgtgaacaaagagaccgagacaaggcccgttaatggagaatggggcccttgggaaccgtactcctcttgcagccggacgtgtgggggtggcatcgagagtgctacacgcagatgcaaccggccagagcccaggaacggtggcaactattgtgttggtaggcgcatgaagtttcgcagctgcaatacagattcctgtccaaagggcacccaggacttccgagaaaagcagtgttcagattttaacggaaagcacttggacatctctggcattcccagtaatgtgaggtggctgcctcggtacagtgggatcggtactaaggaccgctgcaagctgtactgccaagtggcgggaactaactatttttatctgttgaaagatatggtagaagacggtacaccctgcggaaccgaaacgcacgacatttgcgttcagggccagtgcatggctgccggatgcgatcacgtcctcaattctagcgcgaagatcgataaatgcggcgtgtgtggcggagataacagttcatgcaagacgatcactggagtgtttaactcctctcactacggctacaacgtggtggttaagataccagctggcgcaacgaatgtggatatcaggcagtattcttactccggccaacctgacgattcctacttggcgcttagcgatgctgaagggaattttctgttcaacggaaactttcttctcagtaccagtaaaaaggagattaacgtgcagggcacgaggaccgtcattgaatactcaggcagcaataatgccgttgagaggatcaatagcaccaacagacaggagaaggagctgatcttgcaagtcctgtgcgttggaaatctgtacaaccctgatgtccactacagcttcaacattcctttagaagaacgctccgacatgttcacttgggatccatacggtccatgggagggctgcaccaagatgtgtcagggcctccaaagaaggaatatcacatgcattcacaaatctgatcacagcgtcgttagcgataaagaatgcgatcatctccccctgcccagcttcgttacacagtcctgcaacaccgactgcgagctcagatggcacgtgatagggaagtctgagtgttccagccagtgcggacaggggtataggaccttagacatacactgtatgaagtattctattcacgagggccagacggtacaggtggacgaccattactgtggagatcagctcaagcccccaacgcaggaactttgccacgggaattgtgtgtttacaaggtggcactactccgaatggtcccaatgctcacgaagctgtggcggaggcgaacgatcaagagagagttactgtatgaacaactttgggcaccgactggccgacaacgagtgccaggaactgtcccgcgtgactagagagaattgtaatgagtttagctgcccatcatgggctgcttcggagtggtcagagtgcctggttacctgtggcaaaggtacaaagcaacgccaggtgtggtgccagttaaatgtggatcacttatcggatggattctgcaacagttctaccaagcctgaaagcctgagcccttgtgagctgcacacctgcgctagctggcaggtgggtccgtgggggccttgcaccactacatgtggccacggttaccaaatgcgtgatgtgaaatgcgtgaacgagttggccagcgccgtgctagaggatactgaatgccacgaagcgtcacgcccatcagatcgtcagagctgcgtcctgaccccatgtagtttcatcagcaagcttgagactgctttattgcctaccgtgctgattaaaaaaatggcccagtggagacacggcagttggaccccttgcagtgtgtcctgcggcagaggaacgcaggcaagatatgtgtcctgccgcgacgctctggacaggatcgcagacgaatcatactgcgcccatttacccaggccagcagagatctgggactgtttcacaccttgtggggaatggcaggccggagattggtctccctgctccgcaagctgtggacatgggaagaccacacgccaagtcctctgcatgaattaccaccaaccaattgacgaaaactactgcgaccctgaggtgcggcctctgatggagcaagaatgctcgctggcagcctgtcccccagctcatagtcacttcccttccagtccagtgcagccgagctactacctgagcacaaacctgcccctgactcagaagttggaagacaatgaaaaccaggtcgtgcatcctagcgtccgcggaaaccagtggcgcaccgggccatggggctcatgcagctctagttgttctggtggccttcaacatcgggctgtcgtgtgtcaagacgaaaatggacaaagcgctagctactgtgatgccgctagcaaaccacctgagttgcaacaatgcggacccggaccatgtccccaatggaattatggcaactggggagagtgctcccaaacttgcggagggggaattaagagtcgattggtcatttgtcagtttcccaacggacagatactcgaggaccacaactgcgagatcgtgaacaagccgccatctgtcatccagtgccacatgcatgcatgcccagccgacgtttcctggcatcaagagccctggactagctgcagtgcgtcctgcggaaaggggaggaagtacagagaggtgttctgtatcgaccagttccagaggaaactggaggataccaattgtagccaggtccaaaagccacccacgcacaaggcctgtagaagtgtccggtgtccgtcctggaaagcgaactcctggaacgaatgctccgtgacctgcggcagcggagtccagcagcgagatgtgtactgtcggctgaaaggcgtcggacaggtggtcgaggagatgtgcgatcagagtaccagaccctgctcccagaggcgttgttggtcccaggattgcgtgcagcataagggaatggagagaggtagactgaactgtagcactagttgtgagcgaaaggatagccaccaaaggatggagtgcacggacaaccaaattcgccaagttaacgagattgtttacaattcctccaccatctccttgactagcaagaactgccgaaacccaccctgcaattacatcgttgtgaccgctgatagcagccaatgcgccaataattgtggtttttcttatcgacaacgtatcacatactgtactgagataccatcaacaaagaaacacaagctgcataggcttcggcctatcgtctaccaagagtgtccagtcgtgccatcttctcaagtgtatcaatgtattaactcctgtctccatctggccacttggaaggtgggcaaatggtctaagtgctctgttacgtgcggcatcgggatcatgaaaaggcaggtgaaatgtataacaaagcacgggctctcgtcggatttatgcttaaatcatctcaagcccggtgcgcagaagaaatgctatgctaatgattgtaaatccttcaccacatgtaaggaaattcaggtcaaaaaccatattagaaaagatggggactactacctgaatattaaggggagaattataaaaatttattgcgccgacatgtacctagagaaccccaaggagtatctgaccttggtccaaggggaagagaacttctctgaggtctacggcttccggctgaaaaatccctaccaatgtcctttcaacgggtccaggcgcgaggattgcgagtgcgacaacggccatctcgccgcaggctatacggtgtttagtaagattagaatcgacctgactagtatgcagatcaagacgaccgacctactgttttctaagacaatctttggcaacgcagtgccattcgctactgcaggcgattgctactccgcgtttagatgcccacagggtcaattctccattaaccttagtggcaccggaatgaagataagctccacagcgaaatggctgactcagggcagttacacatctgtgtctattcggaggagcgaagacggtacccggttctttggcaagtgtggcggttattgtgggaaatgcctgcctcatatgacaaccggtctgcccatccaagtcatcta

SEQ ID NO: 213447 - DNA, 1869 bp, synthetic construct
  misc_feature 1..1869: note = Description of Artificial Sequence: Synthetic coding sequence
  source 1..1869: mol_type = other DNA
atgtttacctgggatccgtatggcccttgggagggttgtacaaagatgtgtcagggtttgcagcgacgcaatataacttgcatccacaaatccgaccattctgtggtaagtgacaaggagtgcgatcatctgcccttaccatcattcgtgactcagagttgcaatactgactgtgagttgcgctggcacgtcatcggaaaaagtgagtgttcaagtcagtgcgggcagggctatcgcaccctggacattcactgcatgaagtattccatccatgagggtcagactgtgcaagtggatgatcactactgcggggatcagctgaaaccgcctacccaggaactctgtcatggcaactgtgtgttcaccagatggcactattcagaatggagccagtgttcaagatcctgcggcggaggcgaaagatctcgcgagtcctactgtatgaataactttgggcacagactggctgataatgagtgtcaggaactgagccgcgtgacccgtgaaaactgcaatgaatttagctgccctagctgggctgcctcagagtggtctgagtgcctggtgacatgcgggaagggcacgaaacagaggcaggtgtggtgtcagcttaacgtggatcacctatccgacggtttctgcaacagcagtactaagccagaaagcctgagtccatgcgagctgcacacctgcgcttcctggcaggtggggccatggggcccatgcaccaccacatgcggacacgggtatcaaatgcgcgacgtcaaatgtgtcaacgagctcgcatccgccgtgttggaggatacagagtgccacgaggcctccagaccatctgatagacagtgttctgtatcctgtgggagaggcacccaggccagatatgtgtcctgcagagacgccctcgacaggattgccgacgaaagctactgtgctcatttgccccgacccgcagagatttgggactgctttaccccttgcggagagtggcaggcaggcgattggagcccatgttcagccagttgtggtcatggaaaaaccacccggcaggtactgtgcatgaactaccaccaaccaattgatgaaaattattgcgatcccgaagtgcgtcccttgatggagcaggagtgctccctagctgcatgcccacccgctcacagccactttccgtctagcccggtacaaccctcttactatctgagtaccaatcttccattaactcagaaactggaggataatgaaaaccaggtggtccacccttcagtgcgtggcaaccagtggaggactggaccttggggatcttgttcctcctcctgttccggaggtttgcagcacagagcagtggtgtgtcaggacgagaacggacagtccgctagttattgcgatgcagcctccaagccacccgaacttcaacagtgcggccctggaccatgtccccagtggaactacggaaattggggggaatgctctcaaacgtgcggagggggtattaaaagccggctggtcatctgccagttccccaacggccaaattctcgaagaccacaactgcgagattgtgaacaaacctcctagcgtgattcagtgtcacatgcacgcctgtcccgctgacgttagctggcaccaggaaccttggacctccgaagacctgaaagtcaaactgctgccccagcgtactatcattttgtgggaacttatgaaaaacatattctgccacggcaagcattctcacatgtatctcattaacgtggtgactgaccatctgttataccccaggcattgcgatccagagactatagaaacatattttctgtcgctgtggagtctgcagtttacttggggcgatctgaagtattataaaaatagcctgtag

SEQ ID NO: 213448 - DNA, 4515 bp, synthetic construct
  misc_feature 1..4515: note = Description of Artificial Sequence: Synthetic coding sequence
  source 1..4515: mol_type = other DNA
atgtgggtcgccaagtggctcacggggctgctgtaccacttgtccttgtttatcacacgcagctgggaggtcgacttccatcctagacaggaggctttggtacggaccctaacttcctacgaggtggtaattcctgaaagggtgaacgagtttggtgaagtgttcccgcaatcacatcacttcagccgccagaagcgctcttcagaagcgctcgaacccatgccatttcggacacactacagattcacagcctatgggcagctattccagctaaaccttacagccgacgctagcttcctggcagccggatacaccgaggtgcaccttggtactcctgaacggggtgcctgggaaagcgacgccggaccatccgacctgcggcactgtttctatcggggacaagtgaactcgcaagaagattacaaggccgtggtcagtttgtgcggtgggctgaccggcacttttaaggggcaaaatggggagtactttctagagcccattatgaaagctgacgggaatgaatatgaggacggccataataaacctcacctcatctacagacaagacctcaacaattctttcctgcagacattgaaatactgctccgtgagcgaaagtcaaataaaggagactagcctcccttttcatacttactctaacatgaatgaggacctgaatgtcatgaaggagcgggtgctggggcacacgagcaaaaatgtacccttaaaagacgaacgcaggcattctaggaagaaaaggctgatctcttatcccaggtacatcgagatcatggtcactgccgacgctaaggtggtgtccgcccacggttccaatcttcaaaattacatccttacacttatgtccattgtcgctactatttacaaggaccccagcatcggtaacctgatccatattgttgttgtgaaacttgtcatgatacatagagaagaggaggggcctgtcattaatttcgatggagcaaccaccttgaaaaatttctgctcgtggcagcagactcagaatgacctggacgacgtgcacccttctcatcatgacacggcagtgcttatcactcgggaggacatctgttccagcaaagaaaaatgtaacatgttaggcttatcttacttaggcaccatttgcgatccacttcagtcgtgtttcattaacgaagagaagggccttatttccgctttcacaattgctcacgagctgggccatacacttggcgtgcaacacgatgataacccacgatgcaaagagatgaaggtaactaaatatcacgtgatggcccctgccctgtccttccacatgagcccctggtcctggtcaaattgttcacgcaaatacgttacagagttccttgacactggctatggcgagtgtctgctggacaaacccgatgaagaaatttacaatctgccctccgagcttcccggatcccgatacgacgggaacaagcagtgtgagttagcgtttggaccaggcagccaaatgtgtcctcacattaatatctgcatgcatctctggtgtacctccactgagaagttacacaagggatgctttacccagcacgtgccccctgcagacgggaccgattgtggaccaggaatgcattgccggcatgggctctgcgttaataaagagaccgagacaaggccagtgaatggcgagtggggcccatgggagccttactcttcctgttccagaacctgcgggggagggatcgagtcagccaccagacggtgtaacaggcccgagccacgcaacgggggtaattactgcgtagggagacgcatgaaattccgcagttgcaatactgattcgtgcccaaaaggaacgcaggactttagagaaaagcagtgctctgacttcaatggtaagcatttagatattagtggaatcccatctaatgtccgctggttgccacgctattccggaattggaaccaaggatcgttgcaagttgtactgtcaggtcgcaggcacaaactacttttacctgctcaaggacatggttgaggatggcacaccttgtggcacagagacccacgacatctgtgtgcaggggcaatgtatggcggctggatgtgaccatgttctgaatagcagtgcaaagattgacaaatgtggcgtgtgtgggggagacaatagcagctgcaagaccattacgggcgtgttcaacagttcacactacggttacaatgttgtcgtcaaaatcccagccggagctacaaatgtggacattcggcagtatagctactctggccagccagatgacagttatctcgccttgagcgacgccgaggggaacttcttgtttaatggtaactttttgctaagtacatccaagaaggagattaacgtacagggtaccaggactgtcatcgagtattcgggttccaacaacgccgtcgagcggataaactccacaaaccgccaggagaaggagttaatcttacaggtgctgtgtgtgggaaatttgtacaatccagatgtgcactacagctttaacatacccctggaagagagaagtgacatgtttacctgggacccctatggtccctgggagggatgtactaaaatgtgccaaggcctgcagcgcaggaatatcacctgcattcacaaaagtgatcattccgtcgtttccgataaggagtgcgatcaccttcccctgccatcctttgtcacacagtcctgtaataccgattgtgaattacgttggcatgttatagggaaaagcgagtgcagctctcaatgtggccagggctaccggactttggacatccattgtatgaagtactccattcacgaggggcaaactgtccaagtggatgaccattattgcggagaccagctgaagccacccacccaggaactgtgtcatggcaactgtgtgtttacccgctggcattacagcgagtggtcccaatgttcgcgttcctgcggaggaggagagcgctcaagggagagttactgcatgaataatttcgggcatcgcctcgctgataatgaatgtcaggagctgtcacgggtcactagggagaattgcaacgagttttcctgccccagttgggcagctagtgagtggagcgaatgtctcgtcacctgtggtaaaggcacgaaacagcgtcaggtctggtgccagcttaacgttgaccatcttagcgatggtttctgcaattcatccaccaaacctgaaagtttgtcgccatgtgaactccatacttgcgctagctggcaagtgggaccttggggcccttgtaccacaacttgcgggcacgggtatcagatgagagatgttaaatgtgtgaacgagctagcctctgctgtgttggaagacaccgaatgccatgaggcatcaagaccatccgataggcagtcctgcgtattaactccatgctcgttcatcagcaaactcgaaacagctctgctgccgactgtcctaatcaaaaaaatggcacaatggcggcatggctcttggacaccttgttctgtaagctgtggcaggggtactcaggctcgctacgtgagctgccgggacgcgctcgaccggatcgcggacgagtcatattgtgcccacctgcctaggcctgccgaaatctgggactgtttcactccatgcggcgaatggcaggccggtgattggagtccttgctctgccagttgtggacatggcaagaccacgagacaggtattgtgcatgaactaccaccagcccatcgacgagaattattgcgacccagaagttagaccactgatggagcaagaatgcagtttagcagcatgtcccccagctcatagtcactttccatcaagccctgtgcagccgagctattatctgtccacaaatctgcctctgacacaaaaattggaggataatgaaaatcaggtggttcacccttcagtgcgcggaaaccaatggaggactggtccctgggggagttgctcgagcagttgttcagggggactgcagcacagggccgtggtttgccaggatgaaaacggacaatccgcgtcgtactgtgatgcagcttctaagccccctgagcttcagcagtgtggcccaggcccttgcccccaatggaactatgggaattggggcgaatgttcacagacctgcggcggaggaattaagtctcgactggtgatttgccagttcccaaatggacaaatcttggaggaccacaattgcgaaatcgtgaataaacccccttctgtgatccagtgccacatgcatgcctgccccgctgatgtgtcctggcatcaggaaccttggacctcagaggatctcaaggtcaaactgctcccccagcgaacaataatcctctgggagctgatgaagaatatcttctgtcacgggaagcactctcacatgtacctaattaacgtcgtgactgatcacctgctttacccccgtcactgtgaccccgaaaccatagaaacttactttctctcactttggagtctacaatttacctggggcgatctcaagtattacaaaaacagtttgtag

SEQ ID NO: 213449 - DNA, 3618 bp, synthetic construct
  misc_feature 1..3618: note = Description of Artificial Sequence: Synthetic coding sequence
  source 1..3618: mol_type = other DNA
atggtgttgctctcattatggctgatcgccgcagccctggtggaggtgaggacaagtgccgacggacaggccggtaatgaggagatggtgcagattgatctgcccatcaagcggtatagagaatatgagctcgtcactccggtctccactaatctggaaggacggtacctgagccacaccctctccgcctcccacaagaaacggtctgctagggacgtctcttctaacccagaacagctgttcttcaacattactgcctttggtaaagacttccacttgagactgaagcctaacacccagctagtggctccgggagcagttgttgaatggcatgaaacgtccctcgtgcccggtaacatcacagatccgatcaataaccatcaacccggatctgctacatacagaatccgcaggacagagccacttcagaccaattgtgcctacgtaggcgatattgtggatattccaggaacatcagttgcaattagcaactgtgatggcctggcagggatgatcaagtcggacaacgaagagtactttatcgaacctttggagaggggcaaacaaatggaagaagagaaggggagaatccacgttgtgtacaaacgatcagctgtggaacaagcccctatcgatatgagtaaggattttcactatagagaatccgatctggaagggctggacgacctcggtacagtgtacgggaatattcaccagcaactgaacgagaccatgcgaaggagacggcacgctggagagaacgactacaatattgaagtcttgcttggcgttgacgacagtgtggtgcgtttccacggtaaggaacatgtgcagaactacctcctcactctgatgaacattgtgaacgagatatatcacgacgaaagtctcggggtgcacatcaatgtagtattggtgaggatgattatgcttggctacgcaaaaagtattagcctgattgagcgcggaaacccgtcccgttcgctggagaatgtgtgtaggtgggccagccaacagcagagatcagatcttaaccacagtgaacatcacgaccacgccattttcttgactagacaggattttgggcctgctggcatgcaaggatatgctccagtcaccggtatgtgtcaccccgttagatcgtgtaccctcaatcacgaggacgggttttcctccgccttcgtggtcgcccatgagaccggtcacgttctaggcatggagcacgacggacagggtaatagatgcggagatgaaaccgctatgggctctgtgatggccccactcgtccaggccgctttccatagataccactggtccagatgcagcgggcaggagcttaaacgctatatccatagttatgactgtctcttggacgatcccttcgaccacgattggccaaagcttcccgagttacctggcattaactattctatggacgaacaatgccggttcgactttggcgtgggatacaaaatgtgtaccgcctttaggaccttcgacccatgcaagcagttgtggtgctcacaccctgacaacccttacttttgtaagaccaagaaaggcccaccactggatgggaccgagtgcgctgccggtaagtggtgttacaaaggacactgtatgtggaagaatgccaaccaacagaagcaagacggcaattggggctcatggaccaagttcggatcttgtagtaggacgtgcggaacaggggttcgattccgcacaagacagtgtaataatcccatgcccatcaacggtggtcaggattgtcccggagtgaacttcgagtaccagctttgcaacacagaggaatgtcagaagcactttgaggacttccgggctcagcagtgtcagcaacggaacagtcatttcgagtaccagaacaccaaacaccactggctgccttatgagcaccccgacccgaagaaacggtgccatctttactgccaatccaaggaaacaggggacgtggcctatatgaagcaactggtacatgatgggacccactgctcttataaggacccgtactctatctgcgtcagaggggaatgcgtgaaagtggggtgcgataaggaaatcgggagcaacaaggtggaagataagtgcggagtctgcgggggagacaactctcactgccggactgttaaggggaccttcacaaggacacctagaaaactgggatacctgaagatgttcgacatcccacctggagcgcgacatgttcttattcaggaggatgaagcttctccacatatcctagccatcaaaaaccaagcaaccggccactacatcttgaatggaaaaggagaggaggccaagagtagaacttttatcgatcttggtgtagaatgggactacaacatcgaggatgacattgagtccctgcacacagatggaccacttcacgaccccgttattgtgctaatcatcccccaagagaacgacacaagatccagtcttacctacaagtatatcattcatgaggatagtgtgccaaccattaacagcaataatgtgattcaagaggaactagacacatttgagtgggccctgaagtcatggagccagtgttccaagccatgcgggggagggttccagtatacgaaatatgggtgtcggaggaagtccgacaataaaatggtgcaccgatcattctgcgaagccaataagaagccgaagccaataaggcgtatgtgtaacatccaggagtgcactcaccctctgtgggtcgctgaagaatgggaacactgcactaagacatgcgggtctagcggttatcagctccggacagtaaggtgcttgcagccactgctggacggcacaaatcgcagcgtacattccaagtactgtatgggtgaccgcccagaatcccggagaccatgcaatcgagtgccctgtcctgcccagtggaaaacgggcccatggtcagaatgcagcgtgacctgcggagagggcaccgaggtccggcaggtcctgtgccgggctggagaccattgcgacggcgaaaaacccgaatcagtgcgggcttgccagctgcctccctgcaatgatgaaccctgtctgggtgacaagtcaatattttgtcaaatggaggtcctggcgaggtactgtagcattcctggttataacaaattgtgttgcgaatcctgctcaaaaagatctagtacactaccacccccatatctccttgaggccgctgaaacacatgacgacgttatcagcaatccttcagatctaccccgatctttagtgatgcctaccagtctggtaccctaccattctgagaccccggctaagaagatgagtctgtcatctatttcgtctgtgggtgggccaaacgcctatgctgcctttagacctaatagtaaaccagacggcgcaaacctgcggcaaagatcagcccagcaggccggatcaaaaaccgtgcgactggtcacagttccttcaagccctcctaccaaacgagtgcacttgtcctccgcaagccagatggccgcagcaagcttttttgcagcctccgactcaataggtgctagctcacaggccaggacgagcaagaaggacggaaaaattatagataatcggaggcccactcgctcctctacgttggagagatag

SEQ ID NO: 213450 - DNA, 1020 bp, synthetic construct
  misc_feature 1..1020: note = Description of Artificial Sequence: Synthetic coding sequence
  source 1..1020: mol_type = other DNA
atgagccagacgggtagccatcctggaaggggcctggcgggacgatggctgtggggggcacagccctgcctgctccttcccattgtgcctttgagttggctcgtatggctgctgctgctccttttagcatcactgttgccgtccgcccgactggcaagcccccttccgcgagaggaagagattgtgtttccagagaagttaaacggctccgtcctgccagggagtggcgcacctgcaaggttgctttgcagactgcaagccttcggcgagacactgttgctagaactggaacaggactctggggtgcaggtggagggcctgaccgtccagtatttgggccaagcccctgaactcctggggggtgctgaacccggaacttacctcactggaaccattaatggcgacccagaaagcgtggcttccttgcactgggacggcggagccctcctaggagtgctccaatacagaggcgctgaactgcatcttcagccactagaagggggtactcctaattctgcgggagggcctggcgctcacattctgcggagaaagagcccagcaagcggacagggacccatgtgtaatgtcaaagcccctctgggatctccttcgccgcgaccccgtcgcgctaagaggttcgcaagtctcagccgcttcgtggagaccctagtggtcgctgacgataaaatggccgctttccacggcgctggtctgaaacggtatctcttgacagtgatggccgctgcagccaaggcatttaaacatcctagcattcgcaacccagttagcctggttgtgacgaggctagtcatcttgggaagcggcgaggaagggccacaggttgggccttcagccgcacagacgcttcggtctttttgtgcctggcagcgcggactaaatacccctgaggacagcgatcctgaccactttgatacagctattctgttcaccagacaagttagacctcaaagcgcgcctcaggctatgcattgcacaatcctgcgttctgcaaccacttag

SEQ ID NO: 213451 - DNA, 2514 bp, synthetic construct
  misc_feature 1..2514: note = Description of Artificial Sequence: Synthetic coding sequence
  source 1..2514: mol_type = other DNA
atgtctcaaaccggtagtcacccgggtagaggattggccggaaggtggctctggggcgctcagccctgcctgcttctgccaatcgttcctcttagctggctggtgtggctgcttctcctgctgttagccagcctgctgccctccgctcggctagccagtccactgcctcgagaggaggagatcgtctttcccgagaaactcaacggctcagtgttacctggcagtggtgctccggctcgcttgttgtgcaggttgcaggctttcggtgaaacacttctactcgagttagagcaggactccggcgtacaggtggaggggctgacagtacagtacttaggacaggccccagagctactggggggtgcagagccaggcacttatctcactggaactattaatggtgaccccgaaagcgtggcgtcacttcactgggacggcggagcactgctgggggttctgcagtatagaggagccgaactgcatctccagccgttggaggggggaacacctaatagtgcgggtggccctggggctcatatattacggaggaagtcaccagcctctggccaaggacctatgtgtaacgtgaaggctcctcttggaagcccctcacccagacccagaagggccaagagattcgcgtcgctctcccgctttgtcgagaccctcgtggtcgccgatgacaagatggccgcttttcacggagctggcctgaagagatacctcctcacggtgatggccgctgcagccaaggcatttaagcaccccagcattcgcaaccctgttagtcttgttgtgaccaggctcgtgatcctgggcagtggcgaggagggaccccaagtcggcccaagtgctgcccaaaccctacgcagtttttgcgcctggcagagaggacttaacacacccgaggactcggatcctgatcatttcgatactgccattctttttactaggcaggatctgtgcggggttagcacttgtgacaccctggggatggcggatgtcggcacagtttgtgacccggctcgttcttgtgccatcgtcgaagatgacggcctgcaatccgccttcaccgctgcacatgagctggggcatgttttcaacatgctgcacgacaattcaaaaccgtgtatttccttgaatgggcctctttctacaagccgccatgtcatggcccctgtgatggcccatgtggatcccgaagagccctggtcaccttgttcagctcgcttcatcaccgattttctggacaatggctacggccattgtctgctggacaagcccgaggcaccattacatctacctgtcactttccccggaaaggactatgacgccgacagacaatgtcagctcacattcggtcccgattctcggcactgcccgcagctccccccaccttgcgccgcactctggtgctcagggcatctaaatgggcacgccatgtgtcagactaagcatagcccttgggcagatggcacgccttgtggcccagcccaggcctgtatgggaggcagatgtttgcacatggatcaactgcaggactttaacattcctcaagcagggggatggggcccatggggcccatggggtgattgctctcgaacgtgtggcggtggtgtccagttttcttcaagggactgtaccagacctgtgcctcgtaacggaggaaaatactgcgagggaaggagaaccaggttccggtcatgcaatacagaggactgccccaccggctccgccttgaccttcagggaagaacagtgcgctgcctataaccatcggaccgacctgttcaagtcctttccaggcccaatggactgggtccctcgttacaccggtgtcgccccacaggaccagtgcaaacttacatgccaggcccaggccctgggctactattatgtcctggagcctcgggtggtggacggtaccccctgctcacctgacagctcttcagtctgcgtccagggaagatgtatccacgccggttgcgatcgcatcatcggctcaaaaaagaagttcgataagtgcatggtgtgcgggggagatggctcaggttgttctaaacagtcaggctccttccgcaagttcaggtacgggtacaataatgtcgtgactattcctgcaggagctacacacatattggtaagacagcagggcaatccgggacacagatccatctatctggccttgaaactcccggatggatcatacgcgcttaacggggagtatacactcatgcctagtcctacggatgttgtgcttcctggagccgtgtcgctcaggtatagtggggcaaccgcagcctctgagacactctctggacatggcccattggcccagcccctgacgctgcaggtgctggtggctggtaatccacaagatacaagactccgatactcattcttcgtcccgaggcccacaccttctacgcccaggcctacgccccaagactggctgcaccgtcgagcccagattttggaaattttaagaaggcgcccttgggctggacgaaaatag

SEQ ID NO: 213452 - DNA, 2793 bp, synthetic construct
  misc_feature 1..2793: note = Description of Artificial Sequence: Synthetic coding sequence
  source 1..2793: mol_type = other DNA
atgttattaggatgggcctcactcctgctgtgcgcctttcggcttccattggctgccgtgggccctgcagccaccccagcacaagacaaagctgggcagcctcctactgccgctgcagcagcccagcctaggcggagacagggggaggaagttcaggagcgtgctgagcctccgggtcacccccaccccctggcccagaggagacgctccaaggggctcgttcaaaatattgaccagctctactcaggcggaggcaaagtagggtatttggtgtacgccggaggacgccgatttctgctggacctggaacgggacggttctgtgggtattgctggtttcgtaccagctggaggtggaacatccgcaccatggaggcacaggagtcactgtttctacaggggtaccgttgacgggagtcctaggtccttggccgtctttgatttatgcggcggtcttgacggctttttcgcagtaaagcacgctcggtataccctgaagccgctcctaaggggcccttgggccgaggaggaaaaaggtcgagtttacggggatggatccgctagaattcttcacgtgtacaccagggaaggattcagtttcgaagccttgcccccaagagccagttgtgaaactcccgcttccacaccagaagcacacgaacacgccccagctcactcaaatccttctggtagagccgctttggcctcccagttgttggatcagtctgctctttcacctgccggaggttcaggaccacaaacctggtggaggagacgaaggagatccataagcagggcgcgacaggtagaactgctccttgttgctgacgccagtatggcacggctgtacggtcggggtctgcagcattaccttctgacccttgcatccattgcgaatcggctgtatagccacgcgagtattgagaaccacattaggcttgcggtggttaaggtggtcgtgctcggcgataaggacaagagcttggaggtgagcaagaatgctgctaccaccctgaaaaatttttgtaaatggcagcatcagcacaatcaactcggcgacgaccatgaagagcactacgacgccgcaattctctttactcgggaggacctgtgtgggcaccactcatgcgacactttgggaatggctgatgtgggaactatctgctccccagaacgctcttgcgccgtgattgaggacgatggactgcacgccgctttcacagtagcacatgagattggacacctgctggggctgtcacacgacgactctaagttctgtgaggagacctttgggagtacagaggataagaggctgatgtcctcaattttaacaagcatcgacgcctcgaagccttggtccaagtgcaccagcgcgacaatcaccgagtttcttgatgacggtcacggaaactgtctgttagatctgcccagaaagcagatcctgggcccagaagagctgcctggccagacctacgatgccacccaacaatgtaatttgaccttcggccctgagtactctgtgtgtccaggcatggatgtctgcgccagactgtggtgcgccgtcgtacgacaggggcagatggtttgtcttacaaaaaaattgccagcagtggaggggaccccctgcggcaaaggaagaatttgtttacagggtaaatgcgtagacaaaaccaaaaagaagtactactctacctcctcccatgggaactgggggtcctggggcagttggggccaatgcagcagaagttgcggaggcggagtgcagtttgcctatcgtcactgtaacaatccagccccaaggaacaatggtaggtactgtactgggaagcgggctatatatcgatcctgcagcctgatgccatgcccacctaacggcaaatcttttagacacgaacagtgcgaggccaagaacgggtaccagtctgatgctaagggggtgaaaacctttgtcgagtgggtgcctaagtacgcaggggttctgcctgcagacgtgtgtaaactcacatgccgcgctaagggaactgggtattatgttgtcttctcccctaaagtgactgacggaaccgaatgcagactttattctaacagtgtctgcgtgcgaggaaaatgcgtgcgtaccgggtgcgacggcatcatcggctctaagcttcaatacgacaaatgtggcgtgtgcggaggcgataactcttcttgtactaagatcgtgggtacctttaacaaaaaaagcaagggttataccgatgtggtgcggataccagagggtgccacgcacattaaggtaagacagttcaaggcaaaggatcagaccaggtttaccgcgtacctggcgctcaaaaagaagaacggcgagtacttaattaacggcaagtacatgatctcaaccagtgagacgatcatagacataaatggcacggtgatgaactattcagggtggtcccacagggacgactttttgcacggtatgggttacagcgcaactaaggaaattttgattgtgcagatactagctactgatcccacgaagcccctggacgtgagatattccttctttgtgcccaaaaaaagtactcctaaggtcaactcagtgacttcacatggcagtaacaaggttgggtcacacacatcccaaccacagtgggtaactgggccttggctggcctgctctcgcacatgcgacacgggctggcacactcgtaccgtccaatgtcaagacggtaaccggaaactggcgaagggatgtcctctgtcacagcgtccaagcgcttttaagcagtgcctcctgaaaaaatgttag

SEQ ID NO: 213453 - DNA, 2577 bp, synthetic construct
  misc_feature 1..2577: note = Description of Artificial Sequence: Synthetic coding sequence
  source 1..2577: mol_type = other DNA
atggagattctgtggaagaccctgacatggatacttagtctgattatggccagttccgagttccactcggaccaccgactgtcatacagcagtcaagaggaattcctaacgtacctagagcactatcagctcaccatacccataagagtcgatcagaatggcgcttttctgagcttcacagtgaaaaacgataaacactcacggcgacggaggtctatggatcccatagaccctcaacaagccgtttccaagctgtttttcaagctgtctgcgtatggaaaacatttccatctgaatctcaccctgaacacagacttcgtgtccaaacacttcactgtggagtattgggggaaagatggaccgcagtggaaacatgacttcttagacaattgccattatactgggtatcttcaagaccagaggtctacgacaaaggtggcccttagcaactgcgtcggtctgcacggggtcattgcaaccgaagatgaggaatatttcattgaaccattaaaaaatacgacagaggattctaagcatttttcctatgaaaacggacacccccatgttatctacaaaaagagcgctttacagcagagacacctgtacgatcacagtcactgcggcgtctcagactttacgcggtctggcaagccgtggtggttaaatgatacatctactgtaagttattctctgcccattaacaacactcatatacatcatcgacagaaaagaagcgtgagtatcgagcggttcgtggaaacactagttgtggctgataagatgatggtgggctaccacggaaggaaagatatagaacactatatcctgagcgtgatgaatatagttgctaagctctatcgcgacagctcgctggggaacgtggttaacatcatcgtggcccgtctgatcgtgctgaccgaggaccagccaaacttggagatcaatcatcatgcagacaagtctctggactccttttgcaaatggcagaagtctatactgagccaccagtctgacggtaatactattccagagaacggaatcgctcaccacgacaatgcagtcctgataactagatatgatatctgtacctacaaaaataagccttgcggaacattaggattggcaagcgtggctggcatgtgtgagccagaaaggagctgttccattaatgaggacattggtctgggtagcgcgttcacaatcgcccatgagatcgggcacaattttgggatgaaccacgatggcatcgggaactcttgtaggaaggtcatgaagcagcagtatggaagtagccactattgcgagtatcagtcattcttcctggtctgccttcagtctagattgcaccatcagcttagccgcgaggtttgtcgcgaactctggtgtttgagtaaaagcaaccggtgtgtcactaatagcatccctgcagccgagggcactctctgccagacaggcaacatcgagaaaggctggtgttaccagggcgactgcgtgcccttcggcacctggcctcagtctattgacgggggatggggcccttggtctctctggggcgaatgtagcaggacatgtggtggcggagtgagtagtagccttcggcactgcgattccccagctcccagcgggggtggcaaatactgcctgggagagcgcaagaggtacaggtcttgcaacaccgatccatgtcccctcggctcgagagatttccgcgaaaaacagtgtgccgacttcgataacatgccctttcgcggtaaatactacaactggaaaccatatactggaggtggagtgaaaccgtgcgctttgaactgcctagctgaaggttacaatttctacacagaaagagcccctgccgtcatcgacggtactcagtgcaatgccgattccctggacatctgtattaatggagagtgcaaacatgtgggctgcgataacattctggggtccgatgccagggaggacagatgtagggtgtgcggaggggacggaagcacttgcgatgccattgagggatttttcaatgactcactgccccgtggcggatacatggaagtggtgcagattcccagaggaagcgtgcatatcgaggtgcgagaggtcgctatgtcaaaaaactatattgccttgaaatcagagggggatgattattatatcaatggagcatggactatcgactggccacgaaaattcgatgtggcagggaccgcattccattacaagcggcctactgacgagcctgagtcactggaagctttgggcccaactagcgagaatctaatagtaatggtcctccttcaagaacagaacctaggaatcagatataaattcaatgtgcctattactcgtaccgggtctggggacaacgaggttggctttacttggaatcaccagccatggtccgagtgttctgccacgtgcgcaggtggaaaaatgcccactagacagccgacacagagagccaggtggaggaccaaacatatactgtcttatgccttatgtctgctcaagaaactgatcggcaatatcagctgtagattcgcaagttcctgcaaccttgcaaaggagacgctgctgtag

SEQ ID NO: 213454 - DNA, 3354 bp, synthetic construct
  misc_feature 1..3354: note = Description of Artificial Sequence: Synthetic coding sequence
  source 1..3354: mol_type = other DNA
atggaaatcctctggaaaactctgacttggatattgagcctcatcatggctagctccgaatttcatagcgatcaccgactaagctattccagccaagaagagttcctgacatatctggagcattatcagctgaccatccccatccgggtggatcagaatggcgcatttctcagcttcactgttaagaatgacaagcattcaaggcggcgaagatccatggatcctattgatccgcagcaagctgtctccaagctgtttttcaaattgagcgcctacggaaagcacttccacctcaaccttacgctgaacactgacttcgtgtccaagcactttacagttgaatactggggtaaggatggacctcagtggaagcacgattttttagacaattgccattacacaggatacttgcaggatcaacggtccactaccaaggtggcactgtctaattgcgtgggccttcacggtgtgattgccacagaagacgaggaatacttcatcgagcccttgaaaaacaccaccgaagacagtaagcatttcagctacgaaaacggacatcctcacgtcatctataagaaatccgcactccaacagcgtcatctgtacgatcactctcattgcggggttagtgacttcacacgaagtggaaaaccgtggtggctgaacgacacttcaactgtctcttattccctgcctatcaacaatactcacattcaccacaggcagaagaggtcggtgtccatagagagattcgtcgaaacacttgtggtggccgacaagatgatggtaggctatcatgggcgtaaggacattgaacattacatcctgagtgtcatgaatattgtggccaagttgtacagggatagctctttgggcaacgtggtgaacataattgtcgcacgactgattgtgcttaccgaagaccagcctaatcttgagatcaaccatcatgcggataaaagtctggacagcttctgcaagtggcagaaaagtattctcagtcaccagtctgacggaaatactattcctgaaaatggcattgcccatcacgacaacgcggtcttgatcacccgctacgacatctgtacttacaaaaacaaaccctgtgggacgctgggactggcatccgtggctggtatgtgcgagccagaaaggtcgtgcagtattaatgaagatattggactaggaagcgccttcacaattgctcacgaaatagggcataattttgggatgaaccacgacggcatcggcaactcctgcggtacaaaggggcacgaggctgcaaagcttatggctgcccatataacggctaataccaatcccttttcatggtccgcctgcagtagagactatatcacaagcttcctagacagcggacggggaacctgccttgataatgagccgccaaagcgcgacttcttgtaccccgcagtggcccctggccaggtgtatgacgccgacgaacagtgtaggtttcaatacggagccactagtcggcaatgcaagtacggcgaggtgtgtagggaactgtggtgtctttctaagtccaaccgatgcgtaactaactccatcccagccgcagaagggactctgtgccagacggggaacatcgagaagggctggtgctaccaaggagactgtgtcccttttggaacgtggccccagtcaattgacggaggatggggaccctggtccttgtggggagagtgcagtaggacctgtggtggtggcgtctcatcaagtctgagacattgtgactcccctgcgcctagcgggggagggaagtactgcctcggcgagcgtaaacggtacagatcctgcaacacagatccttgtcctttggggagtcgggattttagggagaaacaatgtgccgatttcgacaacatgcccttccgcggtaagtactacaactggaagccttacacaggtggtggggttaaaccttgcgctcttaattgtctggcagagggctacaatttctatacagagcgagcacctgccgtgatcgatgggactcaatgtaacgcagattctctcgacatctgtataaacggagaatgcaagcatgtaggctgcgataatatcctggggagcgatgcaagggaggaccgctgcagggtgtgcggcggagacgggagtacctgcgatgccatcgagggtttttttaatgacagcttgccccgtggaggatacatggaggtggtccagatcccaaggggctctgtacacatcgaggtgagagaagtggcgatgtctaagaactatattgctctcaaatctgagggtgatgattactatattaatggcgcttggactatcgactggccacggaagttcgacgtcgccggtaccgcttttcactacaagcggccaaccgatgagcctgagtcactggaggccctgggcccaacttccgagaacttgatcgtcatggtcctgctccaggaacaaaacttggggatccggtataagttcaatgtgccaattaccaggactggcagtggcgacaatgaagtgggctttacatggaaccaccagccctggtcggagtgtagcgccacatgtgccggaggcgtgcagaggcaggaggtggtgtgtaagcgactggatgataattcaattgtgcaaaacaattattgcgaccctgacagtaaacctcctgaaaaccagcgcgcatgcaatactgagccatgccccccagagtggtttattggggactggctggagtgcagcaaaacatgtgatggcggaatgcgcacccgagccgtgttatgcatccgcaaaatagggccttctgaagaggagacccttgactactcaggatgcctgacccaccggccagtcgagaaggaaccctgcaacaatcagagttgtcccccacagtgggtcgccctcgattggtccgagtgcacgcccaagtgcggaccaggatttaagcaccggatcgtgctgtgcaagtcatctgacctgagtaagaccttccccgctgcccagtgccccgaggagtctaagccgccagtcagaataaggtgctccttggggaggtgtccacctccccgatgggtgactggagattggggacagtgctcagcacaatgcggcctcggacaacagatgcgaactgtccagtgcttgtcttatacaggtcaggcatctagcgattgcctggagacggtgcgaccacccagtatgcaacaatgtgaaagcaaatgtgactccactcccatcagcaacacagaggaatgcaaggacgtgaacaaagtcgcctattgtcctcttgtgctgaagttcaagttctgttctagggcttattttcggcaaatgtgttgcaaaacctgccagggccattag

SEQ ID NO: 213455 - DNA, 1407 bp, synthetic construct
  misc_feature 1..1407: note = Description of Artificial Sequence: Synthetic coding sequence
  source 1..1407: mol_type = other DNA
atggagatcttgtggaaaactctgacatggatcttatctcttattatggcctcttctgaattccactctgaccatagattgtcctactcatctcaagaggaattcttaacctatcttgagcactatcaattgactatcccaatacgcgtggatcagaatggtgcgttcctctctttcacagttaagaacgataaacatagccggcgtaggagaagcatggaccccatcgacccacagcaggctgtgtccaaactgtttttcaaactatctgcatacggcaaacactttcacctaaatctgacccttaatacagacttcgtttccaaacacttcactgtggaatattggggtaaagacggtccccagtggaaacacgacttcctggataattgccactataccggttatcttcaggaccagagatccacaaccaaggtagctctttccaattgcgtgggtctacacggagtgatcgcaacggaagacgaagagtacttcatagagccacttaaaaatacaactgaggactctaaacattttagctacgagaatggccacccccacgtgatctacaaaaagtctgccctgcaacagcgacacttgtatgaccattcacactgtggagtgagtgattttacacgatcaggtaaaccatggtggctgaacgacacgtccaccgtgtcatactccctacccattaacaacactcacatccaccataggcagaagagaagtgtttccatcgagaggtttgtggagacacttgttgtagccgataagatgatggtgggataccacggtcgcaaggatatcgagcattatatccttagtgtgatgaatattgtcgccaagctttaccgcgattcctcgttggggaatgtagtgaacattattgtggctcgcctgattgtgctgaccgaagaccagccaaacctggagatcaaccatcatgccgataagagcctcgatagtttctgtaaatggcagaaatccatcctgtcccaccaatccgatgggaatacaattccagagaatggaatagctcatcacgacaatgcggtcctgattacccggtacgacatttgcacttataaaaacaaaccctgcggaaccctgggcttggcaagtgtggccggaatgtgtgagccggagagatcttgcagcatcaatgaagatataggactcggttctgcgttcaccatcgcacacgaaatcggccacaattttggaatgaatcacgatgggattggaaactcatgcgggacaaaaggtcacgaagcagccaaactgatggccgctcatataactgctaatacaaacccattttcttggagcgcctgcagccgagactacatcacaagttttttagagtttctcaagttgggcgatagcatctctgggtcttag

SEQ ID NO: 213456 - DNA, 5061 bp, synthetic construct
  misc_feature 1..5061: note = Description of Artificial Sequence: Synthetic coding sequence
  source 1..5061: mol_type = other DNA
atgcctggtggcccaagtccaaggtcgcccgcaccgttgctgagaccgttattgctgctcctttgtgctttggcccctggggctccgggtccggcaccagggcgtgctacagagggcagggcagcgctggatatagtacatccagtgcgggttgacgcaggagggtccttcctatcttatgagctgtggccacgtgctttaaggaagcgcgatgtgtccgtgcggagggacgcccctgccttttacgagctccagtaccgcggaagagagctccggtttaacctgaccgctaatcagcacttgttggcacccggatttgtctccgagacccgaaggcgaggcggactcgggagagcacacataagggcccacactcccgcttgccatctcctaggagaagtgcaggacccagagctggagggtggcctggctgcaatcagcgcctgcgatggcctgaagggggtgtttcagctctcaaatgaggactattttatcgaacctcttgatagtgccccagcccgtcccggacatgcacagccccacgtcgtttataagcgtcaagccccagaacgactagcccagagaggcgattcatccgctccttccacctgcggcgttcaagtgtaccctgaactggagagcagacgggagcggtgggaacagcgccagcaatggagacggcctaggctgcgtcgtctccaccagcgctcagtgagcaaggaaaagtgggttgaaacgctggtagtggcggacgcgaagatggttgagtaccatggccagccccaggttgagtcctatgtattgaccattatgaatatggtggccggtttgttccatgacccatccatcggtaatcctatccatatcaccatcgtccggctggttctgctagaggacgaagaagaggacctgaaaatcactcaccacgccgataacacactgaaatctttctgcaaatggcagaagtcaataaatatgaagggtgacgcacaccccctccatcacgacacagccatcctgctcaccagaaaggacttatgtgctgctatgaacaggccttgcgagacgctgggcctgagccatgtcgccggaatgtgccaaccccaccggagctgttcaatcaatgaggacactggactgcctttagccttcaccgtggcacatgagctggggcatagtttcggcatccaacacgacgggagcggaaacgactgcgagccggtcgggaaaaggccctttattatgagcccacagctgttgtacgacgccgcacccctcacttggtcccgatgtagccgacaatacataactcggttcctagatcggggttgggggttatgtcttgacgaccctcccgcaaaggatattatcgattttcctagcgttcctccgggagtgctatacgacgtcagtcaccaatgtcgcctgcagtatggtgcttacagtgctttctgcgaggatatggacaacgtgtgccatacactatggtgtagtgtaggcacaacgtgccatagtaagctcgacgccgcagtggatgggaccagatgcggagaaaacaagtggtgcctctccggagaatgcgttcccgtgggcttccgcccagaagctgtggatggaggctggagtggatggtctgcctggtccatttgttcgcgctcttgcggaatgggcgtgcagtctgcggagagacagtgcacccagcctactcccaaatataaagggcgatattgcgttggcgaacgaaaacggttccgtttatgtaaccttcaggcctgtcccgcaggccgaccctcgtttcgacacgtccagtgcagccatttcgacgctatgctctataagggacagctacatacatgggtgcccgtggtcaacgatgttaacccttgtgagcttcactgcaggcccgcaaatgaatactttgctgagaagctccgggacgcagtggtagacggcacaccgtgttatcaggtcagagcgtctcgagatttgtgcattaacggaatttgtaagaacgtgggctgcgacttcgagatcgattcaggcgctatggaagaccgctgcggcgtgtgtcacggtaacggcagcacttgccataccgtctctggaacctttgaggaagcagaggggttgggttacgtcgacgtgggcctgattccagccggtgcgagagaaatccggatacaggaggtcgcggaggctgctaacttcttggcccttcgcagcgaggacccagagaagtactttctgaacgggggatggaccatccagtggaacggagattaccaggtggcagggactacatttacgtatgctaggaggggcaactgggagaatctgacttctccgggaccaactaaggaacccgtgtggatacagctgctttttcaggagtcaaacccaggggtccactatgagtacaccatacatagagaggcaggtggccacgatgaggtacccccacccgtgttctcctggcattacggaccgtggaccaagtgtacagtgacctgcggcagaggggtgcagagacagaacgtctactgccttgaacggcaggcagggccagtagacgaggaacactgcgaccctctggggagacccgatgatcagcagagaaaatgctccgaacagccatgccctgcaaggtggtgggcgggagagtggcagctgtgtagctcctcttgcggtcccggtggcctttcaaggcgcgcagtcctgtgcattaggagcgttggattagatgaacagagtgcactggagccacccgcttgcgagcatctgccaagacccccaaccgagacaccctgtaacaggcacgttccatgtcctgccacatgggctgtgggcaactggtctcaatgctctgtcacttgcggggagggaacccagagacggaacgtactgtgcacaaacgatacaggcgtcccttgtgacgaggcacagcagcccgctagcgaggtgacctgttcactccctctgtgtcgctggcccttgggcaccctgggtcccgaaggttctggcagcgggtcaagttcgcatgagttgttcaatgaagccgactttataccgcaccacttggccccaaggccttctcccgctagtagccctaaaccaggcaccatgggaaatgctatcgaggaggaagcaccagagcttgacctaccagggccagtattcgtggatgacttttactatgattataattttattaatttccatgaagacctgtcctacgggccaagcgaggagccagacctggacctggccggaaccggcgatcggacccctccccctcactcccaccccgctgcgccatcaaccggaagccctgtaccagccactgaaccccctgccgcaaaagaagaaggggtattaggaccttggtctccctctccctggcccagccaggccggacgatcccccccaccaccctctgaacagacaccaggaaaccctctgatcaatttcctgcccgaagaagacactcctatcggcgctcctgatctaggcctcccatcgctgagctggcctagggtctccactgacgggctccaaaccccagccactcctgaatcgcagaatgatttccccgtgggcaaagacagccagagtcaactgccgcctccctggagagatcgaactaatgaagtcttcaaagacgacgaggaacccaaggggaggggagcgccacatctgccgcctcgcccttccagcactctgccgccattgtcacctgttgggtccacccatagtagtccatctcccgatgtcgccgagctgtggaccggcggaacagttgcttgggagcctgccctcgaagggggtttgggccctgtcgacagcgagttgtggcctacagtgggggtcgcttctcttctgccccctcccatcgcccctcttccggaaatgaaagtccgtgattccagtctggaacctggcaccccctcttttcctactcccggaccgggaagttgggacttacagactgtggctgtgtggggtacatttcttcctactacgctgaccgggttgggtcatatgcctgaaccagccctgaaccccggaccaaaagggcagcccgagagcctgtcccctgaagtgccactgtccagcagactgctgtctacccctgcttgggattcccctgctaatagtcaccgcgttcccgagacccaaccactggccccttccctggcagaagccggtccacctgcagatcctctggttgtccgcaatgctggctggcaggccggtaactggagtgagtgttccaccacatgtggactcggagccgtgtggcggccagttcggtgctcaagtggtcgcgatgaggactgtgcccctgctggacgcccacagccagctagacgatgtcatcttaggccgtgcgccacctggcactctggcaattggagtaagtgttctcgctcatgcgggggaggctcttccgtgcgcgatgtgcagtgcgtggacaccagggacttgaggcctctgcggcctttccattgtcaaccaggacccgctaaacctccagcgcatcgcccttgtggcgctcagccttgcctgagctggtacacaagctcttggagagagtgcagcgaggcatgcggaggcggtgaacagcaacggctggtgacctgtcctgagccgggactttgtgaggaggctctccgacctaacaccacacgtccctgtaacacgcatccgtgtactcagtgggtcgttggcccttggggtcaatgctcaggcccttgtggcggtggcgtgcaacgtcgcctggttaagtgcgtcaatacacaaacaggtctacccgaagaggactccgaccaatgcggtcatgaagcatggcctgagtctagtagaccatgtgggacagaggattgcgagcccgtggagcctcccagatgtgagcgggatcgcctaagcttcggattttgtgaaacgctgcggcttttagggcgttgtcagctcccgacaatccgcacccagtgctgccgttcgtgctcacctccctcccatggcgcaccttctcgaggacaccagagagtggcaaggaggtag

SEQ ID NO: 213457 - DNA, 1383 bp, synthetic construct
  misc_feature 1..1383: note = Description of Artificial Sequence: Synthetic coding sequence
  source 1..1383: mol_type = other DNA
atgccaggcggaccttccccacgctcccctgctcctctgctacggcctctattgctgctgttgtgcgcccttgcccctggtgccccaggacccgcacccggacgcgctacggaaggcagggcagctctggacattgtgcatcctgtgcgggtggatgccggagggagcttcctctcctatgaactgtggccgagagcactgcgaaaaagggatgtgtccgtgagaagggatgctcctgctttttacgagctgcagtacagaggtagggagttacggttcaatctgacagcaaaccagcacttactggcacctgggtttgtgtctgagactagacgaaggggaggactcggcagggcccacattagggcccacacccctgcatgccacctgctgggagaggtgcaggatccagaactggaagggggtctcgctgccatttccgcttgcgacggccttaagggagtgttccaattatcaaacgaggactattttattgaacccctcgactcagcccctgctcgtcctggccacgcccaaccgcatgtggtgtataagcgacaggcccctgagagactggctcagagaggagatagctcagctccttctacatgtggcgttcaggtgtaccccgagctggaaagccgcagagagcgctgggaacagcgacaacagtggagaagaccacgattgcgaaggctgcatcagcggagcgtgtccaaagaaaaatgggtggaaaccctcgtggtggccgatgcaaaaatggttgagtaccatggacagccccaagtagagagctacgtgctcacaatcatgaacatggtggcaggtctttttcacgaccctagcatcgggaaccccattcacattactatcgtgaggttagtgctattggaggacgaagaggaggacttgaaaatcacgcaccacgctgataataccttaaaatccttttgcaaatggcagaagtccatcaacatgaagggagacgcccacccactgcaccacgacacagccattctccttacaaggaaggacctgtgcgcagcgatgaatcgcccatgtgagacattgggactgagtcacgtagctgggatgtgccagccccatcggtcttgcagtattaacgaagacacaggtctccccttggcgtttactgtggctcatgagctgggccatagctcttgtactacacccctacctagtcccggtcccgctgccgcagcatcaataagtcccggaagtctttccgtgcaacggcagaatgtttactgcctggagcgacaggccggtcccgtggacgaagagcattgtgatccccttggcaggccagacgatcaacaacgaaaatgttctgagcagccctgcccagcaagcgcccagtag

SEQ ID NO: 213458 - DNA, 2670 bp, synthetic construct
  misc_feature 1..2670: note = Description of Artificial Sequence: Synthetic coding sequence
  source 1..2670: mol_type = other DNA
atgctgccagctcctgcggcacctcgatggcctcctctcctgcttttactgcttctactgttgccgctggcaagaggtgctccagctaggcccgcagctggcggtcaggcttccgagctcgtcgtgccaaccaggctccccggaagcgccggagaactggcgctgcacctcagtgcctttggcaaggggtttgtgcttaggttggcacctgacgattcattcctggccccagagtttaaaatagagcggctgggaggatctggccgagcaactggcggtgagagagggcttagaggatgtttcttttccggcactgtgaatggggagcccgaaagtctcgcagcagtgtctctgtgcagggggctctcaggaagtttcctgcttgatggagaggagtttacaatccagcctcaaggtgctggaggttcactggcgcagccccacagattgcagagatggggccctgccggtgccagacccctgcccagaggcccagagtgggaggtggagaccggagagggtcagcgccaggagcgcggagatcatcaggaggattctgaggaagagtcacaggaggaggaagctgagggcgcatcggaaccccctccccctttaggcgctactagccggaccaagaggtttgttagtgaagccaggttcgttgagacactcctggtggctgatgcttcaatggcagctttttacggcgctgacctgcaaaaccatatcttaactttgatgtcggttgcggctagaatttacaagcacccttcaattaaaaattctatcaatctgatggtcgtcaaggttctgatagtggaggacgaaaaatgggggccagaggtgagcgacaacggtggcctgactctgcgcaacttctgcaattggcagagaagatttaaccaaccctccgatcggcacccggagcattacgatactgctatattgctcaccaggcagaacttctgtgggcaggaaggcctgtgtgatacactgggcgtggccgatatcggtacaatttgcgatcctaacaaatcttgcagcgtcattgaggatgagggcctgcaagcggctcacacacttgctcacgaactcgggcatgtgctgtccatgccgcacgacgatagcaagccatgcacacgcctgttcggcccaatggggaagcaccatgtgatggctccgttatttgtccacctgaatcagaccctcccctggtccccttgttctgcaatgtatttgacagaacttctggacggtggccatggagactgtctgctcgatgccccagcggctgccctcccccttccaacaggccttcccggacgcatggctttgtaccagctagaccaacagtgtcgccagattttcgggcctgactttaggcattgccctaacacatcagcgcaggatgtctgtgcccagctgtggtgccacactgatggggctgagcccctctgtcacaccaagaacggatccctgccgtgggcggacggcactccgtgcgggcctggtcacctgtgttctgaaggcagctgccttcccgaagaagaagtggagagaccaaaaccagtggcagacggtgggtgggcaccgtgggggccttggggagaatgttcgcggacatgtggcggtggagtgcagtttagccacagggagtgcaaagatcccgagcctcaaaacgggggacgttactgtctcggtaggagagcaaagtaccagagctgtcatactgaggaatgtccccctgatggtaagagtttcagagagcagcagtgcgaaaaatataacgcctacaactatacggatatggacggcaatctcctgcaatgggtgcccaagtacgccggtgtgtccccacgggatcggtgcaagcttttctgtagggcacgcggaaggagtgaatttaaagtgttcgaagcgaaagtgatcgacggaacgctgtgtgggccagagactctggcgatttgtgttagaggtcaatgtgtgaaagctggatgcgaccatgtggtggattcccccagaaagctggataagtgtggagtctgtggcggtaaaggaaacagttgccgcaaagtttccggctccctgaccccaaccaactacgggtacaacgacattgtgaccattccggcaggagctaccaacatagacgtgaagcaaaggtcacatcctggcgtgcagaatgatggcaactacttggctctgaagacggccgatggccagtatctcttgaatggtaatctggctatcagtgccatcgaacaggacatcttagtcaaaggtaccattctgaagtactctggaagcatcgccaccttggaaaggctccagagttttcgtcctctccccgagcccctcacggtgcaattgctgaccgtccccggagaggttttccctcccaaggtaaagtatacatttttcgtgccgaacgacgtggatttttctatgcagagtagcaaggaaagggccaccaccaatattatccagcccctcctccatgcccagtgggtgttaggtgattggagcgaatgttcatcaacttgcggggctgggtggcagcgacgaaccgtcgaatgcagggacccaagcgggcaggcaagcgcgacatgcaacaaagcgttaaaacctgaagacgccaaaccttgcgaatcccagctatgtcctttgtag

SEQ ID NO: 213459 - DNA, 2757 bp, synthetic construct
  misc_feature 1..2757: note = Description of Artificial Sequence: Synthetic coding sequence
  source 1..2757: mol_type = other DNA
gccgctagagctcgtctgggaggcggtggcgctggcggagccggatgtgctagtcagagaggcagacgcggaagcgctcccgcagctggcccacgaggcccatccagaccctgtaccagattgattcctttatttctggaacgggctgccggaccacgctcaggaaggcagcaccttcctgcccctgggggattgctgccaagcccggcacgcagccatcgacgatcacctcacgcgcctcgcccacggcgacctcctgtggcctccgcacccgcagctgcggcagccgctgccgcagccggtcctcggaggccaggacctgcccgtagccgcggagccggactgggagctggcggagcccacgctgttgccaggctgcggggttgcttcttctccggcaccgtgaatggggaaccagaatccttagcggctgtaagcctatgtaggggattatccggcagcttccttctagatggggaagagttcaccatccagccacaaggcgcaggcggtagtctcgctcagccccatcgtctgcaaaggtggggtccagcaggcgctaggccactgcccagaggccctgaatgggaggttgagactggtgagggccagagacaggagcggggtgatcatcaggaggatagcgaggaggagtcccaggaggaagaagccgagggggctagcgagcctcctcccccattgggggcaacctcacggaccaagaggttcgtatccgaagctcgctttgttgagaccctgctcgtggccgacgcaagcatggctgccttctacggcgctgacctgcagaatcacattctcactctgatgtccgttgcagccagaatctataaacatccttctataaagaattccattaacttaatggtcgtgaaagttctgatcgtggaagacgagaaatggggcccagaggtcagtgacaacggcggactgacactgaggaatttctgtaattggcagcgaaggttcaatcagccgagcgatcggcaccccgagcattacgacacagcgatcctgctcacgaggcagaatttttgcggacaggagggtttgtgtgatacattgggagtggccgatattggcacaatctgcgatcccaacaaatcctgcagcgtgattgaggacgagggcttgcaggccgcacataccctggcacacgagctgggtcacgtcctgtcaatgccacacgacgactctaagccttgcacaaggctctttggtccgatgggtaagcaccacgtcatggcacccctatttgtacacttaaatcagaccctgccctggtccccctgttccgccatgtacctcaccgagctattggacggaggccacggtgactgcctgttggatgctccggctgcggctctcccactccccactggactccccggtcggatggctctctaccagctggatcagcagtgtcgtcaaatttttggccctgacttcaggcactgccctaacacatcagcacaggacgtttgcgcacagctttggtgtcacactgatggggcagagcctctgtgtcacacaaagaacggctcccttccatgggccgatgggacaccatgcgggcctggccacttatgtagtgaaggctcctgcctacccgaagaagaggtggagaggcccaagccagtggctgatggtggttgggcaccgtgggggccatggggcgagtgttcaaggacttgtgggggaggggtccagttcagccaccgggaatgcaaagatccagagccccagaacgggggtcgatattgcctcggtaggcgcgctaagtatcagtcttgtcacactgaggaatgtcctcccgacggcaaatcatttcgagaacaacagtgcgagaaatacaacgcgtataactatacagacatggatggcaatctgctacaatgggtgcccaagtacgccggtgtgtctcccagggatcgctgtaaacttttctgcagggctagagggagaagtgaattcaaagtgtttgaggccaaggtcatcgacgggactctgtgcggcccagaaacacttgcaatatgtgtcaggggccaatgcgtgaaggccggatgtgatcatgtggtggattcacctaggaagctcgataagtgcggggtctgcggcggaaagggcaactcctgcaggaaagtgagtgggtcgttgactcccaccaactatggctacaatgatatcgttaccatcccagccggtgccacgaacattgacgtgaaacagcgctcacaccctggcgtgcagaacgacggcaattatctggctctgaaaactgccgacggccaatacctgctgaatggcaatcttgccatctccgctattgagcaggatatccttgtgaaaggaaccatcctgaagtattccggctcgattgctacactcgagaggctccagtccttcaggccgctccccgagccactgaccgttcaactgctcacagtacctggagaagtgttcccgcctaaggttaagtacaccttcttcgtgcccaacgatgtagacttttccatgcagtctagtaaagaaagagcaactactaacatcatacagcctctattgcacgctcaatgggtcctgggagactggagcgaatgttcatctacatgtggcgcaggatggcagcgtcgtacggtagaatgccgcgacccatccggacaagcttctgctacatgcaacaaggccctcaaaccggaggatgctaagccgtgtgaatctcagttgtgccctctctag

SEQ ID NO: 213460 - DNA, 5724 bp, synthetic construct
  misc_feature 1..5724: note = Description of Artificial Sequence: Synthetic coding sequence
  source 1..5724: mol_type = other DNA
atgcaatttgtctcctgggccaccctgctcacgcttctggtgcgtgacttggctgagatggggtccccagatgctgcagccgctgtgagaaaagatcgtctccacccccgacaggtcaagctgttggaaactctcagtgagtatgagattgtgagtcccattagggtgaacgctcttggggaacccttcccaaccaacgtacatttcaagaggaccaggagaagtatcaacagcgccacagatccgtggcctgcttttgcatcttcatcttcaagctctacgagctcacaggcacactataggttgagtgcctttgggcagcagttcttattcaatttgacagccaacgcagggttcatcgcccctctcttcaccgtgacattactggggactcccggagtcaaccaaactaagttctactccgaagaagaagctgaattgaagcactgtttttacaaaggctacgttaataccaactcagaacataccgccgtaatcagcctttgttccgggatgttagggacattccgttcacacgacggggattatttcatagagcctctacaaagtatggacgagcaggaggacgaagaagaacagaataaaccccatataatctaccggaggtccgcaccgcagcgcgaaccttccaccggtcggcatgcttgcgatacctcagagcacaagaacaggcacagtaaggacaaaaagaagacgagggctaggaaatggggagagcgcatcaatctggctggtgacgtcgccgctttgaatagcgggttggctaccgaggcattttctgcatatggcaataaaactgacaacactcgtgagaagcgtactcaccgcaggactaagcggttcctttcctatccgcgttttgtcgaggtactggtggttgctgataaccgaatggtgtcatatcatggagagaatcttcagcattacatcctgacgctcatgtcaatcgacggcccaagcatttccttcaacgcccagaccactcttaaaaacttctgccagtggcagcatagcaaaaatagccccggaggtattcatcatgatacagccgtcctgttgacacgccaggacatctgcagggctcatgataaatgtgacactctcggcctcgccgagcttgggaccatttgcgacccttacagaagctgttccatctcagaggactcaggcctctctactgctttcacaatcgcacatgaactgggacacgtgttcaatatgccgcacgacgacaacaataagtgtaaggaagagggcgtgaaatccccccagcacgttatggcacctaccttgaacttctacactaatccttggatgtggtcaaaatgctcaaggaaatatatcacagaatttttggacactggctatggtgaatgcctgctgaatgagccagagagtcggccatatcccttacctgtacagctgcctggaattctttacaacgtgaataaacagtgcgaactgatttttggaccaggatcgcaagtttgcccctacatgatgcaatgccggcgtctgtggtgtaataatgtgaatggggtgcacaagggatgtagaacacagcacaccccctgggcggacggtacagagtgcgagcccggaaagcattgtaagtacgggttctgtgtccctaaagaaatggacgttcctgtgacggatggaagctgggggtcttggtctccattcgggacctgttcccggacctgcggtggcggaatcaagactgcgattcgtgagtgcaaccgaccggagccaaagaacggagggaaatattgtgtggggagaagaatgaaatttaaatcgtgcaacaccgaaccgtgcctcaagcagaaacgggattttagagacgaacaatgtgcccacttcgatggtaagcactttaatatcaatggcctgctcccaaatgtgcgctgggtgccaaaatattcaggaatcctaatgaaggacaggtgcaaactgttctgtcgagtggcagggaacacggcctactaccaactgagggacagagtgatcgatggaacaccctgcggtcaggacactaacgacatttgcgtccagggtctgtgtagacaggctgggtgtgatcacgtgcttaattctaaggcgagacgtgacaagtgcggggtgtgcgggggagacaactcttcctgcaaaacagtagcaggcacattcaacactgtgcactacggatacaacactgtggttagaattcctgctggggcaactaacatcgacgtcaggcagcactctttctctggtgagacggatgacgataactatctcgccttatcatcctccaaaggagaattcctgttaaacggaaatttcgttgtcaccatggcaaaacgcgaaatccggatcggtaacgcagtggtcgagtattcggggagcgagacagctgtggagaggatcaattcaacagaccgtatcgaacaggagttgctcctgcaagtgctgtcagtgggtaagctttacaaccccgacgtgcgttatagcttcaacatacccatagaggataaacctcaacagttctactggaattcccatggcccatggcaggcttgttccaagccatgccaaggtgagaggaagcggaaacttgtttgtacccgcgaatccgaccagttaactgtcagtgatcagcgatgtgatagattgccacaacctgggcacatcacagagccttgcggaaccgactgtgacctgcgatggcatgtagcatcaagatcagaatgtagtgcccagtgcggccttggttaccgcacattagacatttactgtgcgaagtattccaggttggatggaaagactgagaaggtggatgatggtttctgtagcagccatccgaaaccctcgaatagagagaaatgctctggcgagtgtaacacaggcggatggaggtattccgcttggaccgagtgtagtaagtcatgcgatggcggaactcagaggcgccgagcgatctgtgtcaacacgcgaaatgatgtgctggacgattcgaagtgcacgcaccaggagaaggtgacaatacagagatgctcagagtttccgtgcccccagtggaagagcggggattggtctgaatgcctggtgacttgcgggaagggacacaagcaccgccaggtttggtgtcagttcggcgaagaccgcctcaatgaccgcatgtgcgaccccgagactaaacctaccagtatgcagacttgccagcagcctgagtgcgcctcctggcaagctggaccatggggccaatgttcagtaacctgcggccagggctatcaactgagagctgttaaatgcatcatcgggacatacatgtcagttgtcgacgacaatgattgtaatgcagctaccaggccaactgatacgcaggattgtgaactgccgtcgtgtcacccaccacccgcagccccagaaacgaggcgcagtacctatagtgcccctcgaacacagtggagattcgggtcttggactccctgtagcgccacttgcggcaaaggtacacggatgcgttatgtgtcctgtagagatgagaatggatctgtggccgatgagtccgcgtgtgctactctgcctcgtcccgtggccaaggaggagtgttccgtgactccctgcggacagtggaaggcactggactggagctcgtgctctgtaacctgcggccagggccgtgctactcgccaggtcatgtgtgtgaactactctgatcatgtaatcgacagatcagagtgcgaccaggactatatccctgaaaccgaccaggattgttctatgtccccctgtccacagcgaacccccgattccgggttagcacagcatccttttcaaaatgaagattacagaccacgcagcgcttcaccctcacggactcacgtgttggggggaaatcagtggcgaactgggccttggggggcatgtagttctacttgtgccggaggctcccagcggagagtcgttgtgtgccaagatgagaatggatatactgcaaatgactgcgtcgaacggatcaagcctgacgaacaaagagcttgcgagagtggaccatgcccccaatgggcctatggaaactggggagagtgcaccaaactctgcggaggagggatacgtaccagactagtggtgtgccagaggagcaacggagaacgattccctgacctgagctgcgaaatcctcgataagccacccgaccgagagcagtgtaacacgcatgcatgtccccacgatgcagcatggtcgaccggcccttggagcagttgctctgtgtcttgtggtcgcggtcataagcagaggaatgtttactgtatggcgaaagatggatctcacttagaaagtgattactgtaaacatctcgccaaaccccacggtcacagaaagtgtcggggaggaagatgtccaaagtggaaagcaggcgcatggtcccagtgcagtgtttcatgcgggcgaggggtacagcagaggcacgtcgggtgtcaaatcggcacgcataaaatcgctagagagactgagtgcaacccctatactaggccagaatccgaaagagattgccaaggccctcggtgtcctttatacacatggagagccgaagaatggcaggaatgcactaaaacttgtggagagggcagtaggtatcgaaaggtcgtgtgtgtagacgataataagaacgaggtccacggggctaggtgcgatgtttcaaaacggcctgtggaccgggaatcttgtagtctgcagccctgcgagtacgtttggatcactggtgaatggtctgagtgcagtgtgacatgtggcaagggctacaaacagcggctcgtgagctgcagcgagatctataccggcaaggagaactacgagtattcctaccagacgactatcaattgtccaggcacacagccaccttctgtgcacccctgctatctgagagactgtcccgtgtccgcgacatggagagttggaaattgggggagctgcagtgtttcctgtggggtcggggtgatgcaaaggtctgtgcaatgtctcactaacgaagatcagccatcccacctctgtcatacggacctgaaacctgaggagagaaagacctgcagaaatgtgtacaactgcgagctgccccagaattgcaaggaagtgaaaagactgaaaggagcctctgaggatggggagtactttctcatgatacggggaaagctgctgaagatcttctgcgctggcatgcatagcgatcatcccaaggagtacgtgacgctggtgcatggggattctgaaaactttagtgaggtgtatggacacaggttgcacaatcccacggagtgtccttataatggtagcagacgggacgactgtcagtgcagaaaggactacacagcggcaggattttcctcattccagaagattcgtattgatctgacatccatgcaaatcataaccactgatttacagtttgccagaacctcagaaggccacccagtgccatttgccactgcgggagactgctactccgctgcgaaatgcccccaggggcgattctcaatcaatctctatgggaccggtctcagccttacagaatccgctcgctggatctcgcagggaaactatgctgtaagtgatatcaagaaatcccctgacggcactagggtagtcggaaaatgtggtggatattgtggcaaatgcacaccctccagcggcactggattggaagtgcgtgtgctctag

SEQ ID NO: 213461 - DNA, 2976 bp, synthetic construct
  misc_feature 1..2976: note = Description of Artificial Sequence: Synthetic coding sequence
  source 1..2976: mol_type = other DNA
taggaatgttctgcacaatgcgggttgggctatcgaactctcgatatatattgcgccaagtactcccggctggacggtaagacggagaaggtggacgatggcttctgctcatctcatccaaagccatctaacagagaaaagtgttccggggaatgtaacacaggcggatggaggtacagtgcctggactgagtgctctaaatcttgcgacggagggactcagagaaggagggccatatgcgtgaatactagaaatgatgtgctcgacgattccaagtgtacccaccaggagaaggtgaccattcaaagatgctcagaattcccttgcccacagtggaaatcaggtgattggagtgaatgtctagttacgtgcgggaaaggacacaaacacaggcaggtatggtgtcagttcggagaagaccgcctgaacgataggatgtgcgatcctgaaactaagccaacctcgatgcagacgtgccagcagcctgaatgcgcaagttggcaggccggaccatggggccagtgttctgtcacttgcgggcagggttaccagcttagggccgtcaaatgtatcattggtacgtacatgtcggtggttgatgataacgattgcaacgctgccactaggcctacagacacccaggattgcgagctgccttcatgccatccgccacccgctgcccctgaaacccgcagaagtacctacagcgcaccccgaacacagtggaggttcggtagttggacaccttgctctgccacttgtggcaagggcactcgcatgcgatatgtctcttgccgagacgagaatgggagtgtcgctgatgagtccgcttgtgcgacactccctaggcctgtggctaaggaggaatgttcggtcactccttgcggacagtggaaggcgttagattggagctcatgtagcgtgacgtgcggccaaggccgtgctacacgccaggtaatgtgcgtgaactatagtgatcacgttatcgaccgttctgaatgcgatcaagactatattcccgagaccgaccaagactgtagcatgagcccgtgtcctcagcgtacccctgattcaggattggctcagcatccctttcagaacgaagattacagaccgagaagcgcttcaccttcaagaacacacgtgttaggcggaaatcagtggcgaacaggcccatggggcgcatgtagctcgacttgtgccggtggttcacagcggagggtggttgtctgtcaggatgaaaacggttataccgccaatgattgcgtggaacggataaagcccgacgagcagcgagcgtgcgaatctgggccttgccctcagtgggcgtacgggaactggggggaatgtaccaaactgtgcggtggaggtattcggacccgacttgtggtgtgtcagcgatcaaatggtgaaaggttccctgatctgtcctgtgagatccttgataagcccccagaccgcgagcagtgcaacacccatgcctgccctcacgatgctgcttggtctaccggtccttggtcttcttgcagcgtgtcttgcggcagaggccacaaacagaggaacgtctactgcatggctaaggatgggagccacctggaatccgattattgtaagcacttggctaagcctcatgggcacagaaaatgtagaggaggtcgatgtccaaaatggaaggcaggtgcatggtctcaatgtagtgtgagttgcggtcgaggcgtccagcagcggcatgttggatgtcagatcggaacacataaaatcgcacgcgagactgagtgcaacccctatacccggcctgagagtgagagagactgtcagggacctcggtgccccctctatacctggagggcagaggagtggcaggaatgtacaaaaacctgtggcgagggatcaaggtataggaaggtagtttgtgtggatgacaacaaaaacgaagtgcacggggcaagatgcgacgtctctaaacgccctgtggaccgcgaaagctgtagtcttcaaccttgtgaatatgtgtggattaccggagaatggtccgagtgttccgtcacctgtggtaagggttacaaacagagactcgtcagctgctccgaaatctataccgggaaggaaaattatgaatactcatatcagactacaatcaattgccccggaacccaaccacccagtgtgcatccttgttatctaagggattgccctgtgagcgccacatggcgcgtaggtaactggggcagttgttcagtatcatgtggagtgggcgttatgcagaggtccgttcaatgtctcaccaatgaagaccaaccctctcacctgtgccacacagaccttaagcccgaggagagaaagacatgtcggaacgtctataattgtgaactccctcagaactgtaaggaagtcaagaggttgaaaggcgcttcagaggatggtgaatattttctaatgattcggggaaaactcctaaaaatattttgcgccggtatgcatagtgaccatccaaaagagtatgtaactctggttcacggcgacagcgagaacttcagcgaggtctacggccataggctgcataaccctacggaatgcccctacaacggatcacgcagggatgactgtcagtgccggaaggactacacagcagctggatttagctctttccagaagattagaattgacctgactagtatgcagattataacaacagaccttcagttcgctaggaccagcgagggccaccccgtgccttttgccacagctggggactgctattcagccgctaaatgcccccagggaaggttttctatcaacctttatgggacaggcctgtctctcacagagtcagctcgctggattagtcaaggcaattacgcggtaagcgacatcaaaaagtcccccgacggaacaagggtagttggcaaatgcgggggatactgtggcaaatgcacgccaagcagcggtacaggtctcgaggtccgcgtcttgtag

SEQ ID NO: 213462 - DNA, 5807 bp, synthetic construct
  misc_feature 1..5807: note = Description of Artificial Sequence: Synthetic coding sequence
  source 1..5807: mol_type = other DNA
atgcaattcgtcagctgggccacgctgctgacactcctggtgagggatctggcagagatgggctcccctgacgcagctgctgcagtgaggaaagatcgactgcacccgcgtcaagtgaaactcctggagactctgagtgaatacgagatcgtgagccctattcgagtgaatgccctgggagaaccctttcctactaatgtccatttcaagcggaccaggaggtctatcaacagtgctaccgatccatggccggctttcgctagcagttcatcaagttctactagttcccaggcacactacaggttaagcgcctttggacagcagttcctattcaatctcacggccaatgctggtttcattgccccactgtttaccgtaacgctgttgggcactccgggagtcaaccagactaagttttattcggaggaagaggccgagctgaagcattgtttctataaagggtatgtcaataccaactccgaacacactgcagtgatatccctctgcagcggcatgctgggcactttccgctctcatgatggcgattattttatagaacctctgcaatcaatggatgaacaggaggacgaagaggaacagaataaaccacacatcatttatagacggtccgctccccagagagagccaagcactgggagacacgcgtgcgatacctccgaacacaaaaatcgccactctaaggacaagaaaaagacacgagcgcgaaagtggggagagaggattaaccttgccggagacgtcgcagctttgaattctggcctggccacagaggcatttagtgcctacggtaacaagaccgacaatacgagggagaagagaacccaccggagaaccaagaggttcctgagttatcccaggttcgtggaagtgctggtagttgctgacaaccggatggtgagttaccacggagagaacctgcagcattatattttgaccttaatgagcattgtggcctcaatttacaaggacccttccataggcaacttaatcaatatcgttattgtgaacctgattgtcattcacaacgaacaggacgggccttccatatccttcaacgcacaaaccacacttaagaacttctgccaatggcagcatagcaaaaatagccccggaggcatccaccatgacaccgctgtgttgctaacccggcaagatatttgtagggcccacgataagtgtgacactctgggactcgccgaacttgggaccatctgcgacccttacaggtcttgttcgatcagcgaagactccggactcagcactgcatttaccatcgctcatgagctgggccatgtgttcaatatgccccatgacgacaataacaagtgtaaggaggaaggtgtgaaatcaccacagcacgtcatggctccaactctcaatttttatactaatccctggatgtggtcaaagtgctcacggaagtatattacagagttcctcgacactggctatggagaatgtctcctcaatgagccggaaagcaggccctatccacttccagtgcagctcccaggaattctctacaacgtgaacaaacagtgcgaactgatatttggccctggctctcaggtgtgcccttacatgatgcaatgtcgcagattatggtgtaacaacgtcaatggcgtccacaaagggtgtagaactcagcacaccccttgggctgacggcactgaatgcgagcctggaaagcactgcaagtacggcttttgtgtccctaaggagatggacgtacccgtgaccgatggcagctgggggagctggagtccatttggtacttgttccaggacatgcggagggggaattaagacagccattcgcgaatgtaatcgacctgagcctaagaacggaggaaaatactgcgttggtcgtcgcatgaagtttaaaagctgcaatactgagccatgtctcaagcagaagagagactttcgcgacgaacagtgtgcccattttgacgggaagcatttcaacatcaacggcctgctgccaaatgtgcgatgggtgccaaaatactccgggatcctcatgaaagatcggtgcaagctgttttgtagagtggccggtaacaccgcctattaccagctcagagacagagttatcgatggtactccctgtggtcaagacacgaacgacatctgcgtccaaggtctctgtcgccaagccggttgcgaccatgtgttgaatagcaaagccaggagagataagtgcggtgtctgtgggggtgacaattcaagctgcaagactgttgcaggaactttcaatacagtgcactacggctataacaccgttgttagaattcctgctggcgcaacaaatattgatgtccgccagcacagcttcagtggggagaccgacgacgataattatctggccctctcatcatccaagggagagttcttacttaatgggaattttgtggttaccatggcaaagcgggaaattcggatcggaaacgccgtggtcgagtattccggatccgagaccgccgtggagagaattaattccactgacagaatagagcaggaattattgcttcaggtcctgtccgtgggcaaactgtacaaccctgatgtgcgctacagcttcaacattcccatcgaagataaaccgcagcagttttactggaattcacacgggccttggcaggcgtgcagcaagccttgccaaggggagaggaagcgtaagctcgtctgtacaagggagtcagaccagctcactgtgtctgatcagagatgtgataggctgccccagcctggccacatcacagagccatgtggaacagactgtgacctcaggtggcacgtggcttccaggagcgagtgttcagcccaatgtggccttggttaccgcaccctggatatctactgtgcaaagtacagcaggcttgacggcaaaactgaaaaagtcgacgatgggttttgcagtagccacccgaaacctagcaacagagagaaatgttcaggggaatgcaatacaggcggatggaggtactcagcctggactgaatgtagcaagtcctgcgatgggggtacgcagcggcgtcgagccatatgcgtgaacacccggaacgacgtccttgacgatagcaagtgcactcatcaagagaaagtcactattcaacgctgctccgagttcccgtgcccacagtggaagagcggagattggagtgaatgtttggtgacctgcggaaagggacacaaacatcggcaggtatggtgccagttcggagaggatcgcctaaatgacaggatgtgtgacccagagaccaagccaacatctatgcagacgtgtcagcagcccgagtgcgcgagctggcaggccggaccttggggccagtgctctgtgacttgcggacaggggtaccagcttagagctgtcaaatgtataataggcacttatatgtctgtcgttgacgataatgattgcaacgccgcaacgcgtcccacagatacacaggactgcgaattaccttcctgtcaccctcctcctgcagcccctgaaacacgacgctctacctacagtgctccgagaacgcagtggagattcgggtcatggactccatgctccgccacctgtggcaagggaacaagaatgcgctacgtatcttgcagagacgagaatggctcagttgccgatgaaagcgcttgcgctaccctgccaaggccagtggccaaggaagaatgtagcgtaacaccttgcggccagtggaaagctctggattggtcgagttgttctgtcacttgtggtcaagggagggccacccgccaagtcatgtgtgtgaactacagcgatcatgtgatcgaccggtctgagtgtgatcaggactatatcccagaaaccgaccaagactgctccatgagcccctgcccgcagcggacaccagactctggactggcccagcacccctttcagaacgaggattatcgacctcgcagtgcctccccaagtcgcacccatgtcctgggaggcaaccagtggcgcaccggaccgtggggagcctgttcatccacttgcgcaggcggtagtcagcggagagtggtggtgtgtcaagatgagaacgggtatacagcaaatgactgcgtggagcggatcaaaccagatgagcaacgcgcatgcgagtctggaccatgcccccagtgggcttatggaaactggggggaatgcactaagctgtgtgggggtggaatacggaccaggctggtggtgtgccagcggtctaacggagagcggttccccgacttgagttgcgagattctcgacaagccgccagatcgcgagcagtgtaatactcatgcttgccctcacgacgcggcttggagtacaggcccttggtcttcttgttccgtttcttgcggcaggggccacaaacaacgtaatgtgtactgcatggccaaagatggttcccatctcgagagcgactactgcaagcacctcgcaaaaccacatgggcacaggaagtgccggggtggaagatgccctaagtggaaggcaggtgcgtggagccaatgcagcgtctcatgcggacgtggtgttcagcagcgtcacgtgggctgtcagattggtactcacaaaatcgcgagagagaccgaatgcaacccctacactcgcccagaaagtgagagggactgccaaggccctagatgtcccctgtacacttggagggcggaggagtggcaagaatgtactaaaacatgtggcgaaggcagtcggtacagaaaagttgtctgcgtggacgataataaaaacgaagtgcacggggcaagatgtgacgtgtcgaagcgccctgtggaccgagagagttgtagtcttcagccgtgcgagtatgtgtggatcactggcgagtggagtgagtgctcagtgacgtgtggcaagggctacaagcagcgcctggtgtcatgctctgaaatttatactggtaaggagaactatgagtacagttatcaaaccactataaactgtcccggtacccagcctccaagcgttcacccttgttatctgagagattgccccgtaagtgcgacatggcgtgtgggtaattggggcagctgcagcgtgagctgcggagtcggggtgatgcagcgctccgtacagtgtttaaccaatgaggaccagccatctcacctgtgtcatacagatttaaagcctgaagagagaaagacgtgtcgtaatgtctacaattgcgagctcccccagaattgcaaggaagtgaaaaggctgaaaggcgcatctgaggatggggagtactttctcatgatcaggggaaagctccttaagatcttctgtgcgggaatgcatagcgaccatccaaaagagtacgtgacgctagtgcatggcgatagcgagaacttttccgaggtgtacgggcaccggctacataaccctactgaatgcccgtacaacggaagccggcgagatgactgtcaatgcaggaaggactatacggcagctggcttttcgtcattccaaaaaattagaatcgatctgacatctatgcagatcattacgactgatctgcaattcgccaggacctctgaaggacaccctgtcccatttgcaaccgcgggagattgctattcagctgccaaatgccctcaggggaggttcagtattaacctctatggcaccggcttgtccctcaccgagtcagcaaggtggatctctcagggtaattatgccgtctccgacataaagaagtccccagacggaaccagagtcgtagggaagtgcggaggttattgcggcaagtgcactccgagcagtggtactgggctggaagtcagagtactata

SEQ ID NO: 213463 - DNA, 1176 bp, synthetic construct
  misc_feature 1..1176: note = Description of Artificial Sequence: Synthetic coding sequence
  source 1..1176: mol_type = other DNA
atgattctgaacggggaggaaataattctgtccttacagaagactaagcatctgctggggcctgactacactgaaaccctctactctccccgtggggaagagattacgaccaaacccgaaaacatggaacactgctactacaaaggaaacatactcaacgaaaaaaactctgttgccagtatcagtacttgtgatggactccgaggctattttacccaccaccaccaaagatatcagatcaagcctctgaagtcaacagacgagaaggagcacgctgtttttaccagcaaccaggaggaacaggaccctgcaaaccacacctgtggcgttaagagtacagacggaaagcaaggacctatccgtatttcccgctctctgaaaagcccagaaaaggaggatttcttgagggctcagaaatacatcgacctgtacctggtgctggataatgctttctataagaactacaatgaaaatctgacactcatccgcagcttcgtattcgatgtgatgaacctcctcaacgtgatctacaataccatagatgtccaagtggcactggttggtatggagatctggtctgacggggataagataaaggtggtgccaagtgcaagcacgacattcgataacttcttaagatggcactccagtaatctgggcaagaagatacacgatcatgctcagttgttaagcggtattagtttcaacaaccgcagagttgggcttgcagcatctaattctctctgcagtccctcatctgtggctgtgattgaggccaagaagaaaaacaatgtggctctggtgggcgtgatgtcacacgaactcggccacgtcctaggaatgcccgacgtgcccttcaatacaaaatgtccgagcggatcatgcgtgatgaaccagtatctgtcctctaaatttcctaaagacttctccacatcatgtagggcccacttcgagcgctatcttctaagtcagaagcctaaatgcttgctgcaggcccctattccaactaacataatgaccactcctgtgtgtgggaaccacttgctggaggtgggagaggattgtgattgtggatcgcctaaggagtgcactaatctgtgctgtgaggccttgacttgcaagctgaaacctggcacagattgcggaggcgacgccccaaatcataccacagaatag

SEQ ID NO: 213464 - DNA, 1413 bp, synthetic construct
  misc_feature 1..1413: note = Description of Artificial Sequence: Synthetic coding sequence
  source 1..1413: mol_type = other DNA
atgctgcggggtattagtcagcttccggcagtggccactatgtcatgggtgctgctgcccgtgttgtggcttattgttcaaacacaagctattgcaatcaaacagactcccgagctaaccttgcacgagattgtatgccctaaaaagttgcacattctccataagcgcgagataaaaaataaccagactgaaaagcacgggaaggaagagcgctatgagccagaggtgcaatatcagatgatcctaaatggagaggagatcattttgtccctgcaaaaaaccaaacacctcttgggaccggattatactgagaccctttacagccctaggggggaggagatcacaaccaaacccgaaaacatggaacactgttattataaggggaatatccttaatgagaagaactccgtggcaagcatctccacctgcgacggactcagggggtactttactcaccaccaccagcggtatcaaatcaaaccattgaaaagcactgatgagaaggaacatgctgtgtttacatcgaatcaggaggaacaggacccagctaaccacacctgtggcgtaaaatctaccgacggcaaacaagggccaatcagaatctcacggagccttaaatctcctgaaaaagaagactttctgagggcacagaagtatattgacttgtatctggttctagacaatgccttttataagaattataacgaaaatttgacactaataaggagcttcgtgtttgacgtaatgaacttactcaatgtgatttacaacaccatagatgttcaggtggccctggtcggtatggaaatctggagcgatggagacaagatcaaagtggttccatcagcttctactaccttcgacaatttcctgaggtggcatagcagcaatctgggaaagaaaatacatgaccatgcccagctacttagcggcataagcttcaataatagacgggtgggattagctgcaagtaattccctatgcagtccgtcctccgtggctgtgatcgaggcaaaaaagaaaaacaacgtcgccctggtgggggtgatgagccatgaattaggccatgtcctgggcatgcccgacgtgccattcaacacgaagtgtccaagtggatcctgcgtcatgaaccagtatctgagctctaaatttcctaaggactttagcacgtcctgccgcgcacacttcgaacggtacctgttaagccagaagcctaagtgtctgctccaagcaccaatccccacaaacatcatgactactcccgtgtgtggcaatcacttactcgaagtgggggaggactgcgattgtggaagtcccaaggaatgtacaaatctgtgctgcgaggccttaacgtgcaagctgaagcccggtacagattgcgggggtgatgcaccaaatcacacaaccgagtag

SEQ ID NO: 213465 - DNA, 1176 bp, synthetic construct
  misc_feature 1..1176: note = Description of Artificial Sequence: Synthetic coding sequence
  source 1..1176: mol_type = other DNA
atgatcctgaatggtgaggagatcattctgtcccttcagaagacgaaacatctgctcggaccggactacactgaaactttatattcccccagaggagaggagataactacaaagccggaaaatatggagcactgctactacaagggcaatatactgaacgagaagaactccgtggccagcatcagcacgtgcgacggactccgcggatatttcacccaccaccaccagaggtaccaaattaagcccctgaagtctaccgacgaaaaagaacacgctgtattcactagtaaccaagaggaacaggatccagctaaccacacatgtggcgtgaagagcaccgatggcaagcagggccctatccgtatttctcggtccttgaagagtccagagaaggaggacttcttacgggctcagaagtatatcgacctctacttggtgctggataacgctttctacaagaactacaatgagaatctcactctgataagatccttcgtctttgatgtcatgaacctgctaaacgtcatttacaataccatagatgttcaagtcgctcttgtggggatggagatttggtctgatggagataagatcaaggtggtgccctctgccagcaccaccttcgataatttcctccggtggcacagcagcaatctcggaaagaagatccacgatcacgcccagcttctgtccggcatctcctttaataatagacgggtcggcctcgctgcaagcaacagtctgtgctctccaagcagtgtggccgtgatagaggctaaaaaaaaaaacaatgtcgcactggtgggtgtgatgagccacgagctgggacacgtcctgggaatgcccgatgtgcccttcaacaccaagtgcccttccggatcctgtgtgatgaaccaatatctttcttctaagtttcccaaggattttagcactagttgcagagcccacttcgaacgttacctactcagccaaaagcccaagtgtttgctgcaggcacctatcccgacaaatatcatgaccacacccgtctgtggcaaccatctgctggaagtgggcgaagactgcgattgcggatcacctaaagagtgcaccaatctgtgctgtgaggcattgacctgcaagctgaaacccggtacagattgcggtggcgatgcacctaatcataccacagaatag

SEQ ID NO: 213466 - DNA, 2052 bp, synthetic construct
  misc_feature 1..2052: note = Description of Artificial Sequence: Synthetic coding sequence
  source 1..2052: mol_type = other DNA
atggaatgttgccgcagagccacgccgggtactctgctgctctttcttgcctttttattgcttagttctagaacggctcgatctgaggaggatcgcgatggtctttgggatgcctggggcccttggtcagagtgttcaagaacatgcggcggaggggcttcttattccctgagacgttgtctcagcagtaagtcgtgcgaaggcaggaacatcaggtatcgaacatgcagcaatgtggactgtccacccgaagccggtgacttccgggctcagcagtgttcagcccacaacgatgtgaagcaccacgggcaattttacgagtggctccctgtttccaacgaccctgacaatccgtgcagcttgaaatgccaggctaagggcacaacccttgttgttgagcttgctcccaaggttcttgacgggaccaggtgttacacagaaagcctggatatgtgtatctctggactttgtcagatcgttggctgcgatcaccaactgggcagtactgtcaaagaggacaattgtggcgtgtgtaatggggatggctctacatgtcgcttagtacgcggtcagtacaaaagccagttgagcgccactaagtcagatgacacagtggtcgccattccatacggctccagacacattagactggtgcttaaagggccagatcacctgtacctggagaccaaaactctccaggggactaagggagagaattccctgagctcaaccggaacttttcttgtcgacaactctagcgtagacttccagaaatttccagacaaagagattctgaggatggctggcccacttactgcggatttcatcgttaaaattcgcaattcaggatctgcagactccaccgtgcaattcatcttttaccaacctatcattcacagatggcgtgagacagacttttttccttgttctgcaacctgtggtggaggctaccagctgacatctgctgaatgctacgatctgcgctcaaatcgagttgtggctgaccagtattgccactattacccggaaaatattaagccaaagcctaaactccaggagtgtaacctggatccctgccctgcaagcgacgggtacaagcagatcatgccttatgatctgtatcacccattacctaggtgggaagctaccccctggaccgcatgctcttcgagttgcggcggaggcattcagtcgagagcagtgagctgcgtggaagaggacatccagggccatgttacctccgtcgaggagtggaagtgtatgtacactccgaagatgccaatcgctcaaccttgcaacatatttgattgtcctaaatggcttgctcaggaatggtctccatgtaccgtgacctgcggccagggattgaggtatagagttgtactatgtatcgatcaccgcggaatgcacacgggcggatgctccccaaagacaaagcctcacattaaggaagaatgtatcgtgccaacaccttgttacaagcccaaggagaagttgcccgtggaggccaagcttccatggttcaaacaagcacaggagctcgaagagggagccgcagtgagcgaagagcccagttttatacctgaggcctggagcgcctgtactgtgacctgtggcgtcggaactcaggtacgcattgtgcgctgccaggtgctgctctctttctcacagagtgttgcagacctccctattgatgagtgtgagggaccgaagcccgcaagccaacgcgcttgctatgctggcccatgttccggtgagatccccgaattcaatcctgatgaaacagacgggctgttcggcggtctacaggatttcgatgaactgtacgactgggaatacgagggtttcaccaaatgtagcgagagttgcggtggtggcgtccaggaggccgtggtttcttgcctcaataagcagacccgcgaaccagcggaggagaacctatgtgtaaccagtcgccgacctccccagctgctaaagagctgcaatcttgacccctgcccagcaagaagctcaatcgattcagcatggaacgcttgcaatgttctctgctag

SEQ ID NO: 213467 - DNA, 1401 bp, synthetic construct
  misc_feature 1..1401: note = Description of Artificial Sequence: Synthetic coding sequence
  source 1..1401: mol_type = other DNA
atgtgtctgacggatgaatggggctttttcttctttttttttctcggcgtgccggaggccgaagtcacatggttccggaataagtccaagctgggatctccgcaccacttgcacgagggcagcctgctgctaactaatgtgtccagtagcgaccagggtttatattcatgccgggcagccaacctccacggtgaactgactgaaagcacgcaactgctcatcttggaccctccacaggtgccaacacaactcgaagacataagggctcttttggcggcaacaggcccaaatctcccctcagttctaacttccccgctgggtacccagctagtgctggaccccggaaacagtgcgctgctcggatgccctattaagggacaccctgtaccaaacatcacttggttccatgggggacagccaattgtgactgctacgggactgacccatcacattttggccgctgggcagatcctgcaggtggctaacctttccgggggatctcaaggggaattctcatgtcttgcccaaaacgaggcaggggtgctgatgcagaaggcttccctggtaatccaggattattggtggtcagtcgacaggctggctacttgctcagctagttgcggcaatcgaggtgttcagcagccgagattaagatgcctgttgaacagtaccgaggttaatcctgcacattgcgctggcaaggtgagaccggctgtccagcccatagcatgtaacagacgtgattgtccctccagatggatggtaacttcttggtctgcgtgcacacgtagctgcggcggaggggttcagacacgaagggtgacatgccagaagctcaaagcctccggaatatctacccccgtcagtaacgatatgtgcactcaggtggcgaagaggccagtggatacccaggcgtgcaaccagcaattgtgtgtggagtgggcattttcctcctggggacagtgcaatggcccatgcattggtccacacctagcagtgcagcacaggcaggtcttctgccagacccgcgatggcatcactctgccgagcgaacagtgcagcgccctgcccagaccagtttccacccagaattgctggagcgaggcctgttcagtgcactggagggtgtccctctggaccctctgcacagccacttgtggcaattatggtttccaaagcagacgggttgagtgcgtccatgccaggaccaataaggctgtgccagaacacttatgtagttggggcccacggcctgctaactggcagcgctgtaacatcaccccttgtgaaaatatggagtgcagggacacgacccgctactgcgaaaaagtgaagcagctgaagttatgtcagctgtctcagttcaagtccagatgctgtgggacttgtggaaaagcctag

SEQ ID NO: 213468 - DNA, 1578 bp, synthetic construct
  misc_feature 1..1578: note = Description of Artificial Sequence: Synthetic coding sequence
  source 1..1578: mol_type = other DNA
atggaatgttgtcggagagccactcccggtaccctcctgctgtttctggcattcctgttgctctcctcaaggacggcgagatctgaggaggacagggacgggctgtgggatgcatggggcccatggagtgagtgctcacgaacctgtggagggggtgcatcctacagcctgcgcagatgtctgtcttctaaatcttgtgagggcaggaacattagatatagaacgtgctcgaacgttgattgcccacccgaagccggagatttcagagcccaacagtgttcagctcataatgacgtcaagcatcatggacagttttatgagtggctgcccgtcagcaacgatccagataatccctgtagcttgaagtgccaggctaagggaaccaccctggttgtggaactggcccctaaagtcttagacggtacacggtgctacaccgagtctctggacatgtgcatcagcggactatgccagattgtgggatgtgaccaccaattgggatccactgttaaagaagacaactgcggcgtgtgtaacggagacggaagcacctgtaggctggtccgaggacaatacaaatcgcagctgagcgcgacgaagagcgatgacaccgtcgtggccatcccgtatggcagcagacacatacggctggtcctgaaggggccagaccacctgtacctggagacaaagaccctccagggcacaaaaggcgagaatagtttgagcagtactggtacattcctagtggataatagctctgtagacttccaaaaatttcctgacaaggagatattacgaatggcgggtccactgacggccgatttcatcgttaagattcggaactcaggttctgcagattcaaccgtgcagtttatcttttaccagccaatcattcacagatggagggagacggacttcttcccatgctcggcaacctgtggcggtgggtaccaactgacaagtgcagagtgttatgatctgaggtccaatagggtggtcgctgaccagtactgtcactactacccagaaaacatcaaaccgaagcccaagctgcaggaatgcaatctggacccttgtccagcgtccgatggctataagcaaattatgccttatgacctttatcatccattgccaagatgggaggctaccccatggaccgcctgttcatctagttgtggaggtggcatacaaagcagagctgtgtcttgcgtagaggaagatatccaggggcacgtgactagcgtggaagagtggaaatgtatgtacacccctaagatgccaattgcccagccatgtaatatcttcgactgtcccaagtggttggcacaggagtggtctccatgcaccgtgacatgtgggcagggattgaggtaccgggtggtgttatgtatcgaccaccggggtatgcacactggtggatgttcaccgaagacaaagccacatataaaggaggaatgtatcgttcctactccttgctacaaacccaaggagaaattgcctgttgaggcgaaacttccatggtttaagcaggcccaggaactggaggagggggctgccgtgagcgaagagccaagttag

SEQ ID NO: 213469 - DNA, 786 bp, synthetic construct
  misc_feature 1..786: note = Description of Artificial Sequence: Synthetic coding sequence
  source 1..786: mol_type = other DNA
atgtgtctcaccgacgaatggggatttttctttttttttttcctcggggtccccgaggctgaagtaacatggttccggaacaaaagcaagctaggaagcccccaccatcttcacgaaggcagtctgttactcaccaatgtaagttccagcgatcagggtctctattcatgtcgggctgccaatttgcatggtgagttgacagagtccactcagttgttgatcctcgacccaccccaggtgccaacacagctcgaagatatacgcgctctgttagctgccactggacctaatctgcccagcgtgctgacctctccactaggaacgcagctggtactcgaccctgggaacagtgctttgctggggtgtcctataaagggccatcccgtgccgaacatcacttggtttcacggcggtcagcccattgtcacggcgacggggcttacacaccacatcctcgccgcagggcagatactgcaggtggcaaatctcagtggcggatcccagggggagtttagctgtttggcccagaatgaggccggagtgttgatgcagaaagccagtcttgtcattcaggattactggtggagcgttgacagactcgcaacatgttctgcgtcctgtggaaaccgtggcgtgcagcagccgaggcttaggtgcttactgaacagtactgaggtgaaccccgctcattgtgccggtaaggtcagacctgccgttcagcccatcgcttgcaacaggcgcgactgcccgtccagagccatggggctcgcttcaggactcacatag

SEQ ID NO: 213470 - DNA, 5288 bp, synthetic construct
  misc_feature 1..5288: note = Description of Artificial Sequence: Synthetic coding sequence
  source 1..5288: mol_type = other DNA
atggagtgctgccgcagagctactcccggaacccttttgctctttctggccttcttgctgttatcctctcgtactgctcggagtgaagaagaccgagatgggctgtgggatgcttggggcccttggtcagaatgcagccggacatgcgggggaggagccagctacagcctgcgtaggtgcctatcatctaaatcctgtgaagggcgaaacatccggtatcggacctgcagcaatgtggactgtccccctgaagccggagactttagagcacagcagtgtagcgcccataacgatgtgaagcaccatggacagttttacgaatggctgccggtcagtaacgaccctgataatccctgttccctcaagtgtcaagcaaaaggcactacacttgtcgtggaattagccccaaaagtcctagatggcaccagatgctacaccgaatccttggatatgtgcatctcaggactgtgccagattgtcgggtgtgaccaccaactgggttccaccgtaaaagaggacaactgcggtgtgtgtaatggggatggttccacatgcagactagttcggggacaatacaagagtcaactgtccgccactaaatcagacgatactgtagtcgcaattccatatggatcgcgccacattcgcctcgtgcttaagggccctgatcacttgtacctcgagaccaagactctgcagggaaccaaaggcgagaactctttgagctccactggaacattcctcgtggataactcctcagtcgatttccagaaattcccagataaggaaatcctgagaatggcaggtccactgacagccgacttcatcgttaagatccggaacagtgggagcgccgatagcacagttcaatttattttttaccagcccattattcataggtggagagagacagatttctttccgtgttctgctacatgcgggggtggttaccaacttacatctgcagaatgctacgatctgcggagcaaccgggttgtggccgaccagtactgccactattatccagagaatatcaaacccaaaccaaagctccaggaatgcaatttagacccatgccctgcctctgacggatataaacagattatgccatatgacttatatcatccgctcccacgatgggaggcaaccccttggactgcttgctcctcctcgtgcggtggcggtattcagagcagggctgtgtcatgtgtggaggaagatattcagggacatgtcacttctgtggaagagtggaagtgtatgtacacccccaagatgcctatcgctcagccatgcaacatcttcgactgccccaagtggctggctcaggagtggtccccttgtactgtgacatgtggtcagggactaaggtaccgcgttgttctctgcatagaccacagagggatgcacacaggcggatgttcgcctaagacgaagcctcatatcaaggaggaatgtatcgtgccaaccccctgttacaaaccaaaggagaagctacccgtagaggcaaaactgccctggttcaagcaggcacaagagctggaggagggggctgctgtgtccgaggagccatcttttattcccgaggcctggtccgcttgcacagtgacttgcggggtgggcacccaggtccggattgttcggtgccaggtactgctgagcttttcacagtccgttgctgaccttcctattgatgagtgtgagggtcccaagccagctagtcagcgagcatgttacgccggaccatgtagtggcgagatccctgaattcaaccccgacgagaccgacggtctcttcggtggtctgcaagattttgacgagctgtacgattgggaatatgagggatttacaaagtgctccgaatcatgtggtgggggagtacaagaggccgtggtgtcgtgtctcaacaagcagacgcgtgaacccgctgaagagaatctgtgtgtgacctctcggagaccccctcaactgttaaagtcctgcaatctggatccttgtcctgctaggtgggagattggcaagtggagtccgtgttctctgacttgcggtgtgggattacagacacgagatgtgttttgttcccacctgctcagcagagaaatgaacgagaccgttatactagccgatgaactttgccgccaacctaaacctagcaccgttcaggcttgcaataggtttaactgtccacccgcttggtaccctgctcagtggcagccttgcagtcgaacctgtgggggtggggttcaaaagcgagaggttctctgcaaacagcgcatggcggacggaagcttcctggagctcccagaaaccttttgttccgcttccaagccagcatgccaacaggcttgcaaaaaagatgattgccctagcgagtggctcctatccgactggacagaatgcagcacctcttgtggtgagggcactcagacccggtccgctatctgcaggaaaatgctcaagacagggctctccacagtagtcaattctactctgtgccctccattgccgttttcgtctagcattcggccatgcatgttggcaacgtgtgccaggcccggtaggccgtcaactaagcactctccccacatcgcagctgctcgtaaggtgtacattcagacccgtcgccagagaaaattacacttcgtcgtgggcggatttgcatatctcctcccgaagaccgcagtcgttcttcgatgccccgcaaggagggtgcgaaaaccgctgattacttgggagaaggacggtcagcatctcatctcgagtactcacgtaaccgtggcgccatttggctatcttaagatccaccggctgaaaccgtccgatgctggcgtgtacacatgcagtgcagggccagcgcgagaacattttgtgataaagttaattggaggaaatagaaaactggtagcccgtccactcagcccgagaagtgaggaggaggtactggccggaagaaagggcggtcctaaagaggcacttcagacacataagcaccaaaacggaatcttctccaatggctctaaggcagaaaagaggggattggccgcaaatcccggaagccgctatgatgatctggtcagtcggttgctggagcaaggcggttggcccggtgagctcttggcaagctgggaagctcaggactcagccgagcgcaatactacctctgaagaggatccgggagccgagcaagtgctgttgcatttaccattcactatggtgaccgagcaacgaaggttggacgacatactcggtaatctcagtcaacaaccagaggagctgagggatctatactccaaacacttggtggcacaactggcccaggaaatattccggagtcacttggaacatcaggacacacttctgaagcccagcgagcggaggacctcccccgtgaccttgtctccacacaaacatgtttctggcttttcgtcgtcattgcggacttcttcgactggcgacgcagggggtggatcccgccgtccacataggaaacctactattctgaggaaaatcagtgcggctcaacagctgtccgcatctgaggtggtgacacacttaggacagactgtcgccctggcttccggtactctgagcgtgcttctccattgtgaagcaatcggccacccaaggcctactattagctgggccagaaacggggaggaagttcagtttagtgaccggatcttgctacagccagacgactccctccagatcctggcccctgtagaagcagacgttggattttacacctgcaatgctaccaatgcgcttgggtatgactctgtgagtattgcagtaacattggccggtaagcctttggtgaaaaccagcagaatgacggtgataaatactgagaagcccgcagttacagtcgacatcgggagcactatcaagacagtccagggcgtgaatgtaacaattaattgtcaggtggccggtgtgcccgaggctgaggtgacatggtttcggaacaaatcaaagcttggctctccgcaccatctgcacgagggttccctgctcctgacgaacgtgagctctagtgaccaaggcctgtactcctgtcgcgcagcgaacctgcatggagaactcaccgaatctacacaacttctgatcttagacccgcctcaggttccaactcagttggaggatatcagggccctactcgccgctaccggcccaaatttgccgtcagtcctcactagcccactgggtactcaactagtactcgatcccggtaatagcgctctgttaggttgtcccattaaagggcatccggtcccaaatatcacttggttccacggcggacagcccatcgtcaccgctactggtttgacccaccacatacttgctgcgggacagattctacaggtagcgaacctgagcggagggagccagggggaattctcttgtctcgcccagaacgaggctggcgtactgatgcagaaagccagtctggtcatccaggactactggtggtctgtcgaccgtcttgctacctgttcggcaagctgtggcaataggggcgtgcaacaacctaggttgcggtgtctgctgaacagtacagaggtgaacccagcccactgtgctggaaaggttcggccagccgtgcagcctatcgcttgcaacaggagagactgcccaagcagatggatggtgacatcatggtcggcgtgcacccggtcatgcgggggaggcgtccaaaccagaagggtcacctgccaaaaactgaaggctagtggcataagcacgccggtgagcaatgacatgtgcacccaagttgccaaaaggccggtggatacacaggcatgcaatcaacagttgtgcgtggaatgggcattcagctcatggggccagtgcaacggaccctgcatcgggcctcaccttgccgtacagcaccggcaagttttttgtcaaaccagagatggcattacattgccctccgaacaatgtagcgccttgcccaggccagtatcaacccagaactgctggagtgaggcttgtagtgtacactggagagtgtccctgtggactctgtgcactgctacatgtggcaattacggttttcaaagccgtagagtggaatgcgtccatgcaaggactaacaaagccgtcccagagcacctttgttcttggggacctcgaccagcaaactggcagcggtgtaatataaccccttgtgaaaacatggagtgcagggatactacaagatactgtgaaaaggtgaagcagctgaaactgtgtcagctgagtcaatttaagtcccggtgctgcggcacttgcggtaaagcata

SEQ ID NO: 213471 - DNA, 1320 bp, synthetic construct
  misc_feature 1..1320: note = Description of Artificial Sequence: Synthetic coding sequence
  source 1..1320: mol_type = other DNA
atggaatgttgtaggagggccacaccaggaacccttttgctctttctagccttccttttgctgtcatccaggacagccaggtcagaggaggatcgtgacggactgtgggacgcatgggggccttggagtgagtgctctcgcacatgcggcggtggggcaagttacagtctgaggcggtgcttgtcctccaaatcctgtgagggtcgtaacatccggtatcggacttgctcaaacgtcgactgtccccctgaagctggagacttcagagcccagcagtgtagtgcacacaacgatgtcaagcatcatggccaattttacgagtggctgcccgtgtcaaatgacccagacaatccttgtagtctgaagtgccaggcaaaagggactaccttggtagttgaattggcgcctaaagtcctggatggaactcgttgctatactgagtccttggacatgtgcatctcgggcctttgtcagatcgtgggttgtgatcaccagctgggtagcacagttaaagaggacaattgcggagtatgcaacggtgatggatccacgtgtagactggttaggggccagtacaagtcacaactatctgcaaccaagagtgacgataccgtggtcgcgattccctacggatctcgccatattcgattagtgctaaagggccctgaccatttgtatctggagactaaaaccctccaggggacaaaaggggaaaactcactgagctccaccggcacctttcttgtggataattcctcagtggactttcagaagtttccggacaaagagatcctaagaatggccggtcccctcacggccgactttattgtgaaaattcgcaatagtggctctgcagacagcactgtgcagtttattttctaccagcctataatccaccgctggagggagacagattttttcccatgttctgccacatgtggcggtgggtaccaacttaccagcgccgagtgttacgacctgcgtagtaatagagtggtcgcagaccagtactgccattactaccctgagaacatcaaacctaagcctaagttgcaagaatgtaacctcgacccttgcccagcaaggtgggaggcaacaccctggaccgcatgtagttcaagctgcggtggaggcatccaaagtagagctgtgtcctgtgtcgaggaggatattcagggccatgtcacttctgtggaggagtggaaatgcatgtacacccctaaaatgcctatcgcccagccttgtaacatcttcgattgccccaagtggctggcccaggagtggtcacctgttaccgtcccaagcttttttgtgcactag

SEQ ID NO: 213472 - DNA, 2856 bp, synthetic construct
  misc_feature 1..2856: note = Description of Artificial Sequence: Synthetic coding sequence
  source 1..2856: mol_type = other DNA
atggacggccgttggcagtgttcttgctgggcatggtttctgctggtgctcgccgtcgtggccggtgataccgtctctaccgggagcactgataactctcctacaagtaacagccttgaggggggtacagacgccaccgccttttggtggggcgaatggaccaaatggacagcctgttccagaagctgtgggggaggagttacctcccaggagcggcattgtctgcaacagcgtaggaagtctgtgccaggcccagggaaccgcacgtgcactggcactagtaagagataccagctgtgtcgcgttcaggaatgcccacccgacggaaggagcttccgcgaagaacagtgtgtgtcttttaactcccatgtgtacaatggtaggacccaccagtggaagcctctgtatcccgatgactacgttcacataagcagcaaaccgtgcgacctgcactgcacgaccgtagacggacaaagacagctgatggtgccagcgagggatgggacgagctgcaagctgacggacctacggggtgtctgcgtgtccggcaagtgcgaacctattgggtgtgacggggtgctgttttcaacacacactctggacaaatgcggcatctgtcagggcgacggctcatcctgtactcacgttaccggcaactaccgcaaaggaaatgcccaccttgggtattcccttgtgacccacatccctgcaggcgcacgcgatatccagatagtggagaggaagaagtccgcagatgtgttagctttagcagacgaagctgggtactacttcttcaatgggaattataaagtggatagccccaagaatttcaatatagctggaacagtggtaaagtaccgcaggcctatggatgtatacgagaccggcattgaatatattgtggctcaggggcctaccaatcaggggctcaatgtgatggtttggaatcagaacggcaagtcaccatctataacattcgagtatacactcctgcagcccccacacgaaagccgcccacaacctatctattatggattctcagagtccgccgagagccaaggacttgatggggctggtcttatgggcttcgtgccgcacaatggctccctctacggccaagcctcgtctgagcgcctggggcttgataaccggctgttcggccaccccggtctggacatggagctgggtccctcccaagggcaggaaactaatgaagtatgcgaacaggccggaggtggtgcctgcgagggaccaccacgcggaaagggattcagggaccgcaacgtcactgggactccactgactggcgacaaggatgacgaagaggtcgacacccacttcgcctctcaggagtttttcagcgctaatgcgatctcagaccagttgctgggggcaggctctgatctgaaggacttcactctgaatgaaactgtgaattctattttcgcccagggcgcaccacgcagctctttggccgaaagcttcttcgtggactacgaggagaacgagggtgcagggccttaccttctaaacggtagttacctcgaactgagctcagatcgcgttgccaattcttcatccgaagccccattccccaatgtgtcaacatctctactcacatcagccggaaatagaactcataaggctaggacaaggcctaaggcccgtaaacagggtgtgagccctgccgatatgtatagatggaagctctcgtcccacgagccctgcagtgctacctgcacaacaggagtgatgtccgcgtacgctatgtgtgttagatacgatggagtagaggttgatgattcctattgtgatgccctcactagacccgagcccgttcacgagttctgtgcgggaagggagtgccaaccacggtgggagacaagctcttggagcgaatgcagccgcacgtgtggtgaggggtaccagtttagagtggttcggtgttggaagatgctgtctcctggatttgattcttccgtatacagtgatctatgcgaagcagccgaggccgtgagaccagaggaacggaaaacatgtcgaaatccagcctgcggccctcagtgggaaatgagcgaatggagtgaatgcaccgcaaagtgtggggagcgcagtgtagtcactagggacatcagatgtagtgaagacgagaagctctgtgatcctaacacacgcccagtgggtgaaaaaaattgcacaggtccaccatgcgacagacaatggacagtgtccgattggggcccatgcagcggatcctgtggccaaggaaggaccatcaggcacgtgtattgcaagaccagcgatgggcgtgtggtaccggaatcccagtgccagatggaaacaaaacctctcgctattcacccatgtggcgacaaaaattgccccgcacattggctggcacaggattgggaaaggtgtaatactacatgcggcagaggagttaaaaagagactggtgttgtgcatggagctggccaatggcaagccccagacacggagcggtccagagtgtggcctcgccaagaagccacccgaggaaagcacctgtttcgagcgcccatgttttaaatggtataccagcccatggagcgagtgcaccaaaacatgtggcgtgggagtgcgcatgagagatgtcaagtgttatcaggggacggatattgttcggggttgtgatcctctcgtgaagcctgtgggaaggcaggcatgtgatttgcagccatgtcctacagaaccacccgacgactcttgccaagaccagcccggaaccaactgcgctttagcaatcaaagtcaacctgtgcggtcattggtattacagcaaggcttgctgccgtagttgtagaccaccccattcttag

SEQ ID NO: 213473 - DNA, 2856 bp, synthetic construct
  misc_feature 1..2856: note = Description of Artificial Sequence: Synthetic coding sequence
  source 1..2856: mol_type = other DNA
atggacggacgctggcagtgttcttgttgggcttggtttctgctggttctggctgtcgtggcaggcgatacagtctcgaccggcagtacagataatagtccgacttccaactcgttggaaggaggcacagacgctacagctttctggtggggcgagtggactaagtggaccgcgtgctctcgcagttgtggaggaggggtgacatcccaggaacggcactgtttgcagcaaagaaggaagagtgttccaggacccggaaaccgtacctgtacgggaacttcaaagagatatcagctctgccgggttcaggagtgtccccctgatggacgctcttttcgagaggagcagtgtgtatcctttaacagccacgtctacaatggcaggacccaccagtggaagcctctctacccagacgactacgtgcatatatcctccaagccttgtgatctccattgcactaccgtggacgggcagagacagcttatggtgcccgcaagggatggcacatcgtgcaaactcacggatctgagaggagtttgcgtcagcggtaaatgtgagcctatcggatgcgacggtgtgctcttctccactcacacgttggacaagtgcggcatatgccagggcgacggttcctcttgcactcacgtcaccggtaactaccgaaagggcaatgcacatctggggtattctcttgtaacccatattcccgctggggctcgagacatacagattgtcgagagaaagaaatctgcagacgtgctggcacttgccgacgaggcaggttactatttttttaacggcaactataaggtagattctcccaaaaacttcaatatcgctggcaccgtggttaaataccgacgccctatggacgtctacgagactggaatcgagtacatcgttgcacagggacctactaatcaaggattgaacgtgatggtctggaaccagaacggcaagagcccttctatcaccttcgaatataccctccttcaaccaccacacgaatctcgaccccagccaatctactacggattttcagagtcagcagaaagccaaggacttgatggcgctggactgatgggattcgtaccccacaacggatcactttacggtcaagcttcctcagaacgtctcgggcttgacaaccgtctgtttggtcaccctggtcttgacatggagcttggcccttcccagggacaggaaaccaacgaggtgtgcgaacaggctggcggtggggcttgtgagggacccccacgagggaaaggatttcgggataggaatgtcaccggtacccctctgaccggcgataaggacgacgaagaagtggatactcactttgcctcccaggaatttttctccgccaatgccattagcgaccagctcttgggcgcaggcagcgacctgaaagactttactctcaatgagaccgtcaattctatttttgcccaaggagcacccagatctagtttggcagagagctttttcgttgactatgaggaaaacgaaggggctggcccatatttgttgaacgggtcctacctggaactgtcttccgacagggtcgccaactcatcgtctgaggcacccttccccaatgtgtcgactagcctgctcacttctgcagggaacaggacacataaggccagaacaagaccaaaagcacggaaacagggagtctctccagccgatatgtaccggtggaagctctcctcccacgagccctgcagcgccacatgcaccacaggtgtcatgagcgcctacgcaatgtgtgtgagatacgatggagttgaggtcgacgatagctactgtgatgctctgacccggcctgaaccggtccacgagttctgtgctggaagagaatgccagccgagatgggaaaccagctcctggtccgagtgctcccggacatgcggtgaggggtaccagtttagggtcgtgaggtgctggaaaatgttaagccctggattcgattcttcagtctacagcgacctgtgcgaggccgcagaagccgtacgtcccgaggaacggaagacctgcaggaaccctgcctgcggaccccagtgggagatgtctgagtggtctgagtgtaccgctaaatgtggagagcgtagtgtcgtgacaagagacatcagatgtagtgaagatgagaagctgtgcgatcccaatactaggccagttggcgagaagaactgtaccgggccaccctgtgacaggcagtggacagttagcgactggggaccatgcagcggaagctgcggacagggccgaacaatccgccacgtatattgcaagactagtgatgggagagtggtccccgagagtcagtgtcaaatggagactaagcctcttgctattcacccgtgcggcgacaaaaactgtcccgctcactggcttgcccaggattgggagcgctgcaacacaacttgcgggaggggggtaaaaaagcgccttgttctctgtatggaattggcgaatggaaagccccagactcgctcggggcctgaatgtggcctggcaaagaagccacctgaggagtctacctgcttcgagcgcccttgtttcaaatggtacacgtccccatggtctgaatgtactaagacctgtggcgtgggcgtgaggatgcgggatgtgaagtgttatcagggaacagacatcgtgaggggatgcgatcctttggtgaagcctgtgggaagacaagcctgtgaccttcagccctgccccacggagccacctgacgactcatgccaagaccagcctggtaccaactgtgcacttgctattaaagtgaatctatgtggacattggtattactccaaagcctgctgtcgcagctgtcgaccaccacacagctag

SEQ ID NO: 213474 - DNA, 3183 bp, synthetic construct
  misc_feature 1..3183: note = Description of Artificial Sequence: Synthetic coding sequence
  source 1..3183: mol_type = other DNA
atgctgtttgaggtgggagaaggcggaggggctggggaggaggggaagggcagaggccgacccggtcgatcgctatgtacacacgcagccccagctagaacagctcacttggccccaagtgctctgcgaagcgccaggcctttcctgtgggaagataacctgttgaccagatcacagggcttaccagacaatcacgaccaacttgtgcccgacaatctcgaagcttgggcattggcagggcctcgtggattgtttcccaagcgaacattagttatatggaagcgtatcggcgcaggactcgttgtgacagtagccctgctgcctaggatggatggcaggtggcagtgtagctgctgggcatggtttttgcttgtgctggctgtcgttgctggtgatacggtgtccacgggcagtaccgacaattcccctaccagtaattccctggaaggcggaactgatgcaactgccttctggtggggggagtggactaagtggaccgcatgttcaagatcctgtggcggaggcgtgacctcacaggagcggcactgtctgcaacaaaggcgaaagtccgtaccagggcctggaaaccgtacctgcaccggaacaagtaagagatatcagctatgtagggtccaggaatgccctcctgacggtcggtcttttcgcgaagaacagtgcgtatcatttaattcccacgtgtataatgggaggacccaccagtggaagcctttatatcctgatgactacgtgcatatttcttcgaagccttgcgacctccattgtaccacagtggacggccagcgtcagttgatggttcccgctagagacggcacctcctgcaaattgacagacttacgtggtgtctgcgttagcggaaagtgcgagcccattggttgcgacggcgttttgttttccacgcacaccctggataaatgcggaatctgccagggtgacggctctagctgcacccacgtgactggaaactatagaaaaggcaacgctcatctggggtacagcctggtaacacatattcccgctggagctcgcgacatccaaatagtcgagcgaaaaaagtctgcagacgtgctggcccttgcagatgaggccggatactattttttcaacgggaactacaaggttgactctcctaagaacttcaacattgctgggaccgtggttaaatacagaaggccgatggacgtgtatgagactgggatcgagtatatcgtcgctcaggggccaaccaaccaagggctcaatgtgatggtgtggaatcaaaatgggaagtccccctcaattacattcgagtataccctcctgcagccaccccacgaaagccgcccacagccgatctactacggctttagcgaatccgctgagagtcagggactcgacggcgcaggattaatgggtttcgtgcctcacaacggatctctctatgggcaggcttcaagtgaaaggctgggtctggataatcggttatttgggcacccaggtctggacatggagttgggtccatcgcagggtcaggagaccaacgaagtatgcgagcaggccggtggcggagcctgcgaaggccctcccaggggaaaagggttcagggacaggaacgtcaccggcacacccctgacaggcgataaagacgatgaagaagtcgatacccactttgccagccaggagtttttttcagccaatgctatcagtgaccagcttcttggggctgggtcagatctgaaggactttacgcttaatgagacagtcaattctatttttgctcagggggcacccagatcatccctggccgagagctttttcgtcgattatgaagaaaacgaaggggctggtccatacctgctgaatggcagttacctggaattgagcagcgaccgtgtcgctaattcttcaagtgaggcacccttccccaatgtgtctacctctctcctgacctcagccggaaaccggacacacaaggcacggacaagaccaaaagcccgaaagcaaggcgtgtccccggctgatatgtaccgatggaagctgagctcacatgagccttgttcagctacatgtaccacaggtgtaatgtctgcatatgctatgtgtgtgaggtacgacggtgtggaagtggatgacagttactgtgatgccctcactcggccagagcccgtccacgaattctgcgcgggacgtgaatgccagccgagatgggaaacctcctcatggtctgagtgcagccgcacttgcggcgaaggataccagttcagagtcgtgcgctgctggaaaatgttgagccctggcttcgactcatccgtttactcagatctctgtgaggcagccgaggctgtgcgtccagaggaaagaaagacctgccgaaaccctgcctgcggccctcagtgggagatgtccgaatggagcgagtgtacagccaagtgtggagaacgtagtgttgttacccgcgacattcgttgtagtgaggacgaaaagttgtgtgaccctaatacccgccctgttggggaaaaaaattgtactggacccccttgtgataggcaatggaccgtatcagattggggtccctgcagcggctcttgtgggcaggggcgtaccatccgtcacgtgtactgcaaaacatctgatggtcgggtggtcccggagtcccagtgtcagatggaaactaagccgctggcgattcatccctgcggcgacaagaactgccccgctcactggctcgcccaggattgggaacgctgtaacacaacatgtggcaggggcgtgaagaaacgcctggtgctctgcatggagctagctaatgggaagccccagactcgctctggccctgaatgtggtctcgctaagaaaccgcctgaagagagtacttgtttcgagcggccatgcttcaagtggtacaccagtccctggtcagagtgcactaagacttgtggcgttggcgtgcgtatgcgggacgtcaaatgttatcagggtaccgacattgttcggggttgcgacccactagtaaagccagtgggacgccaggcatgtgacctccaaccctgccccaccgaaccgcctgatgattcctgtcaggatcagcccggtaccaactgcgcattggcaatcaaagtgaacctgtgcggtcactggtactatagcaaggcatgttgcagatcatgtcgtcccccacattcatag

SEQ ID NO: 213475 - DNA, 5076 bp, synthetic construct
  misc_feature 1..5076: note = Description of Artificial Sequence: Synthetic coding sequence
  source 1..5076: mol_type = other DNA
atggcgagctggaccagcccatggtgggtgctgattggaatggtgttcatgcattctcctctgccacagacaaccgccgaaaaatcaccaggagcctatttcttgccagagtttgccctctcccctcaagggtccttcttagaagacaccactggggaacagttcttgacttatagatacgacgatcaaacctcacggaatacaaggtccgacgaagataaggatgggaactgggacgcttggggcgactggagtgactgcagcagaacatgcggaggcggagcttcctattcactgcggcgatgcctcacaggcagaaactgtgaaggtcagaacatcagatataaaacctgctccaatcatgactgtcctcctgatgcagaggattttcgggcacagcagtgctcggcctacaacgacgtacaatatcaaggccactactatgagtggttgccacgctacaacgatccagctgcaccttgcgctctgaaatgtcacgcccagggtcagaacctcgtggtggaactggcacctaaggtgctcgatgggactagatgtaacacggactccctggacatgtgcattagtggcatctgccaagcagtcggctgcgacaggcagttgggatctaatgccaaagaggacaattgtggagtgtgcgcaggcgacggatccacatgccggttggtgcgcggacagtccaagagtcacgtgtcccctgaaaaaagagaggagaatgtgatcgctgtgccactgggttctcgttcagtgaggatcaccgtgaagggccctgcccacctgttcatcgaatccaaaactttgcaaggctcaaaaggcgagcatagcttcaacagccctggagttttccttgtcgagaatacaactgtggaattccaaagaggatccgagagacagaccttcaaaattccaggcccactgatggccgactttatctttaagacccggtacaccgccgcaaaggacagcgtggtgcaattttttttttaccagccaatcagccaccagtggaggcagacagactttttcccttgtaccgtgacatgcggcggaggataccagctgaactcagcagaatgcgtggacatacggctcaaacgtgtggtacccgatcattactgccattactatcctgagaatgttaagcctaaacccaaactaaaagaatgctcgatggatccttgtccgtcaagtgatggatttaaagagattatgccctatgatcatttccagcctttacctaggtgggagcataatccctggaccgcctgcagcgtttcatgtggtggtgggattcaaagacgatcttttgtgtgcgtggaagagagcatgcacggcgaaatactgcaggtcgaggaatggaagtgcatgtacgcacctaagccaaaggtcatgcagacctgtaatctgtttgactgccccaagtggatcgcaatggagtggtctcagtgtacagtgacctgcggacggggtctgcgataccgcgtcgtgctgtgcattaatcatcgcggagaacacgttgggggttgcaacccccagctgaaactgcacatcaaagaggagtgcgttatcccgatcccatgttacaaacccaaggagaaatctcccgtggaagctaagctcccctggctgaaacaggcccaggaactggaagagactaggattgctaccgaagagcccacattcatccctgaaccctggagtgcatgttctaccacatgtgggcctggtgtgcaagtgagggaggtcaagtgccgtgtgctcttgacctttacccaaacagagaccgaattgcccgaagaagaatgcgaagggcctaaactccccactgagagaccttgtctgctggaggcttgtgacgagtccccagcgagtcgcgaattggatataccattgccggaggattcagaaaccacttacgattgggagtatgccggatttacaccttgtacagctacatgcgttggcggacatcaggaagctatcgcagtatgtctgcacattcaaacacaacagaccgtgaacgactctctgtgtgacatggtgcaccggccaccagctatgagtcaggcatgcaatacagagccttgccctccccgatggcacgtgggctcctggggcccttgctcagctacctgtggagtcgggatacaaacgcgagatgtgtactgcctacatcctggcgaaaccccggctccacctgaggaatgtagggatgagaaaccacacgctctccaggcgtgtaatcaattcgattgcccccctggctggcatatagaagaatggcaacagtgttccagaacatgtgggggtggcacgcagaaccggagagtgacatgccgccaacttttaaccgatggttcttttctcaacctgagcgacgagttatgccagggcccaaaggcttccagtcataagagctgtgcaaggactgattgtccccctcacttggcggtgggcgattggagcaaatgtagcgtgtcctgtggtgtcggcatccagcgcaggaagcaggtatgtcagcggctcgctgccaagggtagaaggatccctttaagtgaaatgatgtgccgagaccttcccggtctcccactcgtgagaagctgccagatgcccgaatgctccaaaatcaagtccgagatgaagacaaagctcggggagcaaggcccacagattctcagtgtgcagagggtgtatatccagaccagggaagagaagagaatcaacctcacgatcggttccagagcatacttactccctaacaccagtgtcatcatcaaatgtccagtgagacgcttccaaaagagtttaatccaatgggagaaggatgggagatgtctgcagaacagcaaaaggctggggatcaccaagagcggaagtctgaaaatccatggcctcgctgcacccgacatcggggtgtatagatgcatagctggcagtgctcaggaaaccgttgtcctcaaactcatcgggacagataaccgtctcatcgctagaccagcattgagagaaccaatgcgagaatatccaggaatggatcactctgaggccaattcactgggggtcacatggcacaaaatgcggcagatgtggaataacaaaaacgatctgtaccttgacgatgaccatattagcaatcagccctttctgcgtgccctgctgggccactgttcaaactcagcgggttctactaatagctgggagctgaaaaacaagcagttcgaggctgcagtcaaacaaggtgcctatagcatggacacggctcagtttgacgagcttattcgcaatatgtcccagctcatggagacaggtgaagtgagcgacgacttggcctcacagctcatctaccagctggttgcagaactagcgaaggcacaacccacacacatgcagtggaggggcattcaagaggagaccccacctgctgcacagctgcggggagaaaccggctctgtcagtcagagctctcacgccaaaaattccgggaagctcaccttcaagccaaagggaccagtcctgatgagacagagtcagcctccctccattagctttaataagacgattaactcgagaattggcaatactgtgtacattacgaaaaggaccgaagtaatcaacattctgtgcgatctcatcacaccatcagaggctacctatacgtggaccaaagatggcaccttacttcaaccgtccgttaagattatcttggacggaacggggaagattcaaatacagaatcccactaggaaagaacaaggcatttacgagtgctctgtcgcaaatcatctcggcagcgatgtggagtcaagtagcgttctgtatgccgaggcacccgtgatcctttccgttgagcgcaacatcaccaaacctgaacacaatcacttatccgttgtggtaggcggaattgtcgaggcggctctgggcgctaacgtcactatccggtgcccagttaagggggttcctcagcccaatattacttggcttaagaggggtgggtccctgagcggtaatgtctccctgttgttcaacggctcattgctgctgcagaacgtgagcctggaaaatgaaggcacgtatgtttgcatagcaacgaacgccttgggcaaggcggttgcgacgtccgtgctgcatctgctggagcgcagatggccagaatcccgtattgtgtttctgcaggggcataaaaaatacattctgcaggctactaacacgcgcacgaacagcaacgatccaactggagaacctccaccacaggagcccttctgggagccgggaaattggtcccactgctctgctacctgtgggcatctcggcgctcggatacaacggccacagtgcgtaatggcgaacgggcaggaggtgtccgaagccctgtgcgaccacctccagaagcctctggccggtttcgaaccttgtaacatccgtgactgtcctgccaggtggtttacttccgtgtggtcccagtgttccgtgtcctgcggagaagggtatcatagccggcaggtcacctgtaagcgtaccaaggcaaacggcactgtgcaggtggtgagcccaagagcatgtgcccctaaggacagacccctggggcgaaagccctgtttcgggcacccttgtgtgcaatgggagccgggaaatagatgtcccggtagatgcatgggtcgcgcagtccgtatgcagcagcggcacacagcctgtcaacacaacagtagtgattccaactgtgacgacagaaagcggcctacactgcgtagaaactgcacatctggagcttgtgacgtgtgttggcacactggtccttggaaaccgtgcaccgccgcttgcgggcgaggcttccagagcagaaaagtggactgcattcatacaaggtcctgtaaacccgtggcaaagaggcactgtgtgcaaaagaagaagcccatctcctggcggcactgccttggcccaagttgcgatcgagactgcacagacactacccactattgtatgttcgtcaagcacctgaatttgtgtagccttgaccgctataagcagagatgttgtcagtcatgtcaagagggttat

SEQ ID NO: 213476 - DNA, 3225 bp, synthetic construct
  misc_feature 1..3225: note = Description of Artificial Sequence: Synthetic coding sequence
  source 1..3225: mol_type = other DNA
atggagaattggacaggcagaccctggttatatctgctcctgctgctgagcttgcctcagttatgcctcgatcaggaggtgctttcagggcactccctgcaaacacccaccgaagaggggcagggtcccgagggcgtgtggggaccctgggtacagtgggcctcttgcagtcagccttgcggagtgggcgtgcagaggaggtctagaacatgccagctgccaacggtacagttacacccttcactacctctccctcccagaccccctcgacatccggaggcgctgttacccaggggtcaaggccctcgccctcagacatctcctgaaactcttccactttatcgtacacagtccagagggaggggcggacctctcaggggaccagcgagtcatttgggtagagaggagacacaagagatcagggctgcccgacgttccaggctcagggacccgatcaagccgggaatgtttgggtatggccgtgttccttttgctctgccactgcatcggaatcgtcggcaccccaggtccccgccacggagtgaactttctctgatttccagtcggggagaagaagccatcccttctcctacgccgagagctgagcccttcagtgctaatgggtctcctcaaacggaactgccacctacagaattaagtgtgcacactccgtctccacaggctgagcccttgtctcccgagaccgcacagaccgaggttgctccccgtacacgccctgccccattgaggcatcacccacgggcacaggcctccggcaccgagccacccagcccaacacacagccttggcgagggcggattcttcagggcctcaccccagccacggagaccatcctcccaggggtgggcatccccacaggtcgctgggagaagacctgaccccttcccatctgtcccacgtggcagggggcagcaaggccagggaccttgggggaccggaggaacgccccacggaccccgattagagccagacccccaacaccctggcgcatggctgccccttctcagcaacggtccacacgccagtagcctgtggagtctctttgcgccaagcagcccgattcccagatgcagtggggagagtgagcaattgagagcctgttctcaggccccttgcccaccagaacaacccgatccccgagccctccaatgtgccgcttttaactcacaggaatttatggggcagctctaccagtgggaaccattcaccgaagtccagggatctcagcgttgcgaactaaactgccgtcccaggggctttcgattctacgtccgccatactgagaaggtccaggatggtacactgtgtcaaccgggagccccagacatatgtgtggccggtagatgtctatccccagggtgtgacgggatcctcggcagcggacggaggcctgacggatgtggagtatgtggaggtgacgactcaacttgtcgccttgtttctggcaatctgacagataggggcggaccacttggctatcagaagatcctatggattccggctggagccctccgcctgcagatcgcccaacttagaccaagcagtaattacttggcactgcgaggaccaggagggagatcaataattaatggtaactgggctgtggaccctcccggatcctatagggcagggggaactgtgttccgctataataggcctcctagggaggaggggaagggggagagtctgagtgccgaggggcctacgactcaacccgtggacgtctacatgattttccaggaagagaatcccggagttttttatcaatacgtgatatccagtccacctcctatattggaaaaccccacacccgaacctcccgtcccacagctgcagcctgagatattgagagttgaaccccctctggctcccgcacctcgacctgcgagaaccccaggcacactacagagacaggtccggataccccagatgccggcacctccccatcccagaacccctctgggaagtccagcggcatactggaaaagggtgggccacagcgcttgttccgccagttgtggcaaaggtgtctggaggcccatatttctctgcatctcccgagaaagtggggaagaactcgacgaaagatcctgtgccgcaggagcccgaccaccagcaagccccgagccctgtcacggcacaccatgtccaccttactgggaggccggtgaatggacaagctgttcccggtcctgcggcccaggtacccagcatcgacagctccagtgccgtcaggagttcggaggtggcggatcctcagtgccaccagagcgatgtggccatctgcctcgacctaatatcacacagagctgccaactaagattatgtggtcactgggaagtgggcagcccatggtcacaatgctccgtgcggtgcggccgagggcagcgtagtcgccaggttcgctgtgtcgggaataacggggacgaagtgagtgaacaggaatgtgcgtccggcccacctcagcccccttcgcgcgaagcctgcgacatgggaccctgtacaaccgcctggtttcactcagactggagctctaagtgttctgctgagtgcgggaccggcattcagcgccgttccgtcgtttgtctcggcagcggtgccgcactgggacctgggcagggcgaggctggggctgggacaggccagtcctgtcctacgggttcacggccacccgacatgcgcgcttgttctctgggtccttgtgagcgcacttggagatggtatacagggccatggggagaatgcagcagcgagtgcggctctggcactcagcggcgtgatatcatctgtgtatcaaagctgggtacagaattcaacgtcacatcaccgagtaattgttcacatctgccgagaccacccgctctgcaaccatgtcagggtcaggcttgtcaggatcgttggttttccactccctggtctccatgcagtcgaagttgtcaaggaggaacccagacacgtgaagtccagtgcctttcgacaaatcagacattatctacccggtgcccaccacaactgagaccaagccgcaaaaggccttgcaatagccagccctgctctcagcgcccagacgatcagtgtaaggactccagccctcattgccctcttgttgttcaggccagactttgtgtgtatccctattatactgccacttgttgccgcagctgcgcccatgtcctggaacgctctccacaggacccttcctag

SEQ ID NO: 213477 - DNA, 3225 bp, synthetic construct
  misc_feature 1..3225: note = Description of Artificial Sequence: Synthetic coding sequence
  source 1..3225: mol_type = other DNA
atggagaattggactgggcgaccatggttatacctgctcctacttctgagcctgcctcaactttgcctggaccaagaggttctgagcggccacagcctccaaactcccacagaggaggggcagggtcccgaaggtgtgtggggaccttgggttcaatgggccagctgtagccagccatgcggagttggagtgcagcggagatcccggacatgccaactgccaacggttcagctgcacccttcactgccactccctcctaggcctcccagacaccctgaagccctactccctcggggacaaggacctaggcctcagacctcaccagagaccttgcccctgtacaggacgcagagcagggggaggggaggccctctcagaggcccagcgtctcacctcgggcgagaggagacgcaggaaattcgcgcagcccgtcgcagccggttacgagatcctatcaaacccggaatgttcggatacggcagggtacctttcgcattgccactccacaggaaccgtcggcacccacgtagcccacctaggtcagaactgtctcttatttcttcaaggggagaagaggctattccctcaccaacacctcgggcagagccctttagcgccaacggttctcctcaaaccgagctcccacctactgaactaagcgttcacactcccagcccccaagcagaaccgctcagcccagagaccgcccagactgaggtcgcacccagaaccagacccgctcccttgcgccaccacccaagagctcaggcttctggcacagagccacccagccccacccactccctgggcgaaggcggattctttcgcgcaagccctcagcccaggcggccttcttctcagggatgggcctctccgcaagtcgctggcagacgtccagaccctttcccaagtgtacctcggggtaggggacagcagggacaaggcccatggggcacaggcggtacccctcacgggccaaggctggagccagaccctcagcatcctggcgcttggctgccactgttgtctaatggccctcacgcttcctcattgtggagcctcttcgccccaagctctcctattccccgttgttcaggggaatctgagcaattgcgagcttgcagtcaagccccatgtccgccagagcagcccgatcctagggccctgcagtgcgcggcatttaattcccaggaatttatgggtcagctctatcagtgggaaccttttaccgaggtgcagggctcacagagatgtgaacttaactgccgtccccgaggctttcgattctacgttaggcacaccgaaaaggttcaggatggcactttgtgtcaaccgggagccccagacatttgcgtggccggtagatgtctcagtcctggatgtgacgggatcttaggtagtgggaggcgtccagacggatgtggcgtttgtggtggcgatgattccacatgccgccttgttagtggtaatttaaccgatcgcggaggcccattaggttatcagaaaatcctgtggatcccggctggggctcttcgcctgcaaattgctcagttacggccttcttccaattacctggccttgcgagggcctgggggacggtcaattattaatggaaattgggctgtggatccgccaggctcatatcgcgctgggggtacagtctttcgatacaatagaccacccagagaggagggtaaaggcgagagcttaagtgcggagggaccaacaacgcagccggtggatgtctatatgatcttccaggaagagaatcccggtgtattttaccagtacgtgataagtagccctcctccaatactggagaaccccacccctgagccccctgtgccccagctgcagcctgaaatactgagagtcgaacctcctctggctccagcgccaaggcctgccaggacacctggcacactccagagacaagtgcggatccctcagatgcccgctccaccccacccgcgaaccccattgggatcccccgctgcatactggaagcgtgttggccattctgcctgttctgcttcctgtggcaagggagtctggcgccctatcttcttgtgcatttcacgagaaagcggggaggagctggacgagcggagttgtgcagcaggggctcgaccacccgcttccccagaaccatgccacggaaccccctgccctccatattgggaggccggtgagtggacttcctgtagtcgctcatgcgggcctggcacccagcatcggcagctgcagtgccggcaggagtttgggggagggggtagtagcgttccccctgaaagatgcggacaccttccgcgtcccaatatcacacaatcttgccagttgcggctgtgtgggcattgggaagtcggctccccctggtcacaatgtagtgtgcgatgcggccgtggtcagagatcacgccaagtccgctgcgtgggaaacaacggcgatgaggtgtccgagcaggaatgcgcaagcggtccaccacagcctccctcaagagaggcatgcgacatgggcccatgtacaactgcttggttccattcagattggtcaagtaaatgctccgcggagtgcgggacaggcatccagcggagaagcgtggtctgcctggggtcaggggcagccctcggccctggacagggggaagctggagctggtactgggcagagttgccccactggatcccgcccacctgatatgcgcgcatgctcgctgggtccctgtgagcgcacttggagatggtacaccgggccatggggggagtgctcttccgagtgcgggtcgggtacgcagcgcagagatattatatgtgtttctaagttaggaacggagtttaacgttacaagcccttctaactgctctcatttacctcgccctccagctctccagccgtgccagggtcaggcttgccaggaccgatggttttccacgccatggtctccttgtagtaggagctgccagggtgggactcaaacccgcgaggtgcaatgtttaagcaccaatcaaaccctcagcactcgttgtcccccacaacttagacccagccgcaagcgaccttgcaacagccagccctgttcccagcgtcccgatgaccaatgcaaagactctagcccacattgccctctcgtggtgcaggccagactctgcgtgtacccctattatactgccacatgttgtcgatcctgtgcacacgtcttagagagaagtccccaagacccatcctag

SEQ ID NO: 213478 - DNA, 3294 bp, synthetic construct
  misc_feature 1..3294: note = Description of Artificial Sequence: Synthetic coding sequence
  source 1..3294: mol_type = other DNA
atggaaaactggacaggcagaccgtggctctatttgctacttcttttgtccctgccccaattgtgcctcgatcaagaagtcctttccgggcattctttgcagacccctaccgaggaaggtcaggggcctgagggtgtgtggggtccatgggtacagtgggcgtcctgcagccagccatgcggcgtgggcgtgcagagacgctctaggacttgccaactcccaaccgtccagctgcatcctagtcttccactgccaccaaggcccccaaggcatcccgaggctctgcttccaagagggcagggaccgagaccccagacctcaccagagacactgcccctgtatagaacgcagagtcggggtcgcggtgggcctctgaggggcccagcaagccatctgggcagggaggaaactcaggaaattcgtgctgctcgcaggagtcgcctcagagatcccattaaacctggaatgtttggttatggacgcgtgccctttgcactaccactacacagaaaccgacgacacccaaggtcaccgccaagatcagaactctcactgatttccagccgtggcgaagaggccatcccttcaccgactcccagagccgaaccattctctgctaatggctctccacagactgaactgcctccaactgagttgtccgttcatactccctccccccaggcggaaccattgagccccgaaaccgcacagaccgaagttgctccacggacccgaccagcaccgttacgccaccatcctcgggctcaggcttccgggaccgaacccccttcaccaacgcactctctcggcgagggcggatttttccgggcatccccccagcctaggagacccagcagccaaggttgggccagcccccaagtggcaggcagacgccctgatccgtttcccagtgtgcctagaggcagagggcaacaggggcaggggccatggggaactggtggaactccacacggcccaagattggaaccagatcctcagcatcccggagcttggcttcctctgttgtctaatggaccccacgcttcttccctttggtccctgtttgctccatcatctccaattccaagatgttccggagagagtgaacagctgcgggcatgttctcaggccccatgccccccagaacagcccgaccccagggcactgcagtgtgccgcatttaactctcaggagtttatgggtcagctataccagtgggagccgtttactgaagctcccctcttgcccctgcgccacgctttcttcctgctgcctggagcaggtagcggcgatagcactggtgtgcaagggtctcaaagatgtgagctcaattgtcggccaagaggatttcgtttctatgtccggcatacagaaaaggttcaggatggcacactgtgtcagcctggcgctcctgatatctgcgtggctggacgatgcctgagccctggatgcgacgggatcctaggctcaggacggagaccggacggttgcggtgtttgcggcggtgacgattctacttgtaggcttgtgtcaggaaatctgactgataggggcggacccctgggttaccagaagatcctgtggatcccagcaggggcactaaggttacaaattgctcaactacgtccctcatcgaattatctggccctgcgtgggccagggggacgatctataattaacgggaactgggccgtagatccgccaggcagctacagggcagggggaacagtgtttagatataataggcccccaagggaggaaggcaaaggcgagtccctgagcgcagaggggcctacaacccagcccgtggatgtttacatgatcttccaggaggagaaccctggcgtcttctaccaatacgtgatttctagcccccctcctatcctcgagaatccaacgcccgagccaccggtgcctcagttgcagccggaaatcctgcgcgtggagccaccattagctcccgctccacggccagctcgcactcccggaacactgcagcgacaggtgcgcattccacagatgcctgcccctcctcaccctcgcacccccctggggtccccggcagcttattggaagagggtcggccatagcgcctgctcagcaagttgcggcaagggcgtgtggagacccatcttcctttgcatcagcagagagtccggggaggagctcgacgagaggagctgcgcggctggagctcggcctcccgcttcccccgagccgtgtcatgggacaccatgccctccgtactgggaggccggagaatggacaagctgcagcagatcctgcggaccagggactcaacataggcagctgcagtgtaggcaggagttcgggggaggagggagctccgtgccacctgaacgatgcggccatctgcctagacccaatattacacaatcgtgccagttgcgcttgtgtgggcattgggaggtcggatctccatggtcccagtgttccgtccgctgcgggcgaggccaacggagccggcaggtcaggtgtgtgggtaacaacggcgacgaagtcagcgaacaggaatgtgcttccggcccaccacagccacctagtagggaggcctgcgacatgggaccttgtacaacagcatggtttcattctgactggtcgagcaagtgctctgcagaatgtgggacaggcattcagagaaggtctgtggtgtgtctaggcagtggcgctgccctggggccaggacaaggagaggcaggggctggcaccggtcagtcctgcccaactggaagtaggccacctgacatgagggcctgctctctcggcccatgcgaacggacttggagatggtacaccggaccttggggcgaatgcagttcggagtgcggctcaggaacgcagaggcgggacatcatctgtgtcagcaagctgggcaccgagttcaacgtcacttccccttccaattgttctcatctacctagacctcctgcgctgcagccgtgccaagggcaggcctgccaggacagatggtttagcactccatggagcccttgctccaggtcctgtcaggggggaactcagacacgcgaggtgcaatgcctctctaccaaccagacgctgagtactcgctgtccacctcaactgaggcccagcagaaagcgcccttgcaatagccaaccatgtagccagagaccagacgatcagtgtaaggattcatccccacattgcccactggtggttcaggcgaggctgtgcgtctacccctattacacagccacctgctgtaggtcatgtgctcacgtcctggaaaggtctccacaagacccctcgtag

SEQ ID NO: 213479 - DNA, 2634 bp, synthetic construct
  misc_feature 1..2634: note = Description of Artificial Sequence: Synthetic coding sequence
  source 1..2634: mol_type = other DNA
atggaaaactggacgggtagaccttggttatacctgctccttctgctttccctcccacaattgtgtctcgaccaggaggtgctgtcgggccattcattacagactccaaccgaagagggacagggaccagagggagtctggggtccgtgggtccagtgggcctcctgtagccaaccatgcggggtcggcgttcaaaggaggagtcggacttgccagctgcccaccgtacagctgcatccctccctgccacttcccccacgacctccacggcaccccgaggctctgttaccacggggacagggtccgaggcctcaaaccagccctgagacgttaccgctctaccggacgcagagccgaggcagaggcggtccactgcgtggacctgcctcacatctcggtcgagaggagacccaagaaatcagagcagcacgtaggagcaggcttcgggatcctatcaagcctggcatgttcggatatggcagggtcccattcgctcttcctctgcaccggaatcgccgacatcctcgctcaccccctcgcagcgaattgtcattaatcagtagcaggggggaggaggctattccctcaccgaccccacgcgctgagcctttctccgcaaatgggtctcctcagaccgagttaccgcctacagagctcagcgtgcacacaccatcgccacaggcagagccactgtccccagagacagcacaaacagaggtggccccaaggaccaggccagccccactccgccaccatccgagggctcaagccagcggcacagaacctccaagtccgacccatagcctgggggaaggaggattttttcgggcaagcccccagccgagacgtccgtccagccaaggatgggcctcgccacaggtggccggtcggcgacctgatccattcccttctgtaccacgtgggcgtggccagcagggacagggcccatggggcacaggtggtactccacatggcccacggctggagcctgatccccaacacccgggtgcctggctccctttactttctaacggccctcatgcttcgtccctctggagtctctttgcacctagctctccaatcccaagatgttcgggcgaaagtgagcagctgagggcatgttcacaggccccatgtcctcctgagcagcctgacccacgagcattacagtgtgctgcatttaactctcaagaatttatggggcagctgtaccagtgggagcccttcacggaggtgcagggttcgcagagatgcgaactgaactgtcggcctcgagggttccgattttacgtgcggcatacggagaaggtccaagatggaacactttgccagcctggggcacccgacatttgtgtggccggaaggtgtctgagccccggatgcgacgggatcttaggctccggtcggagaccagatggttgtggcgtatgtggcggagacgacagcacttgccggcttgtgtccggcaacctcaccgatagaggaggacccctgggctaccaaaagatcctatggatccccgctggcgcactgaggctgcagatcgcccagctcagaccctcatccaattacttggccctgcgcggtcctgggggaaggagcatcatcaacggcaactgggctgttgatcctcctggcagttatagggcaggaggcactgttttccggtacaatcgaccccctagggaggagggtaaaggcgaatcattgtccgccgaaggaccaaccacccagcccgtggacgtatatatgattttccaggaggaaaatccgggagtgttttatcagtacgtgatttccagccctcccccaattttggagaaccccactcctgagccacccgtgccccagttgcaaccagagatactgcgggtagagccccctctcgccccagctccgagaccggctcggaccccaggaacccttcagcggcaggtgcggatcccgcagatgcctgctcccccacatccccgaaccccactgggctcccccgctgcctactggaaaagggtgggtcactcagcttgctctgcctcatgcgggaagggggtatggagaccgatttttctgtgtattagtagggagtctggcgaagaactggatgagcgatcctgtgcagctggagctcgccctcccgcttcaccagagccctgccatggtacaccctgccctccgtactgggaggccggagaatggacctcctgcagcaggtcttgtggcccaggaactcagcaccgccaactgcagtgcaggcaggaattcggcggtgggggttcctcagtacctcctgagaggtgcgggcatctgccgaggcccaacatcacccaatcttgtcagctgcgcctgtgcggacattgggaggtggggtccccatggtcacagtgctccgtcaggtgtggaagagggcagcgcagtcgccaggttcgttgcgttggtaataacggggacgaggtgagtgaacaagaatgtgcttctggacccccacagccgccatccagagaggcctgtgacatggggccttgtactacagcttggtttcactcagattggagctctaaagtctcccctgagcctccagctatttcatgtattttaggaaaccatgctcaagacacatcagccttccccgcatag

SEQ ID NO: 213480 - DNA, 1311 bp, synthetic construct
  misc_feature 1..1311: note = Description of Artificial Sequence: Synthetic coding sequence
  source 1..1311: mol_type = other DNA
atgggctctctggccctggcgggagtgctgatggcagtcgaaagcgttggtgtcatgattcttccggtcgctttgttcaggggtacctccctcacagagggcgcaccctgggctatcagacgctcatgtgggttccagagggagccttgcggtagtcggctgcccagctcagggcttgccccaactacttggcactttgtggcgctgggcaggagcatcatcaacggcaactgggcggtggacccccctggttcgtacagggcgggtggtactgtgttccgctataaccggccaccaagggaggaggggaagggcgaaagcttgtccgccgaggggcctactacccagcccgtggacgtgtatatgatttttcaagaggagaacccaggagtcttttatcagtatgtaattagctctcctccacccatcctcgaaaatcccacaccggagccaccggtgccacagctgcagcccgaaatcctgcgcgtggagcctcctctcgcacctgccccacgtcccgcacgtacacccggtactttgcaacggcaggtcaggatcccacagatgccggcaccccctcatccccgaacacccttggggtcgcctgctgcctattggaagagagtcggccactcagcctgcagcgcttcctgcggcaagggagtctggaggccaatattcctctgcatcagtcgggaaagcggggaggagctggatgagcgcagttgcgccgctggtgcaaggccgccagcaagccccgagccgtgccatggaaccccgtgccccccttattgggaggcgggagaatggacctcctgctcccgctcctgtggcccaggcactcaacaccggcagctccagtgcaggcaggagttcggcggtgggggaagtagtgtgcccccagagcgttgcggccacttgcctcggccaaacataacccagtcttgtcagttgcgactgtgtgggcattgggaggtggggagtccctggagccagtgttccgtgaggtgtgggagaggccagaggtcacggcaggttagatgtgtgggaaataacggagatgaggtctctgagcaggaatgtgcaagcgggccacctcaacccccaagccgggaggcctgtgacatgggaccttgcacaaccgcctggtttcatagtgactggtctagcaaatgtagcgccgaatgtgggacaggaatccagcggagaagtgtcgtctgtctgggatccggagcggcacttggtcccggacaaggagaagcgggtgccggaactgggcagtcatgcccaactggttcacgacccccatag

SEQ ID NO: 213481 - DNA, 2130 bp, synthetic construct
  misc_feature 1..2130: note = Description of Artificial Sequence: Synthetic coding sequence
  source 1..2130: mol_type = other DNA
atgccaggaattgacaagctgcccatcgaagagactctagaagactcaccgcagacacgatcacttcttggcgtgttcgaggaggatgcaactgccatctctaattatatgaaccagctctatcaggctatgcatagaatttacgacgcccaaaatgagctgtcagcagcaacacatctgacctctaaactcttgaaggaatacgaaaagcagagattccctcttggcggtgatgacgaggtaatgagcagcacattgcagcagttttccaaggtcattgatgaactcagtagttgtcatgccgtcctcagcactcagcttgctgacgctatgatgtttcccattacacaatttaaggaaagggatttgaaggaaattttaaccctgaaggaagtcttccagattgcctctaacgatcatgatgccgctattaataggtactcaagactctccaaaaagagagagaatgacaaagtcaaatatgaagttactgaagatgtctatacaagccggaaaaagcaacatcagaccatgatgcactacttttgcgcccttaatactcttcagtataagaagaagatcgccctcctggagccactccttgggtatatgcaggcacagatcagcttttttaaaatgggatcagagaatcttaacgagcaactcgaagaatttttagcgaatatcggcaccagcgtgcaaaatgtgcggcgtgagatggacagcgatatcgagacaatgcagcagacgatcgaggatttagaggtggctagcgaccctctatacgtaccggaccccgaccccactaagttcccagtgaatcgcaatttaacaaggaaagccggatatcttaatgctagaaacaaaactggcttggtgagttccacttgggacaggcagttttactttactcaggggggtaatcttatgtcccaggcacggggagatgttgcaggtggattggccatggacattgataattgcagcgttatggcggttgattgtgaagacagaaggtattgctttcagattacttctttcgatggaaagaagagtagtatcttacaagcggaatcaaagaaggaccacgaggagtggatctgtaccattaataatatctctaaacagatctacctctcagagaaccccgaggaaaccgccgcaagagtgaaccaaagtgccctggaagctgtgactccaagcccgagcttccaacaaaggcacgagagtctaagaccagctgcaggtcagagcagaccaccaacagcacgtacatcgagctctggcagtctgggtagcgaatccacgaatttggcggctctcagtctggattcactagtcgcccctgataccccaatccaattcgacataatcagccctgtttgtgaggaccagcctggacaggcaaaagcctttgggcaggggggtagacggacgaatcctttcggggaatccggcggaagcacgaaatcagagaccgaggactctatcctgcaccagctttttatcgtccggttccttggaagtatggaagtgaaaagcgatgaccaccctgatgtcgtgtatgaaaccatgaggcaaattctggccgcaagggcaatccacaacatcttcagaatgactgagtcgcatcttctcgttacatgcgactgtcttaagttaattgaccctcaaacacaggtgacaaggctgacgttcccactgccatgcgtggtgctgtacgcaacacaccaggaaaataagcggctgtttggttttgttctgagaacgagcagtggcagatctgagagcaacctgtctagcgtttgttatatcttcgagtccaataatgagggcgagaaaatctgcgactccgtgggcctagcaaaacaaattgccctgcacgctgagttggacagacgggctagcgagaagcaaaaagaaattgagcgggttaaagagaagcagcagaaggaactcaataagcagaaacaaatagagaaggatttagaagagcagagtcggttaatcgcagcgtcaagtaggcctaaccaagcctccagcgaagggcaatttgtcgtcctttcttcgtctcagtccgaggagagtgacttaggcgaagggggtaagaagcgggaaagcgaagcttag

SEQ ID NO: 213482 - DNA, 1995 bp, synthetic construct
  misc_feature 1..1995: note = Description of Artificial Sequence: Synthetic coding sequence
  source 1..1995: mol_type = other DNA
atgccagctgtggacaaactgctgttagaggaggctctgcaggacagcccgcagacgcgcagcctcctaagtgtttttgaggaggacgctgggactctgacagattacacaaatcagctgctgcaggccatgcagagagtgtatggtgcacagaacgaaatgtgcctggctacacagcagttaagtaagcaactactggcctacgagaaacagaactttgcactgggtaagggggacgaagaggtcatatcaacattgcactacttttctaaagtcgtggacgaacttaatcttttgcacacagaactggctaaacaacttgccgacaccatggtgttacccatcattcaatttagggagaaagacctcacagaagtctccacattgaaggatctgtttggtctggcgagcaatgagcacgacctctctatggccaaatactcgcgtctgcccaagaagaaggaaaacgaaaaagtgaagaccgaagtggggaaagaggtggcagctgcgagacgaaaacagcacttatcttcgctccagtattactgtgcactcaacgcattgcagtacagaaagcaaatggccatgatggagcccatgatcggctttgctcacggacaaattaattttttcaaaaagggagccgagatgttctcaaagagaatggactccttcctctcctctgtcgcagacatggtccaatcaatccaggtcgagttggaagctgaggccgagaaaatgagggtatcccaacaggaactactgagtgtagatgaatccgtttatacgccagactcagatgtggccgcaccccaaatcaatcgcaaccttatacagaaagcaggttatctgaatctccgtaacaagaccgggctcgttacaactacttgggaacggttgtactttttcacacagggcggaaatctcatgtgccaacctagaggggcagtagctggcggtctgatccaggacctggataattgttctgtgatggctgtggattgtgaggacagaagatattgctttcagattaccaccccaaacggcaagagtgggatcattctgcaagctgaaagtcggaaagaaaatgaagaatggatatgtgctatcaacaacattagcagacagatttatctaacagacaaccccgaggctgtggctatcaaactgaatcagaccgctctgcaagcagttacacccattacgagcttcggcaagaaacaggagtcctcctgcccaagtcagaacctcaagaacagcgaaatggagaacgaaaatgataaaatcgtgccgaaggccacggcatcactgcctgaggcagaggaacttatcgctccagggacacccatccaatttgatatagtgttacctgccaccgagttcctggaccagaaccgaggaagcaggcggactaaccctttcggggaaacagaggacgagagtttccccgaggcagaggattctctcctacagcaaatgttcattgtaagatttcttggaagcatggccgttaagactgatagtaccactgaggtgatctacgaggctatgcggcaggtactcgcagctcgagctatccacaatatctttagaatgactgaaagtcacctgatggttacgtcccaatcgctgcggctcatcgacccccagacgcaggtatcacgagcaaattttgagttgacttctgtgacacagttcgcggcacatcaggagaacaagaggctggtcggatttgtgatcagagtcccggaatctacaggggaggagtcactttctacctacatcttcgaaagcaactccgaaggcgaaaagatctgttatgccattaacctgggcaaagagatcattgaggtgcaaaaagatccagaggctctggcccagcttatgctcagtatccccctgactaacgatgggaagtatgtgctgctcaacgaccagcctgacgacgacgatggaaatcccaacgagcatcgcggagccgagtctgaggcttag

SEQ ID NO: 213483 - DNA, 2013 bp, synthetic construct
  misc_feature 1..2013: note = Description of Artificial Sequence: Synthetic coding sequence
  source 1..2013: mol_type = other DNA
atgcccgctgtggacaagctgctccttgaggaggctttgcaggacagcccccaaactagatctctcctttcagttttcgaggaggatgctggtaccctgacagactacaccaatcaactgctccaggcaatgcaaagggtgtatggagcccagaatgaaatgtgtctagcaacccaacagctctcaaaacagttgcttgcgtacgagaaacagaactttgcgctcggtaagggcgatgaggaagtgatctctacactgcactacttctctaaggtcgtagacgaactaaaccttctccacacagagctagccaagcagctggccgacaccatggttctgccaattatccaattcagagaaaaagacctaaccgaggtcagcactctcaaggacctctttgggctggcatctaatgacgtatgcctcttcttagaacacgatctgtccatggctaagtatagtcgtctgcccaaaaaaaaggagaacgaaaaagtgaaaaccgaggtaggcaaagaggtggctgcggctcggaggaagcaacatctctcttcattgcagtattactgtgccctcaatgcccttcagtatcggaagcagatggcaatgatggagcctatgatcggattcgcgcatggtcagattaacttctttaaaaagggagcggaaatgttctctaagcggatggatagttttctgtcaagtgtcgccgacatggtccagtccattcaagttgagctggaggccgaggcagaaaaaatgagagtgagccaacaagaacttctgagcgtggatgaatcagtatacaccccggacagcgacgtagccgcaccacagatcaataggaacctgatacaaaaggctgggtacttgaatttgaggaacaaaactggcctcgttacaaccacctgggagaggctctatttctttacgcaggggggtaatctaatgtgccagccacgaggcgctgttgcaggagggctcatccaagatctggacaattgctcagtgatggccgtagattgcgaggacagacggtattgttttcagataaccactcccaacggaaaaagcggaattatcctgcaggcagagtcccgcaaggagaacgaagaatggatttgcgccatcaacaatattagcaggcagatctacttaacagataatcctgaggctgtggctatcaaactgaaccagacggccctccaggccgttaccccaatcacctcttttggaaaaaagcaagagtcttcatgtccgtctcaaaaccttaagaactcggagatggaaaatgagaatgataaaattgtgccaaaagcaaccgcctccctcccagaggccgaggagttgatagcgcctggcacgccaattcaattcgatattgtccttccggctactgaattcctggaccagaatagagggtcccgcaggacaaatcctttcggagagacggaggacgagagcttcccagaggctgaagacagccttctccagcagatgttcatagtgaggttcctgggctcgatggcagtgaagacagactctacgacagaagtaatctatgaggctatgagacaggtgctggccgcacgcgctattcacaatatctttagaatgacagaaagccatctcatggtgactagccaatccctgaggctgattgatccccagactcaggtgagccgggctaattttgagctcacctctgttacccagttcgccgctcaccaggaaaataaacgtctggtaggtttcgtgatccgtgttccagagagtacaggcgaggaatctctaagcacatacatatttgaatctaattcggagggggaaaagatctgctacgctattaatctgggtaaagagattattgaggtgcagaaggacccagaggctttagcgcagttgatgctgagtatccctctgacaaatgacgggaagtatgttctgttgaacgaccagccagatgatgatgatggcaatccaaacgagcataggggtgctgagtcagaggcctag

SEQ ID NO: 213484 - DNA, 2760 bp, synthetic construct
  misc_feature 1..2760: note = Description of Artificial Sequence: Synthetic coding sequence
  source 1..2760: mol_type = other DNA
atgaccgattcaaagtatttcaccaccaccaagaagggggaaattttcgagttgaaggccgagctcaatagcgataagaaggagaagaagaaggaggcagtgaagaaggttatagcttcgatgactgttggcaaggacgtctctgcattgtttcccgatgtcgtgaactgcatgcagactgacaacctggaactcaagaaactggtttacctgtatctgatgaactatgcgaagagtcagccagacatggcaataatggcagtgaataccttcgtcaaggattgtgaggatccaaaccccttaatcagggcactagcagtgcgaaccatgggttgtattagggttgataagataaccgagtatctttgcgaacccttgcggaagtgcctaaaggatgaggatccatatgttaggaaaaccgccgctgtgtgtgtcgctaagctgcacgatatcaatgctcagctagtggaggatcaagggtttctggatactctcaaggacctgatcagcgacagtaacccaatggtcgtggctaatgccgtggctgccctttcagagatagccgaatcccatccctcctccaacttactggacctgaacccccagtccattaataagcttctcacggccctgaacgagtgtactgaatggggacagatctttattttagattgtttggctaactatatgcctaaggatgatcgcgaggcacaatctatatgtgagagagtcacccctcgactatcacacgctaactcagcagtggtgctgagcgctgtgaaagtcctcatgaaattcatggaaatgctgtccaaagacctcgattactacggcacactgttgaagaaattggcccctccactagtgacactattatcagcagaacctgaactccagtacgtcgctttacgcaacatcaacttaatcgtacaaaagcggccagaaattctaaagcacgagatgaaggtgttctttgtgaagtataacgacccgatctacgtgaagctggagaagctcgatatcatgataagactggcatcccaggccaacatagctcaggtgctggccgaattaaaggaatacgcaaccgaagtggacgttgatttcgttaggaaggctgttagggccattggtcgatgcgccattaaagtcgagcaatcagccgagagatgcgtgtccaccctgctggatctgatacagacaaaggtgaactatgtcgtccaggaggctattgtggttattaaagacatcttccgcaagtaccccaacaagtatgagagtgtcatcgctaccctgtgtgagaacctggatagcctggatgaacccgaggccagagctgccatgatctggattgtgggcgagtacgccgaaaggatcgataatgctgacgagctgctcgaatccttcttggagggctttcacgatgaaagcacccaggtgcagctgcagctgctgacagcaatagttaagctctttctcaaaaagcctaccgaaacgcaagagttagtacagcaggtgctatcgcttgccactcaggactctgacaatcctgatctgagagatcgtggttatatctactggagattactctctacggaccctgtggcagccaaagaggtcgtactggcggagaaacctctgatctctgaagagacagatttgattgaacccaccctgttagatgaactgatctgctatatcgggaccctggcaagcgtatatcacaaacctccctcagccttcgtagagggtgggagaggcgtcgtgcataaaagtctgcctccaagaaccgcttctagcgaatccgccgagtcgccagagacagcaccaacaggcgcaccacctggcgagcagccggatgttatccctgctcagggcgatttacttggggatttactgaacttggatctcggaccacctgtgtcgggccctcccctggccaccagctccgttcagatgggcgctgttgatctgttaggcggaggactcgacagcctaataggtggtactaactttgtcgccccacccacagccgctgttccggctaatctgggggctcccataggctccggtttgagcgacttgtttgacctgacctccggagttggcacactatctggcagttatgtagcacccaaggccgtgggcagcattagtatggatctgcaactcacgaataaagctcttcaagtgatgaccgactttgccattcaatttaaccggaactctttcggactcgcccctgccactcctttgcaggtgcacgcccctttgtccccaaatcaaactgttgagatctccctgcctctgtcgactgtagggtccgtaatgaagatggagccacttaacaacttgcaggtcgcggttaagaacaacatagatgtcttttatttttctaccctgtacccactccacattctgtttgtggaggacgggaaaatggatcggcagatgtttctggccacgtggaaagatattccaaacgagaatgaggcacagttccagattagggattgtcctctgaacgcagaggccgctagcagtaagctacagtcatccaatatttttaccgttgccaagagaaatgtagaaggccaggacatgctgtatcagagtctgaagttgacgaacggaatctgggttctggctgaacttcgtatccaacccggtaacccttcttgcacactctcactcaaatgccgggcacccgaggtttcacagcacgtgtaccaggcatatgagactattttaaagaactag

SEQ ID NO: 213485 - DNA, 2829 bp, synthetic construct
  misc_feature 1..2829: note = Description of Artificial Sequence: Synthetic coding sequence
  source 1..2829: mol_type = other DNA
atgaccgacagtaagtatttcacgaccaccaagaagggtgagatctttgaattaaaagccgagctgaattctgataagaaagagaagaagaaggaagcagttaaaaaagtaattgcatctatgactgtcggaaaagatgtctctgctctgtttcccgacgttgtgaactgcatgcagactgacaatcttgagttgaaaaagctggtttatttgtatttgatgaactacgctaagtcacagcctgatatggctatcatggccgtcaacacctttgtgaaggattgtgaggaccctaacccccttatcagggccttagccgtgcgcacgatggggtgtatccgagtagataagattacggaatacctctgcgagcctcttcgtaagtgtctgaaggacgaggacccatacgtgagaaaaacagccgcagtctgtgtggcaaagctccacgatatcaatgcccagctggtggaggaccagggcttccttgatacccttaaggaccttattagcgactcaaacccaatggtcgttgcgaacgcagtcgccgcactttctgagatcgcggaatcacacccttcctccaaccttctggacctgaaccctcagtccataaataagctgttgacggccttaaacgaatgtacggagtggggtcaaatctttattctggattgtctggcaaactacatgcctaaagacgatagagaagcacagagcatttgcgaaagagtcaccccacggctatcacatgccaactcagctgttgtactcagtgcagtgaaggtactaatgaagttcatggagatgctctcaaaggatctcgactattatggaacactgcttaagaaacttgcccctcccctagtgaccttactctccgcggagcctgagctccagtatgtcgctttacggaatattaatctcattgtccagaaaaggccggagatcttaaaacacgaaatgaaagtattttttgtcaaatacaacgatccaatctacgtcaagctcgagaaactggatataatgatcaggctcgcaagtcaggctaacatagcacaggttctcgccgaactcaaggagtatgcgacagaggtggacgtcgattttgtaagaaaggcagtgcgagcaatcggaaggtgtgctataaaagtggagcagtcggcggagaggtgcgtgtccaccttactggacctgatacagaccaaggttaactacgtggtccaggaagcaatcgtggtgatcaaagacatttttagaaaatacccgaacaaatacgagtcggtgattgcgacactgtgcgagaatcttgatagtctggacgaaccggaagcaagagcggctatgatctggatcgtgggcgaatatgcagaacgaatagataacgccgatgagctgctggagtccttcctagaagggttccacgacgagtccacacaagtccaactccagctgcttacagcaattgttaaactgtttctcaaaaaacctacggaaacacaggaactggtgcagcaggtgctctccctggctacacaggactccgacaatcctgacctgagggaccgcggatacatctattggagattgctctcaacagaccccgtggctgcgaaggaggtagtgctcgccgagaaaccactgatctccgaggagactgacctcattgaaccgacattgctggacgagcttatctgctacatcggtaccctggcaagcgtgtaccacaagccgccatctgcgttcgttgagggcggaaggggcgtggtacataaatccctgcctccccgtacagcctctagcgaatctgccgaaagtccagagaccgcccctaccggtgcccctcccggagagcagcccgatgtcattcctgcacagggcgacctattgggcgacctgctcaacctggatctgggccctcctgtttctggtcctccattggccacttcctccgtgcagatgggtgccgttgatctcctgggcggagggctcgacagcctgatcggagggaccaattttgtggcccctccaacagccgcagtgcccgcaaacttaggtgcgcctattgggagcgggttgtccgatctcttcgatcttacatccggggttggaacgctatccggctcatacgtggccccaaaagcggtatggttgcccgcaatgaaagctaagggcctcgagattagtggcacattcactcgacaggtagggtcaatctcaatggacttgcaattaactaacaaggcactccaagtgatgaccgattttgccatccagttcaacagaaactctttcggactggccccagccacccctcttcaggtgcacgccccactgtcaccaaaccagacagtcgagatttccctgccccttagcactgtgggatctgtcatgaagatggagccactgaataatttgcaagtggccgtgaagaacaacatcgacgtgttctacttttccaccttgtaccctctgcatatcctgttcgtggaggacggaaaaatggatagacagatgtttctggccacttggaaggacattcccaacgagaatgaggcacaattccaaatcagggattgccctctaaatgccgaggcagcctcctcaaaactgcagtcctccaatatcttcaccgttgccaagcgcaacgtcgaaggccaggacatgctgtaccagagcctgaagctcaccaacggcatatgggtgctggctgagctgcgcatccagccagggaatccctcatgcaccgacctcgaactgtcactaaaatgcagggctccagaggtatcacaacacgtgtaccaggcctacgaaacaatactcaaaaactag

SEQ ID NO: 213486 - DNA, 2850 bp, synthetic construct
  misc_feature 1..2850: note = Description of Artificial Sequence: Synthetic coding sequence
  source 1..2850: mol_type = other DNA
atgactgatagcaagtatttcactacaaccaagaagggtgagattttcgagctcaaggccgaattgaacagcgacaagaaggagaaaaagaaggaagctgttaaaaaggtgattgccagcatgacagtgggaaaggatgtgagcgccctgttccccgacgtggttaattgcatgcagaccgacaacctcgagctaaaaaagctggtgtatctctatctcatgaattatgcgaagagtcagccggatatggctattatggccgtcaatacctttgtgaaggactgcgaagatccaaaccccctcatcagggcactagctgttcggacaatggggtgcatccgcgtcgataagatcactgaatacctttgtgagccgctgaggaagtgcctgaaggatgaagatccttatgtacgtaaaacagccgctgtctgtgttgccaagttacacgacatcaatgcccaactcgtggaagatcaaggatttcttgataccctgaaggaccttatctctgacagcaaccccatggtggtggctaatgctgtggcagctctgagtgaaatagccgaaagccacccttcaagtaatctcctcgatctgaacccccaaagtatcaataagcttttaacggctctgaatgaatgtactgagtggggccagatcttcatcctggattgcctcgctaattacatgcccaaggatgatcgggaagcccaaagcatctgtgaacgagttaccccacgactgtcccatgctaatagtgctgttgtactgagtgccgttaaagttcttatgaagtttatggagatgcttagcaaggatctggattactacggcaccctcctaaaaaaactcgctcctccactggtgacactgctgagcgcggaacccgaactccagtacgtggccctccgcaatatcaacctgattgtgcaaaagcgccctgagatcctgaaacatgaaatgaaagtgttttttgttaagtataatgatcccatttacgtcaaactggaaaagctggacatcatgatccggcttgctagccaggcgaatattgcacaggtcttggctgagctcaaggaatatgctacggaagttgacgttgactttgttcgtaaagcagttagagccatcggcagatgtgccatcaaagtagaacaatccgccgaacgatgtgtcagtacattgttggacctgatacagactaaagtgaactatgtagtgcaggaagccattgtcgtgatcaaggacatctttaggaagtatcctaacaagtacgagtctgtgatcgctacgctttgtgaaaatttagactcactggacgaaccggaagctcgagctgcgatgatttggatcgtgggagagtacgccgagcggatcgataacgctgacgagttactggagtctttcctcgagggattccatgatgaatccactcaggtgcaactgcagctgttgacagctattgtgaagctgtttctcaaaaaaccaacagaaactcaggagctggtccagcaagtattgtctctcgctacgcaggatagcgacaaccccgaccttcgcgacaggggttacatctactggaggttgctttcaacagaccctgtggctgctaaggaggtcgtactggccgaaaaaccccttatctccgaggagacagacctgatcgagcctacactccttgacgagctcatctgctatatcggcacactggccagcgtgtaccacaaaccgccatctgcatttgtcgaaggaggacggggagtagttcataagagtctacctccacgcactgcctcaagcgagtctgctgaaagccccgaaacggcacctactggcgctcctcccggagagcaaccggacgtgatccctgcccaaggcgatttactcggcgacctgttgaatttggatctaggccctccagtttctggcccacctctagccacaagtagtgtgcagatgggtgctgtcgacttgttgggaggtggactggattctctcatgggggacgagccagaagggataggcggtaccaattttgtggccccacctactgctgccgtccccgctaacttgggcgctccgatcggaagtggtctgagcgatcttttcgatctgacttccggggttgggaccttgtctgggagttacgtggctcccaaggctgtatggctccccgcaatgaaggccaagggtctggaaatctctggtaccttcacccggcaagtgggctcaattagcatggatctgcagttgaccaataaggctctacaagttatgactgactttgccatacagttcaaccgaaattcgttcggattggcccctgctacaccccttcaagtgcatgcgccattgtcgccaaatcaaaccgtcgaaatttcactaccattgtctacggtagggtccgtcatgaaaatggaacctttgaacaaccttcaagtcgccgtaaagaacaacatagatgtgttttacttcagtaccctgtatcccctccacatcctttttgtggaggacgggaaaatggacaggcaaatgtttctggcaacctggaaggatataccaaacgaaaatgaggcccagttccagataagagattgccccctgaatgctgaggccgcttccagcaagctccaaagctcaaatatcttcacagtcgcaaagcgcaatgttgaggggcaggacatgctttatcagagcctcaagctgacaaatggtatctgggttttagctgaattaagaattcagcccggaaacccctcgtgtactgacctggagctgagcctcaagtgtcgagcccctgaggtgagccagcatgtgtaccaggcttatgagacaatcctaaagaactag

SEQ ID NO: 213487 - DNA, 2820 bp, synthetic construct
  misc_feature 1..2820: note = Description of Artificial Sequence: Synthetic coding sequence
  source 1..2820: mol_type = other DNA
atgacagatagtaaatactttactactacgaaaaaaggtgagattttcgagctgaaagctgaactaaactcagataagaaagagaaaaagaaagaggcggtgaaaaaagtcatagcttcaatgactgttggcaaggacgtcagcgctctgtttcccgacgtggtcaattgtatgcagacagacaatctggaacttaaaaaactggtttacctatacctgatgaattacgctaaatcacagcctgatatggcaattatggctgttaacaccttcgtgaaagactgcgaggacccaaaccctttgatcagagccctcgccgtgcgtaccatgggctgcattcgcgtcgataagattacagagtatctgtgcgaacctcttaggaagtgcctgaaggatgaagacccatacgtcaggaagacagctgcggtgtgcgttgctaaattacacgacatcaatgcccaactcgtagaagatcaagggtttttggatacactgaaggacctcatctccgatagcaatccaatggttgtcgcgaatgccgtcgccgctctgtctgaaatagcagaatctcatccttcttctaacctactggatttgaacccccagtccatcaacaagctgcttactgccttaaatgaatgcaccgagtgggggcagatatttatcctggactgcctcgctaactacatgccaaaagacgacagagaagctcagtccatatgtgaaagagtgactccccgattgtcacacgccaatagtgcggtcgtgctgtccgcagtcaaggttctaatgaagtttatggagatgctgagcaaagacctggactattacggtaccctgctaaagaaattggctcccccattagtgaccctcctgtccgctgaacctgagctgcagtatgttgcacttcggaatatcaacctcatcgtacagaaacgacccgagatcctcaaacacgagatgaaggtgttttttgtgaaatacaatgacccaatttacgtgaaactagagaagttggacataatgattcggctcgcaagccaggccaatattgctcaggtgctggcggaattgaaagagtacgccacagaggtggacgtcgattttgtgcgcaaagctgtgcgagccatcggcagatgtgctatcaaggttgaacagagtgcagaacgctgtgtcagtactttgctagatctcattcaaacaaaggtgaactacgttgtacaggaagctatcgtggtaattaaggacatctttagaaagtacccaaacaagtatgagagtgttatagccacgctatgtgagaacctggactcattagacgagcccgaggccagggccgcaatgatctggattgttggggagtacgccgagcgaatcgacaacgctgacgagctcttggaatcatttctcgaggggttccacgatgagtcgactcaggtacagctccagctcctgactgccatcgtcaaattgtttctaaagaaacccactgaaacacaggaacttgtgcagcaggtcttaagcctcgccacgcaagattctgataaccccgacttgcgtgatcggggatatatctactggaggctgctgtcaaccgatcccgtcgctgctaaggaagtggttctggcggagaaacccctaatctccgaagaaaccgacttaatcgaacccacactccttgacgaactaatctgctacatcggaacacttgcctccgtctatcacaaaccgccatcagcctttgtcgagggaggtcgtggagtcgtgcataaatccctcccacccaggacagctagctcagagagcgcagaatctcccgagaccgcgccaactggcgcaccaccgggagagcaacccgacgtcatccccgcacagggcgacctgcttggcgacctgctgaatctcgacctggggccaccggtgtccgggcctccattggctacctccagtgtacaaatgggagcagtcgacctgctgggtggcggactcgatagtctcataggcggaaccaacttcgtcgcaccgccaacggccgcagttcccgctaatctgggagcacccatcggcagtggcctgtcagacctctttgatcttacgtcaggggtcgggacgctcagtgggagttacgtggctccgaaagctgtttggctgccagcaatgaaagcgaagggcttagagatctccgggacgttcactagacaggtcggctctattagcatggacttgcagcttactaacaaagcactgcaagtaatgaccgattttgccatacagtttaatagaaattcctttggactggcgccagcaacacctctccaggtgcacgcgcctctgtcacctaatcaaacagtggagatctctcttccccttagcactgtgggcagcgtgatgaaaatggagcctctcaacaacctgcaggtagcggtaaagaacaacatcgatgtcttctattttagcaccctttaccctctccatattctgttcgtggaagatggtaagatggataggcagatgtttctggctacttggaaagatattcccaacgaaaatgaagcacagttccaaatccgcgattgccccttgaacgccgaggccgcatcaagtaagctgcagtcttcaaatattttcaccgtcgctaagagaaacgtcgagggccaggacatgctgtatcagtcgttgaaactgaccaacgggatttgggtgctggctgagctccgaattcagccagggaacccatcctgtactctctcactgaagtgccgagcgcctgaagtgagtcagcatgtgtatcaagcttatgagactatccttaagaattag

SEQ ID NO: 213488 - DNA, 2850 bp, synthetic construct
  misc_feature 1..2850: note = Description of Artificial Sequence: Synthetic coding sequence
  source 1..2850: mol_type = other DNA
atgaccgatagtaaatattttactacaactaagaaaggagagatctttgagctcaaagcagaattaaatagcgacaagaaagaaaagaaaaaggaagccgttaagaaggttatagctagcatgaccgtgggcaaagacgtgagtgctctctttccagacgttgtaaactgtatgcagacagacaatttggaactaaaaaagttggtctacttatacctgatgaactatgctaagtctcagcctgatatggccattatggccgtgaacacatttgtcaaggattgcgaggatcccaatcccttgattagagctttggctgtcagaaccatgggctgtattcgggtggacaaaattactgagtacctatgtgaacccctgcgcaagtgcctcaaggacgaagatccttacgtgcgcaagaccgcggctgtgtgcgttgccaaacttcacgacataaacgcccaattggtggaagaccagggctttctggataccctcaaagatctgatctccgattctaacccaatggtagtggccaacgccgttgctgctctatctgagattgcagaatcgcacccctcctcaaacctactggacttgaatcctcagtcaatcaacaagcttcttacagctctgaatgagtgtaccgagtgggggcagatattcatcttggactgcttggccaactatatgcctaaggacgaccgagaagcccagtcgatatgcgaacgtgttactccgagactttcacacgccaattcagctgtcgtcctgtcggcggtgaaggtgctgatgaagttcatggaaatgctgagcaaagacctggactattatggtacccttctcaaaaaacttgcccctcctctagttactttattgagcgccgagcctgaactccagtatgtagcacttagaaacatcaatttaatagtgcaaaagcggccagagattctgaagcacgaaatgaaagtgtttttcgtgaagtataacgacccaatttacgtgaaactggagaaacttgatataatgatcagactggcaagccaggccaacattgcccaagttctggctgaactgaaggaatatgcaaccgaagtcgatgtcgattttgttagaaaggccgtacgcgctataggtcgttgcgccatcaaggtggaacaaagtgcggaacgttgtgtaagtaccttacttgatctcatccagactaaagtcaattatgtggtgcaagaggccatcgtagtgattaaggatatctttcgcaaatatcccaataagtacgagtcagtcattgctaccttatgtgagaatctggactccctggacgaaccagaggcaagggctgcaatgatttggattgttggggagtacgccgagcgcatcgacaacgctgacgagttgcttgagtcgttcctggagggtttccacgacgagtcgacacaagttcaactacagctgctgaccgctatagtgaagctgttcttgaaaaagccaacagagacgcaggagttagtgcagcaggtgctctcactcgccactcaggatagcgataacccagaccttcgcgacaggggctatatttactggagattactgtccactgaccctgtggccgcaaaggaggtggtactggctgagaaacccctgatatccgaggagacagatttgattgaacctaccctgctggacgagctcatctgttacattgggaccctggctagtgtgtaccataaacccccaagcgcctttgtcgaaggagggagaggagtcgtccataaatccctaccacccagaactgccagttctgagtctgccgaatccccggagactgctcccactggagcccctcctggggagcagcctgacgtgattcccgctcagggcgatctgctgggcgacttactgaacctggacctgggtcccccagttagcggaccccctctcgctacctcttccgtccagatgggagcagtggaccttttaggtggcggactggactccctgatgggagatgaacccgagggcataggaggaactaactttgtcgcccctcctaccgccgcagtaccagcgaacctgggcgctccaataggaagtggcctgtccgacctatttgacctcacttcaggcgtgggaaccctaagcggttcttacgtggctccaaaggcggtatggcttcctgccatgaaagccaaaggccttgaaatctccggaaccttcacccgccaggtgggctcaatctctatggacttgcagctgacgaacaaggccctacaagtcatgactgacttcgccattcaattcaaccggaatagtttcgggctagctcccgctacccctctacaggtacacgcacccctgagcccaaatcaaaccgtcgagatcagcctgccgctgtcaactgttggatctgtcatgaagatggagcctctgaataatctacaggtagccgttaagaataacatcgacgtgttctacttttctactctgtatcccctgcatatcctgttcgttgaagacggtaagatggacagacaaatgttcctggccacctggaaggatattcctaacgagaacgaagcccagtttcaaattcgagactgtccactgaacgccgaggcagcaagctctaagctccagagtagtaacattttcacagtggccaagcgcaatgttgaagggcaggacatgctgtatcagtctctgaaacttactaatggaatctgggttttggccgagctgcgaatacagcctggcaatcccagttgcacagacctggagctttccttgaaatgccgggcaccggaggtgtctcagcatgtctatcaagcgtatgagacgatcctcaagaattag

SEQ ID NO: 213489 - DNA, 2820 bp, synthetic construct
  misc_feature 1..2820: note = Description of Artificial Sequence: Synthetic coding sequence
  source 1..2820: mol_type = other DNA
atgactgactctaagtacttcacaacaacgaagaagggggagatttttgagttgaaagccgaactgaatagtgacaagaaggagaagaaaaaggaggccgtaaaaaaggttatcgcctccatgactgtgggtaaggatgtatccgcactgttccctgacgtcgtaaattgtatgcagactgataacttggagttgaaaaagctggtctacctgtacctgatgaattatgccaaaagccagcctgacatggccattatggcggtcaacacattcgtcaaagattgtgaggacccaaaccctctgatccgggctctggcagtccgcaccatggggtgcatcagggtggacaagataactgagtacctgtgcgaacctctgcggaaatgccttaaggacgaggacccctacgttcgaaaaactgccgctgtgtgtgtcgccaagctccacgacatcaatgcacagctcgtcgaggatcaggggtttttggacaccttaaaggatctcatctccgacagcaatcctatggtggttgccaatgcagtggccgcattgtcggaaattgcagagtcccatcccagttccaacctactggatttgaacccacagtccatcaataaacttctcaccgccctgaatgaatgcacagagtgggggcagatctttatactggactgtctggctaattatatgccaaaggacgacagagaggcccaatccatctgtgagcgtgttaccccaagactatcccacgccaatagcgccgtggtcctgtcagcagtgaaagttcttatgaagttcatggagatgctgtccaaggacctcgattactatgggacgctgctaaagaaattggcaccaccactggtgactctgctgagcgcagaaccagaactgcaatacgtcgcccttcgcaatataaacctgattgtgcaaaaaagacctgagattcttaaacatgaaatgaaggtattctttgttaaatataatgatcccatttacgtgaagctcgaaaagttggacatcatgatacggctggcaagccaggcaaatattgcacaggtactggccgagctgaaggagtatgccacggaggttgatgtagatttcgtgcgaaaggctgtgcgagctataggcaggtgtgcaatcaaggtagaacagagtgccgaaaggtgcgtcagcacccttctggatttgatacagaccaaggtgaactacgttgtgcaagaagcaatagtcgtcatcaaggacatctttcggaagtaccctaataagtacgagtcagtaatcgctacattgtgcgaaaacctcgactcactagacgagcccgaggccagagccgctatgatttggatagtaggagagtatgcagagcgtattgataatgccgacgagctgctggaatcctttttggagggcttccacgacgagtccacccaagtgcagttgcagttactgacagctattgtgaaactcttcttgaaaaaaccgacagagacgcaggagttggtacagcaggtgttatctttagccacgcaagattctgataaccccgacctgagggacaggggctacatctactggcggctcctctcaaccgacccagtggcagctaaggaagtcgtgctggccgagaaaccactaatcagcgaggagaccgacctgatcgagcccactcttctcgacgaactgatctgctacataggtactctagccagcgtctaccataagcctccatcagcctttgtagaaggcggtcggggagtggttcataagagcctaccaccaaggaccgcgagctcagaatctgcagaatcgccggagaccgcccctaccggtgctcccccaggcgaacagccagatgtcattccggcacagggcgatcttctcggcgatctgctgaatctcgacctgggtccacccgtctcagggcctccactcgccactagttctgtgcaaatgggcgcagttgatttactaggcggaggccttgacagtttaattggtgggaccaactttgttgccccacctacagccgcagtgcccgctaatctgggagcccctattggctctgggctgtccgatctgtttgatctcacctccggagtgggaacactatctggcagctatgtggctcctaaggcagtttggctcccagcaatgaaggccaaaggtttggaaatttcaggcacatttactcgacaggttggtagcatttccatggatctgcaactcaccaataaggctcttcaagtgatgaccgactttgccattcaattcaatcgaaactcttttggcttagccccagccactcctcttcaagtgcacgcccctctgtctccaaaccagaccgtggagatcagcctgcctctgtctacggttggcagtgtaatgaaaatggagcccttaaacaacctccaggtcgccgtgaaaaataacattgacgtattctatttcagtactctgtacccgcttcacattctctttgtcgaagatggcaaaatggaccgccagatgttcctcgcgacctggaaagatattccaaatgagaatgaggcgcaattccagattagggactgcccactgaacgcggaagccgctagttccaagctgcagagcagtaatatattcactgtggcaaagcgaaacgtggaaggccaagatatgctgtaccaaagcctgaagctgactaatgggatctgggtactcgccgagctgcgaatccagcctgggaaccctagttgcactctgagcttaaagtgccgggctcctgaggtatcccagcacgtttaccaagcttatgaaacaattttgaaaaattag

SEQ ID NO: 213490 - DNA, 1737 bp, synthetic construct
  misc_feature 1..1737: note = Description of Artificial Sequence: Synthetic coding sequence
  source 1..1737: mol_type = other DNA
atgaccgattctaagtacttcaccactaccaagaagggcgagatctttgagttaaaagccgaactcaacagtgacaagaaagaaaagaaaaaagaggctgtgaagaaggtgattgccagtatgacggtgggaaaagacgtgagcgctctgtttccggatgtagttaactgcatgcagaccgacaatcttgaactcaaaaagttggtgtatctctacctgatgaattatgctaagagccaacccgacatggccatcatggctgttaacacttttgtaaaggactgcgaggatccaaatccactcattcgagcactggcagttcggaccatgggatgcatcagagtggataagatcactgaatacttgtgtgagcctttgaggaagtgtctgaaagatgaggacccgtatgttagaaagactgctgctgtgtgcgttgccaagctgcatgatatcaatgcacaactcgtggaagatcaggggttcttggataccttgaaggaccttatctccgatagcaatcctatggtggtagccaacgctgtcgctgccttgtccgaaatcgctgaaagtcacccaagttctaatctactagatctcaaccctcagtccattaataaactcctgactgctctgaatgagtgtacagagtggggtcagatcttcattctggattgcctcgccaattacatgcccaaggacgacagggaagcccagtccatctgtgagcgagtcacacctcggctaagtcacgctaactctgctgtggtcctgagcgcagtcaaggtgctcatgaagttcatggagatgcttagcaaagaccttgattactatggcacgctgctgaagaagctggccccaccactagtgaccctattatctgcagagcccgaattgcagtacgtggcactgcggaacatcaacctgatagtccaaaaaaggccggagatcttaaaacacgagatgaaagtgttcttcgtcaagtataatgaccctatttacgtcaagctggagaagttggacatcatgatccgtctcgcatcacaggcgaatattgcacaggtgctggccgagttaaaggagtacgcaacagaggttgacgtggattttgtgcgaaaagcggtcagagcaatcggcagatgtgctattaaggtcgaacagtcagctgagaggtgtgtctctaccctcttagatctgatccaaactaaagttaactacgtggttcaggaggcgatcgtagtaatcaaagacatctttcgcaagtatccaaacaagtatgagtccgttattgccacactgtgcgagaatctggattctctggacgagcccgaagcacgtgcagcgatgatctggatcgtgggggagtatgcggaacggattgataacgctgacgagctgctagagtccttcctagagggtttccacgatgagtcaactcaggtccagttgcagctcctgacagcgatagtcaaactctttctcaagaagccaacagagacccaagaactcgtccagcaggtgctaagcctggccacccaggattcagacaatcccgacctacgggatcgtggttatatctactggcgactgctgtcaactgatccagtagccgcaaaagaggttgtgctggccgaaaaaccgcttatctccgaagagaccgatttaatcgagcctactctgctggacgagttaatatgctacattggaacgctggcttccgtgtaccataagccaccctag

SEQ ID NO: 213491 - DNA, 2820 bp, synthetic construct
  misc_feature 1..2820: note = Description of Artificial Sequence: Synthetic coding sequence
  source 1..2820: mol_type = other DNA
atgacagattccaagtacttcactaccacaaagaaaggagagattttcgaactcaaagccgaattgaactctgacaaaaaagaaaaaaaaaaggaagccgtgaagaaagtgattgctagcatgactgtagggaaagatgtatccgccttatttcccgacgtggtcaactgcatgcaaaccgacaacctggagcttaagaagctcgtttacctgtacctgatgaattacgcaaaaagccagcctgatatggccatcatggccgttaatactttcgtgaaagactgtgaagacccgaatcctctgataagagcattagctgttcgaactatgggctgtattcgggtggacaaaattaccgaatacctgtgcgaacccctgcggaaatgtctgaaggacgaggacccctacgtgcggaagacagccgctgtgtgcgtcgcaaaactgcatgatattaacgctcagctcgtggaggaccaagggtttcttgacactcttaaggacttgatcagcgacagtaacccgatggtagtggccaacgcagttgccgcactgtctgaaatagcggagtcccacccgagcagtaacctcctcgatctgaatcctcagagtataaataagctactgacagccctgaatgaatgcaccgagtggggccagatcttcatcctcgactgcctcgccaactacatgcccaaagacgatcgggaggctcagagcatctgtgagcgggtcacacccagactgtcacacgcgaactctgcggtcgttctgagtgctgtgaaagtacttatgaagttcatggagatgctgagcaaggatctcgactactacggtactctgctgaaaaagctggccccacccctcgtcacactcctgtctgcagagcctgagcttcagtacgtcgcacttcggaatatcaatctcatcgtccagaagaggcccgagattctaaaacacgagatgaaggtcttctttgtgaaatataacgacccaatctacgtgaaactggagaagcttgatattatgatccgtcttgcgagccaggctaatatcgcacaggtactcgccgagttaaaagagtacgccacagaggtggatgttgatttcgtgcggaaggccgtgcgcgcaatcggcagatgcgctattaaagttgaacagtccgctgagagatgcgtctcaacgctgctcgatctgatacagaccaaagtgaactacgtcgtccaggaggccattgtggtgattaaagacattttcagaaagtatccaaacaagtacgaaagcgtcatagcaactttgtgcgagaacctggactcactagacgagcctgaggcaagggcagctatgatttggatcgtgggtgagtacgccgagcgcatcgacaatgccgatgagctgttagagtctttcctagagggctttcacgatgagtctacccaggtccagctgcagcttctgacggcgatcgtcaaactgtttctgaagaagccaacggagacacaggagctcgtccagcaggtactctccttggctacccaggattctgacaatcccgatcttcgagacagaggctacatttattggcgcctgctctccactgatccagtggcagcgaaggaggtcgtcctggccgagaagcccctgatttcggaggaaacggacttaattgaacccacactgctggatgagcttatttgctacatcgggacactcgcctcagtgtaccataagccgccttccgccttcgtcgaaggcggacggggtgtggtgcacaagagcctgcccccacgaactgctagctccgaatcagccgagagccccgagacggcacctacaggtgctcccccaggagagcagcccgacgtgattccggctcagggtgacctgctgggcgatctgttgaatctagacctggggccaccagtgtccggaccacccttggcaacctcaagcgtccaaatgggcgcagtagacctcctggggggtggtcttgactcactcattggaggcactaacttcgtggcacccccaacagcagccgttcccgctaatctgggagccccaatcggatctggactgagcgatctcttcgatttaactagcggggtaggtacgcttagtggtagctacgtcgccccaaaagctgtgtggctgccagcaatgaaagccaagggcctggagataagcgggacattcacacgacaagtgggatctatttcaatggaccttcagctgaccaacaaggctctgcaggtgatgacagacttcgctattcagttcaaccgcaacagctttgggctcgcaccagcaacacctctgcaggtccacgcgcctctttcgcccaatcagacggtagaaatctctctgcctctgtctacagtaggatctgtgatgaagatggagccactaaacaatcttcaggtcgcagtgaagaacaatatcgatgttttttatttctctacactgtatccactccatatcctattcgtagaggacgggaaaatggacaggcaaatgtttcttgccacttggaaagatatccccaatgaaaatgaagctcaatttcagattagagattgtcctctgaacgcagaagctgcaagtagcaagctgcaatcctccaatatttttacagttgccaagcgcaatgtcgaaggccaggacatgctttatcagtctctcaagctgactaacggaatctgggtactggccgaactgcgcatccagccaggaaatccttcttgcaccctgtctctcaaatgtcgcgcaccagaagttagccagcatgtgtaccaggcatacgaaaccattttaaaaaattag

SEQ ID NO: 213492 - DNA, 2469 bp, synthetic construct
  misc_feature 1..2469: note = Description of Artificial Sequence: Synthetic coding sequence
  source 1..2469: mol_type = other DNA
atgcccgctcccattaggctacgagagctgattcgcactatccgtacagctaggacacaggctgaagagcgagaaatgattcaaaaggagtgtgccgctataaggagctccttcagggaagaagataacacctaccgctgtcgtaatgtggcaaaactcctttacatgcacatgctcggttacccagcccattttggacaactcgaatgccttaagctcattgcctcacagaaattcactgacaagcggattggctatctgggcgctatgttgctgctggacgaaaggcaggatgttcatctgctcatgacaaactgcatcaagaatgatctgaaccactctactcagttcgtgcagggccttgccctgtgtaccttggggtgcatgggttcttccgaaatgtgtagagacctggcaggggaggtggagaaactgttgaaaacttccaacagttacttgagaaagaaagccgctctgtgtgccgttcacgttattagaaaagtgccagagcttatggagatgtttttaccggcaacaaaaaacttgctaaatgaaaagaaccacggagttctccatacctccgtcgtgctattgacggagatgtgtgagaggtcacctgacatgcttgcacacttccgcaaacttgtcccccagctagtccgaatcctcaagaatctcatcatgtcagggtactcacctgagcacgacgtgtctggaattagcgatccttttttgcaggtaagaattctgcggttgctgcggatactgggaagaaacgacgatgactccagcgaggcaatgaacgatatactcgcacaggtcgctactaatactgagacttccaagaacgttggaaacgcgatcctgtatgaaacagtgcttacaatcatggacattaagtcggaatctgggctgagagtgttagccatcaatattttaggaagatttctactcaacaatgacaagaatatccggtatgttgcactgacaagcctgttgaagaccgtccagaccgaccataacgccgtccagaggcacagaagcaccattgtggattgtctgaaagatttagatgtctctatcaagagaagggctatggaactgtccttcgcactggtgaatgggaataacattcggggaatgatgaaggaactgctgtatttcttagatagttgtgagcctgaattcaaggccgattgtgccagcggtatttttttggccgctgagaaatacgccccatcaaagcgttggcatatagatacaatcatgagagtgttaaccactgcaggatcctatgtgcgcgacgacgctgttcccaacttaatacagctcattactaatagtgttgagatgcacgcttacactgttcagcgcttgtacaaagctatcctcggtgattactcccaacagccacttgtgcaggttgccgcttggtgtatcggtgagtatggggaccttcttgtgtcgggccagtgtgaagaagaagagcctattcaggttacagaggatgaagttttagatatcctggaaagtgttctcatctctaacatgtccacatccgtgactaggggatacgcgctcaccgcgatcatgaagctgagcacgcgtttcacttgcacagttaaccgcatcaagaaagtggtaagcatctatggtagctctattgatgttgagctgcaacagcgggcagtggagtacaacgcactgtttaagaagtatgatcacatgagatccgcattgctagaaaggatgcccgtcatggaaaaggttacaactaatggacctacagaaattgtccagacaaatggagagacagagcctgcccctctggagaccaagccaccaccctctggccctcagccgacatcacaggccaacgacctgctagatctcctggggggtaacgatatcacgccagtcatcccaacagctcccacctccaagccatcaagcgcgggaggagagctcttggatctcctgggagacattaacctcacaggggcacccgctgccgcaccggctccggcttccgtgcctcagattagtcagcctccattcctactggacggcctgagctctcagcctctattcaatgacatcgcagcgggaatcccgtccataacagcctattctaagaacggattaaaaatcgagttcacctttgagcggagcaataccaatccttccgtgactgtcattaccattcaagccagcaacagtaccgagctggacatgactgatttcgtctttcaagctgccgtgcccaagacatttcaactgcagctgctctctccctctagtagcatagttcccgcttttaacactggtaccattactcaggtcataaaggtgctgaatccccagaaacagcagctgcggatgagaatcaagcttacttacaatcacaaaggctccgcgatgcaagatctggcagaagttaacaacttcccaccccagagctggcagtag

SEQ ID NO: 213493 - DNA, 2478 bp, synthetic construct
  misc_feature 1..2478: note = Description of Artificial Sequence: Synthetic coding sequence
  source 1..2478: mol_type = other DNA
atgccagcaccaattcgcctccgtgaactgatccgcacgatcaggaccgccagaacacaggccgaagaacgggagatgattcaaaaggaatgtgctgccatacgatcatcatttagggaagaagacaacacctaccgctgtagaaacgttgccaagcttctgtacatgcacatgcttggatatccggcacatttcggacagttggagtgcctgaagctgattgcaagccagaaatttacagataagcgcatcggctatctgggcgctatgctccttctggatgagagacaggacgtccaccttttgatgaccaactgtattaaaaatgacctcaaccactctactcagttcgtgcaggggctcgccctctgtaccctcggctgtatgggctcttccgaaatgtgtcgtgacctggctggcgaggtggaaaagctgctcaaaacttcgaattcatatctgcggaagaaggcagcgctttgcgcagttcatgtcattagaaaggttcctgaactgatggagatgttcctcccggctactaagaaccttctcaatgagaaaaaccatggcgtcctgcacacaagtgtggtccttctgactgaaatgtgcgaaagaagtccagatatgctggcccatttcaggaaaaatgagaaactggttccacaactcgtgcggatcctcaaaaatctgatcatgtctggatatagcccagaacacgacgttagcggcatcagtgacccttttctgcaggttagaattctgaggctcctgcgaatcctagggaggaacgatgacgactccagcgaggcgatgaacgatattctggctcaagtggctacaaatacagagactagcaaaaatgtgggaaacgctatcctttacgagaccgtgttaacaatcatggacattaaaagtgagtcaggacttagggtcctggcaatcaacatcctgggaaggttcctcctcaacaatgacaagaatatccgttacgtcgcattgacatccctgctaaagaccgtgcagacggatcataacgccgtgcagaggcaccgttccacaatcgtggattgcctcaaggacctggacgtctctattaagaggcgtgctatggaactgtcctttgcattagtcaacggaaataatattaggggaatgatgaaagaactcttatatttccttgattcttgcgaacccgagtttaaagcggattgcgcctctggaatcttcttagccgcagaaaagtatgccccttcgaagcgctggcacatcgacacgattatgcgggtgctgacgaccgcagggagctacgtcagggatgatgcagtccccaatcttattcaactcattacaaattccgtggaaatgcacgcatatactgtacaacgcttgtacaaggcaatcctgggcgattactctcagcagccactggtgcaagtggccgcttggtgtataggcgaatacggcgatctgctagttagtgggcagtgtgaagaggaggagcctatacaggtgacagaggatgaggtactcgatattctggaatctgtgctgatatctaacatgtccactagtgtgacacggggttatgcacttacggccatcatgaagctgtccactcgcttcacatgtactgtgaacagaataaaaaaagtggtttccatatacgggtcatctatagacgtggagctgcagcagcgagctgtggaatataatgcactctttaagaagtacgaccatatgagaagcgcgcttctggagaggatgcccgtgatggaaaaagtgacaactaacggtccaactgagatcgtgcagaccaacggcgagacagagccagcaccacttgaaactaagcctcctccgtccggtccccagccaacaagccaggccaacgatctgctagatctcctggggggaaacgacattaccccggtcattcctaccgccccaaccagcaaaccatcttccgccggaggagaactgctagatcttctgggggatataaatctgacaggcgcaccagcggctgcacctgctcccgcatcagtaccccaaattagtcaaccaccctttttactcgacggcctctcgtctcagcctctgtttaatgacatcgctgcgggaataccttctataactgcatactccaagaacggcctcaagattgaattcactttcgaaaggtccaatactaatcccagcgtgacagtgatcaccatacaggcgtctaactccactgagttagacatgaccgattttgtgtttcaggccgctgtcccaaaaacatttcagctgcagctgctctccccctccagttctattgtccccgcattcaataccgggacaataacccaggttatcaaggtcttgaacccccagaaacagcagctcagaatgcgaatcaagctgacgtataaccataaaggctccgcgatgcaggatctcgctgaggttaacaactttcccccacaaagttggcagtag

SEQ ID NO: 213494 - DNA, 2478 bp, synthetic construct
  misc_feature 1..2478: note = Description of Artificial Sequence: Synthetic coding sequence
  source 1..2478: mol_type = other DNA
atgcctgctcccattcgcctaagagagttaatccgcaccattcgtacagccaggacccaagctgaggagcgtgaaatgatccaaaaggagtgcgcggctattcggtctagcttcagagaggaggacaacacctaccgatgtcggaatgtggcaaaattgctttacatgcacatgctcggttaccccgctcattttgggcagctggagtgcctgaagctgatcgcatcccagaaatttaccgacaaaaggattggctacctgggcgcaatgttattattggacgaaagacaggacgttcacttgctcatgaccaattgcattaaaaatgacctgaatcattccacacaatttgttcagggactcgccctttgcacactgggctgtatgggatcaagtgagatgtgccgtgacttggctggggaggtggagaaactgctgaaaactagtaattcttacctcagaaaaaaggcagccctgtgcgcagtccatgtgatccggaaggtcccagagctgatggagatgttcttacctgccactaaaaatctcttgaacgaaaaaaatcacggagttcttcatacaagtgttgttttgctgaccgaaatgtgcgagaggagcccagacatgctggcacacttccgcaaagagagtaagctcgtgcctcaactcgttcgaatacttaagaacttaattatgagtggctactcacctgaacacgatgtatcaggaatctcagaccccttcctccaggtgagaattcttaggttactccgcatcctgggccgtaacgacgacgactcatcagaggccatgaatgacatcctagcacaagtagccaccaacaccgaaactagtaaaaatgttgggaacgccattttgtacgagacagtgctgaccatcatggatattaaatccgagtctggtcttcgcgtcctggccattaacatcctcgggcgttttctgttgaataacgacaaaaatataaggtacgtggccctcacaagccttctgaagaccgtgcagacagaccataatgccgtgcaaagacatcgctcgaccatcgtcgattgcctgaaagacctggacgtttctattaagcgacgggctatggagctgtccttcgcccttgtgaacggcaacaatattaggggcatgatgaaggaactgttatattttctagactcctgcgagcccgagttcaaagcagactgtgccagcgggattttcctggctgccgaaaagtacgctccctcgaagcgctggcacattgacacaattatgcgtgtgctaaccaccgcaggctcctacgtgagggacgacgccgtgccgaatttgattcaactgattacgaattcggtcgaaatgcatgcttacactgtgcagagactgtacaaggcaatcttaggcgactatagccagcagcctctggtccaggttgctgcttggtgtatcggcgaatatggcgatctgctcgtgagcggccagtgtgaggaggaggaacctatccaggtgacagaagacgaagtgctagacatccttgagtctgtcttgatttcaaacatgagtactagcgtgacacggggatatgccctgaccgccatcatgaagctgtctacccgatttacttgtacggtgaataggataaagaaggtggtaagtatctacgggtcttccattgacgttgagctccagcagagggctgttgaatacaatgcgctgtttaagaagtatgatcacatgcgaagtgccctgttagagcggatgcccgtcatggaaaaggttaccaccaatgggcctaccgagatcgtgcagacgaatggggaaacagaaccagccccactggagacaaaaccaccccctagcgggcctcagccaacaagtcaagccaatgacctgctagatctgctgggaggtaacgacatcacacctgtgatcccgactgctcctacttccaagccaagctccgcaggcggtgagttgctggatctattaggggacataaaccttaccggagctcccgctgccgctcccgcacccgcttcggtgcctcagattagtcagcctcccttcttgctggatggtctttccagccaacctctttttaacgacatagcggcaggaattcccagtattacagcctacagtaaaaacggtctgaagatcgaattcacatttgagcgctctaacactaatcctagcgtgaccgtcattactattcaagccagtaatagtaccgaattggacatgactgacttcgtgttccaggctgctgtccccaagactttccagctccaactacttagtcccagttcttctattgtgccagcttttaacaccggtactattacgcaagttatcaaggtgctgaacccacagaaacagcaattgaggatgaggatcaagttaacctataaccataaagggagcgccatgcaggacctggcggaagttaacaactttcctccgcagtcttggcaatag

SEQ ID NO: 213495 - DNA, 1698 bp, synthetic construct
  misc_feature 1..1698: note = Description of Artificial Sequence: Synthetic coding sequence
  source 1..1698: mol_type = other DNA
atgttcgggagctgttgccactgctgtcgcagaccacggtcttgctggtttcactcccggtttagggccgtcagcggcgtccaatcgcaggccgtcggtgtcgagaaaagacgtcagcgaagttgggcacggagagggagggaacctcagggcctcctgagactgctagagggaagaccacgagggctaggcccagggggttccgcacgaagaggtgtgccatgctgtggagtggcaccccctcgtatgcccgcacctataaggctgcgggagttgatccggacaattcggacggcgaggacacaggcagaggaacgagagatgatacagaaagaatgcgccgctattcgctcctccttccgagaagaggacaacacttacagatgcagaaacgtggcaaagctgttgtacatgcatatgctgggctatcccgcacactttggccagcttgagtgtctgaaactcatagccagccagaagtttacagacaagagaataggctatctcggcgctatgctattgctagatgagcggcaggacgtacaccttctaatgactaactgcatcaaaaatgacctcaaccacagtacccagtttgtgcagggtctggcactatgcacgctcgggtgcatgggaagctcggaaatgtgtcgagacctggccggagaggttgaaaagttgttgaaaacctctaatagttatttaaggaaaaaagcggcattgtgtgcagttcatgtgatacgaaaggtgcctgaactgatggaaatgttcctccctgccacaaagaaccttttaaacgagaagaaccacggagtactccacacttcagtggtactgctgactgagatgtgtgagcgctctccggatatgctggcacacttccgcaaagaaagcaaactcgtacctcagctggtgaggatcttgaaaaatcttatcatgagcggctattccccagagcacgatgtgtctggcattagcgaccctttcctgcaggtgagaatactgaggctgttaaggatcctggggcgaaacgatgatgactctagcgaggcaatgaacgacatcttggcccaagtggctacaaacactgaaacatcaaagaatgtggggaacgccatcctgtatgagacagttctgacaataatggatattaagtccgagtccgggctccgcgttctcgctattaatatattgggaagatttttgctcaacaatgacaaaaatataaggtacgtggctctgacatcgctgttaaagactgttcagaccgatcacaatgccgtccagcggcaccggtccactatcgtggactgcctgaaggacctggatgtgtcgatcaaacggagagccatggaattatccttcgcgctggtcaacgggaacaacattcgtgggatgatgaaagagcttctctatttcttagatagttgtgagcccgagttcaaggcagactgtgcctcggggattttccttgctgccgagaagtatgcaccatcgaaacggtggcacatcgataccatcatgcgcgtgctaaccacagctggctcctatgttcgcgacgatgccgtgcctaacctgattcagctgataaccaattccgtcgagatgcatgcctacacagtccagaggttatataaagcaatcctgggggactatagtccaaccttcggcactagtggctgtatggtctaccgttag

SEQ ID NO: 213496 - DNA, 2538 bp, synthetic construct
  misc_feature 1..2538: note = Description of Artificial Sequence: Synthetic coding sequence
  source 1..2538: mol_type = other DNA
atggagaagaatataaaccttaggaactgccaaacactgaacacatacgtcatgcttacccacctgaggatgcctgcccctataaggctccgtgaactgatcaggacgataagaaccgccaggacacaggcagaggagcgagaaatgattcagaaagagtgtgcagccatccgttcaagttttcgcgaggaggataatacatacagatgcaggaatgtagcaaagctgctgtacatgcatatgctcggctacccggctcatttcggccagctggagtgtctgaagcttattgctagccagaagtttacagataaacgtatcggatacctcggtgctatgcttctcctggacgagagacaggacgtgcacctgctgatgacaaactgtattaagaacgatctgaaccacagcacacagttcgtacagggccttgctctttgcacacttggttgtatggggagcagtgagatgtgccgggatctggccggagaggtggaaaaactgcttaaaacaagtaactcataccttcggaaaaaagccgctctgtgcgccgtgcacgtaatccgcaaagtgcccgagctcatggaaatgtttctcccggcaacaaaaaatcttctgaacgaaaagaaccacggagtccttcacaccagtgtggtgctattaacggagatgtgcgagagatctcctgacatgctggctcactttcggaagctcgtcccacagctggttaggatccttaagaacctgatcatgtccgggtacagtcctgagcacgacgttagcggcatctccgacccttttcttcaggtgcggatcttgcgcctgctgagaattctcggacggaatgatgatgatagttcagaggctatgaacgatatcctagctcaagtggcgactaacaccgaaacaagcaagaatgtgggcaatgcaattctgtatgaaactgtcctgacaatcatggatattaaatctgagtcagggctgagggtgctagctattaacatcctaggcagattcttactcaacaatgataaaaacatacgatacgtcgccctgacctcactgctgaagaccgtgcagacggaccacaacgctgttcagaggcacagaagtacaatcgtggattgtctgaaggatctcgacgtgtctatcaaaaggagagctatggaactttcctttgcactggtaaatggtaataatattcggggaatgatgaaggagcttttgtacttcctggatagttgcgagccagaattcaaagctgactgtgcatcagggatctttcttgcggctgaaaagtacgccccatctaagcgttggcatattgataccattatgagagtcctcactaccgcgggttcttacgttagggacgatgccgtcccgaacctcattcagctcatcactaacagtgtcgaaatgcacgcatataccgtccagcggctgtacaaagctatactgggcgattactcccaacagccgttagtgcaagtcgccgcttggtgtatcggcgagtatggagatctgctggttagcggacagtgtgaggaggaggaacctattcaggttacggaagacgaggtgctggacattttggaatctgtgctgattagcaacatgtccacctctgttacacgaggatatgctttgactgccatcatgaagttgtcaacccgcttcacatgcaccgtaaataggatcaaaaaagtagtctcaatttacggatcaagcattgacgttgagctccaacagcgcgctgtggagtacaacgccctctttaaaaaatacgaccacatgcgctccgcactgctcgagagaatgcccgtgatggagaaagtcacaacaaatggtccaactgaaatcgtgcagaccaacggggagacagagccggctcctctcgagactaagccccctccctctgggcctcaacctacttcccaggccaacgacttgttggacctcctggggggaaatgacataactccagtaatcccaacggcacctactagtaaaccgagttcagcgggtggagagctccttgatctgctgggcgatattaatcttacaggcgctccagccgcagccccagccccagcctccgtccctcagatctcccagcctcctttcctgttagatggactttcttcccaaccattatttaatgacattgccgctggcatcccttcaattacagcctactctaaaaatggcctaaaaatcgagttcacctttgagcgttcgaatacaaatccaagtgtgactgtcataaccattcaggctagtaattccactgagcttgacatgaccgatttcgttttccaagcggctgtgcctaaaacctttcagttacagctgctgagcccctcttccagcattgtgccagctttcaacaccggaacgatcacacaggtgatcaaagtgctaaatccacagaagcagcagctgcgcatgcgcattaagctcacatacaaccataaggggtcggcaatgcaggatctcgccgaggtgaataacttccccccacaaagctggcagtag

SEQ ID NO: 213497 - DNA, 531 bp, synthetic construct
  misc_feature 1..531: note = Description of Artificial Sequence: Synthetic coding sequence
  source 1..531: mol_type = other DNA
atgcctgcacctatccgcctgcgcgagctgatccgaaccattcgcacagcacgaacacaggctgaggaaagggaaatgatacagaaggagtgtgcggctataaggtcctcttttcgcgaagaagataacacctaccgatgccgcaacgttgctaagctcttgtatatgcatatgctcggctaccccgctcattttggccagttggaatgcttgaaactgattgcgtcccaaaagttcaccgacaaacgtattgggtacctgggagcaatgctcctcctcgatgaaagacaggacgtgcacctgctgatgactaactgtatcaagaatgacctgaaccacagtacacagttcgtccagggcctcgccctctgtactctggggtgtatggggtcatcggagatgtgccgagacctcgcgggagaagtcgagaagctcctcaagacatcaaatagttatctgcgcaaaaaagaaatgatttacaagcagactaatgtcaccgggtacatcttagggggtatccctaactcctag

SEQ ID NO: 213498 - DNA, 1047 bp, synthetic construct
  misc_feature 1..1047: note = Description of Artificial Sequence: Synthetic coding sequence
  source 1..1047: mol_type = other DNA
atgaaggacaagatgtgccgagatctggccggtgaagtggagaagttattgaagacttccaactcctatcttcggaagaaggccgctctgtgcgccgttcacgtgattcgcaaggttccagaactcatggaaatgttcctgcccgctaccaaaaacctgttgaatgagaagaaccacggggtgctccacaccagcgtagtgctcttgaccgaaatgtgcgagagaagccctgatatgttagcacactttcgaaaacttgtgcctcaactcgtgaggatccttaagaacttgatcatgtccggatatagccctgagcatgacgtttcaggtattagtgatccctttctccaggtgcggatcctgagactgctgaggatccttggccgtaacgatgatgactcatccgaagccatgaacgacatcctggcccaggttgctactaacacagagacctctaagaatgtaggcaatgccattctgtacgaaaccgttttgaccattatggacattaaatccgagagcggccttcgtgttttggccatcaacattctggggaggtttcttcttaataatgacaaaaacatccgctacgtggccctgactagcctcctgaagaccgtgcagaccgatcataacgctgtacagcgccatcggagcaccatcgttgactgtctgaaggatctagacgtgagtataaaacgaagagctatggagttgtcttttgctctcgtgaatggaaacaacatacggggtatgatgaaggagcttctgtattttttggattcatgtgagcctgagtttaaggccgattgcgcatctggtattttcctggccgcagttcctaagacctttcagctgcagctgctctctccatcctcttctatagttccagcattcaatacgggaactatcacccaggtgataaaggtgttaaatccccaaaagcaacagctgagaatgaggattaagctcacctacaatcacaaagggagcgctatgcaagaccttgcggaagtcaataactttcctcctcagagctggcagtag

SEQ ID NO: 213499 - DNA, 1272 bp, synthetic construct
  misc_feature 1..1272: note = Description of Artificial Sequence: Synthetic coding sequence
  source 1..1272: mol_type = other DNA
atgagcgcctctgcggtgtacgtgctggacctgaagggaaaggtcctcatctgtcggaattatagaggcgatgtggatatgtctgaggtcgagcatttcatgcccatcttgatggaaaaagaagaggaagggatgctgtccccaatattagcacacggtggagttcgctttatgtggattaagcacaataatttgtacctggttgcaacaagtaagaaaaacgcttgtgtaagtctcgtatttagctttctttacaaagtggtgcaagtgttctcagagtactttaaggaactcgaggaggagtccataagagacaatttcgtgatcatctacgaactactcgatgaactcatggatttcggctacccccagacaacagattctaagattctacaagaatacatcacccaagaagggcacaagctggagaccggcgcacctagaccccctgcgaccgtcaccaacgccgtaagttggagatccgaggggatcaaatatcgcaaaaacgaagtcttcctggatgtcatcgagagtgtcaacctactggtgagtgccaacggcaatgttcttcggagcgaaatcgtgggaagtataaaaatgcgagtgttcctgagcggaatgccggagctgagattagggcttaatgacaaggtgcttttcgataataccgggaggggcaaatcgaaaagtgtggagctggaagatgtcaaattccatcagtgtgtgagactctcccgtttcgaaaatgatcgaaccatttcctttataccgcctgatggtgagttcgaactgatgtcctatcgattgaacactcacgtgaagcccctgatctggatcgagtccgtgatcgagaaacattcacattcgcggattgagtacatgattaaggctaagagtcagttcaaacggcgatcaacagccaacaatgttgaaatccacatccccgtccctaatgatgcagacagccctaaattcaagacaacagttggttctgtgaagtgggttcccgagaatagcgagatcgtgtggtctatcaagagttttcccggaggcaaggagtacttaatgcgcgctcactttggcctacccagtgtcgaggctgaagacaaggagggaaagccccctatatccgtgaagtttgaaatcccctattttaccacaagcggcattcaggttcgctatcttaaaatcatcgagaaatccggctaccaggctctcccttgggtccgatatattacacagaatggggactaccaactgcgaactcaatag

SEQ ID NO: 213500 - DNA, 1113 bp, synthetic construct
  misc_feature 1..1113: note = Description of Artificial Sequence: Synthetic coding sequence
  source 1..1113: mol_type = other DNA
atgagtgcatccgccgtatatgtgctcgacctgaagggtaaggttctaatctgtaggaactacagaggcgacgtggatatgtcagaggtcgagcactttatgcctattctaatggaaaaggaagaggaggggatgctgtccccaatcttagcccacgggggtgtgaggtttatgtggattaagcataacaacctgtaccttgtcgcgacctctaagaagaatgcctgcgtatcccttgttttttctttcctgtataaagtggtgcaggtgttctctgagtattttaaagaactggaagaagagtccatccgggacaactttgtcattatatatgagctcctggacgagttaatggacttcggttacccccagacaacagactctaagattctccaggagtatatcacacaagaggggcacaagctcgaaactggcgctcctcggccacctgccacagtgacaaacgcagtgagttggcgtagtgagggtatcaaatatcggaagaatgaggtgtttcttgatgtaatcgagagcgtgaacctcctggtgagcgccaacggaaatgtactcagaagtgagatcgtgggtagcattaagatgcgagtcttcctctccggtatgccagaactccgtttgggattgaacgacaaggtgctcttcgacaacactggccgtggcaaatctaagagcgtggagttggaggacgtgaaatttcatcaatgtgttcggctgagtcgatttgagaatgacagaactatctctttcatcccacctgacggtgaatttgaactgatgtcatacagattaaatacgcatgttaaacctcttatctggatcgaatcagtaatagagaaacatagccactcccggattgagtatatgatcaaaggcggaaaagaatacctaatgcgcgctcatttcggattacccagcgtagaagcagaggataaggagggtaagccacctatctcagtcaagttcgagataccttatttcacaacttcaggcatccaagttcgctacctgaagattattgagaaatcaggatatcaggcattgccctgggtgcgctacattactcagaatggggattaccaactcagaactcaatag

SEQ ID NO: 213501 - DNA, 1308 bp, synthetic construct
  misc_feature 1..1308: note = Description of Artificial Sequence: Synthetic coding sequence
  source 1..1308: mol_type = other DNA
atgtccgcctcagccgtctatgttttggatctcaaaggtaaggtactgatctgccgtaattatcgcggtgatgtggacatgtctgaggtggagcacttcatgcctattttgatggaaaaggaagaggaaggcatgctgtctccaatcttggctcatggcggagtcagattcatgtggataaaacacaataatctctatctggtggctacatcgaaaaaaaatgcatgcgtcagtttggtatttagtttcctgtacaaggtcgttcaggtgtttagcgagtacttcaaagaattggaagaggaaagcatccgggacaactttgtgattatttacgagttgttagacgagctgatggatttcggatatccacaaactaccgattccaagatactccaggaatacattacccaggaaggtcataaactcgagacaggcgcaccgaggcctcctgccaccgtcactaatgccgtgtcatggcgatcagaggggattaagtaccgcaagaatgaagtgttcctggacgtgatcgagagcgtgaatctgctgggcaaatacccgggtgtaggatggcttggacacaccgtctccgcaaatgggaacgtccttagatccgaaatagtagggtctattaaaatgagggtgtttctttcgggcatgcccgagctgcgtctgggtctgaacgacaaggttctctttgataataccggccgaggaaagtctaaatctgtggagcttgaggacgtgaagtttcaccagtgtgtgagactgagcagatttgagaacgaccgcactatcagcttcattcctccagacggcgagttcgaactgatgtcgtaccggctaaatactcacgtaaaaccactgatctggattgagtctgtgatcgagaagcatagccattcccggatcgagtatatgatcaaagccaagtcgcagtttaaaagacgttcgaccgccaacaacgtggagatccatatccccgtccctaacgacgccgattcccccaaatttaagactactgttggcagtgtgaagtgggtacctgaaaactcagagatcgtatggagtataaaatcctttcccggaggtaaggagtatcttatgagagcgcacttcggactgccctctgtggaggcagaggacaaagaaggaaaacccccaatcagtgtaaaattcgaaatcccgtacttcaccacttctggcatccaggtacgatacctgaagattattgagaaatctggttatcaggcactgccctgggtgcggtacattactcagaacggcgactaccagctcaggacacagtag

SEQ ID NO: 213502 - DNA, 1056 bp, synthetic construct
  misc_feature 1..1056: note = Description of Artificial Sequence: Synthetic coding sequence
  source 1..1056: mol_type = other DNA
atgtctgcaagcgccgtttatgtgctggatttgaaaggcaaagtggtgcaggtgttcagcgaatattttaaagagttggaagaagagagcatacgcgataattttgttatcatttacgagctgctcgacgagttgatggacttcggttatcctcagaccactgattcgaaaatcctccaggaatacataacacaggagggacataaactggaaaccggagcaccccgacctccagccacagttacaaatgcagtctcttggaggtccgaggggattaaatatcgaaaaaatgaggtattcctcgatgtgatcgaatccgtgaacttattggtttcagccaacggtaacgtgctgaggagcgaaatcgttggttcgattaagatgagagtgtttctctccggcatgccagagctaagactaggcctcaatgacaaggtgttgtttgataacaccggccgtggaaaatccaaatccgtcgagctcgaggatgtgaagtttcaccagtgtgtgagactcagcagattcgaaaacgacaggactatatcctttataccacccgatggcgaattcgaactcatgagctatcgcctgaacacccatgtgaagccattgatttggatcgaaagtgtgattgaaaagcactcccacagtaggatcgaatatatgattaaagctaaatctcaatttaagcgccgatccacggcgaataacgttgagatacatatacccgttcctaacgacgcagattctccaaagttcaaaaccacggtaggttctgtaaagtgggtaccagagaattctgagattgtatggagcatcaagagctttccagggggaaaggaatacttaatgagagcccattttggactgcccagcgtggaagcggaggacaaggagggaaagcccccaataagtgtgaagttcgagatcccgtactttaccacgtccggcatccaggtgagatatttaaaaattatcgaaaagtccggataccaagcactgccttgggtacgttacattacacagaatggagattaccagttacgaacccagtag

SEQ ID NO: 213503 - DNA, 1272 bp, synthetic construct
  misc_feature 1..1272: note = Description of Artificial Sequence: Synthetic coding sequence
  source 1..1272: mol_type = other DNA
atgtctgccagtgctgtctttatactcgatgtgaaagggaagcctctgatctctcgcaactacaagggtgacgtggcaatgtctaagatcgagcactttatgccactgctcgtgcagcgggaagaggagggggctcttgcccctctactgagccacggccaagtgcattttctgtggattaagcatagtaatctgtacttagtcgctacaaccagtaagaatgccaacgcctcattagtgtacagctttctctacaaaaccatcgaagtgttttgtgaatacttcaaggaactagaggaggaatccatacgggacaatttcgtcatcgtttatgagctgttggatgagttaatggacttcgggtttccccagaccacagattcaaagattctgcaggaatacattactcagcagtcgaataagctagaaaccggaaaatcccgggtgcctcccactgtgaccaatgccgtgtcatggaggagcgaggggatcaaatataaaaagaatgaggtattcatagacgttatcgagagcgtcaacctgcttgtaaacgcaaatgggagcgtgttgttgagcgaaattgtggggacaatcaagctgaaagtgtttttaagcggaatgccagaactgaggttgggcctgaacgatcgcgtgctgttcgagctgacaggtaggtccaagaacaagtctgtggagctggaggacgtcaaattccaccagtgtgtccgcttatctagattcgataacgatcgtactatttccttcattccgccagacggagactttgagctgatgtcctaccggctatcaactcaggtaaaaccactcatttggattgaatcagtcatcgagaagttctcgcattcccgtgtggagatcatggtgaaagccaaaggacagttcaagaagcagtcggtggcaaacggcgtggaaattagcgtaccagtgccgtccgacgccgatagtcctaggtttaagaccagtgtcgggtctgccaagtacgtccctgaaaggaacgtcgttatatggtctattaagtcgttccccggaggcaaagaatatctgatgcgcgctcacttcggcttacccagcgtagaaaaagaggaggtggagggaaggcccccaataggagtaaagttcgagatcccttacttcacagtctcaggaatacaggtccgatacatgaagatcatcgagaaatcagggtatcaggcactgccctgggtccgctatattacccagtcaggcgactaccagcttcgcacatcgtag

SEQ ID NO: 213504 - DNA, 477 bp, synthetic construct
  misc_feature 1..477: note = Description of Artificial Sequence: Synthetic coding sequence
  source 1..477: mol_type = other DNA
atgatgaggtttatgctcctgttctctagacaagggaaactgagactgcagaagtggtacctcgccaccagtgacaaggagaggaagaagatggtgcgtgaactgatgcaggtggtgctggcacgcaagcccaaaatgtgttcctttttggagtggcgagacctgaaggtggtatacaaacggtatgctagcctttatttctgctgtgctatcgagggacaagacaatgaacttatcactctcgagctgattcaccggtatgtagagctgctcgataagtacttcgggagcgtgtgcgaactggacattatattcaactttgagaaggcatactttattctcgatgaatttttgatgggcggagatgtgcaggatacgtccaagaagagcgtgctcaaggctatagaacaggctgatttactacaggaagaggacgagagccctcggagtgtgctagaagaaatggggctggcgtag

SEQ ID NO: 213505 - DNA, 477 bp, synthetic construct
  misc_feature 1..477: note = Description of Artificial Sequence: Synthetic coding sequence
  source 1..477: mol_type = other DNA
atgatgcgctttatgcttctttttagtaggcaggggaagctgcggctgcagaaatggtatttagcaacatctgacaaggagaggaagaagatggtccgcgagctcatgcaagtggtgctcgccaggaagcccaaaatgtgcagctttctggaatggcgcgacctaaaagtggtgtataagcgctacgcaagtttgtatttttgctgcgctattgagggacaggataacgagttaattactttggagctcattcacagatacgtcgagttgctcgacaagtatttcggcagtgtctgtgagctagacataattttcaacttcgagaaagcttactttatcctcgatgaattcctcatgggtggtgatgttcaggataccagcaaaaaaagtgtgcttaaagcaatcgaacaggctgatctgctccaggaagaagatgaatcccctcgaagcgtgttggaggagatgggtctggcatag

SEQ ID NO: 213506 - DNA, 474 bp, synthetic construct
  misc_feature 1..474: note = Description of Artificial Sequence: Synthetic coding sequence
  source 1..474: mol_type = other DNA
atgcaatttatgttactctttagccggcaaggaaagctccggctgcagaaatggtacgttccactatctgacaaggaaaagaagaagatcacgagggagctggttcaaacggttctcgcacgcaagccgaagatgtgctctttcctagaatggcgagacctaaaaatagtgtataaaaggtatgcttcactgtacttctgctgcgccatcgaagaccaggacaacgaactgatcactctggagataattcatagatacgtcgagctcctcgacaaatatttcggctctgtctgtgagctggacataatttttaacttcgagaaggcctacttcatccttgatgagtttcttctgggtggtgaagtgcaagagacctcgaagaagaacgtgctaaaggctattgagcaggccgatctactccaggaagaggccgagactcccaggtcagtgcttgaagagataggccttacttag

SEQ ID NO: 213507 - DNA, 462 bp, synthetic construct
  misc_feature 1..462: note = Description of Artificial Sequence: Synthetic coding sequence
  source 1..462: mol_type = other DNA
atgctcctgttttccagacagggtaagttaaggcttcagaaatggtacgtccccctcagtgacaaagaaaagaaaaagataaccagggagctggttcagacagtcttggcgagaaaaccaaaaatgtgtagctttctggagtggagagatttaaaaatcgtgtacaaaaggtacgcctctctgtacttttgctgcgccattgaggaccaagacaacgagctgatcactctcgaaataatccaccggtacgtggagcttcttgataagtacttcggctcggtgtgtgagctggatattatttttaattttgaaaaggcctattttatccttgacgagttcctgctcggcggagaagtgcaggaaaccagcaagaagaacgtactgaaagcaattgagcaagcagatctcttgcaggagagtcagaacgaggaatggggtggtctttcagaggacatcctgtag

SEQ ID NO: 213508 - DNA, 483 bp, synthetic construct
  misc_feature 1..483: note = Description of Artificial Sequence: Synthetic coding sequence
  source 1..483: mol_type = other DNA
atgcaattcatgctgctattctcccggcaggggaaacttcgtctgcagaagtggtatgtgccactgtctgacaaagagaaaaaaaagattactagagagttagttcagaccgtcctagcaaggaagccaaaaatgtgtagttttctggaatggcgggatctcaagatagtttataagcggtacgccagcctgtacttctgttgcgcaattgaagaccaagataatgaactaatcaccttggaaataatacatagatatgttgaattgctggataagtattttgggagtgtgtgtgagttagatataatttttaactttgagaaagcatattttatcctggatgaatttctgctcggaggggaggtgcaagagacgtctaaaaaaaacgtgcttaaggcaatcgaacaagctgatctgctccaggaaaaaacggagaccatgtaccactcaaaaagtttcattggattcaagaaagcttactag

SEQ ID NO: 213509 - DNA, 609 bp, synthetic construct
  misc_feature 1..609: note = Description of Artificial Sequence: Synthetic coding sequence
  source 1..609: mol_type = other DNA
atgcctgctggctgtcctcctcattcgaccacggcctcacttccacagcatggagaccgaggatttcccttcgccgcagcggctgctgccggacaagccccaccacggcctcggcctgcagcggctatgcaatttatgttgctattcagccgtcaggggaaactccggctgcagaaatggtacgtccccctaagtgataaggaaaagaagaagatcacgcgcgagctggtccagactgtcttagctaggaaaccgaaaatgtgctccttcctcgagtggagagacctcaagatcgtatataagcggtacgcttccctttatttctgctgtgccattgaagatcaggataatgagctgattacactcgaaatcattcatcgctacgtggaactgctggacaagtactttggatccgtgtgtgagctggacataatctttaacttcgaaaaggcttacttcattctggatgaattcctgctgggcggagaagtgcaggaaacaagcaagaaaaatgtgctgaaagctattgagcaagccgatctcctacaagaaaaaactgagacgatgtatcacagcaagagctttatcggcttcaagaaagcctattag

SEQ ID NO: 213510 - DNA, 441 bp, synthetic construct
  misc_feature 1..441: note = Description of Artificial Sequence: Synthetic coding sequence
  source 1..441: mol_type = other DNA
tgaaggcaggggaaactaagactacaaaaatggtatgtgcccctctcggacaaagagaagaaaaaaattactagagagctggtacagactgtcctcgctcggaaacccaagatgtgctcattcctggaatggcgcgaccttaagatcgtttacaagcgttatgcctctttatatttctgctgcgctatcgaagaccaggataatgagttgattaccctcgagatcattcaccgttatgtcgaacttttggataagtacttcggtagtgtatgtgaactggacatcatctttaactttgagaaggcatacttcatcttagatgagttcctcctgggcggagaggtgcaggagacatccaaaaagaatgtgttgaaggctattgagcaggccgacctcctgcaagagcctcgacatgagtacttcaacgtgccagtgtactag

SEQ ID NO: 213511 - DNA, 462 bp, synthetic construct
  misc_feature 1..462: note = Description of Artificial Sequence: Synthetic coding sequence
  source 1..462: mol_type = other DNA
tgacttcttttctccagacagggcaagctgagactgcaaaagtggtacgtccccctgagtgacaaagaaaaaaaaaaaatcacacgcgagctggtgcagaccgtactcgctagaaaaccaaaaatgtgctcttttctggaatggcgagacctgaagatcgtgtacaaacgatacgcgtctctgtacttctgttgcgccatcgaggatcaagataacgagttgatcactctcgaaatcatccataggtatgtagaattgttagacaagtacttcggcagcgtctgcgagctggacataattttcaattttgagaaggcctacttcatcttggacgaatttctcctcggtggtgaagtccaggaaaccagtaaaaaaaatgtgctgaaagcaattgaacaggcggaccttcttcaagaatctcaaaatgaggaatggggcggactgtccgaggatattttgtag

SEQ ID NO: 213512 - DNA, 588 bp, synthetic construct
  misc_feature 1..588: note = Description of Artificial Sequence: Synthetic coding sequence
  source 1..588: mol_type = other DNA
atgccagccggatgtccaccccatagcaccactgcaagtctgcctcagcatggggaccgcggtttcccatttgctgctgccgcagctgccggacaggccccacctcgcccacgcccagccgctgccatgcaattcatgctgctcttctctcgccagggaaagctccgcctacagaaatggtatgtccccctctctgataaggaaaagaaaaagatcacccgcgaactggtgcagactgtgctggcaagaaaacccaagatgtgctcctttttagagtggcgggatcttaaaatagtctacaagcgatatgccagtttgtatttttgctgcgccatagaggatcaagacaacgaattaatcacacttgaaatcatccatcggtacgtcgagctgttggacaagtatttcgggagcgtttgtgagctggacatcatttttaacttcgagaaagcctattttatcctcgatgaattcctactcggtggcgaggtgcaggaaacctctaagaaaaacgtgcttaaagcgatcgagcaggcagatcttctgcaagagcctagacatgagtatttcaatgtgccagtgtattag

SEQ ID NO: 213513 - DNA, 315 bp, synthetic construct
  misc_feature 1..315: note = Description of Artificial Sequence: Synthetic coding sequence
  source 1..315: mol_type = other DNA
atgatccggttcatccttatacagaatcgtgcaggtaaaacacggcttgcaaagtggtacatgcagttcgacgacgatgaaaagcagaaactgatcgaggaagtgcatgcagtggtgacagttcgcgacgccaagcacaccaacttcgtagaggtgttaaatgagtactttcacaacgtgtgcgaactggacctggtgttcaatttttataaagtgtacacagtagtggacgagatgttcctagctggagaaattcgggagacctcacagacaaaggtgttaaagcagcttctcatgctacagtccctcgagtag

SEQ ID NO: 213514 - DNA, 2868 bp, synthetic construct
  misc_feature 1..2868: note = Description of Artificial Sequence: Synthetic coding sequence
  source 1..2868: mol_type = other DNA
atgcctgctgtgagcaaaggcgacggaatgcggggactggcagtgtttatttcagatatacgtaactgtaagagtaaggaggcagaaattaaaagaattaataaagagctggcaaatatccgcagtaaattcaaaggggataaagccctggatggctattcaaagaaaaaatacgtctgcaagttgctctttatctttctcctgggtcacgatatagactttggccacatggaagcggtcaacctgttgtcatcgaataaatacacagaaaagcaaatcggttatctatttattagcgtgctggtgaactccaactctgagctgattaggttgatcaataacgctattaagaacgacctggcctcccggaatcccacattcatgtgcctggcgctccactgcatagcgaatgtgggttcccgggaaatgggggaagccttcgctgctgacatccctagaattttagtcgcaggcgatagcatggactctgtcaaacagtcagctgccctttgtcttcttaggctgtataaggcatctccagatctggtccccatgggtgaatggacagcacgggtggtgcacctgcttaacgatcaacacatgggggtggtgacagccgcagtgtccttaattacatgcctatgtaagaaaaatcctgatgattttaaaacatgcgtcagcctagccgtctcccgcctttcgcggatcgtcagtagcgcttctactgacctacaagactatacatactactttgttcccgcaccttggctttctgttaagctgcttcgccttcttcagtgctacccccctcccgaagatgctgccgtcaagggacgcctggtggaatgtctagagacagtgcttaacaaagcccaggagccccctaagagcaagaaagtgcaacatagcaacgcgaaaaacgccattctgtttgaaactatcagcctgattattcattacgatagcgaaccgaaccttttggtccgagcttgtaatcagctggggcagtttcttcagcatagggaaactaaccttaggtacctggcgctcgagtccatgtgcacactcgcctcttcagaattctctcacgaagcagtgaagactcacattgatactgtgatcaacgcccttaagactgagcgcgatgtcagtgtacgccagagagcagccgacttgctgtatgccatgtgcgatcggagtaacgcgaagcagatcgtgtcagaaatgctgaggtatctcgaaacagctgattatgctattagagaggagatcgtgctgaaagtggcaatattagcagagaaatacgctgtggattactcttggtacgtcgatactattctgaacctgatccggatcgcgggtgactacgtgtctgaggaggtgtggtaccgagtgctgcagatcgtgacgaatcgggatgatgtgcagggatacgctgccaaaaccgtgtttgaggcactccaagcccctgcctgtcacgagaatatggtgaaggtgggcggttacatcctcggggagtttggaaacctcatagccggtgatcctcgaagcagcccaccagtgcagttctctctgctgcacagcaagttccatctctgtagcgtggcgacccgcgcacttttactgtccacctacatcaaattcatcaatctgtttcccgagaccaaggcaactatccagggcgtactacgggcaggctctcagttgaggaacgccgacgtggaactacagcagagagcagtggagtacctgactctgtcttccgttgcctccaccgacgtcctcgcaacagtccttgaggaaatgcccccttttccagagagggaatcatccatcctggcaaaactgaaacggaaaaaaggccctggcgctgggtctgccctagatgatgggaggcgcgacccttcctccaatgacattaatggtggaatggagcccaccccttctactgtctcgacacccagtccctctgccgacttgctgggactccgggctgccccaccgcctgcagctcctcctgcatccgccggagccggaaatctgttggttgacgtgttcgatggcccagccgcacagccaagtcttgggcctacacctgaggaagcgttcctgtccccagggcctgaagacatcggccctccaatcccggaagccgatgagctgcttaacaagtttgtgtgcaaaaacaatggggtcttgttcgaaaatcagttgctgcagatcggggtcaaatcagagtttcggcagaaccttggacgcatgtatctattttatggcaataaaacctctgtgcagtttcagaatttttcccccacagtagtgcaccctggcgatctccagacccagttagcagtccagactaaaagagtagcagcccaggtggacggaggggcacaggtccagcaggtgctgaatatagagtgcctgcgggactttttgaccccacccttactgagcgtccggtttaggtatgggggagctccccaggctctgacactgaagttacccgtcactataaataagttttttcagccaacagaaatggcagctcaggacttcttccagagatggaagcagttatcacttccccagcaggaggctcagaagatctttaaggccaaccatcctatggatgccgaggtcacaaaagctaagttgttggggttcggcagcgcattactcgacaatgtggaccctaacccagaaaatttcgtcggcgcaggcattatccagacaaaagcactacaagttggatgtctgttaaggcttgagcctaacgcacaggcccagatgtacagattgactttgcggacctccaaggaacctgtttcgcgacatctgtgtgagctgctggcccagcagttctag

SEQ ID NO: 213515 - DNA, 2934 bp, synthetic construct
  misc_feature 1..2934: note = Description of Artificial Sequence: Synthetic coding sequence
  source 1..2934: mol_type = other DNA
atgcccgctgtgtcaaaaggagacggcatgcgcggtctggccgttttcatttcagatatccgcaattgtaagagtaaggaagcagaaatcaagaggatcaataaagaactggcaaatatccggtcaaaatttaagggggataaagcactggacggctactccaagaagaagtatgtctgtaaactgctctttatctttttactcggccatgacatcgacttcgggcacatggaagctgtgaacctcctttcatccaacaaatatactgagaaacagattggatacctgttcatcagtgtccttgtgaatagcaactcggaactgatccggctgattaacaacgccattaagaatgatttggcctcccggaatccaacatttatgtgcctggccttacattgcatagccaatgtagggtcaagagagatgggggaggcatttgctgctgatattccgaggattttagtcgccggagattctatggactctgtcaagcagagcgccgcactgtgcctgttgcgtctctataaggcgagcccagacttggtcccaatgggcgaatggacggcccgagtggtacacctgctcaacgaccagcacatgggagtggtcactgcagcagtctctctcatcacttgtttgtgcaagaaaaatcctgatgactttaagacatgcgtctccttggctgttagcagactgagcagaatcgtctcttccgcttccacggatttgcaagattatacatattattttgtgcctgccccttggctgtccgtgaaacttctacgtctcctgcagtgttacccaccaccggaggatgcagcagtgaagggcaggctggtagagtgcctagagaccgtgttgaacaaggcccaagaaccacctaagagtaagaaggtccaacattccaacgctaagaatgctattctttttgaaacaatcagtctcattatccactacgatagcgagccaaacctgctcgtgcgggcttgtaaccagcttggacagtttttgcagcatcgcgagacaaatctgagatatctcgctcttgaatcaatgtgtaccctggccagctcagagttttctcacgaggccgtgaagacacatatcgacactgtgatcaacgctctcaaaaccgagcgcgacgtttccgtgaggcagcgagcagcggacttgctctatgcgatgtgtgaccgttccaacgcgaagcagatagtaagtgaaatgctgcgctacctggagactgccgactacgctatcagagaggagatcgttttaaaagtagctattcttgctgaaaagtacgccgtggactactcatggtacgttgatactattcttaatctgattaggatcgcgggtgactacgtatccgaagaagtgtggtaccgcgtgcttcaaattgtgactaatcgcgacgatgtacagggctacgctgctaagacagtatttgaagcactacaggccccagcctgtcacgaaaatatggttaaagtggggggatacatcctgggagaatttggcaacctgattgctggtgatcctcgttcaagcccaccagtccagttttctctgctgcattccaaatttcatctatgctctgtcgcaaccagggctctgctgttatctacctatataaaattcattaatctctttccagagactaaagcaactattcagggcgtgctgagagccggatcacagctgcgtaacgccgatgtggaattgcagcagcgagctgttgagtacctgactctgtcttctgttgctagcacagatgtcttagccacagtgttggaagagatgcccccttttcctgagcgtgagagcagcattctggcgaaactcaaacggaagaaaggacccggtgccggatccgccctcgatgatggcaggagggatccttcctcaaacgatatcaatggtggcatggaacccacgcccagtaccgtatcaacacctagcccttcagccgacctgctcggcctcagagctgcacccccaccagccgctcccccagcctcggccggtgctggaaatttgctcgtggacgtttttgatggcccagctgcccagcccagtctcgggccaacgcctgaggaggcttttctgtctgagttggaacctcccgctccagagtctcctatggctctcctggctgaccctgctccagctgcagaccccggacccgaagatatcggcccaccgattcctgaagccgatgagctcctcaacaagtttgtttgcaagaacaacggcgtgctgtttgaaaaccagctgcttcagattggcgtcaagtcagagttcagacagaatttgggtcgaatgtaccttttttatggcaataaaacatcggtccaattccagaacttcagtcccacagttgtacatcctggggatctgcagacccagctggccgtacagacaaaaagggtcgcagctcaggtcgatggtggggcacaggtgcagcaggtgttgaatattgagtgtttgcgggactttcttaccccacccctgctctctgtacgttttcggtacggaggagctccccaggcgctaacactaaagctgcctgtgactatcaataagttttttcagccgacagagatggccgcacaggacttttttcagcggtggaaacagctgagtttgcctcagcaggaggcacaaaaaattttcaaagcgaatcaccctatggacgctgaagtgaccaaggccaagcttctgggatttggctcagccctcttggacaacgtcgacccgaatcctgagaattttgtcggagcaggaattattcagacaaaagccctccaagtcggctgcctgctgcgactggagccaaatgcccaggctcagatgtatcggttaaccttacgaacgtccaaagaaccggtgtctcgccatctatgcgagctcctggcacagcagttttag

SEQ ID NO: 213516 - DNA, 1404 bp, synthetic construct
  misc_feature 1..1404: note = Description of Artificial Sequence: Synthetic coding sequence
  source 1..1404: mol_type = other DNA
atgggactggctcttcactgcatagcatcagtgggctcgcgcgagatggcagaggcattcgccggtgagatcccaaaagttctggtggctggagacactatggattctgtaaagcagagcgctgccttatgtctcctccggctctacagaaccagcccggatttggttcctatgggagattggacttcacgcgtcgttcacctgctgaacgatcagcacttgggggtggtgaccgctgctacctcacttattaccactttagctcagaagaatcctgaggaattcaaaaccagtgtcagtttagccgtttcaagactgtcacgcattgtcacgtcagctagtaccgacctccaggactatacatattatttcgtgcccgctccttggctgagcgtaaagctgctgcggctgctccagtgctacccccctcccgacccagcagtcaggggaagactgacagaatgcctggagacaattcttaacaaagctcaagagcctccgaaatcaaaaaaggtacagcactcaaacgctaagaacgctgtgctcttcgaggcaatctctttgatcattcaccatgattcagaaccaaacctgttggtcagagcctgtaaccaactgggtcagttccttcaacacagggagaccaatcttaggtacctggctttggaatctatgtgcactctggcatcctctgaattctctcacgaggccgtgaaaactcacatcgaaacggtgatcaatgctctaaagactgagagggatgtgagtgtgctccctcccacgcccccacgtagtctttgggagcaacaatgccattgcgcatggaggggcttgagcctgggcgtgtggccatcctggtggctccacacgtggagaagaccaggcccactgggcggtgctcaactgaccctcgtcctgctgcagagccagctagactgcttcccgagacaggactttaacctggaatttcggaatatatgcatctgcaatgacttttggcagaaacatgtgtcttggcctgatgtcacggtcctgctgagccaattgctgttcgtgaaaggcgtgtgctacgccccagctgttgctgaagctctcgatgtgcagccaggcgaggaacggcctgctggcccagcgggaccgcctggcctgcaggggaaagtatgggccggaggtgctcgactgagaggagtccttgtgtcttttttaagtgaatgggccagccctggacatggggctggtttgtccccatccaccgggcctgttcagtcgtcgctggagggcctttggcgcagggatgcttctgtatggagcggttccgagggcgcaattggtcggatgccctgtgctacttgcggcctgtgcctaacctgtcacctggattcagcccctagactacatgtctag

SEQ ID NO: 213517 - DNA, 2823 bp, synthetic construct
  misc_feature 1..2823: note = Description of Artificial Sequence: Synthetic coding sequence
  source 1..2823: mol_type = other DNA
atgccagcagtgtctaaaggagacgggatgagaggactcgccgtgttcatatctgatattcgcaattgcaagagcaaagaggctgagattaagaggatcaataaggagctagccaacattagatctaaatttaaaggtgacaaggccctggacggatattccaagaagaagtacgtgtgcaaactgctgttcatctttctgctcggacacgatatcgactttggccacatggaagctgtcaatttactgagcagcaaccgctacaccgagaaacaaattggctacctcttcatctctgtgttggtcaatagtaactctgagctgatccggctcataaacaacgccatcaaaaacgatctggccagccgcaacccgactttcatgggcctcgctctgcactgtatcgccagcgtcggtagccgagaaatggcagaagcctttgccggtgaaattcctaaggtcctggtcgctggggacacgatggatagtgttaaacagagcgcagccctttgcctcctgagactatatcggacttctcccgacctggtccccatgggggattggaccagccgcgtcgtgcaccttcttaacgatcaacacctgggtgtggtgacagccgctacctctctgataacgacgctggctcagaaaaacccagaggagttcaagacttctgtctctttggctgtgtctcgcctgtccaggatagtgacctccgccagcacggatctgcaggattatacttactactttgttccagcaccatggcttagtgtaaaattgctgcgtctgctgcagtgttatccccctccagaagatcctgccgtgcggggaagacttacagagtgcctggagaccatccttaataaggcacaagagccaccaaaatcaaagaaggtgcagcatagcaatgccaagaacgccgtcctctttgaagcgatcagcctgatcatccaccacgacagcgaacccaacttgctcgtgagggcatgcaaccagcttgggcagttcctccagcacagggaaactaatctccggtacctggccctagagagcatgtgtactttggcgagttctgagtttagtcatgaagccgtaaagacccacattgagaccgtgatcaacgcccttaaaactgagagggacgtgagcgtgcgccagagagctgtggatctgctgtacgctatgtgcgaccgctcaaacgctccacagatcgtagccgaaatgttaagttatctggagaccgccgactattctatccgggaagagatcgtcctcaaagtcgctattctagctgagaagtatgcagtggattatacatggtacgtggacaccatcctgaatctcataagaattgctggcgactacgtctcagaagaagtttggtacagagtgatccagatagttatcaacagggatgacgtgcaagggtacgccgcaaagaccgtgttcgaggcccttcaagcccctgcttgccatgagaatctcgtcaaggtgggaggatacattttgggcgagttcggcaatctcattgcgggagacccacgatctagccctctgatccaatttcacttactgcattccaaatttcatctgtgttctgtgcccacaagagctctgctgttgagtacatacattaaattcgtcaatttgttccctgaggtaaagcccacaatacaagacgtattgcgctcagatagccagctgcgaaatgccgatgtcgaactccagcagcgagcagtcgaatatctccggctgtcaactgtggcgtccaccgacatcctggctacagtcctggaagaaatgccccctttccctgagagggaatctagtatcctggcaaaactcaagaagaagaagggtccatccaccgtgacggacctcgaggacactaaaagggatcgatccgtcgacgtgaatggtggccctgaaccagcacctgcctccacatcagcagtgagtacaccttccccttctgcagacctgctggggctgggtgccgctccgcctgcgcctgccggaccccctccctcctcagggggatccgggcttctcgtggatgtgttcagtgattccgcctcagtggtcgcaccgcttgcgccaggctccgaagacaacttcgctcgatttgtgtgcaaaaacaacggggtgctcttcgagaaccagctactccagatcggcctgaaaagcgagttcaggcagaacctgggtcgcatgtttatcttttacggcaataaaacatccacccagtttttgaactttactcccacacttatttgctcggacgatctccagcccaacctaaatctccagactaagccagtggatcctaccgtggaaggtggggctcaagtgcagcaggtggtgaacatcgagtgcgtatcagactttacagaggcccctgtactgaacattcagttccgatacggcggaaccttccaaaacgtttctgtccagttacccatcactctgaataagttcttccagcctacggaaatggctagccaagatttttttcagagatggaagcagctgtctaacccacagcaggaagtccaaaacatatttaaagcaaaacacccgatggacacagaggtgaccaaagcaaagatcatcggttttgggtctgctctgttagaggaggtcgacccaaatccggctaacttcgtgggtgctggaataattcacacaaaaactacacagatcggatgtttgctccgcctggagcccaacttacaagctcagatgtacagattgaccttgcgtacatccaaggaggccgtaagtcaacgtctctgtgaactcttatcggcgcaattctag

SEQ ID NO: 213518 - DNA, 1062 bp, synthetic construct
  misc_feature 1..1062: note = Description of Artificial Sequence: Synthetic coding sequence
  source 1..1062: mol_type = other DNA
atgccagccgttagcaagggggacgggatgcggggactcgctgtattcatttccgatatccgcaactgtaagtctaaggaagccgaaattaaaagaatcaacaaggagctagcaaacatccgttccaagttcaaaggtgataaagcactggacggctattcaaaaaaaaaatatgtgtgtaaactgctctttatctttttgctgggccacgacattgatttcgggcatatggaagcagttaaccttctctctagtaaccggtacacggagaaacagataggatatctgtttatcagcgtgttggtgaattccaatagcgagttgataaggctcatcaataacgccataaagaacgacttagcctctcgcaatccaacattcatgggacttgcactgcactgcatagccagcgtgggaagtcgggaaatggccgaagcattcgccggagagatcccaaaggttctggtggctggagacacgatggacagtgtcaagcagtctgctgccctgtgcctgctgagactatatcggaccagccccgatctagtgcccatgggggattggacttctagggtagtccaccttttgaatgatcagcacttgggcgtggtcactgccgctacatccctcattaccactctcgcacaaaaaaatccggaagaatttaaaacctcggtcagtctggcagtttcccggctgtccaggattgtcacctcagcatctaccgatctgcaggattacacttactacttcgtgcctgccccatggctaagtgtcaagctgctgcgattactgcaatgctatccgcctcctgatcccgctgtgcggggaaggctaaccgaatgtctggaaactatcctgaataaggcccaggaaccgcctaagtcaaagaaagtgcagcacagtaacgccaaaaacgcagtgctgttcgaggcgatttcactgatcatccatcacgatagagaacccaacctgcaagcgcagatgtatcggctgactctgcgcacttccaaggaggcagtgagtcagcggctctgtgagctgctttccgcccaattttag

SEQ ID NO: 213519 - DNA, 1971 bp, synthetic construct
  misc_feature 1..1971: note = Description of Artificial Sequence: Synthetic coding sequence
  source 1..1971: mol_type = other DNA
atgcctgccgtctcaaaaggcgatggaatgagaggcctggctgtattcatatccgacattaggaattgtaagtctaaggaagccgagattaagcggattaacaaggaactcgcgaacattaggagcaaatttaagggagataaggctttagatgggtactctaaaaaaaagtatgtgtgcaagcttctatttatttttctgttgggccacgatattgactttgggcacatggaggccgtgaatctgctgagcagcaatagatacaccgagaaacagatcgggtacctgtttatcagcgtgctagtgaacagcaattccgagttaatccgtctcatcaacaatgctatcaagaatgatctggcgtccagaaatcccacattcatggggctggctctacactgtattgccagcgtgggctctcgagaaatggccgaggcattcgcaggggagataccaaaggttctggtcgccggtgatactatggactccgtgaaacagtccgctgccctgtgtctgcttcgcctgtatcgcacctcacccgacctggtccctatgggggactggacgagccgggtggtccatctgttgaacgaccagcacttgggcgtggtaacagcagccacatctctcatcaccactttagctcaaaaaaaccccgaagagtttaagactagcgtaagtctggcggtgtcaagattatctagaattgtgactagtgcctcaaccgatttacaggattatacatactatttcgtccccgctccttggctgtctgtgaagttactgagacttctccagtgctatcctcccccagaagatccggctgtacgcggaaggctgactgagtgtcttgagacaatcctgaataaggctcaggagccccctaagtccaaaaaggtgcagcactcgaacgcaaagaacgcagtccttttcgaagcaattagcttgattattcaccacgacagtgaacctaatttgttggtaagggcctgcaatcagctgggccagttcctgcaacatagggaaacaaacctgcgatacctcgctctggagtccatgtgtactttagcgtcctccgaattctcccatgaagcggttaagacccacatcgagaccgtaatcaatgccctgaagacagaacgcgatgtgtccgtgagacaacgagcggtggacttgttgtacgctatgtgtgataggtccaatgctccccagatagtagctgaaatgctctcttacctcgaaactgccgattactcaatccgtgaggagattgtgctaaaagtggccatcctagccgagaaatatgcagtggattatacctggtatgtcgacactatactcaatctgatcagaattgccggtgactacgtctctgaagaggtctggtacagggtaattcaaattgtgattaatagggatgacgtacagggctacgccgcaaagaccgtcttcgaggccctgcaggccccagcatgtcacgagaatttggttaaggtcgggggatacatacttggcgaatttggaaatcttatcgctggcgatccacgtagcagccccttgatccaattccacctgcttcattctaaattccacctgtgttccgtacctacacgggctcttcttctgtccacatacatcaagttcgtgaacttgtttcccgaagtgaagcctacgattcaggacgtcctgcggagcgactcacagctaaggaacgccgacgttgaactgcagcaacgtgccgttgaatatctgcgcctttctaccgtggcctcaacggatatactcgcaacagtactggaggaaatgccaccatttcctgagcgcgaatctagcatcctggccaaactaaaaaaaaagaaggggccaagtactgtgaccgaccttgaagacacaaagcgggacagatccgtcgatgtgaatggcggacccgagccagctcccgcatctacttcagcagtactctgcctctag

SEQ ID NO: 213520 - DNA, 2820 bp, synthetic construct
  misc_feature 1..2820: note = Description of Artificial Sequence: Synthetic coding sequence
  source 1..2820: mol_type = other DNA
atgccagccgtgagtaagggcgacggaatgcggggtctggctgtcttcatctccgacatccgaaactgcaagagtaaagaggcagaaattaagcggataaataaagaattggccaatattagatccaaatttaaaggcgataaggccttagacggttattccaaaaaaaaatacgtgtgtaaactcctgttcatctttctactggggcatgacattgatttcggccatatggaggccgtgaacctgctgagttccaatcggtacacagagaagcaaattgggtacttattcatctctgtactggtcaattcaaattcagagctcatccgtctcataaacaacgcgataaaaaacgatttagcttcccgaaaccccacatttatggggcttgccctccactgcattgcttctgtaggcagccgcgagatggccgaggcattcgcgggagaaatacccaaggtgttggtggccggagacacaatggacagcgttaaacagtccgctgcattgtgtctgctacgtctataccgtaccagccccgacctagtgccaatgggagattggacgtcccgggtcgtccatctgttaaacgaccaacatttaggcgtggtgactgcagcgacctcgctgattactaccctggctcaaaagaatcccgaggaatttaaaactagcgtgtctctggctgtatctaggctgtccaggattgtgacaagcgcctctaccgatctgcaggactacacatactactttgttccagccccttggctttctgtcaagctgttgaggctactccaatgttacccaccaccggatcctgcggttcgtggacgtcttacagagtgtctggaaacaattcttaacaaggcgcaagagccaccgaagtctaagaaagtgcagcacagcaatgctaaaaacgctgttctctttgaggcaatttccttgattatccaccacgatagtgagcccaacctgcttgtgcgagcctgcaatcaactgggccagttcctccagcatagagaaacaaatctgcggtacctggcccttgagtccatgtgcactctagcgtccagtgagttttctcacgaggccgtgaaaacccatatcgagaccgttattaacgctttgaaaactgaaagggatgtgagtgtacgtcagcgggctgtcgatctactatacgccatgtgcgacagaagtaatgcgccacagatagtggccgagatgctcagctacctggagaccgcagactactcaattagagaagaaatcgtcttgaaggtcgccattctggctgagaaatatgccgtggactacacatggtatgtggacaccattctgaacttaatcagaattgccggagactatgtgtcagaggaggtctggtaccgcgtgatccaaatagttatcaatagagacgatgttcaggggtacgccgctaaaactgtgttcgaagctctccaggcccctgcctgccacgagaatctcgtcaaagtggggggatatatactgggagagttcggcaacctgattgccggtgaccctcgctcaagcccactcatacagttccacctgcttcattccaaattccatttatgctcagtgcctaccagggcactgctgctgtctacctatatcaagtttgtaaatctgtttccggaggtcaagcccacaatccaagatgtgctgcggtcagactcacagcttcggaatgccgacgtggagctgcagcagagagccgttgagtatctgaggctctccacagtggcaagcacagatattttggccactgtactggaagagatgccgcctttccccgagagggagagtagcatcctggccaaattaaaaaagaagaagggtccctccacagtgacagacttggaggatacaaagcgagaccgttctgtggatgtgaatgggggtccagaacctgcacccgctagcaccagcgctgtgtctacaccaagccccagcgctgaccttcttggcttgggcgctgcccctcccgctccagccggtccaccaccatctagcgggggatccggactgttggtagacgttttttccgattcagcaagcgtggtcgctcctctagcccctggctccgaggataattttgcgagatttgtgtgcaagaataatggagtcttgtttgaaaatcagcttctgcaaattggactcaaatccgagtttaggcagaacttgggaaggatgttcatcttttacggaaataaaacctctacacagtttttaaattttacccctacactgatctgcagtgacgatctgcagccaaacttaaatctccagacaaagccagtagacccaacggtcgagggcggtgcacaggttcagcaggtcgtgaacattgaatgtgtgagtgactttaccgaggcacccgtccttaatatccagttccgatatgggggaacattccagaatgtgagtgtgcaattgcctataactttaaataagttcttccaaccaaccgagatggcttctcaagacttcttccaacggtggaagcagctgtcgaatcctcagcaggaggttcagaatatctttaaagccaagcaccccatggatacagaggtgacaaaggcaaaaataatcggcttcggatcggcgcttctggaggaggtggaccctaatccggctaatttcgtgggcgcaggtattatccatacaaagacgacccagattggctgccttctccggctggagccgaacttgcaggcccagatgtatcgcctgaccctacgaacatcaaaagaagccgtaagccagaggctgtgcgaactgctttctgcacaattctag

SEQ ID NO: 213521 - DNA, 2040 bp, synthetic construct
  misc_feature 1..2040: note = Description of Artificial Sequence: Synthetic coding sequence
  source 1..2040: mol_type = other DNA
atgccggctgtctctaagggggatgggatgcggggattggccgtttttatttcagatatccgaaactgcaaatccaaggaggccgagatcaaacgcataaacaaggagctggctaacattagatccaaattcaagggtgacaaggctttggacggctacagtaagaagaaatatgtctgtaagctcctgtttattttccttctgggccatgacattgacttcggccatatggaagccgtgaacctcctgagcagcaatcggtacactgagaagcagatcggatacctattcatctcggttctggttaactcaaatagcgaactcattaggttgattaataatgcaattaaaactgagcgggacgtgagtgttaggcagcgtgccgttgatctgctgtacgcaatgtgtgaccggtcgaacgcacctcagattgtggctgagatgctctcatatctcgaaacagcagactacagcatccgggaagagatcgtcctgaaagtggccatcttggcggagaagtacgccgtggattacacgtggtacgtagacactattttgaacctgatcagaatcgctggagactacgtgtctgaagaggtatggtatcgcgtcattcagatcgtgatcaacagagacgatgtgcagggttatgctgcgaaaaccgtgtttgaagccctacaggcgcctgcttgccatgaaaatctggtaaaggttgggggatatatcctgggagagttcgggaatctgattgccggagacccacggtcttcgccactgattcagttccatttactgcatagcaagtttcatctgtgctccgtgcctaccagggcgctcctgctttccacctatatcaagttcgtgaacctcttcccagaggtaaagcccaccatccaagacgtgctgcgaagcgacagccagctccggaacgccgatgttgagctgcaacaacgagccgtggagtaccttcgactgagcactgtagcctcgacagacatcttagccactgttctggaagagatgcctccctttccagagagggagtcaagcatactggccaagctgaagaaaaaaaagggcccatcgactgttaccgacttagaagacactaagcgggatcgatctgttgacgtgaacggtggacccgaaccagcccctgcttcaacttctgcagtgtctacaccctcaccttccgccgatttgctgggtctgggtgcagccccacccgctccagccggtccccctccttcgtccggcggatccggcctcctggttgacgttttctccgactcggcctccgtcgttgcgcctttagccccaggttcggaggacaacttcgcaaggttcgtgtgtaagaacaacggagtgctttttgagaaccagctgctgcagattggcctgaaaagcgaattcagacagaatttaggtcgcatgttcatattctacggcaacaagacaagtactcaattcctgaactttacccccacccttatatgtagtgatgacttgcagcctaacctaaatttacagactaagcccgtcgatccaacagttgaagggggagcccaggtgcaacaagtggtgaatatcgagtgtgtgagcgatttcaccgaggcccctgtgctgaacatccaattcagatatggagggacctttcaaaacgtgtctgtccaattgcccataaccctgaataaattctttcagcctacagaaatggccagtcaagactttttccagcggtggaagcagctgagcaatccgcagcaggaggtccagaatatctttaaggcgaagcacccgatggacaccgaagtcactaaagccaagataatcgggttcgggtccgcactgcttgaagaagtggaccccaaccccgctaacttcgtgggtgcgggaatcatccacacaaaaaccacacagattggctgcttgctcagactggaacccaatctccaagcacagatgtacaggctcacccttcgcacaagtaaagaagccgtatctcagcggttgtgcgagttactctcagcccagttctag

SEQ ID NO: 213522 - DNA, 2031 bp, synthetic construct
  misc_feature 1..2031: note = Description of Artificial Sequence: Synthetic coding sequence
  source 1..2031: mol_type = other DNA
atgccagccgtgtccaagggtgacggaatgcggggactcgccgtgtttattagcgatatccggaactgcaagtccaaggaagcggagattaagagaattaacaaggagctagctaatatccggtccaaatttaagggtgacaaagctctcgacggatactccaagaagaaatacgtttgtaaactgttgtttatttttctgcttgggcacgatatcgattttggccacatggaagccgtcaaccttttatcaagcaatagatataccgagaagcagatcgggtacctgttcatctctgtcctggttaactctaatagtgagctgatacgcctgattaacaacaccgagagggatgtgtctgtcagacaacgggctgtggatcttctgtatgccatgtgcgatcgtagtaacgcgccacaaatcgtagccgagatgttatcctacttggaaactgcagattactctatccgggaggagatagtgctcaaagtagcaattctcgcagaaaaatacgcagtggactacacttggtatgtggatacgatattgaatcttatccgcatcgcaggtgattatgtctccgaggaagtgtggtaccgtgtcatacagatcgtgatcaacagggacgacgtgcagggctacgctgccaagaccgtgttcgaagctcttcaggccccagcttgccacgaaaacttggtaaaggtgggcggttacatactgggcgaattcgggaacctcatcgccggagacccgaggtcatctcccctgatacagttccacctactacacagcaagttccatctgtgtagcgtgccaacaagggctttgctgctgtcaacttacatcaagtttgtgaatttgtttcccgaggtgaaacccacgattcaggatgtgctacggtccgacagtcagctgaggaacgctgacgttgaactgcagcagcgcgcagtcgaatatcttagactgtctacagtagcatcaaccgatatacttgctacggtgctggaagagatgccaccttttccagagcgagagagctctattctggcaaagctcaaaaagaaaaaaggccctagcaccgtcactgacctcgaagacaccaagcgcgacaggtcagtcgacgtgaatggaggcccagaacctgctccagcttctacaagcgctgtgtctactccttccccatctgctgatctgttgggcctgggcgcagcacctcccgctcctgctggaccccctccgagttctggcggatccggcctgctcgtagatgtgtttagcgacagcgcttccgtcgttgccccacttgcgcctggttcagaggataattttgcacgcttcgtctgtaagaacaacggcgtcctgttcgaaaaccagttgcttcaaatcggcttgaagtcagagtttcggcagaatctgggtcgcatgttcattttttacgggaataaaacctccacccagtttcttaacttcacccctaccctaatctgctcggacgatctacagcccaacctgaaccttcagacaaagccagttgatcccaccgtagaggggggtgcacaagttcagcaagtggtcaatatcgagtgcgtctcagatttcaccgaggcacctgtgctgaatatccagtttcgttacggcggaacctttcagaatgtttccgtgcagctgcccatcacactgaacaaattctttcagccaaccgaaatggcttctcaagacttctttcaacggtggaagcagctgagtaacccacagcaggaagtgcagaatatttttaaggccaaacaccctatggatacagaggtgactaaggctaagatcatcggcttcgggtcagctttgcttgaagaggtggaccctaacccagccaatttcgttggcgctggtatcatacacactaagaccacccagatcggctgcctgctgaggctggaaccaaaccttcaggcccagatgtataggctgactttacgaacttctaaggaagcggtcagccaaaggctctgtgagctcttaagcgcacagttctag

SEQ ID NO: 213523 - DNA, 2814 bp, synthetic construct
  misc_feature 1..2814: note = Description of Artificial Sequence: Synthetic coding sequence
  source 1..2814: mol_type = other DNA
atgaccgatagtaaatacttcaccaccaacaaaaagggtgaaatattcgaactgaaggcggaacttaataatgagaagaaggagaagcgaaaagaagctgtgaaaaaagtcatcgccgcaatgactgtggggaaggacgtgtccagccttttccctgacgtggttaactgcatgcaaactgacaacctagaactgaagaaactagtgtacttgtacttgatgaactacgcaaaatctcaaccagatatggccatcatggcagtgaactcttttgtcaaggattgcgaggaccccaaccctttgatccgggcactggccgtgaggactatgggttgcatcagagtcgataagattacagagtatctttgcgagcctctccgcaaatgcctcaaagatgaagacccgtacgtgaggaaaacggctgccgtgtgcgtggccaagttgcatgacatcaatgcccagatggtggaggatcagggttttctagactctcttcgggatcttattgccgacagcaatcctatggttgtcgcgaacgcggtggccgcactgtccgaaattagcgagtctcacccaaattccaatctgttagatttaaatccacagaacatcaacaagttactcaccgctttaaacgagtgtactgagtggggccagatattcattctagactgcctgtcaaactataatccaaaggatgatcgagaggcccaatccatctgcgagagagttacgcccagactgtctcacgctaacagcgccgtggtgctgtccgctgtaaaggtcctcatgaaattcctggaacttttaccaaaggactccgattactacaatatgctgttgaaaaaactcgcaccaccgctagtgaccctgctgagcggagagcccgaagtccaatacgtggcattaaggaatatcaatcttattgtgcagaagcgccctgaaatcctgaagcaggagattaaagtgttttttgtaaaatataacgatccaatctacgttaaactggagaagctagacataatgatccggctcgcctctcaggctaacattgcacaggtgcttgctgagttaaaagagtacgctacggaagtcgatgtggactttgtcaggaaagctgttagagccatcggcagatgtgccatcaaagtggaacagtcagcggagcggtgcgtcagtacccttctggacctgatccaaactaaggttaattacgttgtgcaggaggccattgtcgtcattcgggacatcttccgtaaataccctaataaatatgaaagtatcatcgcaacgctgtgcgagaatcttgattcgctggatgagcctgatgcccgagcggctatgatatggatcgtgggcgaatacgctgagcggatcgataacgcggatgaacttctggagagcttcctggaagggttccacgatgaatctacccaggtccaacttacactcctgacggccatcgtaaagctgttccttaagaagccctctgagactcaggagctggtgcagcaggtgctgagtctcgccactcaggattcagacaatccagacttgcgtgaccggggttatatttactggcgactgctcagcacagatcccgtgaccgcgaaagaggtcgtgctgagcgaaaagccgctgatttctgaggaaacagatctcattgaacccacactactggacgagctcatttgccatattggcagtctcgcatcagtgtaccacaagcctcctaatgctttcgtggagggaagccacggaatccaccggaaacatctgccaatccatcatggaagtaccgatgccggtgatagtcctgtagggactactaccgctaccaacttggaacagccccaggtgattccgtcccagggagatctcctgggggatctcctcaacctggatcttggtccaccagttaacgttccacaggttagttccatgcaaatgggcgctgttgacttgttgggaggcggactggattcgctggtgggacagtcattcattccttcgagtgttcccgcaacttttgcaccttcaccaaccccagctgtagtctcctccggacttaatgacctgtttgagctctcgacaggtatcggcatggccccaggcggatacgttgctcccaaagccgtctggctgccggctgtgaaggccaaaggcctggagatatctgggactttcactcatcgtcaggggcatatatacatggagatgaactttaccaacaaggcgttgcagcacatgactgactttgccattcaatttaataaaaactctttcggcgtgataccgagcactcccctggccatccatacccctctaatgcctaaccagtcaatcgacgtgagcttgccgttgaataccctgggacccgtgatgaagatggagcccctgaataaccttcaggttgctgtgaagaataatattgatgtgttttactttagctgcttaattccactgaacgtcctcttcgtggaggatgggaaaatggagcgacaggtatttctggcgacttggaaagatatcccaaatgagaatgagctccaattccagattaaggaatgccacctaaacgcagacacagtcagttccaagctgcagaataacaatgtgtatacaatcgccaaacgcaatgtcgaagggcaggacatgttgtaccagtccctcaagctgaccaacggcatttggatactggccgagctgagaatccaacccggaaaccccaactatacacttagcttgaaatgccgggcacccgaggtaagccaatacatatatcaagtctacgattctatcctgaaaaactag

SEQ ID NO: 213524 - DNA, 2856 bp, synthetic construct
  misc_feature 1..2856: note = Description of Artificial Sequence: Synthetic coding sequence
  source 1..2856: mol_type = other DNA
atgaccgattctaaatactttacaactaacaagaagggagagatatttgaattgaaggccgagcttaacaacgagaagaaagaaaaaaggaaggaggccgtgaagaaggttatcgccgcaatgacagtgggcaaagacgtctcttctttattccccgacgtggtgaactgcatgcagactgataatctggaactcaagaagttggtgtacctttatctcatgaactacgccaagagccagcccgatatggctatcatggctgtcaacagctttgtgaaagactgtgaggaccccaacccactgattagagccctggcagtgaggacgatggggtgcatacgtgttgacaagatcactgaatatctgtgcgagcctctgcgtaagtgtctcaaagacgaggacccttacgtcaggaagacagccgctgtgtgcgtagctaaattgcatgacattaacgctcaaatggtggaggaccagggcttccttgattcactgcgagatttaattgccgactctaacccaatggtcgtcgccaatgctgttgcagcgttgtcggagatttccgaatcccatcctaacagcaaccttctggacctgaatccacagaatattaacaaacttttgacagccctcaatgaatgtaccgaatggggacaaatttttattttggactgcctgtcgaactacaatccaaaagacgatagggaggcccagtccatttgcgaaagagttaccccaaggctatcccatgctaactccgcagttgtgttaagtgctgtaaaagtgctgatgaaattccttgaacttctgcctaaggatagcgattattataatatgttgctcaagaaactggcgcctccactggttactctgcttagtggcgagcccgaggttcagtatgtggcccttcgcaacatcaacctgatcgtccaaaaacgccctgaaatccttaagcaagagatcaaggtcttcttcgtcaaatacaacgatcccatatacgttaagctagaaaaactggacatcatgatccggctagcttcacaggccaacatcgctcaggtgttagcagagttgaaggagtacgccactgaggtggatgtggacttcgtcaggaaagccgttagggctataggcaggtgtgcaatcaaggtggagcagtccgcagagaggtgtgtcagcacactcctcgaccttatacagacgaaagtcaactacgttgttcaggaggctatcgtggtaattcgcgatatttttcgcaaatatcccaataagtatgagagcattattgccaccctgtgcgaaaacctcgatagcctagacgagccagacgcacgagctgctatgatttggattgtaggcgaatacgccgagcgtattgacaatgctgacgagctgctcgaaagctttctggagggtttccatgatgagtctacgcaggtccagctcaccttgctgactgcaatcgtcaagctttttttgaagaagcctagtgaaacccaggaacttgtccaacaggtcctgagtctggctactcaagattccgataaccccgacctacgggatcgaggttacatctactggagacttctttcaacggacccagtaaccgctaaggaggtggtcctgtcagagaagcccctcatttctgaggaaactgacctcatcgagccaacattactcgacgagctgatttgccatattggatctctagcctctgtgtaccataaacctcctaatgcatttgttgaaggctcccatggcatccatcgaaaacatctgccgattcatcacggtagcacagatgctggggatagccccgtgggcaccacaaccgccacaaatctcgagcaaccacaggttataccttcccagggggatctcctaggggacctgctgaacctcgacctcggacctcccgtgaacgtgcctcaggtgagctcaatgcagatgggagccgtggatcttctgggcggagggttggacagtctgctgggatctgacttgggcggagggatagggggaagcccagcggtggggcagtccttcataccctcatccgttcccgcaacctttgcaccctcacctacccccgctgtcgtcagttctgggctgaatgacctatttgagctgtctacgggcatcgggatggctcctggcggatacgtggccccaaaggccgtgtggctgcctgccgttaaggccaaagggctggaaatttctggtacatttactcatcggcaaggacatatttatatggaaatgaacttcacaaataaagccctccagcacatgaccgacttcgctatccagttcaacaagaatagttttggagtaattcccagcacgcctttggccatacacactccactgatgccgaatcaatcaattgatgtgtcactgcctctaaataccttaggacccgtgatgaagatggagccgctgaataacctccaagtcgccgttaagaataatattgacgtattctactttagctgtcttatacctcttaacgtgctcttcgtggaagacgggaagatggaacggcaggtcttcctggccacttggaaagatatccctaatgaaaatgaattacagttccagataaaagaatgtcacctgaatgccgacacggtaagctctaagctgcagaataacaacgtgtataccatcgctaagaggaatgtcgagggacaggacatgctgtaccagtcgctcaagctcaccaacggaatatggattctcgccgagttaaggatccagcctggaaaccctaactacactttgagtctgaagtgtcgggcaccagaagtatcacaatatatctatcaagtttacgatagtatcctgaagaattag

SEQ ID NO: 213525 - DNA, 2856 bp, synthetic construct
  misc_feature 1..2856: note = Description of Artificial Sequence: Synthetic coding sequence
  source 1..2856: mol_type = other DNA
atgaccgattctaagtattttactaccaacaagaagggagagatattcgaactgaaagccgagctgaataatgaaaaaaaggaaaagcggaaagaggccgttaagaaggtgattgcagccatgaccgtcggtaaggatgtctccagtctctttccggacgtagttaattgtatgcagaccgataatctggagctgaagaagttagtatacttatacctgatgaattatgccaaaagtcagccagatatggccattatggccgttaacagcttcgtcaaggattgcgaggaccccaatccattaattcgtgccctggcagtccgaactatgggttgtatccgagtggacaagatcacagaatatctatgtgagccactccggaagtgcctgaaggacgaagatccttatgtgaggaagacggcggctgtctgcgtggctaagctccatgacatcaatgctcagatggtggaagatcaggggttcttagactctctccgggacttgattgccgacagtaaccctatggtagtggccaatgctgttgccgctctgtctgagatatccgagtctcacccaaatagcaatctgctggacctgaatcctcagaacattaacaagctacttacggccctgaacgagtgcacagaatggggacagattttcattctggactgtctctctaattacaaccctaaagacgaccgagaggctcagagtatttgtgagagggtcaccccaagattgtcccacgccaactctgccgttgttctcagcgctgtcaaagttctgatgaaatttcttgaactgttgcctaaggattccgactactacaacatgttactgaaaaaactagcaccaccactggtcactctcttgtcaggggaacctgaggtgcagtacgtagctctgaggaatattaacttgatagtgcagaagagaccagaaatcctgaagcaggaaatcaaggttttcttcgtcaagtacaatgaccccatctacgtaaaactggaaaaactggatatcatgattcgtttggcaagccaggctaatatcgctcaggtcctagccgagctgaaggagtacgccactgaggtggacgtggattttgtgcggaaggccgtgcgcgcaatcggccgatgtgctataaaagttgagcagagcgccgagcgctgtgtcagtaccctgttagatctgatccagacgaaggtgaactatgtggtacaggaggccattgtggtcatcagagacatctttaggaagtatcccaacaaatatgagtcaattatagccactctctgtgagaatttggactccctggacgagcctgacgcacgcgcagcaatgatctggattgttggcgaatatgctgagcggattgacaatgccgatgaactccttgaatccttcctggaagggtttcatgatgagagcacccaggtccaactaacactcctcaccgccatagttaaattgtttctgaaaaagccttccgagacccaagaattagtacagcaggtgttgagccttgcaacacaggacagtgacaaccccgatctgagagacaggggatacatatactggcgcctgctctcaaccgacccggtaacagcgaaagaggttgtactgtctgaaaagcctctgatatctgaagagaccgatctgatcgagccaacattgttggacgaattgatttgtcatatcggctctctcgcgagcgtgtaccacaagccccctaatgcgtttgtcgaaggctctcatggaatccaccgaaagcatctgccaattcaccatgggtcaacagatgccggtgacagcccggttgggacaacaacagcaactaacttggagcagcctcaggtgattcccagccagggggacctgctgggagacctgctgaacctcgacctcggaccacccgttaatgtgccccaggtatcatcgatgcagatgggagcggtggacctccttgggggaggattggactctctgttgggttccgaccttgggggagggattggcggtagtcctgctgttggacagtcctttatcccctcaagcgtgcctgccaccttcgcgccaagccccacccctgcagttgtcagctcaggactgaatgacctgtttgaactgtcaactggaatcggtatggcgcctggaggctacgtggcgccaaaggctgtgtggctcccggcagtgaaggccaaaggactggagatctcaggaacgtttactcaccgccagggacacatttacatggaaatgaattttaccaataaggccctgcagcacatgacagactttgcgattcagttcaacaagaattcgttcggggttataccttccacacccttggcaattcacacaccattaatgcctaaccagtcaattgacgtgtctttacccctgaacacgttgggacccgtgatgaagatggagcctctcaataatttgcaggtcgctgtgaaaaacaatattgacgtcttttacttctcctgtttgattccactgaacgtgctattcgtggaggatggcaagatggagcgccaggtatttctagctacttggaaggacatccctaacgagaatgagctgcagtttcaaattaaagaatgtcacctgaacgccgacaccgtttcttctaagctccagaacaacaacgtgtataccattgcaaagagaaatgtggaggggcaagatatgttgtatcagagtttaaagctgaccaatggaatttggattctcgctgagctgcgtatccagcctgggaaccccaactacaccctgtcacttaagtgcagggcaccagaagtctctcagtacatttaccaggtgtacgacagtatcttaaagaattag

SEQ ID NO: 213526 - DNA, 2643 bp, synthetic construct
  misc_feature 1..2643: note = Description of Artificial Sequence: Synthetic coding sequence
  source 1..2643: mol_type = other DNA
atgcaaacagataatcttgagctgaagaagttggtctacttatatctgatgaattacgccaagtctcagccagacatggccattatggccgtgaactccttcgtcaaggactgcgaggatcccaatcccctcattagagcccttgcagtgagaactatggggtgtatacgcgtggacaaaataacagaatatctgtgcgagcctctcaggaaatgtttgaaggacgaagacccttacgtacgaaaaactgctgccgtatgcgttgccaaactgcacgacattaatgcccaaatggtggaagatcagggctttcttgactcattgcgggacctgattgccgattcgaatccaatggttgtggctaacgcagtggctgccctttccgaaatttccgaatctcaccccaactccaacctgctggaccttaacccacagaacataaacaaattgcttactgcactcaacgagtgcaccgagtggggacaaatttttatcctggactgcctgtccaactataatcccaaggacgaccgcgaggctcagtccatctgcgagcgagtgaccccacgtctctctcatgcaaactcagctgttgtcctgtctgccgtcaaggtccttatgaaattcctggagttgctgccaaaagattccgactactacaacatgttactgaagaagttagctcccccactagtgactcttttgtctggggagccagaagttcagtacgttgcgctcaggaacattaacctaatcgtccagaaaaggcccgagattctgaagcaggagatcaaagtgttcttcgtgaaatacaacgacccgatctatgttaagctggagaagctcgacattatgatccgattggcttcacaagccaacatcgctcaggttcttgccgagctcaaggaatatgcgacagaagtagatgtcgacttcgtgcggaaggctgttcgtgcaataggtcgatgcgccattaaggtggaacagtccgccgaacggtgcgtttctacactgctagatctgatccagacaaaggtcaattatgtggtacaggaggccatcgtcgttatcagagacatcttcagaaaatatcctaacaagtacgaaagcatcatcgctacactgtgcgagaatttggactccctcgatgaacccgatgctcgcgcagcaatgatttggattgtaggtgagtacgctgaaagaatcgataacgctgacgagctgctcgagagtttcctcgagggtttccatgatgaatccacacaggttcagctcaccttgctgaccgctattgtgaaactgtttctgaagaaaccttcggagactcaggaacttgtgcaacaagtcctctctctggccacgcaggactcagataaccctgacttgagagacagggggtacatttactggaggctgctatcgacagatccagttactgccaaggaggtcgtgttatccgaaaagcccctgattagcgaggagacggacctcatcgaacctaccctcctcgacgagctcatttgccacatcggatcactcgcctctgtgtaccacaagccccctaatgcatttgtagaaggctctcacggcattcacaggaagcaccttccaatccaccacggaagcaccgatgccggagactcaccagtaggaaccaccaccgctacaaacttggaacagccccaagtgatcccttcacaaggagaccttttgggtgatctcttgaatctggatttgggccctcctgtgaacgtgcctcaagtgtcatctatgcaaatgggcgcagtggacctcctaggcggaggcctggatagcctcgtgggccaaagttttatcccctcgtctgtgccagcaaccttcgccccttcacccactccagcagtggttagttctggcctgaatgatctgttcgaattgagcacaggaatcggtatggcgccaggcggatacgtggccccaaaagcagtgtggctccccgctgtgaaagccaaggggctggaaatttctggtacatttacgcatagacagggccacatttacatggagatgaatttcaccaataaggcactacaacatatgactgattttgccattcagtttaacaaaaattcatttggcgtcattcctagcactccgctcgcaattcacacacccttaatgccgaaccagagcatagacgtttcactgccgctgaacactctaggccctgtgatgaaaatggagcccctcaataacctgcaggtggccgtaaaaaacaacatcgatgtgttttacttcagttgcctgattccgctcaacgtgctgttcgttgaggacgggaagatggagagacaggtttttttagccacctggaaggacattcccaatgaaaatgagctgcagtttcagatcaaggaatgtcacctgaacgccgacacagtgagttccaagttacagaacaataacgtgtatacaattgctaaacggaacgtggagggccaggatatgctgtatcagtcactcaaattgactaacggaatctggattcttgccgagcttcggatccagcccggaaatccgaattacactttgtcattgaaatgtcgggcaccggaggtgagtcagtacatataccaggtgtatgatagcatactgaaaaactag

SEQ ID NO: 213527 - DNA, 2067 bp, synthetic construct
  misc_feature 1..2067: note = Description of Artificial Sequence: Synthetic coding sequence
  source 1..2067: mol_type = other DNA
atgaaattccttgagctactccctaaggattcagactactacaacatgctgctaaagaagctcgcacctccgctcgtgaccctcctctcaggtgagcccgaggttcaatacgtcgctctgcgtaatatcaacctgattgttcagaaaagacccgaaattcttaagcaggagattaaggtattctttgtgaaatacaatgatcccatctatgtaaagctggagaaactggacatcatgataaggttagcttctcaggcaaacattgcacaagtcctcgctgagctgaaggagtatgctacggaagttgacgtggactttgtgcggaaagctgtgcgagcaatcggcagatgtgctataaaagtagaacagtccgctgaacgctgcgtgagcaccctgctggacctaattcagacaaaggttaattacgttgtgcaggaggctatcgtggtcatcagagatatatttaggaaataccctaacaagtacgagtccattatagctactttatgtgaaaacctggacagtctggacgagcccgatgctagggccgcaatgatttggattgtcggggagtacgcagaacgcattgacaatgccgacgaactgctagaatcgttcctggagggtttccatgatgagtccactcaggtccagttgacactgctaaccgccatcgtcaaattattccttaagaaaccatctgagacacaagagctggtccaacaggtgcttagcctggcgacacaagactcggacaatcccgatctgcgcgatcggggttatatttattggaggctactgtccaccgacccagtgactgctaaagaggtggtgctcagcgaaaaaccattgatctcggaagaaacagatctcatcgaacccaccctgctagatgagctcatctgccacattggatccttggccagcgtttaccacaagccgccaaacgcattcgtcgagggtagccacggtattcacagaaagcacctgcctattcaccacggatccacggatgccggagattcccctgtagggaccaccactgccacaaatttggaacagcctcaggtcattcctagtcagggagatctgttgggggatcttctgaacctggacctgggacctcctgttaatgtgccacaggtgtcgagcatgcagatgggcgcagtcgatcttctggggggaggactggacagcctgcttggatctgacctgggcggaggtattggcggatctcccgctgtcggacagtcattcatcccttcttctgtccctgccacattcgcgccttctcctactcctgccgtcgtgtcatctggactcaacgatttatttgagctttctacagggattgggatggcccctggcggttacgtggcacccaaagccgtatggcttcctgccgttaaggcaaagggcctcgaaatctctggaactttcacacataggcagggacacatctacatggaaatgaacttcaccaacaaggcccttcagcatatgacagatttcgccattcagtttaacaagaactctttcggcgtgatcccatcaaccccgttggccattcacaccccgctgatgcccaatcagagcatcgatgtgtctttgcccctgaacacactcggccctgtgatgaagatggagcccctcaataatctccaggtggccgtgaagaataatatcgacgtattttacttctcttgtctaatcccactgaatgtcttattcgttgaagatggtaaaatggaacgacaggtgttcttggctacctggaaggacattccaaatgagaacgaactacaattccagatcaaagagtgtcacctgaacgcagataccgtcagttctaagcttcagaacaataatgtgtacacgattgcgaaacgcaacgtagaaggacaggacatgctctaccagagcctcaaactgacgaacggcatctggattctggcagagctcagaattcagcccggtaaccctaactacacactctctcttaagtgtcgggctcctgaggtttcccagtatatataccaggtttatgactctatactcaagaactag

SEQ ID NO: 213528 - DNA, 1308 bp, synthetic construct
  misc_feature 1..1308: note = Description of Artificial Sequence: Synthetic coding sequence
  source 1..1308: mol_type = other DNA
atgattggagggctgtttatctataaccacaaaggtgaagtgctcatctcccgcgtatacagggatgatatcgggagaaatgctgtggacgctttccgagtcaacgtgattcacgctcggcaacaggtccggtctccagtcaccaacatcgcaaggaccagttttttccatgtgaagagatcaaatatctggttggcagccgtaacgaagcagaacgtgaatgccgcaatggtctttgagtttctgtacaagatgtgcgacgttatggccgcatacttcggaaagatttctgaagaaaatattaaaaacaactttgtcttgatttacgaactgctggacgagatactggacttcggctacccccagaattctgaaacaggagccctcaaaacctttatcacccagcaaggtatcaagtcgcagcaccagactaaagaggaacaaagccagatcacgtcacaggtgactggccaaatcggctggagaagagagggcatcaagtatcggcgaaacgaactgtttttggatgtgcttgaatcagttaacttgcttatgtcgccgcagggccaggtacttagcgcccacgtgtctggccgagtcgttatgaagagttacttgagtggcatgccggaatgtaaattcgggatgaacgacaaaatagtcatcgagaagcaaggaaagggaacagccgacgagacgagcaaatccggaaagcagtcaattgctatcgatgattgcacctttcatcagtgcgtgaggctcagcaagttcgattctgagagatcaattagctttattcccccagacggagaattcgagcttatgaggtaccgcacaacaaaagatattattcttcctttcagagtcattcctttggtgagggaggtaggacgcaccaagttggaggtgaaggtggtcataaaatcaaactttaaaccttctctcttggcccagaaaatcgaagtaagaattcccacacccctcaatacgtctggagttcaggtgatatgtatgaaggggaaggctaagtacaaggctagcgagaacgcgatagtttggaaaattaagcggatggcaggcatgaaagaatcacagatttccgctgagatcgagctgctcccaacgaacgataagaaaaaatgggcaaggcccccaatcagtatgaacttcgaggtcccctttgcgccatcaggattgaaggtgagatatctgaaggtatttgagcccaaactcaattattcagaccatgatgtcattaagtgggtgcgctatattggcagatcaggaatctacgaaacgcgctgttag

SEQ ID NO: 213529 - DNA, 1302 bp, synthetic construct
  misc_feature 1..1302: note = Description of Artificial Sequence: Synthetic coding sequence
  source 1..1302: mol_type = other DNA
atgattggagggctgttcatttacaaccacaagggtgaggtccttatttcgcgcgtctatcgggacgacattggacggaacgctgtggatgcctttcgagtaaatgtgatccacgcccgtcagcaggtgcggagccccgttacgaatattgcccgtacatctttctttcatgtgaaaagatcaaatatctggctggcagctgttacaaagcagaacgtcaatgcagcaatggtgttcgagtttttgtataaaatgtgtgacgtaatggccgcatacttcggtaaaatcagcgaggaaaatattaaaaataactttgtgttaatctacgagctcctggacgaaatcttggacttcggctacccccagaattctgagaccggagcattgaagaccttcatcacacagcaagggatcaaaagccaaaccaaggaagagcagagccagatcacttcacaggtaacaggtcaaattggttggcgcagggaaggcattaagtaccgccgtaatgagttattcttggatgtgctcgaaagcgtgaacctgttgatgtcgcctcaggggcaggttttatctgcccacgtatcagggagagtcgtgatgaagtcctacctgtccggaatgcctgagtgtaagtttggaatgaacgacaaaatagtcattgaaaaacagggaaagggcacagcagacgagacttcgaagtcaggaaaacaatccatagccattgacgactgcaccttccaccagtgtgtgcggctttcaaaattcgactctgagaggagcatctcattcattcctccagacggcgagtttgaattaatgcggtacaggacaaccaaggatatcatcttacctttccgcgtgatcccgctggtaagggaagtaggcagaacaaagttggaagtgaaagtcgtcatcaagagcaactttaagccaagcctgctggctcaaaagattgaggtgcgaatccccacccccctgaacacctcaggggttcaagtgatctgcatgaaggggaaggcaaagtacaaggcttccgagaacgcaattgtgtggaaaattaagcgaatggccggtatgaaagagagccagatatcggcagagatcgagctgctccctaccaacgataagaaaaagtgggcccgacccccaatctctatgaactttgaggtgccattcgctccgtccgggttgaaggtccggtacctcaaggtgttcgagcctaaactgaattactcagatcacgacgtaattaagtgggttcgatacatcggtcgatccggcatctacgagactcgctgctag

SEQ ID NO: 213530 - DNA, 1302 bp, synthetic construct
  misc_feature 1..1302: note = Description of Artificial Sequence: Synthetic coding sequence
  source 1..1302: mol_type = other DNA
atgattgggggactgttcatctacaatcataaaggagaagtactaatcagcagggtgtaccgagacgacattggaaggaacgcggtagatgccttcagagtcaacgtgatacatgccaggcaacaggttcgctcccccgtgacaaatatagcccgtacatcttttttccacgtgaagaggagcaacatatggctagccgcagtgacaaagcagaacgtgaacgctgccatggttttcgagtttctctataaaatgtgtgacgttatggctgcctatttcggaaagatctctgaggaaaatatcaaaaataatttcgtcctcatatacgagctgttggacgagatcctggacttcggatacccgcaaaactctgagaccggtgcactcaaaaccttcataacacagcaggggattaagagtcagactaaggaagagcagagtcagatcaccagccaggtcacgggacaaatcggttggcgtcgcgaagggatcaaatacagaaggaatgaactgtttctggatgtcctggaatcagtcaacctgctgatgtcaccacaggggcaggtgctgtcggctcacgtgtcggggagggtagtcatgaagtcgtatctaagcgggatgcccgagtgtaaatttggcatgaatgataaaattgtgatcgaaaagcagggaaaaggcacagctgacgaaacaagcaaaagtggtaaacagtccatcgccatcgacgactgtactttccaccagtgcgtcaggctctccaagttcgattccgagcgttcaatcagtttcataccccctgacggcgaatttgaactcatgagatatcggaccacaaaggacattatactcccgtttagggtcattcctctggttcgggaggtcggccgtaccaagttggaagtaaaggtggtgattaaatctaacttcaaaccaagtcttctggctcagaagatagaagttagaatcccaacacctttaaacacgtccggagtgcaagtgatctgcatgaagggcaaagccaagtataaagcgagcgagaatgccattgtctggaagattaagagaatggcgggtatgaaggaatcacagatctccgcagagatagaactacttccaacaaatgataaaaagaaatgggccaggccacctataagcatgaattttgaagtgccattcgcgccttctgggctcaaggtgaggtacctgaaggtgttcgagcccaagctgaactactcagaccatgacgtgattaaatgggttcgttacattggtcgtagcgggatttatgaaactagatgttag

SEQ ID NO: 213531 - DNA, 342 bp, synthetic construct
  misc_feature 1..342: note = Description of Artificial Sequence: Synthetic coding sequence
  source 1..342: mol_type = other DNA
atgatagggggactatttatatacaaccacaagggcgaggtgcttatcagccgcgtttatcgagacgacatcggtcgcaacgctgttgatgcattccgagtgaatgtgatccacgccagacagcaagtgagatcccccgttacaaacattgccagaactagcttttttcatgtaaaacgctctaacatctggttggcagccgtaacaaaacagaacgtaaacgcagctatggtgtttgaattcttatataaaatgtgtgacgtgatggctgcgtattttggaaaaatcagtgaggagaatattaagaacaactttgtgttgatctacgagctgctcgattag

SEQ ID NO: 213532 - DNA, 1263 bp, synthetic construct
  misc_feature 1..1263: note = Description of Artificial Sequence: Synthetic coding sequence
  source 1..1263: mol_type = other DNA
atgattgggggtctgtttatttacaaccataagggcgaggtgctgatctctcgcgtgtatcgggatgacattgggcgaaacgctgtggacgcgtttcgtgtgaatgtgatccatgccaggcagcaagtgcggtcgcctgtcaccaacatctggttggccgcagtgaccaagcagaatgtgaacgcagctatggtgttcgaattcctctataagatgtgcgatgtgatggctgcatattttggcaagatttctgaagagaatatcaagaataattttgtcctgatttacgagctgctcgacgaaatactggacttcggataccctcaaaactccgagaccggcgctttaaagacatttatcacgcagcaagggatcaaaagtcagacaaaagaggagcaatctcagataacctcacaggtgaccggtcaaattggttggcggcgagaaggaattaaataccggagaaacgaactgttcctggatgtcctggagtccgtaaatttgctgatgtctccccagggccaagtactaagcgcccacgtgtccggacgggtggtgatgaaatcttatctaagtggcatgcccgaatgcaagttcggtatgaacgacaaaattgttatcgaaaaacagggcaaaggtaccgccgatgaaacgagcaaatctgggaagcaaagcattgccatagacgactgcactttccaccaatgtgtgcgcctgtccaaatttgattcagaaagatctatcagtttcatacctcccgatggtgagttcgagcttatgcgctaccgcactactaaggatattatactgccatttagggtaatccccctcgtgagggaggtaggcaggacgaagctcgaagtgaaagtggtaattaagtcaaactttaaaccttccttgttagcgcagaaaatcgaggtcagaatccccacacctttgaacaccagcggtgtgcaggtcatctgtatgaagggcaaggctaagtacaaagcaagtgagaatgccatcgtgtggaaaatcaaacgtatggctggcatgaaagagtcccagatttcagcagagatcgagttgctgcccacgaacgacaaaaaaaaatgggccagacctcccatcagcatgaatttcgaagtaccattcgccccatcgggtctgaaagttaggtacctcaaagtgtttgagccaaaactaaattattccgatcatgacgtgatcaaatgggttcgctatataggcaggtccgggatttatgagacgcgctgctag

SEQ ID NO: 213533 - DNA, 1128 bp, synthetic construct
  misc_feature 1..1128: note = Description of Artificial Sequence: Synthetic coding sequence
  source 1..1128: mol_type = other DNA
atgattgggggactttttatttataatcacaaaggggaggttttgatcagtagggtatatagggatgatataggtcggaacgccgtggcagcctacttcggaaaaatttccgaggagaacattaagaataactttgttctcatttacgaactgctggacgagatcctggacttcgggtatccacagaattcggagacaggcgctttgaagactttcatcacacagcaaggcatcaaaagccagcaccagacaaaggaagagcagtcccagattacctctcaggtgactggacagatcggttggcgcagggagggaataaaatatagacgaaacgaactgtttctggatgtgctggagagcgtgaacctgctcatgtcaccacagggccaagtgttgagcgcccacgtgtccggaagagtggtgatgaagagctacttgtctggcatgcccgagtgcaagttcgggatgaatgataagattgtgattgagaaacaggggaagggcaccgctgacgaaacctctaaatcggggaagcagagcattgctatcgatgactgcactttccaccagtgtgtacgtctttcaaaattcgattcggaacgcagcataagctttattcctccggacggggagtttgagcttatgcgttatcgtaccactaaggatattatcctgccgtttagagtgatacctctggttcgcgaggtgggccgaacaaagctggaggtcaaggtggtgataaagtcgaatttcaagcccagtctcctggctcagaagatcgaggtgagaatacccacaccgctgaacacctccggggttcaggtcatttgcatgaaagggaaagctaaatataaagcctctgaaaacgctatagtgtggaagattaaacgtatggccggaatgaaggagtctcagatctctgcagagattgaactactcccaactaacgacaagaaaaagtgggccagacctcccatatcaatgaacttcgaagtaccattcgctcctagcggcctgaaggtgagatatctgaaagtgttcgagcctaaattaaattattccgaccacgacgtgataaagtgggtgagatatatcggccgatcagggatctacgagaccaggtgctag

SEQ ID NO: 213534 - DNA, 429 bp, synthetic construct
  misc_feature 1..429: note = Description of Artificial Sequence: Synthetic coding sequence
  source 1..429: mol_type = other DNA
atgattcggttcatactgatacagaaccgggctggcaagacccgcttagccaaatggtacatgcagttcgacgatgatgaaaaacagaagctaatcgaggaggtgcacgccgtggttacagtcagagacgccaagcatacaaattttgtggagtttaggaatttcaaaatcatctacagacgttacgcaggactctacttttgtatctgtgtagacgtgaatgacaataacctggcgtatcttgaagccattcataattttgtggaggttcttaacgagtattttcacaatgtgtgtgaactggatctcgtgtttaacttctacaaggtttatactgttgtggacgaaatgttcttggctggagaaatccgggaaacgtcccagacaaaggttctgaagcagcttcttatgctgcagtctctcgagtag

SEQ ID NO: 213535 - DNA, 315 bp, synthetic construct
  misc_feature 1..315: note = Description of Artificial Sequence: Synthetic coding sequence
  source 1..315: mol_type = other DNA
atgattcggtttattctaatccaaaatagagccggaaaaaccagattggcaaaatggtacatgcagtttgacgatgacgagaagcagaagctgatagaggaagtgcatgccgtagtgaccgtgcgagatgccaaacacaccaacttcgttgaggtgttgaacgagtacttccataatgtttgtgagctggacctggttttcaacttctacaaggtgtacacggtggtggacgaaatgtttctcgccggagagattcgcgagacaagtcagaccaaggtactcaagcagctgcttatgctccagagtttagaatag

SEQ ID NO: 213536 - DNA, 3285 bp, synthetic construct
  misc_feature 1..3285: note = Description of Artificial Sequence: Synthetic coding sequence
  source 1..3285: mol_type = other DNA
atgtctagtaacagcttcccctacaacgagcagtcagggggtggtgaagcgactgagctcgggcaggaagcgacgagcaccatttcaccctcgggcgcattcggactgtttagctctgatttgaaaaagaacgaggatctcaaacagatgctcgaaagcaacaaggactctgccaaactagacgctatgaaaaggatcgttggcatgatcgccaagggcaaaaacgcctctgagctgtttcctgctgtggtgaagaacgtcgcttccaagaacattgagattaaaaaactggtttatgtctacctggtacgctacgctgaggagcaacaggacctggcgttattgagcatttccacctttcagcgagcccttaaagaccccaaccagctgatccgagcatctgccctaagggtcttgagcagcatcagagtcccaatcatcgtgcccataatgatgctggccatcaaagaagcctcagccgatctctctccttacgtccgtaaaaacgcagcccacgctatccaaaaactctacagtctcgaccccgaacaaaaagaaatgcttatcgaagtcatcgagaagctgttgaaggataagagcactttggtcgccggtagcgtggtcatggcattcgaagaagtgtgcccagaccggatcgatctcatccacaagaattaccggaagctgtgtaatctactggtggatgtggaagagtggggccaagtggtcatcattcatatgcttacgcgctacgcacgtactcagtttgtgagcccctggaaagaaggggacgagcttgaagataacgggaagaacttctatgagtccgatgatgatcaaaaagagaagaccgacaaaaagaaaaagccttatactatggacccagaccacaggttgttgatccggaatacaaagccccttctccagtcacggaatgcggctgtggtgatggctgtggcccagctttactggcacatcagccccaagagcgaggcaggaattataagcaagagtttggtgcgtctcctgagaagcaaccgagaggtgcagtacatagtactccagaacatagctacaatgagcattcagagaaaaggcatgttcgaaccctaccttaaatctttttacgtccggagcacagatccaaccatgatcaagactttgaaactcgagattctgactaatctcgcaaatgaggctaacatttctaccctgctaagggagttccagacctatgtgaagtcacaggataagcagttcgctgcagccactatccaaactatcgggaggtgtgccaccaacatcctcgaggtgacagacacgtgcctcaacggcctagtttgtttgctgtcaaaccgagatgaaatagttgtagcggagtccgtggtagtgatcaaaaagctcctccagatgcagccggcacagcatggagaaataatcaaacacatggccaagctgcttgactcaatcaccgtccctgtggctcgcgcatccatcctgtggctgatcggagagaactgcgagcgggtgccaaagattgcacccgacgtactgcgcaagatggcaaagagcttcacaagcgaagatgacttagtgaaactccagattctcaacttgggcgctaagctttacctgaccaattccaagcagaccaaactgttaactcagtatatactgaacctgggaaagtacgatcaaaactacgatatacgagatcgaacccgctttataagacaactaattgttcctaacgtgaagtccggagctctttccaagtacgctaagaaaatttttttagcgcagaaacccgcacctctgctggagagcccctttaaagatcgtgaccactttcagctcgggactctttctcacactctgaacatcaaggcaacgggttacctcgaactctctaattggcccgaggtggcccctgatccatctgtgaggaatgtggaggttattgaactggctaaggaatggaccccagccggtaaagctaaacaggagaatagtgcaaaaaagttctacagcgaatctgaggaagaggaagattcatcagatagctcttcggactccgaaagtgaaagtggctctgagtcaggggaacaaggagagtcgggagaagagggcgatagcaatgaggatagttccgaggactcatccagtgagcaagactccgagagtgggcgagagagcggccttgaaaataagcggacggccaagaggaatagcaaggcaaagggcaagtctgactccgaagatggggagaaagaaaacgaaaaaagcaagaccagtgattccagtaatgacgaatctagctctatcgaggattcatcaagcgattcggaaagtgagtctgagcctgagagcgagagcgaatcgcgaagagttacaaaggagaaggagaaaaagaccaagcaggaccgaacccctctgaccaaagacgtatctctgctggatctggatgacttcaatcctgttagcacaccagtggccctcccgaccccagcactaagcccatccctcatggccgacctggaaggcctgcacctgtcaacttcatcaagtgtgattagcgtttctacaccggcattcgtccccaccaagacccatgtactgcttcacaggatgagtgggaaaggcctggctgctcactatttttttccacgacagccgtgcatcttcggagacaagatggtcagcattcagattacgctgaacaataccacagatcgcaagatcgagaatatacacatcggagagaagaagctccctattggaatgaaaatgcacgtgtttaatcccatagactcactcgaacctgaaggttctataaccgtgtccatgggtatcgatttctgcgactctactcagacggcctcatttcagttgtgtaccaaagacgattgttttaacgtgaatattcagcccccagtgggagagctgttgctgccagttgcaatgtctgaaaaggattttaagaaggaacagggtgtgttaacaggtatgaatgagaccagtgcagttataatagctgcccctcagaactttactccgagtgttatttttcagaaggtggtaaacgtggccaacgttggggcagtgcctagcgggcaggataacatccataggttcgccgcaaaaactgtgcattctggatcgctgatgctggtcactgtcgagttaaaagagggatcaaccgcgcagctcataatcaacaccgaaaaaacggttattggcagcgtgttgctcagggagttgaagcccgtcctgtcccagggttag

SEQ ID NO: 213537 - DNA, 1698 bp, synthetic construct
  misc_feature 1..1698: note = Description of Artificial Sequence: Synthetic coding sequence
  source 1..1698: mol_type = other DNA
atgtcctccaatagtttcccctataatgaacagtcaggtgggggagaggctactgagctggggcaagaggcaaccagcactatatcaccatcaggagcatttgggctcttcagcagtgatctcaagaaaaatgaagacttaaagcagatgctagagtctaacaaggactctgccattaaagaagcaagcgctgacctgtcaccatatgtgaggaagaacgcggcacacgctattcagaagctgtacagtctggacccagaacagaaggaaatgctcatcgaggtaatcgagaaactcctgaaggataagagcaccctggtcgccggtagcgtcgttatggcatttgaggaagtatgtccggaccgaattgacttgatccataagaattaccggaagctctgtaacctcctggtcgatgtggaggagtgggggcaagtggttatcatccacatgctaactaggtacgccagaactcagttcgtatccccatggaaggagggtgatgagttggaagataatggcaagaacttttatgagtctgacgatgatcagaaggagaagaccgataagaagaaaaagccatacacgatggatccagaccatcgtcttcttattaggaacactaaacccctgctgcagtcacgaaatgccgcagtagtcatggccgtggctcaactgtattggcatataagccctaagtccgaagccggtattatatcaaaatctttggtacgccttctgcgctcaaacagagaggttcaatatattgtgctccagaatattgccaccatgtcaattcaacggaaagggatgttcgagccctacctcaagtctttttatgtccgcagcactgacccaactatgatcaaaacactcaaattagaaatcctgaccaacttggcaaacgaagctaacattagcaccctccttagggagtttcagacctacgtaaaatcccaggataaacagttcgcagcagcgacaatccagaccatcggtcgctgcgcaaccaatatattggaggtgacagacacttgcctgaacgggctagtctgcctgttatcaaacagagacgaaattgtcgtggccgagtccgtggttgtgatcaagaaactcctgcagatgcaacccgctcagcacggagagatcataaagcacatggctaagcttttggactccataacagttccagtagccagggcctcaatcctctggctgatcggggagaattgcgagagggtacctaaaattgctccagacgtgctcaggaaaatggccaagagcttcacctcagaggacgacctggtgaagctccagatcctaaacttgggcgcaaagctgtatcttaccaactcaaagcagaccaagctgctgactcagtatattcttaacctggggaagtatgatcagaactacgatatccgtgatcgaaccagatttataaggcagcttatcgtgccaaacgtgaaaagcggagcactaagcaagtatgctaagaagatctttctagcacaaaagccagcccctctgctcgagtcacctttcaaagacagggaccattttcaactgggaacactgtcacatacccttaacatcaaggcgaccgggtatctggaattgtctaactggccagaagtggcacctgatccttcagtacgcaacgtggaggtaatcgagctcgtcgtattgtctgagtag

SEQ ID NO: 213538 - DNA, 2403 bp, synthetic construct
  misc_feature 1..2403: note = Description of Artificial Sequence: Synthetic coding sequence
  source 1..2403: mol_type = other DNA
atgtcaagcaattcatttccttacaatgaacagtcgggcggaggagaggcaacggaacttggtcaagaggccactagcacgattagcccaagcggcgctttcggtctcttcagcagcgacctcaagaagaacgaggatcttaagcagatgctggagtctaacaaagattcagccaagcttgatgcaatgaagcgcatagtagggatgattgctaagggcaaaaatgcatctgagcttttccctgcagtcgtgaagaacgtcgcatcgaagaacattgaaataaaaaagctggtctacgtttacctcgtcagatatgctgaagagcagcaggacctcgcgctgctctccatcagcactttccagcgcgctctcaaggaccccaatcagctgattagagcctctgccctgagggtgctgtcgtcaattcgagtcccaatcatcgtgcccataatgatgctggcgattaaagaagcttctgccgatttatccccatatgtcagaaagaatgcggctcacgctatccagaagctctacagcctggatcctgaacaaaaagaaatgctcatcgaggtgatagagaagttgctgaaagacaagtctaccttggtagctggaagtgtcgtgatggcatttgaggaggtttgtccagatagaatcgatttgattcacaaaaactatagaaagttgtgcaatttgctcgttgatgtcgaggagtggggacaagtcgtgatcatccacatgcttactcgctacgccaggacccagtttgtatcaccgtggaaagaaggtgatgagctcgaagataacggtaaaaatttttacgaaagtgatgacgatcagaaggagaaaaccgacaaaaaaaaaaaaccctatacaatggatccagaccataggctgctgatcaggaataccaagccgctgctccagagcaggaatgctgcagtcgtgatggcggttgcacagctatattggcacatttcacccaagtccgaggcaggcattatcagtaaatcactcgtgagactgctaaggtccaatcgcgaggttcaatacatcgtcctacaaaatattgctacaatgtccatccagcggaaggggatgttcgagccttatctgaagagcttctatgtcagatccactgacccgactatgatcaagacattgaagctcgagatcctaaccaatctggcaaacgaggcaaacatcagcacgttgctgcgtgagtttcaaacctacgtcaagtcacaggacaaacagtttgcggcagccacaattcaaacgattggaagatgcgctaccaacatcctggaagttaccgatacgtgtttgaatgggttggtttgtctcttgagcaatcgcgacgagattgtggtcgcagaaagcgtcgtcgtcatcaagaagctgttgcagatgcaaccagctcagcatggggaaatcatcaagcacatggcaaaactcctagactctattacggttccagtggccagggccagcatactgtggcttataggcgaaaattgtgagagagtcccaaagattgcccctgacgtattgaggaagatggccaagagctttacatccgaagatgatcttgtgaaacttcaaatcctcaatcttggcgcaaaattgtatttaacaaattccaaacagactaagctgctgacccagtacatcttaaacctcggaaaatacgaccaaaattatgatatccgcgatcgaacccgcttcatacgtcagcttattgtgcccaacgtgaaatccggtgccctgagcaagtacgccaagaaaatctttcttgctcagaaaccagcccctttattagaaagccctttcaaggatcgcgatcactttcagctgggaacgttgtcccacacactgaacataaaagcgactggatatctggagctttcaaattggcccgaggtcgccccagacccctcagtgcggaacgtagaggtgattgagctagctaaggagtggacacccgctggcaaagccaagcaagaaaattctgcgaaaaagttttatagcgaaagtgaggaggaagaggatagcagcgactcaagctccgatagcgaatccgagtcaggctcggaatctggggagcagggagagagcggggaagagggggattcaaatgaggattcatccgaagatagttcttccgaacaggactcagagagcggaagggagtctggtctggaaaacaaaaggaccgccaaacgcaactcgaaagcaaagggaaaatctgatagcgaggacggggagaaagagaatgagaagagtaagacaagcgactcctccaacgacgagtcctcgtcaatcgaagactcctcatctgatagcgagagtgagtcagaaccagaatccgaatcagaaagccgacgggtgaccaaagaatag

SEQ ID NO: 213539 - DNA, 582 bp, synthetic construct
  misc_feature 1..582: note = Description of Artificial Sequence: Synthetic coding sequence
  source 1..582: mol_type = other DNA
atgatcaaggccattctgatctttaataatcacgggaagcctaggctgagcaagttctatcaaccgtactctgaggatacacagcagcaaatcatacgcgagacgtttcaccttgtttccaagcgggacgaaaatgtctgtaacttcctggaggggggtcttctgataggaggttcggacaacaagttaatctacagacactatgcaaccctctacttcgtgttctgtgtcgattcaagtgagtctgagctgggaattcttgaccttatccaagtgttcgtcgagacactagataaatgctttgagaacgtatgcgaactagacctcatctttcacgtggataaagtacataacatactcgccgagatggtaatgggtggaatggtcctggagacaaatatgaacgagattgtgacccagatagacgcccagaacaagctggagaagagtgaggcaggtctggcgggtgctcccgctagggccgtatccgccgtgaagaacatgaatctcccagagatccccagaaacattaatataggtgatatctccataaaggtccccaacctgccttcttttaagtag

SEQ ID NO: 213540 - DNA, 450 bp, synthetic construct
  misc_feature 1..450: note = Description of Artificial Sequence: Synthetic coding sequence
  source 1..450: mol_type = other DNA
atgatcaaattctttttaatggttaataagcaagggcagacacgactgtcgaagtattatgagcatgtggacatcaataagaggacgctgctagaaaccgaagttatcaaaagttgcttatctcgtagcaacgagcaatgctcttttatcgaatacaaagacttcaagctgatttatcgccaatatgccgctctctttattgtggttggggtgaatgataccgaaaacgagatggccatttacgaattcatacacaatttcgtcgaggtgctcgatgaatattttagcagagtgtcagagttagatgtgtccttctttaatacagtgttccactcaacatggcagatgcattcgggcccttaccaaacaagatcctgctctgtgacacaggccggagtgcaacggtgcgatcatggctccctgcatcccggaagcccaggtttgaagtag

SEQ ID NO: 213541 - DNA, 408 bp, synthetic construct
  misc_feature 1..408: note = Description of Artificial Sequence: Synthetic coding sequence
  source 1..408: mol_type = other DNA
atgatcaaattcttcctgatggtgaataaacagggacaaacacgtctgagcaaatactacgaacacgtagatattaacaaaaggacacttctcgaaacggaggtgattaagagttgcctgtcaaggagcaacgagcagtgttcctttatcgaatacaaggattttaaactgatttaccgacagtatgccgctctgttcatcgtggtgggcgttaacgatacagaaaatgaaatggcgatctacgagttcattcacaatttcgtcgaagtgctagacgagtatttctctcgggtggagccgatcgacgagttgcctaagatttgtagtgccctcgagccccagcagacctgtttctctcctgactcctcatcctttaaaggcgcagcctccacaaccccgatctattag

SEQ ID NO: 213542 - DNA, 2220 bp, synthetic construct
  misc_feature 1..2220: note = Description of Artificial Sequence: Synthetic coding sequence
  source 1..2220: mol_type = other DNA
atgccatacttaggcagtgaagatgtcgttaaggagctgaagaaggcactatgcaaccctcacatacaggcggacagactccgttaccgcaatgtgatccagcgggtcataagatatatgacccaggggctggatatgtccggagtctttatggagatggttaaagcttccgccacagtggacattgtgcagaaaaagctggtgtatttgtacatgtgtacctatgcacctctcaaaccagacctggctctgctggctataaacacgctgtgcaaagactgcagtgatcccaaccccatggtgcgcggactcgctttacgttcgatgtgctcgcttcgtatgccgggagtgcaggagtacatccagcagccaatcttaaacgggcttagagataaggcctcctatgtgcgccgagttgccgtgctaggatgcgctaagatgcataatcttcatggagactccgaagtagacggagccttagtgaacgagctatatagcctgttaagagatcaggaccctatcgtcgtggtgaattgtttgcggagcctggaggaaatcctcaaacaggaggggggtgtggttatcaataagcctattgcacatcatctgctcaaccgtatgagcaagctggaccagtggggacaggcagaggtgctgaacttccttctgagatatcaaccccgatccgaggaggaattatttgacattctgaatctcctcgacagttttctaaagtcctcctcaccaggggttgtcatgggggctactaagttgttcctcatcttggcaaagatgttccctcatgtccaaacggacgtcctagtgcgagtcaaaggcccattgctggcagcttgttcctcagagtccagagagttgtgtttcgtggccttatgtcatgtgaggcagattttacacagccttcctggccatttctctagccactataagaagtttttttgcagttacagtgagccccactatatcaagctgcagaaggtcgaagtgttgtgcgagctggtcaacgatgagaacgttcagcaggtgctggaagaactgcgtggttattgcaccgatgttagtgcagactttgcccaagcagccatcttcgctatcggtggaattgccaggacttataccgatcagtgcgttcaaatattaacggagctattaggacttcggcaggagcacattacaaccgtggtggtgcagaccttccgagatctggtatggctgtgccctcagtgcaccgaggcagtgtgtcaagcattgcccggatgcgaggagaacatccaagacagcgaaggaaaacaagcactgatctggctattgggtgtgcatggtgaacgcataccaaacgctccatacgtgctcgaagacttcgtagaaaacgtgaagagcgagacgtttcctgccgtgaaaatggagttgcttacagccctgttgcgcttattcctgagccggcctgccgagtgtcaggatatgctgggaaggctcctctactattgcatcgaggaggaaaaagacatggccgtgcgagaccgcggtctcttctactacaggctgctactcgtcggtattgatgaggtcaaacgcatcctgtgtagtcccaaatcagatcccacactaggtctgctggaggatcctgctgaacgcccagtgaacagctgggccagcgacttcaatactctggttcctgtgtacgggaaggctcactgggcaaccatttccaagtgtcagggcgcagagagatgcgaccctgaactgcctaagacctcctctttcgctgcatctggccctctgattcccgaagagaacaaggagcgggtgcaggagctgcctgacagtggcgctttgatgcttgttccaaataggcaactcaccgcggactacttcgagaagacatggctctctctcaaggtcgcccatcagcaagtgctgccctggaggggtgaattccacccagacaccttgcagatggctttacaggtcgtaaacatacagaccatcgccatgagtcgcgctggtagtagaccgtggaaggcctatctgagcgctcaggacgatacgggatgtctctttttgacggaattattgctggagccaggaaattcggagatgcagatttctgtgaagcagaatgaggccagaacagaaacactgaactcctttattagtgtgctagaaaccgtcattggcacaatcgaagagattaaaagctag

SEQ ID NO: 213543 - DNA, 891 bp, synthetic construct
  misc_feature 1..891: note = Description of Artificial Sequence: Synthetic coding sequence
  source 1..891: mol_type = other DNA
atgccctatctggggagcgaggacgtagtgaaagaacttaaaaaggctctgtgcaacccccacatacaagccgaccgtttacgatacagaaacgttatccaaagagtgatacgtatgcccggagtgcaggaatacatacagcagccaattctgaacggtttgagagataaggcctcttacgtgcgccgtgtagcagtgctcgggtgtgcgaaaatgcacaatctccacggtgactctgaggtcgatggagctttagtaaacgagctgtacagcctgctccgcgaccaagaccccatcgtcgtggtgaattgccttaggtctttagaggagattcttaaacaggaggggggtgtggtgatcaataagccaatcgcccaccacctgctgaaccggatgtctaaattagaccagtgggggcaggcagaggtactgaactttttattacgctaccagcccaggagtgaggaggaactctttgatattttgaatctcctggactccttccttaagtctagcagcccaggggtggtgatgggtgctacaaagttgtttttgatcttggctaagatgttcccccacgttcagaccgacgtgttggtcagagtgaaggggccactgcttgcagcctgcagtagcgagagcagggagctgtgttttgtggctctctgtcacgtccgacaaatcttgcatagcctccccggtcacttctcaagtcactacaaaaaatttttctgtagctacagtgaaccacactatatcaagcttcagaaagttgaggtgctgtgcgagctcgtgaatgacgaaaacgttcaacaggtcctggaggagctgcggggatactgtaccgacgtgagtgcagactttgctcaggccgcaattttcgcaatatag

SEQ ID NO: 213544 - DNA, 909 bp, synthetic construct
  misc_feature 1..909: note = Description of Artificial Sequence: Synthetic coding sequence
  source 1..909: mol_type = other DNA
atgccatacttgggcagcgaggatgtcgtcaaagagctaaaaaaagctctgtgcaatccgcacatacaagccgacagattacgataccgaaacgtcattcaacgcgtcatccgttacatgacacaagggctggacatgagcggcgtgttcatggagatggtaaaggcatctgccacagtggacattgtgcagaagaagcttgtgtatctgtatatgtgtacctacgcacccctaaagcccgatttggcgctgctggcgattaacaccttgtgcaaggattgttctgatcccaaccccatggtacgtgggctggccttgcgctctatgtgcagtctgcggatgagtaaactcgaccagtgggggcaggccgaagtgcttaattttctcctgagataccagccaagatctgaggaggagctcttcgacatactgaacctactcgactctttccttaaaagtagttctccaggggtcgtcatgggagccacaaaactcttcctgattcttgcaaaaatgtttcctcacgtgcagaccgacgttctggttagggtcaaaggccctttgctcgccgcatgctcatctgagagtcgagaattatgttttgtggccttatgccacgtccggcagatccttcatagcctccccggacattttagtagccattataagaagttcttctgcagctatagcgaacctcactacataaagctgcagaaagtcgaggtgctttgcgaactagtgaacgatgaaaatgtacaacaggttttggaggagctgcgtggctactgtaccgacgtgtcagcagatttcgcacaggctgccatctttgcaattggcaggtgcttgctgctgttccttctcgaaaacctggatcagcccgcacggaaattatggctcgaagagccctag

SEQ ID NO: 213545 - DNA, 1716 bp, synthetic construct
  misc_feature 1..1716: note = Description of Artificial Sequence: Synthetic coding sequence
  source 1..1716: mol_type = other DNA
atgccctatcttggctcagaagatgtggttaaggagctgaaaaaggctctttgtaatcctcatatccaggccgataggctgcgctatcgtaacgttatacagcgagtgataaggatgagcaagttggaccagtgggggcaggccgaggtcctcaacttcttactgcgataccagccgaggagtgaggaggagctcttcgacatcctgaacctgctcgattcctttctgaaaagctcttcccctggcgtggttatgggcgctaccaagctattcctcattctggctaaaatgttcccccatgtgcagacagacgtactagtaagggtcaagggcccacttcttgccgcatgctcttccgagtctcgcgagctgtgctttgtggctttatgtcatgtgaggcaaatccttcattctctgcccggtcatttcagtagccattacaaaaagtttttttgctcctattcagagcctcactacattaagctgcaaaaagtggaagtcctctgcgagctggtaaatgacgagaacgtccagcaggtcttagaggaactgagagggtactgcacagatgtaagtgcggactttgcgcaggcagccatctttgccatcggcggaatcgccagaacttataccgaccagtgcgtccagattctgacggaactcctcggcctgcggcaagagcacattacgaccgtggtcgttcagactttccgggatttagtttggttatgccctcaatgtacggaggccgtttgtcaggccctcccaggttgcgaggagaacatccaggacagcgaggggaaacaagcactgatctggctgctcggcgtgcatggcgagcgcatccccaacgcaccatatgtcctggaggactttgtggaaaacgtgaagtcagaaactttcccagccgtcaagatggagttactgaccgccctgctcaggttattcctcagccgcccagccgagtgccaggatatgctcggacgcctgctttattactgtatagaagaggagaaggatatggctgtccgcgatcggggactgttctactatagactacttttggttggtatcgatgaagtgaaaaggatcctctgctccccaaagagtgaccccacattgggactcctggaggaccccgcagagaggccggtcaactcatgggcatccgattttaatacattggtgccagtctatggaaaggcccattgggctactatcagcaagtgccagggcgcagaacggtgtgatcccgagcttccaaaaacttctagttttgccgcatctggcccactcatacccgaagaaaacaaggaacgcgtgcaagaacttcccgattctggggctctgatgctcgttcctaaccgacagctcacggccgattacttcgagaaaacctggctgtctttaaaggtggcacaccagcaggtgttgccttggaggggagagtttcatcctgacacactccaaatggcactccaagttgtcaacatacaaactatcgctatgtcgagagctggtagtcgcccatggaaagcatacctctctgcccaagatgacacaggttgccttttcctcactgaattgctcctcgagcccggtaattcagagatgcagatctcagtgaagcagaatgaggcaaggacagagacgctaaatagtttcatcagcgtgctcgagacagtcatagggactattgaggagattaaaagctag

SEQ ID NO: 213546 - DNA, 2220 bp, synthetic construct
  misc_feature 1..2220: note = Description of Artificial Sequence: Synthetic coding sequence
  source 1..2220: mol_type = other DNA
atgccctatctgggctctgaggacgtcgtgaaagaactgaaaaaggcgctgtgtaatcctcacatccaggccgatagactgcgatacagaaacgtcatccagcgcgttatccgctatatgacgcagggacttgatatgtctggcgtttttatggagatggtgaaagccagcgcgactgtagatatagtccaaaagaagctggtatatctatacatgtgtacttacgcacccttgaagccagacctggcgctgttggccatcaacaccctgtgcaaggactgcagcgatccgaatcccatggtcagaggccttgcgctcagaagcatgtgttcgctccgaatgcctggcgtccaggagtacattcagcagccaatcttaaacggactgagggacaaagcctcttatgtgcgcagggtggccgtgctcggttgcgctaaaatgcataacctgcacggagattctgaggtagatggagctctggtgaatgagctttattctttgctcagggaccaggatcccatcgtggtcgtgaactgtctccggtctttagaggaaatacttaagcaagagggcggagttgtgattaataagccaatagcccaccatctgttgaatcggatgagcaagctggatcagtgggggcaggctgaagtgcttaattttctgctgcggtaccagccacggagtgaagaagaactttttgacatcctgaatctgctggactcttttctgaagtcctcctctccaggggtggtcatgggagcgacaaagctgtttcttattctggcaaagatgttcccccacgtacagaccgatgtgctggtcagagtgaaaggcccactcttggctgcctgttcgtctgagagccgggaactatgctttgtggcactttgtcacgtccggcaaatcctgcatagcctgccgggtcactttagctcccactataagaaattcttctgctcctactcggagcctcactatattaaacttcaaaaggtggaggtgctgtgtgaactcgtcaacgatgagaatgtccagcaggtcttagaagagttaagaggatactgcacagacgtgtcagcagattttgcccaggccgcaattttcgctattggcggaatcgcacggacttacactgatcagtgcgtacaaattctgacggaacttctgggccttagacaagaacacatcacaacagtggtggttcaaacttttcgggacctggtttggttgtgtccacagtgcactgaggcagtgtgtcaggctctgcctggatgcgaggaaaacatacaggacagtgaggggaagcaagctctgatctggctcctaggcgtgcatggggagagaatccccaatgccccttatgtgctggaagatttcgtggaaaatgtgaaaagtgagacctttcctgccgtgaaaatggaactgctcactgctttgctgcgcttgttcctcagtaggcctgcagagtgtcaagatatgctcggtagactgttatattactgcattgaggaggagaaggatatggcagtgcgggaccgtgggctcttctactacaggctcctgctagtgggaattgacgaagtcaagcgaatactttgcagcccaaaaagcgacccaacattagggctattagaggatcctgcagagcgaccagttaacagttgggccagtgacttcaatacactcgtgccagtctatggaaaagcgcattgggccacaatatcaaagtgccagggcgctgagaggtgcgatcccgaacttccaaaaacatcttcctttgccgcatctggccctctgatcccggaggaaaacaaggagagagtgcaggagctgcccgactccggggcactgatgctggtgccgaaccgccagcttacagccgattactttgaaaagacttggctctctctgaaggtggcacaccagcaagtactgccatggcgcggtgagttccacccagatactctgcaaatggccttgcaagtggtcaacatccaaactatcgctatgtccagggccggatcacgtccatggaaggcctacctcagtgcccaggacgacactgggtgtctgttcctcactgagctcctgctcgagcctgggaactctgagatgcagatctctgtcaagcaaaacgaggcaaggaccgaaacactgaattctttcattagcgttctggagaccgttatcggaacaatcgaggaaatcaaatcatag

SEQ ID NO: 213547 - DNA, 789 bp, synthetic construct
  misc_feature 1..789: note = Description of Artificial Sequence: Synthetic coding sequence
  source 1..789: mol_type = other DNA
atgccttatctgggctcagaggatgtggtcaaagaactcaaaaaggctctgtgtaatccccatatccaggccgaccgccttcgctaccgcaacgtgatacagcgcgtgatcagatacatgacgcagggcctcgacatgagtggagtatttatggaaatggtaaaggcaagcgcgaccgttgatatcgtccagaaaaagctggtctatctgtacatgtgtacgtatgcccctctgaaaccggacctggctctcctcgccatcaacactctgtgcaaagattgtagtgatcccaacccaatggtcaggggcctcgcactgcggagtatgtgttcacttcggatgcctggggtacaggagtacatacagcagcccattctgaatggtttgagggacaaagcatcctatgtgcgcagggtcgctgtactcggctgcgcaaagatgcacaacctgcatggtgacagtgaggtcgatggcgctctggttaatgaactttatagcttactcagagaccaggacccaatcgtggttgtgaattgtctacgcagtcttgaagaaatactcaagcaggagggtggtgtggtgattaacaagcctatagcacaccatcttttgaacaggatgtccaagctcgaccagtgggggcaagccgaggtgttaaacttcttgctgcgataccagcctaggtccgaagaggaactttttgacattctgaatttgctcgactcctttttgaagagcagctctcctggggtggtaatgggcgctacaaagctatttttgatactttag

SEQ ID NO: 213548 - DNA, 528 bp, synthetic construct
  misc_feature 1..528: note = Description of Artificial Sequence: Synthetic coding sequence
  source 1..528: mol_type = other DNA
atgccttacctgggaagcgaagacgtcgtcaaagaactgaaaaaggctttgtgcaacccccatattcaggcggacagactccgctacagaaacgtgatccaacgggtcattcgtatgtcaaaactggatcagtggggccaggccgaggtgctcaattttctcctaagataccagcccaggagtgaagaggagctgttcgatatcttgaacctgctagactcctttctcaagtctagctcacctggtgttgtgatgggcgctactaaactctttctgattcttgcaaaaatgtttccacatgtccagaccgatgttctggtgcgcgtaaaagggccacttctcgcagcctgtagttcagaatccagggagctatgcttcgtggctctctgccacgtgaggcaaatactgcattcactcccgggtcacttcagttctcactacaagaaatttttttgcagttatagtgagcctcattacattaagcttcagaaggtggaagtcctgtgcgaactggtgaacgatgaatag

SEQ ID NO: 213549 - DNA, 3414 bp, synthetic construct
  misc_feature 1..3414: note = Description of Artificial Sequence: Synthetic coding sequence
  source 1..3414: mol_type = other DNA
atgagtgatatagttgaaaagaccctcacggccctgccgggattattcctccagaatcagccgggaggagggccagccgctgctaaagcttcatttagctcccggctaggttcgctggttcgtggaatcacagccctgacatcaaaacatgaagaggagaagcttatacaacaggagttgtcttcactgaaggcaactgtcagtgcgcctaccacaacattgaaaatgatgaaagagtgtatggtccgcctcatatactgtgagatgctgggatatgatgcctcctttgggtacatccacgctatcaagttagcccagcagggaaacttattggaaaagagagtagggtacctggcagtttctctgttcctccacgaaagtcacgagcttctcctgctcttggtcaataccgtagtgaaagatctccagtctaccaacttggtagaggtgtgtatggcactcacggtggtctctcaaatatttccctgcgaaatgattccagcagtgctgccactgatagaagataagttgcagcactccaaagagatcgtgcgtagaaaggcagttcttgcactgtacaagttccacctgatcgctcctaaccaagtccagcatatccacattaaatttcgaaaagcactttgtgacagagacgtcggagtcatggcggcttccttgcacatatatttgagaatgattaaggagaattcaagtgggtacaaggacctaacaggttccttcgtgacgattctcaagcaggttgtcgggggaaagctacccgtggaatttaactatcatagtgtgcccgcaccatggctgcagattcagctgctacgcatcttgggcctgctgggcaaggatgatcagaggacatccgagctgatgtatgatgtgctggacgagtcccttcggagagctgagctgaatcacaacgtgacatatgccattctgtttgaatgcgtgcacaccgtctactcaatttatccaaaaagtgaactgcttgaaaaagctgcgaagtgtattggaaagtttgtcctttcacctaagattaatttaaagtacttggggctcaaagccctcacctatgtcattcagcaggacccgaccctcgctctgcagcaccagatgaccattatagagtgtctcgaccatccagacccaatcataaagagagaaaccctggaacttctttaccgcatcactaacgcacaaaatatcaccgtgatcgtccagaaaatgctggagtatctccatcaaagtaaagaggagtacgttatagtgaatctggtaggcaagatcgctgagctcgcagaaaagtacgcccctgacaatgcttggtttatccagaccatgaatgcggtgttttctgtggggggagacgtgatgcacccagacattcccaataactttctgcgattactcgccgaggggttcgacgatgaaactgaggatcagcagcttcgtttgtacgctgtgcagagctaccttacgttactggacatggagaacgttttttatcctcagagatttctgcaggttatgagctgggtgttgggggaatatagctacttgctggacaaggaaactcctgaagaagtgatcgcaaaactgtacaagctattaatgaatgattcggtgtctagtgaaacgaaagcgtggttgatagccgctgtcactaaactgacctcccaggcacattcttcaaatacagtggagagattaattcatgagttcaccatttcgctggatacttgcatgaggcagcacgccttcgagcttaaacatttgcacgaaaatgtggagctgatgaagagtcttctccccgtggatcggagctgtgaggaccttgttgttgatgcttcactctcatttttggacggcttcgtcgccgaaggactcagccagggcgcagccccatataagccgcctcaccagaggcaggaggaaaagctgagccaggagaaggttttgaactttgagccgtatggtctgtcattctccagctccggctttaccggccgacagtccccagccggaattagcctcggcagcgacgtctctggtaacagcgcggagactggcctcaaggagactaactccttgaagttagaaggcattaagaagctgtgggggaaagagggctatcttcccaagaaagaatccaaaaccggagatgagtccggagccctgcctgtgccacaggagagcatcatggagaacgtcgaccaagcaataaccaaaaaggaccagagtcaggtgctgacccaatcaaaggaagagaaggaaaagcagcttctggcctctagcctgttcgtggggctgggttctgagtctacgattaacttgttagggaaagcagacaccgtgtctcataaattccgcaggaaatctaaggtgaaagaggccaagtctggagagactacgtctactcacaatatgacttgttcaagcttctcatcactaagcaatgtggcctatgaggacgattactacagtaacactctgcacgatactggagataaggaactgaaaaaattcagcctgacaagtgagctactcgattcggaatctctcaccgagctccccctagtagaaaaatttagctattgtagcctgagcactccatctctcttcgcaaataataacatggaaatcttccatccccctcagagcaccgcagcaagtgtggcaaaggaatcttcactggcctcaagcttcctcgaagagaccacagagtatattcatagcaatgcaatggaagtgtgcaacaacgaaacaatcagcgtatctagctataagatttggaaagacgattgcctgttaatggtatggtcagtaaccaacaaatccggattagaattgaagtcggcagatctggaaattttcccagccgagaactttaaggtgacggagcagcctggctgctgtctcccagttatggaggccgaatccacgaagtccttccaatatagcgtgcaaatcgagaagccttttaccgagggcaatttgacgggttttatatcataccatatgatggacactcatagtgcacaactggagttttcggtgaacctgtccctgctggatttcatccggccactcaagatcagcagcgatgacttcggcaagctttggctctcgttcgccaatgatgtgaaacagaacgtgaagatgagcgagtctcaagcggctctgcccagcgcactgaaaacgctgcagcagaagctgcggctgcacataattgaaattattgggaacgagggcctgttggcttgtcagcttctgccatcaatcccctgtctattgcactgcagggtgcatgcagacgtgctggctttgtggttccgctcctcttgttcaacccttcccgactatctattataccaatgtcagaaagttatggagggcagctag

SEQ ID NO: 213550 - DNA, 1362 bp, synthetic construct
  misc_feature 1..1362: note = Description of Artificial Sequence: Synthetic coding sequence
  source 1..1362: mol_type = other DNA
atgatttcacagttcttcatcctttcatccaagggagatcccctgatctacaaggacttccgaggcgacagtgggggaagagacgtagctgagctgttctaccgaaagctgaccggtttgcccggtgacgaatcaccggttgtgatgcatcaccatggcaggcactttatacatatacgccacagcggactgtacctggtcgtcacaactagcgagaatgtgtcgcccttctcacttctggaattactcagtcggctggctactctgttgggagactactgcgggagcttaggcgaaggtaccatctcaaggaatgtggccctggtatatgagcttctcgatgaagtcctggactacggatacgttcaaactacttccaccgagatgcttagaaactttattcaaaccgaagccgtggtctccaagcctttcagtctatttgacctgagcagcgtgggtttatttggagctgagactcagcaatctaaagtggcgccatcttcggccgcatcacggcctgtgctgtctagccggagcgaccagagccagaaaaacgaggtcttcctcgacgtggtcgagcgattgtccgtcctgattgcgtccaacggctcgctcctgaaagtggacgtgcaaggggaaattcggctgaagagtttcctgccatccgggagcgagatgcggatcggcctgaccgaggagttttgcgttggaaagtccgagctcagaggatatggacctggaatacgagttgatgaagtgagtttccatagttccgtgaatctagacgaattcgagtcccacagaatcctccggcttcagcctccccagggggagctgacagtgatgcgatatcagctctcagacgatcttccgtcccccttaccttttagactttttccttctgtgcagtgggaccggggttctgggaggctccaggtatacctcaaactgagatgcgaccttctttctaaatcacaggcgctcaacgtcaggttacacctcccccttccaaggggcgtcgtatccctttcacaggagttgtcctcccccgagcaaaaggccgaactagctgaaggggcactgcgatgggacctcccacgcgtgcaagggggaagccagctgagcgggctgtttcagatggatgtccccggaccacccggacccccttctcatgggctgagcacaagcgcttctccactgggtctgggaccagcatcactgtcgttcgagctgccacgccacacatgctccggtctacaggtgcgattcctgcggctggcattccgcccttgtggcaacgccaatccacacaaatgggttcgccacctgtctcattccgacgcatacgtcatacgcatctag

SEQ ID NO: 213551 - DNA, 1362 bp, synthetic construct
  misc_feature 1..1362: note = Description of Artificial Sequence: Synthetic coding sequence
  source 1..1362: mol_type = other DNA
atgatcagccagtttttcattctgagttctaagggagatcccttaatttacaaggactttcgcggagactctgggggaagagatgtggccgagttgttctaccgcaaattgacagggttgccgggtgacgaaagcccagttgttatgcatcatcatgggaggcatttcattcacatcagacactctggactttacctggtggtcaccacaagcgagaacgtgtcaccattttcattgctggagctgttaagtagactcgcgacgctgcttggggactattgtggttctttgggggaaggaacgataagtcgaaatgtcgcacttgtctatgagctgctagatgaggtcctagattatgggtacgttcagacaactagcacggagatgcttagaaactttattcagaccgaggcggttgtctccaaacccttttctctgtttgatctctcaagtgtcggcttatttggagctgaaacccagcaatctaaggttgccccatcaagcgccgcaagcagacctgtgttatccagtaggtccgatcagagccaaaagaacgaagtcttcctggacgtcgtggaacggctttcagtgctgatcgcatctaatggcagcctgctcaaggtggatgtgcagggtgaaattagactgaaatcattcttgcccagcggctcagaaatgagaatcggtctcactgaagaattttgcgtgggcaagagcgaattaaggggttatggccctgggatccgggtggatgaggtgtctttccatagttccgtgaacctcgacgagttcgaatctcatcgaatcttgaggctccagccccctcagggggagctgaccgtcatgcgctatcaactgtccgatgacctgccatctcccctgcccttcagattgtttcccagtgtgcaatgggacaggggatcaggaaggctgcaggtgtacctgaaattgagatgtgacctgctgagtaagagtcaggccctgaacgtgcgtctgcacctacctctgcctcgaggcgtggtgagcctgtcccaggagctgtcctcacctgagcagaaggccgagttagctgagggggctttgagatgggatttacctcgtgtgcaaggcggtagtcagctcagcggtctgtttcaaatggatgtcccaggacctcctggcccaccatcgcacggtctgtctaccagtgcttctcccctgggactgggtcccgcatctttgagcttcgagctccccagacacacatgttccggtttgcaggtaaggttccttaggctcgcctttcggccttgcggtaatgccaatcctcataagtgggtgaggcacttgagccattccgacgcctatgtcatccgcatctag

SEQ ID NO: 213552 - DNA, 1653 bp, synthetic construct
  misc_feature 1..1653: note = Description of Artificial Sequence: Synthetic coding sequence
  source 1..1653: mol_type = other DNA
atgtccgccgcttggatccctgcacttggcctgggagtttgtctgctactgttgcctgggccagccggtagcgagggtgcggcacctattgcgattacctgttttaccaggggcttggatattaggaaggaaaaggctgacgtgctgtgtcccggtggttgtccacttgaggaattttcggtgtacggaaatattgtgtatgcctctgtgtcatccatatgtggtgccgctgtgcatcgaggggtgataagcaacagtgggggacccgtccgggtgtatagcctgcctggccgtgagaactacagctctgtagacgcgaatggaatccaaagtcagatgctcagtcgttggagcgcaagcttcacagtcaccaaaggcaagtctagtactcaagaagctaccggccaagccgtctcaaccgcccatcctccgaccggaaagcgactgaagaagacccctgagaaaaagaccgggaataaggattgtaaagcggacatcgcttttctcatagatggctctttcaacatcggccagcgacgttttaacctgcaaaagaatttcgtcggaaaggtggccttaatgctggggatcggcaccgaaggccctcatgtgggcctggtccaggccagcgagcaccctaagatagaattctatctcaaaaactttacgtcagcgaaggatgttctctttgccataaaagaggtgggtttccgtgggggaaactccaacacaggcaaagctctgaagcacactgcccagaagttctttactgtggatgccggagtgcgtaagggaatccccaaggttgttgtcgtgtttattgatgggtggcccagtgatgacatcgaggaagctgggatagtggcccgagaattcggggtgaatgtattcattgtgtccgtcgccaaaccgataccagaggaactgggaatggttcaggatgttacattcgtggacaaagccgtgtgcagaaataatggcttcttctcttatcacatgccaaattggttcggaacaacaaagtacgtgaagcccctggtgcagaaactgtgtacccatgaacagatgatgtgttcaaagacgtgctataacagcgtgaacatcgctttcttaattgatggctctagcagtgtgggcgactccaactttagactgatgctcgaatttgtatcaaacattgcaaaaaccttcgagatttctgacatcggcgctaagatcgccgcagtgcagtttacttatgaccagagaaccgagtttagttttaccgattattcaaccaaagaaaatgtcctcgccgtgatcaggaacatcaggtacatgagtggcggaaccgcaacgggggacgccatttcatttaccgttcggaatgtttttgggccaatccgggaaagcccaaacaagaatttcctagtgattgtgacagacggacaatcgtacgacgatgttcaaggacccgctgcagcagctcatgacgccggtatcacaatcttctcagtaggcgtagcttgggcgcctcttgatgacttaaaagatatggctagcaagccaaaagaaagtcacgcctttttcacgagagagtttaccggcctggagcctattgtttcggatgtgattcgcggtatatgtcgtgattttttggaatcccagcagtag

SEQ ID NO: 213553 - DNA, 435 bp, synthetic construct
  misc_feature 1..435: note = Description of Artificial Sequence: Synthetic coding sequence
  source 1..435: mol_type = other DNA
atgattaagttcttcctaatggtcaataagcagggacagaccaggttgtctaaatactacgaacacgttgatatcaacaagagaaccttgctggaaaccgaagtcattaagtcttgtctttcacgctcaaacgagcagtgcagctttatcgagtacaaagattttaaactgatataccgacagtatgctgccctgttcatcgtggtcggcgtgaatgacacagagaacgagatggccatttacgaattcatacacaactttgtggaggttcttgatgagtacttttcccgggttgtaaagggccacatcatgtttaacttggacaaagtgcatatcatcctggatgagatggttctgaacggatgcattgtggagactaatagggcccgtatactggctcctctgctcatattagacaagatgagtgagagctag

SEQ ID NO: 213554 - DNA, 435 bp, synthetic construct
  misc_feature 1..435: note = Description of Artificial Sequence: Synthetic coding sequence
  source 1..435: mol_type = other DNA
atgataaaatttttcctgatggttaataaacagggtcagaccaggcttagtaaatattacgaacacgtggacattaataagcggaccctgctggaaactgaggtgattaagtcgtgcctatctcgaagtaacgagcaatgctccttcatcgagtataaagatttcaagctcatttaccggcagtatgccgctctttttattgtcgttggcgtgaatgacacagaaaacgagatggccatctacgaattcattcataatttcgtggaagttcttgacgagtattttagccgggtgagtgagctggacattatgttcaacttggataaagtgcatatcattttggacgaaatggtgctcaatgggtgtatcgtcgagaccaaccgagcaaggatcttggctcccctgcttatcttagacaagatgagcgagtcttag

SEQ ID NO: 213555 - DNA, 27 bp, synthetic construct
  misc_feature 1..27: note = Description of Artificial Sequence: Synthetic coding sequence
  source 1..27: mol_type = other DNA
atgattaagttttttttaatggtgtag

SEQ ID NO: 213556 - DNA, 297 bp, synthetic construct
  misc_feature 1..297: note = Description of Artificial Sequence: Synthetic coding sequence
  source 1..297: mol_type = other DNA
atgatcaagttcttcctgatggtcaacaagcagggacaaacgcggttaagcaaatattacgagcacgttgatataaacaaaagaacattgctggagaccgaagtcatcaagtcttgtctgtcccggagcaacgaacagtgctcgttcattgagtataaagacttcaaattaatttatcgccagtacgccgctctgtttattgtcgttggagtgaatgatactgaaaatgagatggccatctatgagttcattcacaattttgtggaggtattagatgagtatttcagccgggtgtag

SEQ ID NO: 213557 - DNA, 402 bp, synthetic construct
  misc_feature 1..402: note = Description of Artificial Sequence: Synthetic coding sequence
  source 1..402: mol_type = other DNA
atgatcaaatttttcctgatggtcaacaaacagggacaaaccaggctgagcaagtattacgagcatgtggacattaacaagcgaactctgctggagactgaggtgatcaaatcctgcctgagtcgatctaacgagcagtgctcattcatcgagtataaagatttcaagctcatttatcggcagtatgccgcactgttcattgttgtgggggtgaacgataccgaaaatgaaatggccatctacgagtttatccacaacttcgtagaggtgctcgatgaatacttctctcgagtcagcgaactcgacattatgttcaatctggataaagtgcacattattttagatgagatggtgttgaacgggtgtattgtcgaaaccaaccgcgcacgcattcttgcatag

SEQ ID NO: 213558 - DNA, 4611 bp, synthetic construct
  misc_feature 1..4611: note = Description of Artificial Sequence: Synthetic coding sequence
  source 1..4611: mol_type = other DNA
atgggtgtggtgaacttcgtgtttcgagcctccgaggacttgcaggtactcgagaactacagtgatgcgccaatgaccccaaagcagattctccaggtcatcgaagccgaaggtctcaaagagatgtccggaacctctcccctcgcctgcctgaacgctatgctccacagcaactcgaggggcggagaaggcctgttctacaagctgccgggacgtatttccctgtttacgctaaagaaagatgcactacaatggtcccggcaccctgcaactgtggagggcgaggagcctgaggataccgctgatgtcgagagctgtggatccaacgaagctagtaccgtaagtggcgagaacgacgtgtccctagatgagacttcctccaacgccagttgcagtacagagagtcaatctagacctttgtctaacccccgtgatagttaccgcgcaagcagtcaggctaacaagcagaagaagaagaccggtgtgatgttgcctcgtgtggtgcttactcccctgaaggtgaacggcgcacatgtggaatcagcctcggggttttcgggctgccatgccgatggagagtcaggatcacctagcagctcaagctccgggagtcttgcactggggagcgcagccatcagagggcaggcagaagtaacgcaggatccggctcctctgctgcgtggatttcgcaaacccgcaacaggccagatgaagcggaatcgtggcgaagagattgatttcgaaacacctggctccatcctggtgaacaccaatttgcgtgctctcattaattctaggacctttcacgctttgccctcgcactttcagcagcagctgctgtttctgctgcccgaggtagaccggcaggtggggacggacgggttgctgaggcttagctcaagtgctttgaataacgagttctttacacacgctgcacaatcctggagggaacgcctcgccgacggtgaatttacacatgagatgcaagttagaattaggcaagaaatggagaaggagaagaaggtagaacagtggaaagaaaagttctttgaggactactatggccagaaactgggactgacaaaggaggaatccctgcagcagaacgttggacaggaagaggcggaaattaaaagcgggttgtgtgtgcccggagagtccgtgcgcattcagcgtggccctgcaacacgccaacgcgacggacatttcaaaaagagatctagaccggatcttagaacccgggctagaaggaatctctataagaaacaggagtctgaacaagcgggagttgctaaggatgccaagtccgtggcatctgacgtcccgctatataaagacggcgaggccaaaactgatcctgcaggcctcagctcccctcacctaccgggtacatcctcggccgctccagacttggagggcccagaatttccagtagagtccgtcgcctctcgaattcaggctgagcctgacaacctcgccagagcttctgccagtcccgatcgaattccctcattaccccaggaaacagtcgatcaggagcccaaggaccagaagagaaaaagttttgaacaagcggcatcagcgtcttttcccgagaaaaagccacgtctggaagaccggcaatccttccgcaataccattgagtcagtacacaccgagaagccgcagcctaccaaagaggagccaaaggtgccacccatccgtattcagcttagccgcataaaacctccctgggtagtaaaaggacagccaacctaccaaatatgcccgcgaatcattccaactacagagtcctcctgtcgtggatggacgggagccaggactttagcggacatcaaggcaagggccctacaggtgagaggcgcacgcggacaccattgtcacagagaggccgcaacaacggctattggcggtggtggagggccaggcggaggtgggggaggggcaacagacgagggaggcggaagaggttcgagcagcggggacgggggagaggcttgcgggcacccggaacccagaggcggtccaagcacccctgggaaatgcactagcgaccttcagcgcacacagctcttgcccccttaccctcttaacggggagcatacccaggccggaaccgctatgagccgagctaggcgcgaagatctaccatcactgcggaaagaggagtcgtgtctgttacagcgagccaccgtcggtctcactgatggcctgggagacgcctcccaactgccagtcgcgcctactggggaccagccctgccaggccttgccactgctatcctctcaaactagtgtggcagagcggctcgtggagcagccacagctacacccagacgtgcggacagagtgcgaaagtgggacaacatcttgggaatcggatgacgaagagcagggcccaacagtgcctgccgacaatgggccaatcctgagcctggttggagatgacacacttgaaaaagggacgggtcaagctctcgatagtcatcccactatgaaggatcctgtcaacgtgactccatcctcgacccccgagtcatccccaacagattgtctccagaacagggcctttgacgacgagttggggctcggcggaagctgcccacccatgcgcgagtcagacacgcggcaggagaatctgaagacaaaggccctggtgtccaactccagcctgcattggatcccaatccctagcaatgacgaggtggtgaagcagcctaagcccgagtctcgagaacacatcccctcagtcgaaccacaggtgggggaggagtgggagaaagcggctccaactccccctgccttgcccggagatctgactgccgaagagggccttgacccgttggatagcttgacctccctgtggacagtgcctagccgcggtggctccgactccaacggctcatattgccagcaggttgatatcgaaaaactcaaaatcaatggtgattctgaggccctctctcctcatggcgagtcgaccgacaccgcctcagactttgaagggcacctgaccgaggactcctcagaggcagatactcgcgaggctgccgtaacaaagggatctagcgtcgataaggatgagaagcctaactggaaccaatccgcaccattgagtaaggttaacggcgatatgagactcgttacacgcacagatggtatggtcgccccacaatcttgggtgtccagggtttgtgccgtgaggcagaaaattcctgattccttgttactggcctcgactgagtatcagcccagagctgtgtgcctctcaatgccaggatcatccgtggaagctacaaacccattagtgatgcagttgctgcagggaagccttcccctcgagaaggtcctaccaccggcacacgatgacagcatgagtgaatctccgcaggtccccttaacgaaagatcaaagtcacggttccctgcggatgggctcgctccacggactggggaagaattctggcatggtagatggatccagcccatcttcactgcgcgctctgaaggagcccctactacccgattcttgtgaaacgggcactgggctggctcggatagaggctacacaggccccaggagctcctcagaaaaattgcaaggcagtacccagcttcgattctttacaccctgttaccaatcccatcacctcttcgcggaagctggaagaaatggattcaaaggaacaattttctagtttctcttgtgaagaccagaaagaagtgagagccatgtctcaggactcaaactccaatgctgcccctggaaagagcccgggagacttgaccacatccaggactcctcgctttagttccccaaatgttatctcctttggacccgaacagacaggacgcgctctgggggatcagagcaatgtcaccggccaggggaaaaagctatttggctcgggtaacgtcgctgcaaccctccagaggccacgaccagcggacccaatgcctctgcctgccgagattcctccagtcttccccagcggcaaactggggcctagcaccaattctatgtcgggaggcgtgcaaacccccagggaagattgggcgcctaagcctcatgctttcgtgggcagtgtcaagaatgagaaaacattcgttggtggccctctcaaggctaatgcagagaaccgcaaggctacagggcattctccactggaactcgtgggtcatctggaaggtatgccattcgtaatggatttgcccttttggaagcttcccagagaaccaggcaaggggttgtcagagccccttgagccttcaagcctcccttcgcagttatctattaagcaggccttctacggcaagctgtcaaagctgcagctctccagtacatctttcaactacagctcctcttccccgacattccccaaggggttagccggatctgttgtgcaattatcccacaaggcaaactttggcgcttcccacagcgcctccctttctttacagatgtttacggattcctctactgttgaaagcatctctctgcagtgcgcatgctcattaaaagcaatgatcatgtgccaggggtgcggcgcattttgtcacgatgactgtatcggcccatctaagttgtgcgtcctgtgtctggtggtgagatag

SEQ ID NO: 213559 - DNA, 4626 bp, synthetic construct
  misc_feature 1..4626: note = Description of Artificial Sequence: Synthetic coding sequence
  source 1..4626: mol_type = other DNA
atgaaagacaagcagaagaagaagaaggaaaggacgtgggcagaggctgcccgactggtgctggagaactacagtgatgcacctatgacgcccaaacagatactccaggtgatagaagcagaggggttaaaggaaatgaggtccgggacgagccccctggcttgcctgaatgctatgctgcattctaacagccgaggcggagaagggctcttttataaacttccaggcaggataagtctctttactctgaaaaaagacgctctgcagtggtcaaggcaccctgctactgtggagggtgaggagcctgaagacactgctgatgtggagagctgcgggagcaatgaagcctctacagtctctggtgagaacgacgtgagcctcgatgagacgtcctcgaacgctagctgtagcactgagagccaaagtaggcctttgagcaaccctcgcgactcgtaccgagccagctcccaggcaaacaaacagaagaaaaagaccggagtcatgcttccccgtgtcgttctcacgccccttaaagtcaatggcgctcacgtggaatcagccagcggattctccggctgccacgcggacggtgaaagcgggtccccttcctcttcctcttcagggtccctggcactgggatcagctgccattaggggtcaagcagaggtcactcaggatcctgccccattgctgcggggtttcagaaaaccagcaacggggcagatgaagagaaataggggggaggaaatagactttgaaactcccggaagcatcctcgttaatactaatctgcgggcattaatcaattcccggaccttccacgccctacccagccacttccaacagcagttgctgtttctcctccccgaagtagaccgacaagtgggcactgatggcttgctccgcctgtcctctagcgcactaaacaacgagttcttcacacacgctgctcagtcttggagagaacgcctggctgacggggagttcactcacgaaatgcaggtacggattagacaagaaatggagaaggagaagaaggtcgagcagtggaaagagaagttcttcgaagactactacggacagaagttgggcttgactaaagaagagagcttgcagcagaatgtgggacaggaggaagcggagatcaagagtggtctgtgtgtgccaggggagtccgtacgtattcagaggggccctgctacccggcagagagatggccattttaagaaacggtcgcggccagacctgagaaccagagctaggaggaatctgtacaagaagcaagagagtgaacaggccggagtagctaaggacgcgaagagtgtggccagcgacgtcccgttgtacaaagacggcgaagccaaaacagaccctgctggtctcagtagccctcatttgccaggaaccagctctgcagctcccgatttagaaggcccagaatttcccgtagagtcggtggcaagccggatccaagccgaaccagacaatctggctcgggcttccgccagcccggatcggattcccagtctgccacaagagacagtggatcaggagcccaaagaccagaagcggaagagctttgaacaggcagcttctgctagctttcctgagaaaaaaccacgactcgaagatcggcaatcctttaggaatactatcgagagcgtccacacagaaaaacctcagccaactaaggaggagccaaaggtgccccctataaggatacagttatctcggataaagcccccatgggtcgtgaaaggtcagcccacctaccaaatttgcccccgaatcatccctacaaccgagtcatcttgcaggggatggaccggtgcacggacattggcagacattaaggcgagagctctccaagtcagaggtgctaggggtcaccattgtcatcgggaggccgctaccactgccataggcggagggggtggtcccggagggggtggcggaggagccactgacgaaggtgggggaagggggtctagtagcggcgatgggggagaagcatgtggccaccccgagccccgagggggaccgtctacccccggaaaatgcactagcgacctgcagcgcactcagctgctaccaccttatcccctaaatggggaacatacgcaggctggaaccgcgatgagccgggcacgcagagaagacctcccaagcctccgcaaggaggagtcctgcctactgcagcgcgctacggtaggcctgactgatggactgggtgatgctagccaactccctgtagcccctacgggtgatcagccttgtcaagccttgccactgctgtccagtcagacatcagtggccgagaggctcgttgagcagcctcagctccatcccgacgtgcggacagagtgtgaatctgggaccacttcctgggagtccgacgacgaggaacaagggcctaccgtgcctgctgataacggacccatcctctcattggtaggcgacgatacccttgagaagggtactggccaggcactcgattcacaccctacgatgaaggatcccgtgaacgtgaccccatcttccacccctgagagcagccctactgactgtctgcagaatcgtgcctttgatgacgaattagggctgggcggatcatgtccacccatgagagagtctgacacacggcaggaaaatcttaagaccaaggctctggtgagtaattctagtcttcactggatcccaatcccatcaaacgacgaagttgtaaagcagcccaaaccagagagcagagaacatatcccaagcgtggagccgcaggtgggggaagagtgggaaaaagctgcacctaccccacccgcattaccgggagatttgaccgctgaagaagggctcgaccctctcgacagcctcactagtctgtggactgtgcccagccgtggcggaagcgactctaacggttcgtattgccagcaagtggacatcgagaagctgaaaatcaatggggatagtgaggccctgtccccacacggagagtccacagacacggccagtgatttcgaaggccacctgaccgaggattcgtccgaggctgatacacgcgaagctgcggtgacgaagggatcttccgtggataaggacgaaaaacctaattggaaccagagcgcacccctctcgaaggtaaacggagacatgcggctcgtgactcgaactgatggtatggtagcccctcagagctgggtgtccagggtgtgcgctgtgcgccagaagatccctgactcattattactggcttctacagagtatcagccacgcgctgtttgtctttccatgcccggttctagcgtggaggcgacaaaccctttggtcatgcagctactacagggcagccttcccttggagaaagtcttaccgcctgcacacgacgatagcatgtccgaatcccctcaggttcccctgacaaaagaccagtcgcatggttcactgcgcatgggatcacttcatgggctgggaaaaaacagcgggatggtggacgggtcgtcccctagtagcctccgcgctctaaaagagcccttgttacctgatagttgcgagacaggcacgggtctcgctcgcatcgaagctacacaagccccaggtgcacctcagaaaaattgtaaagcagtcccctcatttgactcactgcaccccgtcacaaacccaattacttcttccagaaagctcgaggaaatggattcaaaagaacagttctcttcctttagttgcgaggaccaaaaggaagtgcgggcaatgtcacaggacagtaacagcaacgctgctcccggtaagagcccgggtgatctgaccacatcacgaacgcccagattcagctctcccaatgtgatctcattcggcccagaacagactgggagagcccttggcgatcagtctaatgtgacggggcagggcaaaaagctattcggttccggcaacgtagcagctacacttcaacgcccacggccagctgacccaatgcctctgccggctgagattccccctgtattcccttctggcaaattggggccttcgaccaattccatgagtggcggagtccagaccccgagagaggactgggccccaaagccccacgctttcgtgggctccgtgaagaacgagaagactttcgtgggcggtcccctgaaggccaatgccgagaatcggaaagccaccggccattccccactggagctcgtcgggcacctggaagggatgcccttcgtaatggacctcccattctggaagctgccaagggagcctggcaaaggcctttctgagccactggagccttcaagccttcccagccaactgtccatcaagcaggcgttttacgggaaactttctaagttgcaactgagtagtacgagcttcaactactctagttcttcacctacttttccaaaaggcctggcaggctccgtggtgcaactgagccataaagcaaattttggggcaagccacagcgcttccttgtctctgcaaatgttcacagacagctccacagtggagtcaatctccctgcaatgtgcatgttctctgaaggcaatgatcatgtgtcagggctgcggggctttctgccacgacgactgcatagggccttccaagctctgcgtgttatgcttggtggtgaggtag

SEQ ID NO: 213560 - DNA, 4626 bp, synthetic construct
  misc_feature 1..4626: note = Description of Artificial Sequence: Synthetic coding sequence
  source 1..4626: mol_type = other DNA
atgaaggacaagcagaaaaaaaaaaaagagcgcacttgggctgaggctgccaggctagtgctggagaattattcagacgctcctatgactcctaaacagattctccaggtcatagaagctgaagggttgaaagagatgcgcagcggcacgagcccattagcatgcctaaacgcaatgttgcatagcaactcaagagggggtgaggggctcttttacaaactacccggaagaatcagcctgttcacattgaaaaaggatgccctccagtggagtcgacaccccgcaaccgtagagggcgaggaacccgaggacacagctgatgtcgagagctgtggcagcaatgaggcctccacagtgagcggtgaaaacgacgtcagcctagacgaaacctcaagcaatgcttcatgctcgaccgaatcacagtcgcgcccactatccaatcccagagatagctacagagcctcaagccaggctaacaagcagaagaagaagacaggggtcatgctaccacgcgtggtgctcaccccccttaaggtgaacggagcccatgtcgagtccgcaagcgggttttctgggtgtcatgccgacggggagtctgggagcccatcgagcagctccagtggctctttggctctggggtctgccgcaattagaggacaagcagaggtcacacaggacccggcaccattgcttagaggtttccgcaagccagcgaccggccagatgaagaggaaccgaggggaagagatcgacttcgaaactcctggctcaattcttgtaaatacaaatctccgtgccctaatcaacagccgcacctttcatgctctgcccagccactttcagcaacagttgctcttcctcctgccagaggtggatcgccaggtaggcaccgatggcctgctgcgtttaagctcatctgccctcaataacgagttttttactcacgcggctcagagttggagggagaggttagcagatggagagttcacccatgaaatgcaggtgaggattagacaggagatggagaaagaaaagaaggtggaacagtggaaggagaagttctttgaggattattatgggcagaagcttggcctgacgaaggaggaatccctgcagcagaatgtgggacaggaagaagcagagatcaaaagcggactgtgtgttccaggtgaaagcgtgcggatccagagagggcctgctacccgacagagggacggccacttcaagaagaggtcaagacctgacttgcgaacacgcgctcggaggaatctgtataaaaagcaggagagtgagcaggccggagtagcaaaggatgcaaagtccgtcgcctcagacgtgcctttatacaaggatggagaagcaaaaactgatccagcaggactgtcctcccctcatctgccaggtacatcctccgcagcccctgatcttgagggccctgagttcccagtggaatctgtagcctcacgaatccaagctgagccagacaacctcgctcgagcctcagcgtcaccagaccgcattccaagcctcccacaggaaacagtcgatcaggagcccaaagaccaaaagaggaagagctttgaacaggccgctagcgcctctttccccgaaaagaaacctcgcctggaggacaggcaaagcttccgaaacaccatagaatctgttcacaccgaaaaaccccagcccacaaaagaagagcctaaggtgcctccaattcggatccagctgtcacgaatcaaaccaccatgggtggttaaggggcaacccacataccagatctgcccacgaatcataccaacgaccgagtcttcgtgcaggggctggactggcgcacgcacactcgccgatattaaagcccgagcgctacaggttcgtggtgccagagggcatcactgccacagggaggctgcaacaacggcaatcggtgggggtggcggtccaggcggaggcggaggcggtgcaaccgacgaggggggaggcaggggatccagctccggtgatggcggagaagcttgtggccatcctgaacctaggggcggacccagcacccctggcaagtgtactagcgatctccagcgcactcagcttctgcctccctacccgctgaacggagagcacacccaggcaggcactgccatgtccagggcacggagagaggatcttccaagcctccgaaaagaagaaagctgcctgcttcagcgcgcaacagtggggctcaccgacggcctcggtgatgcatcgcaactgcccgtggccccaacgggcgaccagccttgtcaggcactgcctcttctgtcttctcagacctcggtcgccgaacgccttgtagagcagccccagctgcaccctgatgtgagaacagagtgtgaaagtggcacgacttcatgggagtcagatgatgaggaacaggggccaaccgttccagccgacaacggtccaatcttatctctggttggagacgacacattggaaaaggggacaggacaggcccttgactctcatcccactatgaaggatcccgtcaatgtcactccatctagcactcccgaaagctctcctaccgactgcctgcagaaccgtgcttttgatgacgaactgggactcggaggtagctgccctcctatgcgggaaagcgacacccggcaggaaaacctgaagactaaagctctcgtgtcaaacagttcactgcactggattccaattccatctaacgatgaggtggtgaagcagcctaagcccgagagcagggaacatattccatcggtggaaccacaggtcggcgaagagtgggaaaaggctgcccctacgccaccggcattaccaggcgacctcaccgccgaggaggggcttgacccactggactcactgactagtctgtggacagtgcctagccgcggtggctctgatagtaacggctcttattgccagcaggtggacatagagaaattgaaaatcaacggggatagcgaagcgttgagcccccatggcgaaagtacagataccgcttcagattttgaggggcaccttaccgaagactcctcggaggccgatacacgggaggccgcagttaccaaaggcagctcagtggacaaggacgagaaacctaactggaaccaatcggctcccctttctaaggtgaacggcgatatgaggctggtcacacgtactgatggaatggtcgcaccccagagctgggttagcagagtttgcgccgtcagacagaagatacccgattctcttctcctcgcatccacagaatatcagcccagggctgtgtgtctgtccatgcccggtagctcagttgaggccactaatccattggttatgcagctcctgcaagggtctcttcctctcgagaaagtgctgccccctgcccatgatgatagtatgtcagagagcccgcaggttccactcacaaaggatcaaagccacggatccctgcggatgggctctcttcacggcctcgggaagaactccggaatggtagacgggtctagcccgtcctccttacgggcactaaaggagcccctgctgcccgatagctgcgaaactggcacagggttggcccgtatcgaggccactcaagctcccggagcgcctcaaaaaaactgcaaggcagtgccctctttcgatagccttcatcccgttaccaatcccattacatcctccagaaaacttgaagagatggactccaaggagcagttcagttcattctcctgtgaagatcagaaggaggttagggccatgtctcaggactccaattctaatgccgctccagggaagtcacctggagacttaacaacatctcggacccctaggttctcatctcccaacgtgatcagttttggcccagaacagacggggagagcactgggagatcagtctaacgtgaccggtcagggcaaaaagctgtttgggtccggaaacgttgctgcaacactgcagcgccctcgccctgccgatccaatgcccctacccgctgagatcccaccagtgtttccaagcggcaagctgggcccttccacgaattccatgagcggcggtgtacagaccccaagggaggattgggcgccaaagccccacgcctttgtgggttccgtgaagaacgagaaaacatttgtgggcggtcccctgaaagcgaacgcggagaataggaaggcaacggggcatagcccactggaactagtgggccacctggaggggatgccgttcgtgatggaccttcccttctggaagctcccacgcgagccaggaaaggggctatcagagccactcgagcccagttcgcttccttcacagctgtccattaaacaggctttttatgggaagttgagtaaattacagctctcttcaacaagtttcaactatagctctagctctcctacatttcctaagggccttgctggttccgtggtgcagttgagccataaggctaacttcggagctagccacagcgcatccctgagtctccagatgttcaccgattcttctacagtcgagagcatcagtcttcaatgcgcgtgctctctcaaagctatgattatgtgccaagggtgtggcgctttttgccatgacgactgcatcggacccagcaagctgtgcgtgctatgtctcgtagtgagatag

SEQ ID NO: 213561 - DNA, 4389 bp, synthetic construct
  misc_feature 1..4389: note = Description of Artificial Sequence: Synthetic coding sequence
  source 1..4389: mol_type = other DNA
atgctgtcttttccaaatctcaatcaggtgttagaaaattattcggatgcacccatgacacctaagcagatactgcaggtcatcgaggcagagggcctgaaggaaatgtcttctgggacttccccgctggcatgcctcaatgccatgttacactccaattctcgtggcggagagggacttttctacaagttacccggtagaatctccctgtttacgctcaagaaagacgccctgcaatggtcgcgacatcccgcaaccgtggagggagaagaaccagaagacaccgcagatgttgaaagttgcggttcaaatgaggcctctacagtcagtggcgagaatgatgtttccttggacgagaccagttccaacgcttcatgttccacagaatctcaatcccgccctctctcaaaccctcgggactcttaccgcgcaagttcgcaggctaacaaacaaaagaagaagaccggtgtgatgctgcccagagtcgtcctgacccccctgaaagtgaatggggctcacgtggagagcgctagtgggcagatgaaaaggaatcgtggagaggagatagacttcgagacccccggttctatccttgtcaatactaatctcagagcactaattaactccagaacatttcacgccctgccgtctcactttcaacagcagctgttgtttctcctgcctgaggtagaccgacaggtcgggactgacggcttactgcgattatcctctagcgcccttaataacgaattcttcacccacgcagcccagtcctggcgcgaaaggctggcggacggcgagttcactcacgaaatgcaggtccggattcgccaggagatggagaaggagaaaaaggttgaacaatggaaggagaagttctttgaggactactatggccagaaacttggcttgaccaaggaggaaagtctgcagcaaaacgtagggcaggaagaggcagaaatcaagtctggtctctgcgttccgggagagtccgtgcgaatccagcggggacccgcaactagacagcgtgacgggcatttcaagaagaggagccgaccagacctaaggaccagagctaggagaaacttgtataagaagcaggaatccgagcaggccggagtggcaaaggatgctaaaagcgtggccagcgacgtgccactgtacaaggatggagaggctaaaaccgatcctgccggacttagttctccccatcttcctggaacctcgtctgccgcacctgacctcgaaggtccggagttccccgtggagtctgtggcctcacggatccaagccgaacctgacaatctggcaagggctagtgcctctcctgatagaataccctcactaccccaggagactgtggaccaagagccaaaagaccaaaagcgcaagtccttcgagcaggcagcatctgcatcatttccagagaaaaaaccacgcctggaggacagacagagtttcagaaacacaatcgagtcggttcacactgaaaaaccccagcccacgaaggaagagcctaaggtcccacctatcagaatccagctttcccgtattaaaccaccctgggtggtgaaaggccagccaacctaccagatctgcccccgaatcatcccgactactgaaagctcatgccgcggatggactggcgctaggacactcgcagacataaaggcacgcgcacttcaggtgaggggcgctcgcggtcaccactgtcaccgtgaggcaacagatgaaggagggggacgcggaagctccagtggcgatggcggagaggcctgcggacaccctgagccacggggaggaccttccactccaggaaagtgtaccagtgatcttcagaggacccagctcctgccgccataccccctgaacggagaacatacacaggccggaacggccatgagcagggccagacgcgaagatctcccctcactccgtaaagaagagtcatgcttgttgcaaagagccaccgtggggctgactgacggattgggggacgctagtcagctgcctgtggctcccaccggggaccaaccatgtcaggcccttcctttgctcagctcacaaacttctgtcgccgagcgcctggtcgaacagccccagctacatccagacgtccgaaccgaatgcgagtctggtaccacatcctgggaatccgatgacgaggaacagggccctaccgtacccgctgataacggacccatcctaagcttagtcggagacgacacgctggagaagggtaccgggcaggcactggattctcaccctacaatgaaagatccagtgaacgtgacaccgtctagcacgccggagtcaagtcctaccgattgcttacagaatcgagcatttgatgatgaactcggactgggtggctcctgtcctccgatgcgggagtcagacactaggcaggagaatctcaagactaaagccctggtgtcgaactcttctctgcactggattccaatcccttccaacgacgaagtggtcaaacaacctaagcccgaaagccgcgaacatatcccctccgtggagccccaggtgggggaagaatgggaaaaggccgcacccacaccacctgctctccctggagaccttaccgcagaagagggactggatcccctggactcactgacttccctctggacagtcccctcaagggggggatccgatagcaacggtagctattgtcaacaggtagacattgagaagctgaaaatcaacggggactcggaagcactcagtccacatggggagtcaactgacaccgcctctgattttgaaggacacctgaccgaggactcctccgaagctgacacacgcgaagcagctgtaacgaaggggagctccgttgacaaggacgaaaagccaaactggaaccagagcgcacctctttcaaaggtaaacggggatatgcgcctggtgacccggaccgatggcatggtagcaccccagagctgggtctccagagtttgcgcagtgcgtcagaaaattcctgattccctgctattagcttccaccgaataccagccacgagccgtgtgtctgtccatgccaggatcttctgtagaagccacgaaccctttggttatgcagctcctgcagggaagtctcccactcgagaaggtgctgcctccggcacatgatgatagtatgagcgaatcccctcaggttccactgactaaggatcaatctcatggcagcctccgtatggggtctctgcatggcctgggaaagaactccggaatggtggatggaagcagtccctcatccctccgagcacttaaggaacccctgctacccgattcttgcgaaacaggaactggcctggctcggatcgaagctacacaggcaccaggagctccccagaagaattgcaaggccgttccgagctttgactctctccaccccgttaccaaccccattacatcttcgcgaaaattagaagagatggacagtaaagaacagttctcctcgttcagttgtgaagatcaaaaggaggtccgtgccatgagccaagattccaactcaaatgcggctccaggaaaatcaccgggtgatctgacaacaagtaggacgccccgattcagtagtcctaatgtgataagcttcgggccagagcagaccggcagagctctgggtgatcagtcgaacgttaccggtcagggcaaaaaactctttggcagcgggaatgtagcggctactctgcagcgtcccaggccggcagacccgatgccactgcccgctgagatccccccagttttcccctccgggaaactcggaccttctaccaatagcatgtccggcggtgtccagactccgagagaagactgggctcccaagcctcatgccttcgtcggtagcgtaaagaatgaaaaaacattcgtcgggggacctttgaaagcaaatgccgaaaacagaaaggcaactggtcatagcccccttgagctggttggacacctggagggcatgcctttcgttatggatctccccttctggaaattaccacgggagccaggaaaagggctaagtgaaccactggagccttcgtcgctgccgagccagctctcaatcaagcaggccttctacggcaaattgagcaagctgcagctatcaagtacctccttcaattactctagttcttcacccacttttcccaagggacttgccggaagtgttgtccagcttagccacaaagcaaacttcggagctagccactcagcttccctgtctctacagatgtttaccgacagttcaacagtggaatcaatcagtctccaatgcgcctgcagcctgaaagccatgatcatgtgtcaggggtgcggagccttctgccatgatgattgtatcggacctagcaagctgtgtgttctctgtctcgtggtgaggtag

SEQ ID NO: 213562 - DNA, 4626 bp, synthetic construct
  misc_feature 1..4626: note = Description of Artificial Sequence: Synthetic coding sequence
  source 1..4626: mol_type = other DNA
atgaaggacaagcagaagaagaaaaaagagcgaacttgggccgaggctgcacgccttgttttggaaaattattctgacgctcccatgactcctaagcagatactccaggtgatcgaggccgagggactaaaagaaatgcggtccgggacttccccattggcgtgtctcaatgcaatgctgcatagcaattcccgcggaggcgaaggcctgttctataagttgcccggtcgcatttcactttttacgcttaagaaagacgctttacagtggagtagacacccagccactgtcgaaggcgaggagccagaagatactgccgacgtggagtcatgcggctcaaacgaagcctccacggtgtcaggcgagaatgacgtcagcttagatgagaccagtagcaatgcttcttgtagcaccgaatcacaatcccgcccactgtccaaccctagggacagctatagagcgagttcccaggccaacaagcaaaagaaaaagaccggcgtgatgcttccacgcgtcgtcttgacacccttgaaggtgaacggggctcacgtagaatctgcgagcgggttttccgggtgccatgctgacggcgaatctggctctccttcgtcgagctctagcgggtcactcgccttgggatcggctgccatcagaggacaggcagaggtgacgcaagatcccgcaccccttctccggggtttcaggaagccagcaacgggccaaatgaagaggaatcgaggagaagaaatcgatttcgaaacacctgggagtatccttgttaacacaaatcttagagcgctgattaattctcgtacattccacgccttacctagtcactttcagcagcagctgctgtttctcttaccagaagtggaccgtcaagtcgggaccgatggtctactcagactgtcaagttcggctctcaataacgaattctttacccacgccgcacaatcctggcgggaaaggctagcagacggagagttcactcacgagatgcaggtccggattagacaggaaatggagaaggaaaagaaggttgaacagtggaaggaaaagttttttgaagactattacgggcagaagctcggtctaactaaggaggagtcacttcagcagaatgttggccaggaagaggccgaaattaagtctggtctgtgtgtgccaggtgaaagcgttcgcatacagaggggccctgcaaccagacagcgcgacggacacttcaaaaagagatctcgcccagacctgcgaacaagggcaagacgtaacctttacaaaaagcaggagtccgagcaggccggtgtcgcaaaagatgctaagtctgttgcttcagatgtccccctgtataaagacggcgaggccaagaccgaccccgctggcctttctagcccccatttacccggtacctcaagcgctgccccagacctggagggaccagagttcccggtagagtctgtcgcttctcggatccaagccgaacccgacaatctggcccgtgcaagcgccagtccagaccggattccttcactgccgcaagagactgtcgaccaggagcccaaggaccaaaagcggaagagctttgaacaggcggcatcagcatcattccccgagaaaaaaccgaggcttgaggatagacagagctttcggaacactatagaatcggttcacactgagaagccacagccgactaaagaggaacccaaagtaccccctatccgcattcagctgagcaggatcaagcctccatgggtcgttaaagggcaaccgacgtaccaaatctgtccccgtataatcccaaccacagaatcttcctgccggggatggacgggagcaagaacacttgctgacatcaaggctcgcgctctgcaggttcgcggagctcggggtcaccactgccacagagaagcagcaaccaccgccattggtggtgggggtggacctggcggtggagggggaggcgcaaccgacgagggcggtggacggggatctagcagcggcgacggcggagaggcctgcgggcatcctgagcccaggggcggaccttcaacgccgggtaagtgtacgtccgacctgcagaggactcaacttcttcctccttatcctttgaacggcgaacacacgcaagcaggaaccgccatgtcccgagccaggagagaagatctcccaagcctacgcaaagaggaaagctgtctgctccaaagagctactgttggtctgacagatggtctgggcgacgcctcccagctgcccgtggcgccaaccggcgatcaaccatgtcaagctttgcccctactcagctctcaaacttccgtcgcggagcgattggtcgagcaacctcagctccaccccgatgtgcgtacggagtgtgagtctggcacgacatcctgggagtctgatgatgaggaacaagggccaaccgtgccagctgacaatggcccaattttgtctctggtcggcgatgataccctagaaaagggcaccggccaggcgctagacagccatcctacgatgaaggatcccgtcaacgtcacaccctccagcaccccagaaagctcaccaaccgactgtcttcagaatagggctttcgacgatgagttaggcctgggcggtagttgtccgcctatgcgggaaagcgatacaagacaagagaacttgaaaacgaaggccttagtgagtaactcctccttgcactggattcctatcccctctaacgacgaggtggtaaagcagcctaagccagaaagccgagaacacatcccatcggtggagccccaggtgggagaggagtgggaaaaagcggctccaacccctcccgctctgcctggggacctcaccgccgaggagggcctggaccctttggattcactcacaagcctgtggactgttccatcccgcggtgggagcgactcaaacggaagttactgccaacaagtggacatcgagaagttgaagattaacggagatagtgaggccctcagccctcacggcgaatccactgacaccgcttctgatttcgagggtcacctgacagaggactcgagcgaggcggacacacgggaagctgcagtgacaaaaggctcatcagttgataaagacgagaagccgaactggaatcagagcgcacctctgagcaaggttaacggcgacatgcgcctcgtgacccgcaccgacggtatggtagcccctcagagctgggtatctagggtgtgcgctgttaggcagaagattccagactccctcctcttggccagcaccgaataccaaccacgggctgtttgcctgtccatgccaggaagctcagtcgaagccaccaatcccctggtgatgcaacttctccagggtagcctccctctggaaaaagtgctcccacccgctcatgacgacagcatgtctgagtcaccacaggtcccactcaccaaagatcaatctcatgggtcgttgcggatgggtagcctgcatgggctcgggaagaacagtggcatggtggatggaagctcccccagtagtctgagagccctgaaggaacctttgttacctgattcatgcgagaccggaacaggactggctaggatcgaagcaacacaagcgccaggtgctcctcagaagaactgcaaggccgtgccatcttttgactccctgcacccggttaccaatcctattacgagctcaagaaagttggaagagatggacagcaaggaacagttcagttctttctcctgcgaggatcagaaagaggtgagagctatgtcgcaggatagtaatagcaacgccgctccaggtaaatcccccggtgatctgaccacgtcacggactccaagattttcgtcacctaatgtgatcagttttggcccagagcagaccggacgagccctcggtgatcaaagcaatgttacagggcaaggtaagaaacttttcggaagcggtaacgtggccgctactctccagaggccaaggcccgctgaccccatgccgctgcccgcagagattcctcccgtgttcccgtccgggaaactcggcccttccacaaattccatgagtggaggagtacagacccccagggaggactgggcccctaagccccacgcctttgtggggtcagtcaaaaatgagaaaacctttgtcggagggccactcaaagccaatgccgaaaaccggaaggctactggacactcaccgctcgaactggtgggccacttggaaggtatgccctttgtgatggacctgccgttctggaaactacctcgggaaccaggtaagggtctctctgaacctctggagccctcctcattgccgtctcagctaagcattaaacaggcattttacggcaaactcagtaaattgcagctgtccagcacctcctttaactattcctcatcctcacccacatttcctaaaggtttggcaggcagtgtcgttcagttatcccacaaggccaacttcggtgcctcacatagtgcaagtctgagcctacagatgtttacggacagcagtactgtggagagcatcagcctccagtgcgcttgttccctcaaagcgatgattatgtgccaggggtgcggcgctttctgccacgacgactgtatcggaccctcgaaactgtgtgttctgtgtctcgttgtgcgttag

SEQ ID NO: 213563 - DNA, 225 bp, synthetic construct
  misc_feature 1..225: note = Description of Artificial Sequence: Synthetic coding sequence
  source 1..225: mol_type = other DNA
tgatgggcagaagcagccagacttgtgcttgagaattattctgatgctccgatgacacctaagcagattttacaggtcattgaagcggaaggattgaaggagatgcgttccgggacgagtcccctagcatgcctgaacgccatgctgcacagcaatagtagggggggagagggtctgttctataagctgccagggagaatcagtcttttcactctcaaggtgtag

SEQ ID NO: 213564 - DNA, 258 bp, synthetic construct
  misc_feature 1..258: note = Description of Artificial Sequence: Synthetic coding sequence
  source 1..258: mol_type = other DNA
atgaaagataaacagaaaaagaagaaagagagaacttgggctgaggctgcacggttagtgctagaaaactattcggacgcaccgatgaccccgaagcagattctgcaggtcatcgaagctgagggcctaaaggaaatgcgatccggcacatcccctctggcctgtttaaatgccatgctgcattctaacagcagaggcggagaaggactgttctataaactccccggtaggatatcactgtttacacttaaggtgtag

SEQ ID NO: 213565 - DNA, 255 bp, synthetic construct
  misc_feature 1..255: note = Description of Artificial Sequence: Synthetic coding sequence
  source 1..255: mol_type = other DNA
atgaaggacaagcagaagaagaaaaaagaacggacgtgggcagaggccgctagactggtcctggaaaactactctgacgcccctatgacccccaaacaaattcttcaggtgattgaggccgagggcctgaaggaaatgtctggtactagtccattagcctgcttgaatgctatgctccattccaacagtagaggcggagaaggccttttttacaaactgccaggcaggataagcctcttcaccctgaagcgatag

SEQ ID NO: 213566 - DNA, 2757 bp, synthetic construct
  misc_feature 1..2757: note = Description of Artificial Sequence: Synthetic coding sequence
  source 1..2757: mol_type = other DNA
atgaagagaaccaaatgcgccgatattgacgtggagacccctgactccatccttgtgaataccaaccttcgcgctctcatcaacaagcatacatttagcgttctgcctggcgactgccagcaaagactgttgctgctgcttcctgaagtagatagacaggtgggtcccgacgggcttatgaagctcaacggctctgcattaaacaatgagttttttacttcggcagcacaggggtggaaagaaagactatccgaaggtgagtttacacccgagatgcaggtgcggataaggcaggaaattgagaaggagaaaaaggtcgaaccatggaaagagcagtttttcgagtcttactatggccagtccagcggcctgtccctagaggactctaagaaactgactgcctcaccttctgatcccaaagttaagaaaacgcctgccgagcagcccaaaagtatgcctgtatctgaggccagcctgatcaggatagtgcccgtggtgagccaaagcgaatgcaaggaagaggcccttcagatgtcatcacccggacgcaaggaagaatgcgagagtcagggcgaggtacaacccaactttagtacctcatcagagcctcttttatccagcgcccttaacacgcacgaactgtcttcaatcctgccgatcaaatgcccaaaagatgaagacctacttgaacaaaagcctgtgactagcgcagagcaggaaagtgagaagaaccatcttaccaccgcatccaattacaacaagagtgaatctcaggaatcgcttgtgacctcaccatccaagcctaagagccccggagttgagaagcccattgtgaagccaactgcaggcgcagggccacaagagaccaatatgaaagagccccttgctacacttgtggaccagtcccccgagtccctcaagcgtaaaagtagcttgacacaggaggaggcacctgtctcttgggagaaacggccaagagtcacagaaaaccggcagcatcagcaaccttttcaggtttctccacagccttttctcaatcgcggagacagaattcaggtccggaaagttcctcccttaaaaataccggtctctcggatctctccaatgcctttccacccctcacaggtgtcccctagggctcgctttcccgtctctattaccagcccaaatcgaaccggagcccgtaccctcgcggatattaaggccaaggcccagctggtaaaagcccagcgggcagcggcagccgctgcagccgcagctgcagctgcagcgagcgtggggggtacaattccaggacccggtcctggaggcggacaggggcctggcgagggaggcgaagggcagacagccagaggtggttccccaggttctgatagggtatcagaaactggcaagggacctaccctagagctggccggaactggctctcgcggaggcactcgggagctattaccctgtgggccagagacacagccacaaagtgagacaaagaccacgccaagtcaagctcagccccactcagtgagcggtgctcagctccagcagacaccgcctgtgccgcctacaccggcagttagcggggcttgcaccagcgtgccctctccagcccacatcgagaagttagacaacgagaaactgaatccaaccagagctaccgctaccgttgcgagtgtgtcgcatcctcagggaccatcgagctgcaggcaggagaaggctcctagtccaacgggatttcagctggaggatatttccacaagtcaaaggttcatgctcggcttcgccggaagaaggacctctaagcctgcgatggctggtcactatttgctgaacattagtacttacgggcgtggctcagagtcctttagaagaacccattcagtgaacccagaggaccgcttttgcctgtctagtccaaccgaggcgctaaagatgggatatacagactgtaagaatgcgactggtgaatccagtagtagcaaggaggacgataccgacgaagagtcaacgggggatgagcaggagtccgttaccgtaaaggaagaaccacaggtgtcacagtccgcaggaaagggcgacacctcatccgggcctcactcaagggagaccttaagcacaagcgactgtctagcgtccaagaatgtcaaagccgagattccactgaatgaacagacgaccttatcgaaggaaaattatctattcacacggggacagactttcgacgagaaaactctcgcaagggacctaattcaggcagcccagaaacagatggcccacgccgtgcggggaaaggccattcgcagctctcctgagctgtttagttcaacggtcctccctctgccggctgatagccccactcaccaaccgttgctgctgccccctttgcagacccctaagctgtacggatcgccaactcagatcggcccatcatacaggggtatgatcaatgtgtccacctcatccgacatggaccataattctgccgtgcctggatcgcaggtgagttctaatgttggtgacgtgatgtctttcagcgtcacagttactacgattcctgcaagtcaggctatgaacccctcctcccacggtcaaacgatcccagtgcaggcctttagcgaggaaaacagtatcgaaggtacccccagcaagtgttactgtcgcctaaaagccatgattatgtgtaaagggtgtggggctttctgtcatgatgattgtataggtccctctaagctctgtgtgtcctgtctggtggtccggtag

SEQ ID NO: 213567 - DNA, 4224 bp, synthetic construct
  misc_feature 1..4224: note = Description of Artificial Sequence: Synthetic coding sequence
  source 1..4224: mol_type = other DNA
atgagccacaaggaaatcctacaagtgatccagagggaaggactgaaagaaatatcaagcggcacctctccgcttgcttgtctaaacgccatgctccatacaaattcccgcggtgaagaaggtatattctacaaggttcctggacgcatgggtgtgtataccctgaaaaaagatgtgcctgatggagtaaaagagctcagtgaaggtagcgaagaatcctcagatggccagagtgattcccagtcctctgaaaactcgtcttccagtagtgacggcggatctaacaaagagggcaagaaaagccggtggaaacgcaaagtgtctagtagcagcccacagtcggggtgcccctctcccaccattcctgcaggtaaggtgatttcaccaagccagaagcacagcaagaaagctctcaaacaagcactgaagcagcagcagcaaaagaaacagcagcagcagtgccggccatccatatccattagttcaaatcaacatctatcattaaagacagtgaaagcagcctcggattccgtgccagcgaagcccgcaacatgggaagggaagcagagtgatggccaaactggatctccacaaaacagcaactccagcttttcctcctccgttaaggtggaaaatactctgttgggcctcggcaaaaagtcattccagaggagcgagcgattgcacacgcgacagatgaaaaggacaaagtgcgccgacattgatgttgagacccctgactctatcctggtgaacacaaacctaagagctctgatcaataagcacacattttccgtgctccctggagattgccagcaacgtctcctgctgttactgcctgaagtcgaccgacaagtgggtccagacggcctgatgaaactgaacggatcagctctaaataacgaattcttcaccagtgctgcccaaggatggaaggaaagactgtccgagggtgagtttacccccgaaatgcaagttcgcatcagacaggagatcgagaaagagaaaaaggtggagccttggaaggagcagttcttcgagagctactatgggcagtccagcggtttgagcctggaggattcaaaaaagcttacggcatcaccttccgaccccaaggttaaaaagactcccgcagaacagcccaagagcatgcccgtgagtgaggccagtctgattagaatcgtccctgtcgtttcacagagcgagtgtaaagaggaagctcttcaaatgtcaagccctgggagaaaagaagagtgtgagtctcagggcgaggtccagccaaactttagtacctcgagcgagcccttgctaagttccgccctcaatactcatgaactgagctccatccttcccattaagtgcccgaaggatgaggatctgctggagcagaagcctgtgaccagcgctgagcaggagagtgagaagaaccatctgaccaccgctagtaactataacaaaagcgaatcacaggagtctctggttacctcaccatcaaaaccaaagtctcccggagtggaaaagcctatcgtgaaacctactgctggagctggcccacaagaaaccaatatgaaagaacccctcgcgacactggtagatcagtcacccgaatccctgaagaggaagagcagtttgacacaagaagaggctcccgtcagctgggaaaaaagacccagagtcacagaaaaccggcaacatcaacaacccttccaggtctcaccccagccattcttgaaccgcggagatcgaattcaagtgagaaaggtgcccccattaaaaatccctgtttcaaggatttcccccatgccattccacccaagccaggtgtctccaagagcacggtttccagtgtcaattacctccccgaacagaacgggtgcccgtaccctggctgatattaaggcaaaggctcagctggtgaaggcccaaagagctgcagccgcagccgcagctgccgctgctgccgctgcatcagtcgggggaactattcccggtcctggtccaggagggggacaggggcctggagagggtggtgaaggccagaccgccaggggcggatcacctggttccgaccgcgtctcggagactggaaaggggcctactcttgagctggcaggtaccggtagcagggggggaacccgggagctcctgccatgcgggcctgaaacgcagcctcaatccgagaccaagaccacgccaagtcaggcccagccccatagtgtgagtggagcccagctccagcagacaccccctgtgcccccaacacccgctgtctcaggcgcttgtacatccgtcccgtcccccgctcatatcgaaaaactggacaacgagaagctgaatccgacacgcgctactgctacagttgcgtccgtgtctcacccccaaggcccaagtagctgccggcaagagaaagctcccagccccaccggcccagcactgatcagcggggcatcacccgtgcattgtgctgctgacggcacagtggagctcaaggccggacctagtaagaatatccccaacccctccgcaagcagcaagacagatgcaagtgtgcctgtcgccgtaacacctagcccactgacttctctcctcacaaccgctaccttggaaaagctgccggtgccccaggtatccgctactaccgctcctgcgggaagcgctccacctagctcaactcttcccgctgctagctcgctgaaaacgcctgggacgtctctgaacatgaatggcccaactttaaggccaaccagctctattccagccaacaatccactcgtcacgcagctgctgcagggcaaagatgtccccatggagcaaatcctgcccaaacctctgacaaaggtagagatgaagacagttccgctcactgcaaaggaggagagaggtatgggtgcactgattgcaaccaatactaccgaaaacagtaccagggaggaggtcaatgaacggcagtctcatcccgctactcaacagcagctaggcaagactttgcagtcaaagcagctgccacaagttcccaggcccctgcagctgttcagcgcgaaggagctgagggattctagtattgatacccaccaataccacgagggcctcagtaaggctacccaggatcagatcctccagactttaatccagagagtccggaggcagaacctgctgtccgtagtgccaccaagccaatttaatttcgcacatagtggcttccagctggaggacataagcactagccagcgatttatgctgggcttcgccggacggaggacttctaagcccgcaatggcaggccactacttgttaaatatctcaacttacgggagaggaagtgagtccttccgcagaactcacagtgtcaatcccgaggaccgcttttgtttgtcatctcctacagaggctctcaagatgggttacactgattgtaagaacgctaccggcgagtctagctcttccaaggaggacgacaccgatgaagaatcaacaggtgatgagcaagagagcgttacagtgaaggaagaacctcaagtttcacaaagcgccggaaagggggacacaagcagcgggccacactcgcgcgagacgcttagcacaagtgactgtctggcatccaaaaacgttaaagcagagatcccccttaacgaacagactactctgagcaaggagaattacctatttaccagggggcagacattcgacgaaaagactctcgcaagggatttgatccaagccgcacaaaagcaaatggcgcatgcagtacgtggcaaggcaatccgatcgagcccagagttattctcatcaactgtcctgcctctgcctgcagatagccccacccatcaaccactgctgctcccaccccttcagaccccaaagctgtatgggtcccctactcagattggcccatcgtaccggggtatgattaacgtgtccacctctagcgatatggatcacaactccgctgtgcctggatcacaggtgagcagcaatgtgggcgacgtaatgtccttcagtgtgactgtgacaaccatacccgcttcccaggcaatgaatccatctagtcatggccagaccattcccgtgcaggccttctctgaggagaactctattgaagggacgccatccaagtgttattgccgcctgaaagccatgattatgtgtaaggggtgtggggcattttgccacgacgactgcatcggcccatcaaagttgtgtgttagttgtctggtggtgcggtag

SEQ ID NO: 213568 - DNA, 2757 bp, synthetic construct
  misc_feature 1..2757: note = Description of Artificial Sequence: Synthetic coding sequence
  source 1..2757: mol_type = other DNA
atgaagcgtacaaaatgcgccgatatcgatgttgagaccccggatagcatcttggtcaatacaaatttgcgcgcactgatcaataagcatactttctctgttttgcctggggactgtcagcaacgcctgctgctcctgctacccgaagtcgacagacaggtggggcctgacgggcttatgaagctgaacgggagcgcccttaacaacgaattttttaccagcgctgcacagggctggaaagaacggctatcagagggggagttcacccctgagatgcaagtcaggattcggcaggagattgagaaagagaagaaggtggagccatggaaagagcaatttttcgaatcttactacgggcagtctagcgggctgtcactggaagattcaaagaaactgacggccagcccaagcgatccaaaggtaaaaaagacccccgctgaacagcccaaatctatgccagtgtcggaggccagcctgattagaattgtccctgtggtgagccaatctgagtgcaaagaggaagcacttcaaatgtctagcccgggaagaaaagaggagtgcgaaagtcagggggaggtgcagccgaactttagtactagtagcgagcctctgctgtcatcagcgctcaatacacacgagctttcatccatcttacccattaagtgtccgaaagacgaagacttgttagagcagaaacctgttacttccgccgaacaggaatccgaaaagaatcatctcaccacagccagcaactacaacaaaagtgaatctcaggagagcctggttacaagcccaagcaaacctaaaagccctggggttgagaagccaattgttaagccgacggctggggctggccctcaagaaacaaatatgaaagagcctctggccaccttggtagatcagtcccctgaatcccttaaaagaaaaagttctcttacacaggaggaagcacccgtgtcttgggagaagaggcctcgggtgacagaaaaccgtcagcaccaacagccgttccaagtaagcccccagcccttcctgaaccgcggtgaccgcatccaggtgagaaaggttcctccactgaagattcctgtctcccgaatctccccgatgccttttcatcccagtcaggtctctcctagagccagattcccggtgagcatcacgtccccgaacagaactggcgcaagaacactggccgacatcaaggcaaaagctcagctggttaaggcacagcgggcagccgcagcagccgctgctgccgctgcagccgctgcctctgtcggtggcactattcccggaccgggtccaggcggagggcaggggccaggtgaggggggtgagggccagaccgcgcgaggtggcagtccaggatcagatcgcgtgagtgagacgggaaagggccctactctcgagttagcaggtactggaagtcggggaggtacacgagagctactgccttgtggaccagaaacccagcctcaatctgaaactaagaccacgcccagccaggcacagcctcatagcgtcagcggtgctcagcttcagcagaccccacctgtgcctcccacacctgctgtgtctggagcttgtactagcgttccttctccagcccatattgagaaactcgataatgagaagttgaatcctacccgggcaacggccacagtggctagcgtcagccaccctcagggaccctcctcctgtagacaggaaaaagctccctcaccaacaggcttccagcttgaggatatttctacaagccagcggttcatgctcgggttcgccggtcggagaactagcaagcctgccatggcaggccactatttgcttaacatcagcacgtatgggaggggctcagagtccttcaggaggacccacagtgtaaatcctgaagatagattctgtctgtcctcccctactgaggcattgaagatgggttatacagattgtaagaatgcaacaggtgagagttcctcatctaaagaggatgatacggatgaagaatccaccggggacgaacaagaaagtgtaacagtgaaggaagagcctcaggtaagtcagtcagctggtaagggagatacatctagtggaccacacagtcgggagaccctgagtacaagcgattgccttgccagtaagaacgtcaaggcggagattcctttaaacgagcagaccaccttaagtaaagagaactacctatttacgagagggcaaaccttcgacgagaagactttggcccgtgatctcattcaggctgcacagaagcagatggcacacgccgtgagggggaaggcaatacgctcctcccccgagctttttagctcaacggtgcttcccctgccagccgacagtccaacacatcagcctctcttattgccaccactacaaacaccgaaattatacggatctcccactcaaattgggccatcctaccgagggatgatcaatgtttccacctcttctgacatggatcacaacagtgccgtgcctggaagtcaagtaagttctaatgtaggggatgtgatgagcttctctgtaaccgtgaccactatccccgcatcccaggcaatgaatcccagtagccacggacagaccatccctgttcaagccttcagtgaagagaactctattgaaggcaccccgtctaagtgttactgtagactgaaggctatgatcatgtgcaagggttgcggagcgttttgccacgatgactgcatcggaccgtcaaagctatgtgtgtcctgtctggtggtgagatag

SEQ ID NO: 213569 - DNA, 4308 bp, synthetic construct
  misc_feature 1..4308: note = Description of Artificial Sequence: Synthetic coding sequence
  source 1..4308: mol_type = other DNA
atgagggagaaaggacgtcgaaaaaaggggagaacatgggcagaggctgcaaaaacagtcctggaaaagtaccccaacacgcccatgtcccataaggagatcctgcaggtcattcagagggagggcctgaaggagatcagatccggaactagcccactcgcctgcctgaacgccatgctacacacgaattcccggggagaggaaggcattttctacaaggtgcctggtcgcatgggagtctatactctcaagaaggatgtacccgatggcgtaaaggaacttagcgaaggtagcgaggagtcctcggacggtcagagtgattctcaatccagcgaaaattcttcttcttcctctgatggcggttccaataaagaggggaaaaagagcaggtggaaaaggaaggtctcctcctcatctccacagagtggctgccccagccccacgatccctgccggtaaggttatttctccatcccagaagcatagtaagaaggcacttaagcaggcattgaaacagcagcaacagaagaagcaacaacagcagtgccggcctagtattagtatctccagtaaccagcacctgtctctgaaaacagtaaaagccgctagtgactcagtccctgcaaagcctgccacctgggagggtaagcagtctgacgggcagacaggaagcccccagaactcaaatagctcgttttcctcgtccgtgaaggtggagaacactctacttggacttggtaagaaaagcttccaaaggtcagaaagactgcatactcgccagatgaagcggacaaaatgtgccgatatcgatgttgaaacacctgacagtattctagtcaataccaatctacgagccctgatcaataagcacacattcagcgtgctccctggtgattgtcagcagagactgcttctgctgttgcccgaggtggatcgccaggtcggtcccgacggcctgatgaaactcaacggcagcgctctgaacaacgagttcttcacatccgccgctcagggctggaaggagcgacttagcgaaggggagttcacgccggagatgcaggttagaatccgccaggaaatcgaaaaggaaaagaaagtcgagccatggaaagagcagttctttgagtcgtattatggtcagagctccggcctctcactggaagactcaaaaaaactgaccgccagtccatccgaccccaaagtgaagaagacaccggcagagcagcctaagtcgatgccagttagcgaagcttccttaatccgcatcgtaccggttgtgtcacagtctgagtgcaaagaggaggcgctgcagatgtctagcccaggcagaaaggaagagtgcgaatcccaaggagaagttcagcctaactttagcacatcgagcgaaccactattgagctcagcactgaatacccatgaactgtcgtctatcctgcccatcaagtgccccaaggatgaagatctgctggaacaaaagccagtaacttccgccgaacaggagtccgaaaagaaccatttgacaactgcctctaactataacaagtcagagtcccaggagagtcttgtaacatctccgtccaagcctaaatcgcccggtgtcgagaagccaatcgtaaaacctacggctggggcaggccctcaggagacaaatatgaaagaacccctcgcgactttggttgaccagtcccctgaatccctgaagcgaaagagcagcctgacccaggaagaggcgcctgtgtcctgggagaagcgaccccgagtgaccgagaacaggcagcaccagcaaccatttcaggtgtctccacaaccatttctcaacagaggggatcggatccaggtgaggaaggtgccacccctgaagattcccgtaagcaggatctctccgatgccttttcacccttcccaagtatctcctagggcccgatttcctgtgtccattaccagccctaacaggaccggggctaggaccttggccgacatcaaagctaaggcacagctagttaaggcccagagggcagctgcagctgcagcggctgcagctgccgcagccgcttcagttggaggcaccatccccggtccaggacctgggggtggtcagggacccggagagggaggagaaggccagacagcccgaggcggtagtcctggtagcgacagagtctctgagaccggcaagggcccaaccctggagctggccggtacgggctcccgaggaggtacaagagaactcctgccttgtggccctgagactcagcctcagtcagagacgaagactacaccttcacaggctcaacctcactcagtgtccggagcacagctgcaacagaccccgcctgttcccccaacacctgccgtgtctggggcatgtacttctgtgccttcgccagcacacatcgaaaaacttgacaacgagaaactcaaccctacccgggcaactgccactgttgcgagtgtcagccacccacagggtccatcctcctgccgccaggagaaagccccaagccccacaggccctgcactgatcagcggagcatcgccagtgcactgtgcagcagacgggaccgttgaacttaaagccggaccgtcaaaaaacattccgaacccttcggcgtccagtaagacggacgcctcagttcccgtggccgtcacaccctcaccactcacgtccctgcttaccactgctaccttggagaagctccccgtgcctcaggtctctgccactaccgctcccgcaggaagtgcacctcctagctctacactgcccgctgccagttctctaaagacccctgggaccagtttaaacatgaacgggccaaccctccggccaacttcctccattccagcgaacaacccactggtgactcagttgcttcagggtaaggacgtgcccatggaacaaattcttccaaagcccttaaccaaggtggagatgaagacggtgccgctgaccgccaaggaggagaggggaatgggtgctctcatcgcaacgaacaccacagagaattccacacgggaggaggttaatgagcggcagagtcatccagcaacccagcagcagctcggcaagacacttcaatcaaagcagctgccccaagtcccgagaccacttcagttgttctctgccaaagagctgcgcgactcatctatagacacacaccagtaccacgaagggctgtccaaggccacccaggatcagatcctgcagaccttgatccagcgggtacggaggcaaaacctcctttcagtagtccctccttcccagttcaacttcgcccacagtgggttccagcttgaggatatctctacttctcaacggttcatgctgggctttgccggaaggcgcacatctaagcctgcgatggccggtcattatctcctgaatatttccacctatgggcgtgggtccgaatcatttcgcaggactcactccgtgaacccagaggacagattttgtctgtcttctcctacagaggccttgaagatgggctacaccgattgcaaaaatgccacaggcgagtcgagttccagtaaggaagacgataccgatgaggagtccaccggggacgaacaggagagcgtgacagtcaaggaagaaccacaagttagccaaagcgcaggaaaaggcgacactagcagtgggcctcacagcagagagactctctcaacgtccgattgtctagcatctaagaatgtgaaggcagagattcctctgaatgaacagacaactctctcaaaggagaactatctgttcactcggggtcagaccttcgacgagaagacactggcgagggacctgatccaagcagcccagaagcagatggcacatgccgttaggggcaaggcgatccgctctagtcctgaactgttctcgtccacagtgctgcccttaccagccgactcccctacacaccagcctcttctgctgcctcccctgcagacccctaagctctatggaagtccaacgcaaatcggaccctcctaccggggtatgattaatgtgtccactagtagtgacatggaccataacagcgccgtgcccggaagccaggttagcagcaacgttggcgacgtaatgagcttctctgtcaccgttacaaccatccccgctagccaagctatgaacccatcatctcatggacaaaccatccccgtccaggccttttccgaggagaattcaatcgagggaacgcccagtaaatgttattgccgactcaaggcgatgatcatgtgcaagggttgtggggcattctgtcacgatgattgcataggaccaagcaaactgtgtgtgtcatgcctggtggtgcggtag

SEQ ID NO: 213570 - DNA, 6746 bp, synthetic construct
  misc_feature 1..6746: note = Description of Artificial Sequence: Synthetic coding sequence
  source 1..6746: mol_type = other DNA
atgaaggataagcggaagaaaaaggatcgtacctgggccgaggcggctagactggccttggagaagcaccccaattccccaatgactgctaaacagattctggaggtgatccaaaaagaaggtttaaaggagacttccggcacgagccctttggcctgtctcaatgccatgctgcacacaaatacaagaataggggacgggaccttcttcaaaatccctggcaaatcaggcctgtatgcactgaaaaaggaggagtcctcatgtcctgcggacggcaccctagacctcgtgtgtgagtcagagctcgatgggactgacatggcggaggcaaacgcacacggcgaggagaatggtgtttgcagcaagcaggtgaccgatgaggcctcaagtactcgggattcgtcgttgacaaataccgcggtccagagcaaactggtgagcagctttcagcaacacaccaagaaggccctgaaacaagcactgagacagcagcagaaaaggcgaaatggggtgtcaatgatggtgaataagacggtgccgagagtcgtattgaccccgcttaaagtgtcggatgaacaaagcgatagtccatctgggtcagaatccaaaaatggtgaggcagactcatctgacaaagagatgaaacatggtcaaaaaagtcctaccggcaaacagacatcacagcacctgaagagattaaagaagagcggcctcgggcacctcaaatggaccaaggctgaggacattgacatagaaacaccaggctctattctggtgaacacaaacctgcgcgctcttattaacaagcacacatttgcctcactgccccagcacttccagcagtatctgctgctgctgcttcccgaagtggacagacaaatgggttctgacggcatcctgagacttagtacaagcgccttaaataacgagttcttcgcatacgctgcccaggggtggaagcagcggttggctgagggcgagtttactcctgaaatgcagctgagaatccggcaggagatcgagaaagagaagaagaccgagccctggaaagagaagtttttcgaacgattttacggcgagaaactcgggatgtcccgcgaggagagcgtaaaactgaccactggccctaacaacgccggagctcagagctcgagctcttgcggaacctctggactgcctgtgagcgcacaaactgccctcgccgagcagcagccaaagagcatgaagagtccagcatcccctgaacccggtttctgcgccactctgtgcccaatggtggagataccacctaaggatattatggccgagttggaatcagaagacattcttatccccgaggagtcagtgatccaggaagaaattgctgaggaggtagaaacatccatctgtgagtgccaggacgaaaatcacaaaaccattcctgagttttcggaggaggcagagtctcttaccaattcccatgaagagcctcagatagcgccaccagaggacaatctcgagtcgtgtgtgatgatgaacgatgtgcttgagacgctccctcatattgaagtaaagatcgaaggcaagtccgagtccccccaggaggagatgacagtggtaattgatcagctggaagtttgtgattccttgatcccctctacctcgtcaatgactcacgtgagcgacaccgagcacaaggagtcagagacagccgtagaaactagcacccccaagattaagactgggtcctcctcattggagggtcagtttcccaacgaggggattgccatcgatatggaactgcagtctgaccctgaagaacagctgagcgaaaacgcttgcatctccgaaaccagcttctcctcggaaagccctgaaggagcttgtactagtctcccctctcctggcggtgagacccagtctacctcagaggagagttgcacaccggcaagcctggaaactacattttgctctgaggtgagcagcaccgaaaacactgacaagtataatcagaggaatagcaccgatgaaaattttcatgcttcactgatgtcggagatcagtcctatcagtacgtcacccgaaatctccgaagcctctttgatgtcaaacctccccctcacctccgaagcctcccctgtcagcaacttgcccctgaccagcgagacatccccaatgtccgacctgcccctgacaagtgagacaagcagtgttagtagcatgctgttaacttccgagacaaccttcgttagcagtcttccgctgccatccgaaacgtctcccatcagcaactcttccataaatgagaggatggcccatcagcagcgtaagagccccagcgtgtcggaagagcctcttagcccgcaaaaggatgagtcctcagccaccgccaaacccctcggtgagaatctcactagtcaacagaagaacctgtccaacacccccgagccaatcatcatgtcatcctcgtctatagcccctgaggcctttcctagcgaagatctgcacaacaagaccctcagtcaacagacatgcaagagccacgtggatactgagaagccataccccgcttctattcccgaactggcatcaacggagatgattaaagtgaagaatcatagtgtgctgcagagaacagagaaaaaggttctgccctctccgctcgaactgtctgtcttcagcgagggcactgacaataaaggcaatgagttgccgagtgcaaaactgcaagacaagcaatatatttcttccgttgacaaggctccattctcagagggtagtaggaacaagacccacaagcagggaagtacacaaagcaggctcgagacatcccacacctctaagtcaagcgaaccctcgaaaagtccggacggcatcagaaatgaaagcagagactcagagatcagtaagcgcaaaactgcggagcaacatagctttggcatttgtaaggagaagagggcgaggattgaagatgatcagagtacacggaacattagtagtagttcacctcctgaaaaggagcagccccctcgtgaagaacctcgggtgccccctctgaagattcagttgagcaagattggaccgccatttattatcaagagccagcctgtaagtaaaccggagtctcgtgcctcaacttcgacatccgtgtctggtggaaggaacactggggctagaacgctggccgatataaaggcccgtgcccagcaagctagggcacagcgggaggcagccgctgccgctgcggtggctgccgctgcctctatcgtttctggcgcaatggggtctcccggagagggaggaaagacacgtaccctagctcacataaaggagcaaaccaaggccaagcttttcgcaaagcaccaggccagagcccatttgttccagacctcaaaggaaacaaggctgccccctcccctctctagcaaagaaggacctccaaacctggaagttagcagtacccctgagacaaaaatggagggcagcaccggagtcatcatcgtcaacccgaactgtcgatcccctagtaataaatccgctcatctaagggagaccacaaccgtgttacagcaatcacttaatccctccaaactacccgagaccgcaaccgacctgagtgttcactcctcagacgaaaacatccctgtgtcacacctgtccgagaaaatcgtgtcatccaccagcagcgaaaactcgagcgttcccatgctgtttaataaaaactctgtgcctgtgagtgtgtgctctacagctatatcaggcgcaataaaggagcatccttttgtatctagcgtggacaagagttccgtgctcatgagcgtcgactcagcgaacaccacaatttctgcctgcaatatcagcatgttaaagactattcagggcaccgacactccctgcatagctattattcctaaatgcatagaatctacccccatctctgctaccacggagggtagctcaatctctagttccatggacgataaacagctgcttatttcatcgtcatccgcctctaatctggtctctacacagtacacttccgtgcccaccccctcgatcggcaataatctgccaaacctctctaccagctctgtgttaataccaccaatgggcatcaataaccggtttccctccgagaaaatagcaataccaggctctgaagaacaggccaccgtgagcatgggaactacggttagagccgctctttcttgtagcgatagtgtggctgttaccgacagcctcgttgcccatccaacggtagcgatgttcaccggtaatatgttaaccattaatagctacgactctcctcctaagctttcagccgaatcactcgacaagaattccggacccaggaaccgcgcagacaacagcgggaagccacaacagccaccaggtggtttcgctccagccgctattaaccgatcaatcccatgtaaggtcatcgttgatcactccaccacgctgacaagctccttgtccctcacagtgagcgtcgagtcttcagaagcttctctggatctccagggaaggcctgtccggaccgaggcttccgttcagcccgtcgcctgtccccaggtcagcgtaatatcaagaccagagccagtggccaatgaaggcatcgatcacagcagtacgtttatcgcagccagcgctgcgaagcaggattccaagacgctgcctgccacctgtacatcactacgcgaattacctcttgttcccgataagctgaatgagccaacagctcctagccacaattttgcagagcaggcccgtgggcctgcacccttcaagagtgaagcggatacaacgtgcagcaatcagtacaacccgtcgaatcggatctgttggaatgacgatggcatgaggtcaacaggacagcccctggtaacccactcagggagtagcaagcagaaagaatatctagaacagtcctgccctaaggccataaaaaccgagcatgctaactatctgaacgtgtcggaactccatccacgcaatttggtcaccaacgttgccctgcctgttaagtctgagttgcacgaagccgacaaggggttccggatggacacggaagactttccaggccctgagcttccaccccctgccgctgagggtgcttcctcagttcagcaaactcagaatatgaaggccagcacatcttctccgatggaggaagccatctcactggccacggacgcactgaaacgggttcctggcgctggttcttctggatgcaggttgtcatcagtcgaggcaaacaatccgctagtgacacagctcctgcagggtaacctgcccctagaaaaggtgctgccacagcccaggctgggggctaagctcgaaattaaccgcctgcccctcccactgcagactaccagcgtaggaaagacggcacctgaaagaaatgtagaaatcccacccagcagccccaaccctgacgggaagggatatctagccggaaccctggcgcctctgcagatgaggaaacgcgaaaatcatcccaagaagcgggtcgcacggacggttggtgagcatacacaggtgaagtgtgagcccggtaagctgcttgtagagcctgacgtcaaaggcgtgccatgtgtcatcagctccggaattagccagctcgggcactctcagcccttcaaacaggaatggctgaacaagcacagtatgcaaaaccgcattgtacactccccagaagtgaaacagcagaagaggctactaccgtcatgttccttccagcagaatttatttcacgttgataaaaacggtggtttccacaccgatgctgggaccagccacagacagcagttttatcaaatgcccgtcgctgccaggggcccaatacctaccgctgctcttctgcaagcgagctctaaaacccccgttggatgtaatgcattcgcatttaatcgacatttggaacagaaaggtctcggcgaggtgtcactttcatctgccccacaccaactgagattggccaatatgctcagccctaatatgcccatgaaagagggtgacgaggtgggcggtaccgcacacaccatgccaaataaggcactggtacatccaccccctccgcctccccctcctcccccacctccactggccctgccaccgccaccccctcccccacctcctctgccccctccgcttcctaacgctgaagtgcctagtgatcagaaacaacctccagtaactatggagaccacaaaaagactttcctggccacagtcaacagggatctgtagcaacatcaaaagtgaaccgctctctttcgaggagggcctcagctcatcatgcgagctggggatgaaacaggtcagctacgatcagaatgagatgaaggaacagctgaaggctttcgctctgaagtccgccgattttagcagctacctgctcagtgaaccccagaaacccttcacacagctcgcggcacagaagatgcaggtacagcagcagcagcaactgtgcggaaactatcccaccattcactttgggtccacttcatttaagcgcgctgccagtgcgatcgagaaaagtatcggcatcctgggcagtgggtcgaatcccgctaccgggctaagcggccaaaatgctcagatgccagtccagaacttcgccgactctagtaacgccgacgaactggagctgaaatgctcgtgtagactcaaagccatgatagtgtgcaaagggtgtggcgctttttgccacgatgactgtatcggcccttcgaagctgtgtgtcgcatgtcttgtagtgaggta

SEQ ID NO: 213571 - DNA, 2307 bp, synthetic construct
  misc_feature 1..2307: note = Description of Artificial Sequence: Synthetic coding sequence
  source 1..2307: mol_type = other DNA
atgaatggcgactctcgagcagcagtggtgacaagcccccctcccaccaccgcccctcataaggaacggtacttcgatcgtgtggatgaaaacaaccccgagtacctgagggagagaaacatggctccggacctcaggcaggattttaacatgatggaacagaagaaaagggtgtccatgatcctgcagtcccccgcattctgtgaagagctcgagagtatgatccaggaacagtttaaaaagggtaagaatcctaccggattgctggcactgcagcagatagccgatttcatgactacaaatgtgcctaacgtttaccccgcagcccctcagggcggtatggccgctctgaacatgagtctcggcatggtgacccctgtgaatgatcttcggggatccgacagcatagcttacgataagggagagaagctacttaggtgtaaactggccgcattttacaggctggctgacctgttcggatggagccagttgatctacaatcatattactacaagagtgaactcagagcaggagcactttcttatcgttcctttcggcctgttgtacagcgaagtgaccgcatcaagtctggtgaagattaatctgcaaggggatattgtggaccgtggttcgacaaacctgggcgtcaaccaggccggatttacgctgcattccgccatctacgctgctaggccagacgtcaaatgcgttgtccatattcacacacccgcaggcgctgccgtcagcgctatgaagtgtgggctgctgcctatttcccctgaggccctaagtctgggagaggtggcttaccacgactatcacggaatattggttgacgaggaagagaaggtactgattcagaagaacctgggcccaaaaagcaaagtcttgatcctgcgcaaccatggtcttgtgagcgtgggcgaaagtgtcgaagaagcattctattatattcacaacctggtagtagcctgcgaaattcaggtgcgtaccctggccagtgctggtgggcctgataaccttgtgctgctgaatcctgagaaatacaaagccaaaagccgctctcctggctcacccgttggagaaggaaccggaagtccaccgaagtggcagattggcgagcaagagttcgaggcgctgatgagaatgctggacaacctgggttatcggacgggttacccatataggtacccagcactgcgggaaaagtccaagaagtacagcgacgtagaagttcccgcaagtgtcaccggatatagcttcgcctcagatggagattctggcacctgctctcccctgcgccattccttccagaagcagcagagagagaagacccgctggttaaatagtggcagaggcgacgaagcatccgaggaagggcagaatggttccagtcctaaatccaaaactaaggtgtggacaaacatcacacacgaccacgtgaaaccactactgcaatctctgagttccggagtgtgcgttccttcatgtatcactaactgtctatggacaaaagaagatggccacagaacgagtacgtccgccgtgccaaatcttttcgtccctctgaatacgaaccccaaggaagtccaggagatgagaaacaagattcgggagcaaaacttacaagatatcaagacagctggtcctcagtctcaagttctttgtggcgttgtgatggaccggagtctggtgcagggcgaactggtaactgcttcaaaagccatcattgagaaggaataccagccccacgtgatcgtgtctacaactgggccaaacccttttaccaccctcacggacagagaactggaggaatacaggcgcgaggtggaacggaagcagaaggggtcagaagaaaatctggatgaagccagggagcaaaaagagaaaagtcccccagatcagccggcagtgcctcacccacctccaagcactccaattaagttggaagaagacctggtaccagagcccacaacaggagatgattccgacgcagcaacctttaagcctaccctacccgatctgtctccagacgagccctcggaggccctcggtttccccatgctcgagaaagaggaggaagcccatcgcccacccagccctaccgaggccccaacagaggctagtcccgaaccagctcctgaccccgctcctgtggcagaggaagccgctccatcagccgtggaagagggcgctgcagctgacccaggtagtgacggctctccaggaaagtcacctagtaaaaagaagaagaaattccgcaccccctcctttctgaagaagtccaaaaaaaagtcagatagttag

SEQ ID NO: 213572 - DNA, 1989 bp, synthetic construct
  misc_feature 1..1989: note = Description of Artificial Sequence: Synthetic coding sequence
  source 1..1989: mol_type = other DNA
atgaacggtgacagtagagcagcagtagttacatcccccccacccacaacagcccctcataaggagcgctactttgacagagtggatgaaaataatcccgagtacctgcgagaacggaacatggcccctgacctgagacaggatttcaacatgatggagcagaaaaaaagggtgtctatgattctgcagagcccggcattttgtgaggagctggagtcaatgatccaggaacagtttaagaaaggaaaaaatccgaccggactcctggccctgcagcagattgctgatttcatgactactaacgttccgaatgtctaccctgctgccccacaagggggaatggctgctctgaatatgtctctgggcatggtgacccctgtcaatgacctgcgcggtagcgattcaatcgcgtatgacaagggggagaagctgctacgatgtaagctggcagccttttatcgccttgcagatctattcggatggtctcagctgatttataatcatattacaacacgggtgaactctgagcaggagcactttcttatagtgccattcggcctcctctatagtgaggttaccgcctcctccctcgtgaaaatcaacctccagggtgatattgtcgaccggggttcgaccaacctgggagtcaaccaagcaggcttcacactgcactccgccatatacgcagcccgacctgatgtgaagtgtgtagtccacatccacactcccgcaggggctgccgtcagcgctatgaaatgtggcctgctccctatctctccggaggctctctctctgggagaggtggcctaccacgactaccatggcatattggtggatgaggaggaaaaggtgctgattcagaagaacctagggccaaaatccaaggtcctgatactccgcaaccatgggctggtaagcgttggtgaatctgtcgaggaagctttctactacattcacaacctcgttgttgcatgcgagattcaggtgaggaccctcgccagtgccggtggccctgacaatctggtgctgttaaaccctgagaagtacaaggccaaaagccgatccccaggaagtcccgtgggtgaaggtacaggcagtcccccaaagtggcaaatcggagagcaggaatttgaggcattgatgcggatgctggacaacctgggctaccggacaggttatccttaccggtatcccgctcttcgcgagaagtctaaaaagtatagtgatgttgaggtgccagcttctgttacagggtatagcttcgcatccgatggagactcaggcacttgtagtccattgcgacactcattccagaagcagcaaagggaaaaaacaagatggctcaacagcggtaggggggacgaggcaagcgaagaaggacagaacgggagctcgcccaaatctaagaccaagtggaccaaggaagacgggcaccgaacaagcactagcgccgtgcccaacctgttcgtaccactgaacacgaatcccaaagaggtccaagagatgaggaacaaaatcagagagcagaatcttcaagacatcaagactgcgggacctcaatctcaggtcctgtgtggagtggtgatggatcgctcattggttcaagacgcacccctttccgactgcactgaaactatcgaaggcctggagctgaccgaacaaacattttccccagcaaaatctcttagcttcaggaaaggggagttggtgacagcctcaaaggcgattattgaaaaggaataccagccacatgtaatcgtgtcgactaccggccctaacccgttcacaacactcacggacagagaacttgaagagtaccgtcgggaggtagagcgtaaacagaaaggaagcgaggaaaacttggatgaggccagagaacagaaggaaaagagcccccctgaccaacccgctgtgccgcatccacctccttcaacgcctataaaattggaagaaggtgatggctgtgcccgagagtatttacttccctag

SEQ ID NO: 213573 - DNA, 1989 bp, synthetic construct
  misc_feature 1..1989: note = Description of Artificial Sequence: Synthetic coding sequence
  source 1..1989: mol_type = other DNA
atgaatggcgattcaagagccgctgtggttacatcaccacctccaactactgctccacacaaggagagatacttcgatcgcgtggatgagaacaaccccgaatatctgcgcgagcgcaacatggctcccgacctccgccaagactttaatatgatggaacaaaagaagagagtttctatgattcttcaatcccctgcattttgcgaggagctggagtccatgattcaagaacaattcaaaaagggaaagaatcccacagggctgctcgcgctgcagcagatcgcagacttcatgaccactaatgtgcccaatgtctaccctgcagcaccccagggtggcatggccgcactcaatatgtcacttggaatggtgaccccagtgaatgatttacgaggcagtgactcgatcgcatacgacaagggagagaaacttctgcggtgtaaactcgccgctttttaccggctcgcagacttattcgggtggagtcagctcatttataaccacataacaactcgcgtgaacagcgaacaggaacatttcctgatcgtgccctttgggttactctactccgaggttacggcgtctagcctggtcaaaattaatctgcagggcgatatcgtggaccggggttcaacgaatctgggagtgaatcaggccggtttcacactacactctgctatctacgccgctaggcctgacgttaaatgtgtggtgcatatacataccccggctggcgctgccgtatcagcaatgaagtgcggtctgctacctatatcccctgaggctttgtcactgggcgaagtggcataccatgactaccacggtatcctcgtggacgaagaggaaaaagtacttatccagaaaaatttagggccaaagagcaaagtactgatactgaggaatcacggtctagtcagcgttggcgagtctgtcgaggaagcattctattacatacataatttggtagttgcgtgcgaaatccaggtgaggacactggcttccgctggtggccctgataatcttgtcctgttaaatccagaaaagtataaggccaagagcagaagccctggaagtcctgtcggtgaaggaacaggatctccccctaaatggcagattggtgagcaagagtttgaagcactgatgaggatgctggataatttagggtaccggactgggtacccctatcggtatccagccctcagggagaagtccaaaaaatactctgacgtagaggttcctgcttctgtaaccgggtactcttttgcctcggatggagacagcggtacctgttcacccctaaggcactccttccaaaagcagcagcgtgagaagacccggtggctcaactccgggaggggcgatgaagcttccgaagaagggcagaatggctcctcacctaagtcaaagactaaggtctggactaatatcactcacgatcacgtgaagcctctgctccaaagtctgagctccggagtctgtgtgccctcttgcatcacaaattgtttgtggacgaaggaggatggacataggacatctacatcagctgttcccaacctattcgttcctttaaacaccaatccaaaggaagtgcaggaaatgcgcaataagatcagagagcagaacttacaagacattaagaccgccggaccacagtctcaggtgttatgtggggttgttatggataggtccttggtgcagggcgagctcgtgactgcgtcaaaggcaataatcgaaaaagagtatcaacctcacgtgattgtttcgacaaccggtcctaacccctttacaacacttacagacagagagctcgaggagtacagaagggaggttgaaaggaagcaaaaaggcagtgaggaaaacttagatgaggcgagggagcagaaagaaaagtcaccgcctgaccagcccgcagttcctcaccctcccccttccacacccattaaactggaggaaggtgacggatgcgccagggagtacttgttaccatag

SEQ ID NO: 213574 - DNA, 1203 bp, synthetic construct
  misc_feature 1..1203: note = Description of Artificial Sequence: Synthetic coding sequence
  source 1..1203: mol_type = other DNA
atgaatggcgattcccgggcagcggttgttacctcccctcctccaaccaccgccccacataaggagcgatattttgacagagtggatgagaacaacccggagtacctccgcgagcgaaatatggccccagatctccggcaagactttaacatgatggagcagaagaagcgcgtctccatgattctccagtcccccgcattctgtgaggagctagaaagcatgatccaggagcagtttaagaaaggcaagaatccgacaggcctcctggccctgcagcaaattgctgacttcatgaccacgaacgtccccaatgtctatcccgctgcccctcagggcggtatggctgctcttaacatgagcctcggcatggtaactcctgtaaacgatttacgaggtagtgactctatagcatacgacaaaggagagaagctgttgaggtgcaagttagcagccttctatcggctggctgatctgttcggttggagccagctgatctataaccacattaccacaagggtcaacagcgagcaggaacattttctgatcgtgccatttggactcctgtatagcgaggtgaccgcctcatccctcgtaaagattaaccttcagggggacatcgttgatcgaggctccaccaaccttggagtcaatcaggcaggcttcaccctgcacagtgctatctatgctgcccgaccagatgtcaaatgtgtggtccacatacatacgccggctggtgccgctgtttctgcgatgaaatgcggcctattgcccatttcacccgaggccctctctcttggcgaggttgcgtaccacgactatcacgggattctggtggatgaagaggagaaggttctgatacagaaaaacttaggtcctaagtccaaggtgttaattttgcggaaccacgggctggttagcgtcggggagagtgtggaggaggcattttattatatacataatctcgtggtggcttgcgaaatccaggtgaggacactggcttcagccggaggcccagacaacttggtactgctcaaccccgagaaatacaaagccaagagccggtcgcccggttctccggtaggcgagggcaccggaagtccgccaaagtggcagattggcgaacaggaattcgaagccctcatgcgaatgctggacaacctaggctatcgcacaagtagctccggccgacgccaggatggctag

SEQ ID NO: 213575 - DNA, 1989 bp, synthetic construct
  misc_feature 1..1989: note = Description of Artificial Sequence: Synthetic coding sequence
  source 1..1989: mol_type = other DNA
atgaatggagacagtcgggcagcagtggtcacctctccccctcctacaaccgctccccataaggaacgatactttgaccgtgttgatgaaaacaaccctgagtatcttcgcgaacgcaacatggctccggatcttcggcaagatttcaatatgatggagcagaaaaaacgggtctcaatgatacttcagagcccagccttttgtgaggaactggagtctatgattcaggaacagtttaagaagggcaagaaccccacaggattgcttgcactgcaacaaatagcagatttcatgacaactaatgttccgaacgtatatccagccgctccccagggcggaatggctgcactaaacatgagcttaggcatggtcacaccggtgaacgatttgagaggcagcgattccatagcctatgataaaggagaaaaactactcaggtgtaaactagccgcattttatcgcctggccgacctttttgggtggtcccagcttatttacaaccacattaccacgcgcgtcaattctgagcaagaacacttcctgatagtccctttcggcctcttatattcagaggtgaccgccagctcgctcgtgaagatcaatctgcagggggacatcgtggatcgtggaagtaccaacctcggcgttaatcaagcaggctttacactacacagcgccatctatgcggctcgccctgatgtaaagtgcgtagtgcatattcatacccccgcaggagctgccgtgtcagctatgaagtgcggcctattgccaattagtccagaagcactcagccttggcgaagtggcttaccatgactaccacgggatcctggtggatgaggaggagaaagtgctgattcaaaagaatctgggcccaaaaagtaaagtgctaattttacgaaaccatgggcttgtctccgttggagaatcggtcgaagaggcattctattatattcataatctcgtggtagcctgtgagatccaggtgaggaccctcgcatcagcaggtgggccagacaatctggtcctactgaatcctgagaaatataaagccaagtcccggagccctggtagccccgtgggcgaaggcacggggtcaccacccaagtggcagatcggcgagcaggagtttgaggcactgatgagaatgttggataatctgggctacagaaccggatacccttacaggtaccccgctctgcgcgagaaatctaaaaagtacagcgatgtggaagtgccggcaagcgtcacaggatattcatttgcatctgatggcgacagcggcacatgttcaccactgagacactcgttccagaaacagcagagagaaaagacaaggtggctcaatagtggaagaggagatgaggccagcgaagaaggccagaatgggtcatccccaaaaagcaaaacaaaagtgtggacgaatatcacccacgatcacgttaagcctctgctgcagagccttagttccggtgtatgcgtgcctagctgcatcactaattgtctgtggacgaaggaggatgggcaccgcacctcaacaagcgcagttcccaacctgttcgtacctttgaacactaacccaaaggaggtgcaggagatgaggaacaagatacgcgaacagaacttgcaagacattaagactgctggacctcagtcgcaggtgttgtgcggcgtcgtgatggatcggtctctcgtgcagggggaacttgtgaccgcctccaaggccatcattgagaaggagtatcaaccacacgttatcgtgagcaccacgggacctaaccctttcaccaccctcaccgatagggagcttgaggagtataggagggaggtagagcggaagcagaagggcagcgaggagaacctggacgaggcgcgtgagcagaaggagaaatcccctcctgaccagccggctgtgccgcacccgcctcccagcactcccatcaagctcgaagaaggggatgggtgtgctagggagtatctgttgccctag

SEQ ID NO: 213576 - DNA, 2214 bp, synthetic construct
  misc_feature 1..2214: note = Description of Artificial Sequence: Synthetic coding sequence
  source 1..2214: mol_type = other DNA
atgaatggggactctagggctgccgttgtcacgagccccccacccaccacagccccacataaagagagatacttcgaccgggtcgacgaaaacaatcctgagtaccttcgggagagaaatatggccccagacttgaggcaggactttaatatgatggaacagaaaaaaagggtgagcatgatattacagagccctgcgttctgcgaagagctcgagtcaatgatccaggagcaattcaagaagggcaagaaccccaccggtttgctggctctgcagcagattgcagacttcatgactacaaatgttcccaatgtttaccctgccgctcctcagggcggtatggccgcacttaatatgtcattgggaatggtgactccagtcaacgaccttagggggtcagacagcatcgcctatgataaaggagagaagctgctgcgctgcaagctggcagccttctaccgccttgccgatctgttcgggtggtctcagctgatctacaaccatatcacaacgcgggtgaacagtgagcaggagcacttcctgattgttcctttcggactgctgtatagcgaggtgacagccagtagcctcgtcaagatcaacctacagggtgatattgtggaccgcggatccaccaacctgggagtgaaccaggcaggattcacgttgcactctgccatctatgctgcgagaccagatgtaaagtgtgttgttcatatccacacacctgccggagctgccgtgagcgccatgaagtgcggtttgctcccgatttcacctgaagccctgtctctgggagaggtggcgtaccacgattatcacggcatcttagttgatgaagaagagaaggtcctgatccagaaaaatctgggtccgaagtccaaggtgctcattctacggaatcatggcctcgtcagtgtgggcgagtccgtggaggaagccttttattacatacataacctggtggtggcatgcgagattcaggtgcggacgctggcttccgccggtggaccagacaacctggttctccttaaccctgagaaatacaaggccaaaagccgttccccaggctcccccgtcggagaaggaacaggcagcccgcctaagtggcaaatcggagagcaggaatttgaagctctcatgcgtatgctggataatctgggttacagaactggctatccgtaccgatatccagctctgagggaaaagtccaagaaatatagcgatgtcgaggtgcctgcttccgtaaccggatatagcttcgcgagcgatggggatagcggcacttgcagcccactcaggcattctttccaaaaacagcagcgcgaaaagacacggtggctaaactcaggtcgcggagacgaggcgtccgaggaaggccagaatgggtccagccccaagtccaagacaaagtggacaaaggaggatggacaccgcacaagcacatccgccgtccccaacctcttcgtcccactgaataccaacccgaaagaggtgcaggaaatgaggaataaaattcgggaacaaaacctccaagacattaagactgcgggaccccaaagccaggtgctttgtggagtggttatggaccgttccctggtgcagggtgaactggtaaccgctagcaaggcgattatcgaaaaggagtatcaaccacacgtgattgttagcacgacaggaccaaatccttttacgaccctgaccgacagggagctggaggaataccgtcgcgaggtggagcggaagcagaaaggctccgaagaaaatttagatgaggccagagagcagaaggaaaaatccccccctgaccagcctgccgtaccccacccaccgccaagcacccccatcaagctcgaagaggacctcgttccggagcccacaacaggcgatgactccgacgccgctacctttaaaccaaccttgcctgatttgagtccagatgaaccaagtgaagctttagggtttcctatgctggagaaggaagaagaggcgcaccgtcccccatctcccactgaagctcccactgaggctagcccagagcccgcaccagacccagcaccggtcgctgaagaggcggctcccagcgccgtggaggagggcgcagccgctgacccaggcagcgacgggtcccctggaaaaagcccgagtaaaaaaaagaaaaaatttaggaccccttcattcctgaaaaagagcaagaagaagtcagactcgtag

SEQ ID NO: 213577 - DNA, 2214 bp, synthetic construct
  misc_feature 1..2214: note = Description of Artificial Sequence: Synthetic coding sequence
  source 1..2214: mol_type = other DNA
atgaacggggattctcgcgcagccgtggtcacttcccccccaccaaccacggcccctcacaaggagaggtacttcgacagggtagacgaaaataatccagagtacttacgggagcggaatatggcccctgaccttcgacaagactttaacatgatggaacagaagaagcgcgtgagcatgatcctccaatcacctgcgttctgtgaagagctggaatccatgattcaggagcagttcaagaaaggaaaaaacccgacaggtctgctagcccttcagcagattgcagacttcatgactacgaacgtacccaatgtctatccggctgcgccacaaggcggaatggccgcactcaacatgtctctgggaatggttacacccgtgaacgaccttcgcggttccgatagcatagcctatgacaaaggcgaaaagctgctgagatgcaagctggcagctttttacagactcgctgatctcttcgggtggagccagctgatatataaccacatcaccacccgggtgaatagcgaacaggagcactttctgatcgtgcctttcggcttactgtacagcgaggtgaccgcatcctctctggtgaagatcaatctgcaaggagacattgttgacagagggtctaccaacctcggcgtgaaccaggctggattcactttacattcagccatatacgccgctagacctgacgtcaaatgcgtcgtccatatccacacaccagcaggagcggcagtatctgccatgaagtgtggattactgcctatctccccagaggctctcagccttggagaagttgcttatcacgactatcacggcatcctggtcgatgaggaggaaaaagtgctcatccagaagaacttagggccaaaatctaaagtcttgattctcaggaaccatggactggtatcggtgggcgaatctgtcgaagaggcattctattacattcacaacttggttgtggcctgcgagattcaggtcagaacactcgcctctgccggaggaccggacaacctggtactgctgaatcccgagaagtataaagctaagagcaggtcaccgggaagcccggtgggcgagggaactgggtcccccccaaagtggcaaattggcgagcaggaatttgaagccctgatgcggatgctggacaaccttggataccggaccgggtacccataccgttacccggctttaagagaaaaatccaagaagtattcagatgttgaggtacctgcctccgtgaccggctattcgttcgccagcgatggcgacagtggaacctgctctcccctgagacactcctttcagaagcagcaaagagaaaaaactagatggctcaatagcggcaggggggacgaggccagtgaagaaggacagaatggttcaagtcccaaatctaaaaccaagtggaccaaagaagacgggcacagaactagtacctccgctgtacccaatctctttgtacccctgaacacaaatccgaaagaggttcaagagatgagaaacaagatccgcgagcagaatttgcaggacattaaaaccgcgggacctcagagccaagtgctgtgtggcgttgtcatggaccggtctctcgtccaaggtgagctggtgaccgcttccaaggcaataatcgagaaagaataccaaccacatgtcattgtctccaccacaggtccaaatccttttacaacactaactgaccgagagctggaggaatatcgccgagaggtggagaggaaacagaagggctcagaagaaaacctcgacgaggctagagagcaaaaggagaagtctcccccagaccagccagccgtcccgcacccccctccttcgactcccataaaactggaggaagatcttgtgccagagccaactaccggcgacgacagcgacgccgctacctttaaaccaacactgcctgatctttcccctgacgagccctcggaagcgttgggatttccgatgctcgaaaaagaggaagaggcccacaggcctcccagcccaacagaagctcccacagaagcctcgcctgaaccagccccagatcctgcacccgttgcagaagaggcagcaccttctgccgtggaggagggagccgcagccgaccctggaagcgatgggtcacccggaaaatcaccttcaaagaaaaagaagaagtttagaactccatctttcctgaagaaatcaaagaaaaagagtgactcatag

SEQ ID NO: 213578 - DNA, 414 bp, synthetic construct
  misc_feature 1..414: note = Description of Artificial Sequence: Synthetic coding sequence
  source 1..414: mol_type = other DNA
atgaatggggactcacgggcagcggtggtcacctctccaccgccaaccacagccccacataaggaaaggtattttgatcgcgttgacgagaataacccagaatacttgcgggagcggaatatggcaccggaccttcgtcaagattttaatatgatggagcagaagaagagagttagtatgatactccagtctcccgcattctgcgaggaactagaatcaatgatccaggagcagtttaagaagggtaagaaccctacggggctgctagccctgcagcagatcgccgactttatgaccactaacgtacctaatgtgtaccccgcagcaccacaagggggtatggcagccttgaatatgagcctgggcatggtaacccctgttaatgatctccggggatcagatagtatcgcctag

SEQ ID NO: 213579 - DNA, 1899 bp, synthetic construct
  misc_feature 1..1899: note = Description of Artificial Sequence: Synthetic coding sequence
  source 1..1899: mol_type = other DNA
atgaacggtgactccagagcggcagtggttacatccccccctcccaccaccgcacctcacaaagagagatactttgatagagtcgacgaaaacaacccagagtacttgcgagaacgaaatatggcaccagacttgcggcaggacttcaatatgatggaacagaaaaagcgggtgagtatgatcttgcagtctccagccttctgcgaagaactggaatctatgatccaggagcagtttaaaaaaggcaaaaatccaaccggtcttctggcactgcagcagatcgcggacttcatgacaaccaacgtcccaaatgtgtaccccgcagccccacagggcggaatggccgctttaaatatgtctctcggaatggttactcctgtgaacgacctccgtgggagcgatagtatagcttacgataagggtgagaagctgctccgttgcaagctggcagccttctaccgactcgctgatctgttcggatggtctcagctgatatacaaccacatcacaaccagggtgaattcagaacaggaacacttcctcatcgttccttttggcctgctatattccgaggtgaccgcctcaagcctcgtgaagatcaacctccagggcgatattgtagacaggggatctaccaatttgggcgtgaaccaggccggtttcacactccactcagccatttatgctgcccgacctgacgtgaagtgtgtggtccacattcatacacccgctggcgcagcagttagcgcaatgaagtgtggcctcctgccaatcagcccagaagcgctctcgctgggggaggtggcataccatgactaccacgggatcttggtggacgaagaggagaaagtgctgattcaaaagaacttgggccctaagtctaaggtgctgatccttaggaaccacggactggtttccgtgggagagtcagtggaggaggccttttattacatccacaatctggtcgtcgcctgtgaaattcaggtaagaaccctggcctctgccggaggaccggacaacctggtgttgctgaatccagagaagtacaaggcaaagagtcgaagcccagggtcccctgtcggcgaaggaacgggctcaccccctaagtggcagattggcgaacaggagtttgaagctctgatgagaatgctcgacaatctgggctaccggactggatatccatataggtacccagccttgagggaaaaaagtaaaaaatacagtgacgtggaagtgcctgcgtcagttactggctattcctttgcttcagatggagactcagggacttgttcgccactgagacactcctttcagaagcaacagcgggaaaagactcgctggcttaattccggtcggggtgacgaagcttcagaggagggccagaatgggtcttcccccaagagtaagacaaagtggaccaaagaggatggtcaccgtacctctacctcagctgttccgaacctgttcgtgcctcttaatacaaatcccaaagaggtgcaggaaatgcgcaataaaatccgggagcagaatctgcaggacatcaagacagcgggtccacagtcccaggtcctgtgcggagtggtgatggacagatcactggttcagggggaactggtaaccgcttccaaggcaatcatagaaaaggagtatcagcctcacgtgatcgtgtctactaccggtcctaatccattcaccaccctgaccgacagagagcttgaagagtaccggagagaggtggagagaaagcagaaaggctccgaagaaaaccttgacgaggctagagaacagaaggagaaatcacccccagaccagccggctgtgccacaccctccaccatcaacacctattaaattggaagaggccggagatggctgcgccagagaatacctcttaccctag

SEQ ID NO: 213580 - DNA, 1335 bp, synthetic construct
  misc_feature 1..1335: note = Description of Artificial Sequence: Synthetic coding sequence
  source 1..1335: mol_type = other DNA
taggtacttatcctaaggaatcacggccttgtgtcggtcggcgagagtgtggaggaggctttttactatatccacaacctcgttgtcgcatgcgaaatacaggtgaggaccctggcctcagctgggggacccgacaacttagtcctgctgaaccccgagaagtacaaggctaaatctaggagtccaggaagccctgtgggtgaggggaccgggagtccgccaaagtggcagattggcgagcaggaattcgaggctttaatgcggatgcttgataacttgggatacaggaccggttacccttacagatatcctgctctgcgagaaaagtctaaaaaatatagtgatgtggaggtcccagcaagtgtgaccggctactcattcgcctcggacggtgacagcggaacctgctcccctctgcgccactcatttcaaaagcaacagcgtgagaaaaccaggtggcttaatagcggtagaggagatgaggcttccgaagaaggccaaaatggaagcagtccaaaaagcaagaccaaggtgtggacaaacattacacacgatcacgtgaaaccgctgctgcagagcctgagcagcggagtgtgtgtaccatcttgcatcacaaattgcttatggactaaggaagatggccacagaacgagcacgagtgctgtgcccaacttatttgtcccattgaatacgaatccgaaagaagtccaggagatgaggaacaaaatcagggagcagaacttacaggacattaagacagcgggaccacagtcccaggtgttatgcggggtcgtgatggacaggtcattggttcaaggtgagctcgtaacagcctcaaaggcgatcattgagaaggagtaccagccacatgttattgttagcacaaccggacccaatcccttcactactctgaccgatcgcgagctggaggaatacagacgagaagtggaacgcaaacagaaaggtagcgaggagaatcttgatgaggctagggagcagaaagagaagtctccaccggaccaacctgcagttccacatcctcccccaagtacccctattaaactggaagaggacctcgttccagagcctaccacgggcgacgatagcgacgccgcaacctttaaaccaacgctgccagacctgagcccggatgagccatctgaagcactgggcttccccatgctggagaaggaggaggaggcccaccgacctccgtctcccacagaagccccaactgaggctagtcctgagcctgcgccagaccccgcacccgtggctgaagaggcggcacctagcgcagtggaggagggcgcagcagcagaccccggtagttag

SEQ ID NO: 213581 - DNA, 2181 bp, synthetic construct
  misc_feature 1..2181: note = Description of Artificial Sequence: Synthetic coding sequence
  source 1..2181: mol_type = other DNA
atgtctgaggaaacagtccctgaggccgcatcgcctccacctccccagggccagccttatttcgatcgctttagcgaggacgatcctgaatacatgcgactacgtaatcgagcagcagatttacgacaagatttcaacctcatggagcagaaaaagcgggtgactatgatcctgcagtctccctcttttcgggaggagcttgaggggttgattcaagagcagatgaaaaagggcaacaactcttcaaacatctgggccctgaggcagatcgccgatttcatggcatcaacttctcatgctgtctttcccaccagctcaatgaatgtgtcgatgatgacaccaatcaatgatcttcacacagctgactctcttaacctagccaagggcgagcgcctgatgcgctgtaagatatcctctgtatacaggctcctggatctatatggctgggcccagttatcagacacttatgttacgctccgcgtgagcaaggaacaggaccacttcctgattagccccaagggagtgtcctgtagcgaagtgactgcctcctccctgattaaagtgaacatccttggtgaggttgtggagaaagggagttcctgttttccagtcgacaccaccgggttttgtctccacagtgccatttacgcagccaggcctgatgtgcgctgtattattcacctgcacacaccagccactgcagccgtgtctgcgatgaaatggggattgctgccggtctctcataatgccctgctggtaggagacatggcttactatgactttaacggagagatggagcaggaggccgacaggatcaatctgcagaaatgtctcggccctacctgcaagatcctggttctgcggaaccacggagtggtggccctgggtgacaccgtggaagaggcgttttacaaaatctttcatttgcaggccgcttgcgaaatccaagtctctgccctgagcagcgctggcggtgttgagaacttgattctgctcgagcaagaaaaacatcgacctcatgaagtgggatccgtccaatgggcgggtagcacattcggcccaatgcaaaagtctcgcctgggtgagcatgagtttgaggctttaatgcggatgctggataatttgggatacagaaccgggtatacctatagacaccccttcgtgcaggagaaaacaaaacacaagagcgaggtagagattccggctactgtgactgccttcgtgtttgaggaagatggtgcacctgtacccgcacttcgccagcacgcccagaagcaacagaaggaaaagacccgctggcttaatactcccaatacctatttaagagtgaatgtcgctgatgaagtgcagaggtcaatggggtcgccacggccaaagaccacctggatgaaggcggatgaggtggaaaagtcatcatccggaatgcctattcgcattgaaaacccaaatcagttcgttccactgtacactgatcctcaggaggtgctggagatgaggaataaaataagggaacagaaccgacaggatgtcaagagtgcaggaccacagagccagctgttagcttctgttattgctgagaagtcgcgctcccctagcacagagtcccagcttatgtccaaaggcgatgaggacacaaaggacgattccgaagaaaccgttcccaatcccttctctcagctgactgaccaggaattggaggagtacaagaaggaggtggaacggaaaaagttggaacttgacggagaaaaggagactgccccagaagaacctggatccccggctaagtctgcccctgcctcacccgtacagtccccggctaaggaggcagaaaccaagtccccactggtctccccttcaaagtcacttgaggagggaaccaagaagactgaaacctcaaaggcggcaactacagaaccagaaaccactcagccagaaggcgtagtggtgaacggaagagaggaggagcaaactgctgaggaaatcctgagcaaaggcttgtcacagatgacaaccagcgccgacacggacgtcgacacctctaaagacaagacagagagtgtcacctcaggccctatgtctcctgaggggagcccctccaagagtccctctaagaaaaaaaagaagttccgaactccttccttcctgaagaaatctaagaagaaagaaaaagtcgaatcctag

SEQ ID NO: 213582 - DNA, 297 bp, synthetic construct
  misc_feature 1..297: note = Description of Artificial Sequence: Synthetic coding sequence
  source 1..297: mol_type = other DNA
atgtccgaggagaccgtccccgaggcagcaagcccaccaccaccccagggtcaaccttatttcgataggttctccgaggatgatcccgaatacatgagattgagaaacagggccgcagacttgcgccaggatttcaatctgatggagcagaaaaagagagtcactatgattctacaatccccctcatttcgagaagaacttgaaggtctgatacaagagcagatgaagaaggagtataagaaagaagtggaacggaagaagctggagctcgacgcacccggatggttctcctcttag

SEQ ID NO: 213583 - DNA, 1764 bp, synthetic construct
  misc_feature 1..1764: note = Description of Artificial Sequence: Synthetic coding sequence
  source 1..1764: mol_type = other DNA
atgtccgaggaaactgtccccgaagccgcttccccgcctcccccacagggccaaccttacttcgaccgtttctcagaggatgaccccgaatatatgcgacttcgtaatagggcagccgatctccgccaagattttaatctcatggaacagaagaagcgggtgacgatgattctgcagagcccctcatttagggaagaactggaaggcctcatccaggagcaaatgaaaaaaggaaataactcaagcaatatatgggcgttaagacagattgctgactttatggcctccaccagtcacgccgtgttcccaacatcttcgatgaatgtgtccatgatgacaccgattaatgacctgcatacagccgactccttaaatctggcaaaaggagagagattaatgagatgtaaaatctcttctgtgtaccgacttctggatctctatggctgggctcaactctccgatacgtacgtcacgctcagggtgagcaaagagcaggatcatttccttatatcccctaaaggcgtttcatgctccgaggtgacggcgagtagtctaataaaagtaaatattctgggtgaggtggtagagaaaggatcctcctgcttcccagttgatacaacaggattctgcctccacagcgccatttacgctgcccgacccgacgtcaggtgcattatccatctacacacaccagccacagccgcagtgagcgctatgaagtgggggctactcccagtgagccacaatgccctgttggtcggagatatggcctactatgattttaacggtgaaatggagcaagaagctgatcgaattaacctccagaagtgtctgggaccaacctgcaaaatcctggtcttgcgcaatcacggagtggtggccctgggcgacacagtggaggaagccttttacaaaatcttccatcttcaggccgcatgtgagatccaggtgtctgccctgagctcagcaggaggagtcgaaaacttgatcctgctggaacaggagaagcacagaccacatgaggtcggatccgtgcagtgggctggatctaccttcggcccaatgcaaaagagtcgattgggtgagcatgagtttgaagcattaatgcggatgctggacaaccttggctatcggaccggctacacatatcggcatccattcgttcaggaaaagaccaagcacaaatcagaggtcgaaatccccgctacagtcaccgcgttcgtgttcgaggaggatggagccccagtgcccgctttgcgacaacatgcccagaagcagcagaaagaaaagaccagatggttgaatactccaaatacataccttcgggtgaatgtggctgacgaggtccagagaagcatgggttcccctagacccaagacgacatggatgaaagccgacgaagtggaaaaatcctctagtggcatgcccatcaggatcgagaaccccaatcagtttgtacccctctatacggatcctcaggaagtgctggagatgcggaacaaaatccgtgaacagaatcgccaggatgtgaagtcagctgggcctcagtctcagctactggcctctgtgatcgcggaaaaatccagaagtccctccaccgagagccagcttatgtccaagggcgacgaggatacaaaggatgacagtgaggagactgtccccaatcccttctcacagctgaccgatcaggagcttgaggaatacaaaaaggaagtagagcgcaagaagcttgagctggatgcacccggatggttttcttcctag

SEQ ID NO: 213584 - DNA, 2181 bp, synthetic construct
  misc_feature 1..2181: note = Description of Artificial Sequence: Synthetic coding sequence
  source 1..2181: mol_type = other DNA
atgtcggaagaaacggttccggaagcagcctctcctcccccaccccagggacagccatatttcgatcgtttctcagaggatgatcctgaatacatgcgacttaggaatagagcggctgatcttcgacaagactttaatctcatggaacagaagaaacgcgtcaccatgatcctgcagtctccctcctttagagaagaattggaaggacttattcaagaacaaatgaagaagggtaacaatagttctaacatatgggccttgaggcagatcgctgactttatggcctctacttcccatgccgtctttcctacttcttctatgaacgtatctatgatgacccccattaacgatctccacaccgccgacagcttgaacctggccaagggagaacgcctgatgaggtgcaaaatcagcagcgtctatcgcctcctggacctctatggttgggcccagttatcagatacctacgtgacactaagagtttctaaggaacaggaccactttctgatatcaccgaaaggtgtatcatgctctgaggtcactgccagttccctgataaaggtgaacatcttaggagaagtggtggagaaaggatcttcttgctttcctgtcgacaccaccggtttttgcctgcattccgccatctacgcagctcggccagatgtgcgctgtatcatacacctccacacacccgctaccgcagcagtctcagctatgaaatggggcctcttgcctgtctcccacaatgccttactagtgggcgatatggcttattatgactttaatggcgagatggagcaggaggctgacaggataaacttgcagaagtgcctgggaccaacttgcaaaatactggtgctgagaaatcacggggtcgtagctctcggcgataccgtggaagaggcgttctataagatcttccaccttcaggcagcatgcgaaatccaggtgtctgccctgtccagcgctggcggagttgagaaccttattctgctggagcaggaaaaacacagaccacacgaggtcggcagcgtgcagtgggccggaagtacgttcggccctatgcagaaaagtagactcggtgagcacgagttcgaggctctcatgaggatgctggataacctgggatatcgcaccggatatacctaccgccaccccttcgttcaggaaaaaactaaacacaaaagcgaggtggagataccagcaacagtcacagcatttgtgtttgaggaagatggggctcctgtgcctgcactgcgccagcacgcacagaagcaacaaaaggagaaaacccgttggctgaatacccctaacacatacctccgggtgaacgtggcagatgaggtccagcgctcaatggggtcacctcggcctaaaactacgtggatgaaggcggacgaagtggagaaatctagcagcggaatgccaatcaggattgagaatcctaaccagtttgtgcccctgtacactgacccccaggaagtgctcgagatgcgtaacaagattagagagcaaaatcggcaggacgtcaaatctgccggtccccagtcccagttgcttgcttctgtcatcgcagaaaagtcccgtagcccttctaccgaatcccagctcatgagtaagggtgacgaggacaccaaagacgactcagaagagacggtccctaatcctttcagtcaacttacggatcaagagctggaggagtacaaaaaggaagtggagcggaagaagctggaactcgatggagagaaagagacagcccctgaagagcctggctcacctgccaaatccgcccctgctagccccgtacaaagtcccgctaaggaagccgaaaccaagtcaccactagtcagcccctcaaaatccctggaggaagggaccaagaaaacagaaacaagcaaagccgcaacaacagaaccagagactacacagccagagggggtggttgtgaatgggagggaggaggaacaaaccgctgaggaaatactgtcaaaaggtctttcacagatgaccacgagtgctgacactgacgtcgacacttcaaaggacaaaactgaaagcgtaacgagtggcccaatgagtcccgaaggatccccaagcaaatctcctagtaaaaagaagaagaagtttcgtacaccaagctttctgaaaaaaagtaagaagaaggaaaaggtggagagctag

SEQ ID NO: 213585 - DNA, 2181 bp, synthetic construct
  misc_feature 1..2181: note = Description of Artificial Sequence: Synthetic coding sequence
  source 1..2181: mol_type = other DNA
atgagcgaggagaccgtccccgaagccgcttccccaccacctcctcagggacagccgtatttcgaccggttctcagaggatgaccccgagtatatgaggttgcgcaaccgtgcagccgatttgcggcaggacttcaatctgatggagcagaaaaaacgggtgacaatgatccttcagagcccatcattcagggaagaattagaaggacttattcaggagcaaatgaagaagggaaataacagcagtaacatctgggcacttcggcaaatcgctgatttcatggcaagtacatctcacgcagtcttccccacttcatcaatgaatgtatccatgatgacaccaatcaatgatcttcatacggccgattcactcaatctcgccaagggagagcgcctcatgaggtgtaagatctcctctgtctacaggttactggatttgtacggctgggcccagctctctgacacgtatgtcacgctccgagtgtctaaagagcaagaccactttctgatttcccctaagggtgtgtcttgctcggaggtgacagcctcaagtctgatcaaagtgaacatactgggtgaggtggttgaaaaaggtagttcatgtttcccggttgatacaacaggtttctgcttacattccgctatctatgctgctcgtcccgatgttcgctgtataatacacttgcacactcctgccacagctgcagtatcagcaatgaaatggggcctactccctgtctctcataacgctctcctagttggggatatggcttactacgactttaatggagagatggaacaggaagccgacaggataaatctccagaagtgtctgggaccaacatgcaagatcctggtcctgaggaatcacggcgtggtggcccttggcgacaccgtggaagaggcattctacaagattttccatctgcaagccgcatgtgagatccaagtgtccgccctttcgtcagcgggaggggttgaaaatcttatccttctggaacaggagaaacatcgaccccatgaagttgggtccgtgcagtgggccggatcaacattcggccctatgcagaagagcaggctgggggaacatgaatttgaagccctgatgcgcatgctcgataacctcggttatcggacagggtacacttataggcacccttttgtacaggaaaaaaccaaacacaaatcagaggtggagatccccgctactgtgacagcttttgttttcgaggaggacggagccccagtgcccgctctgcgccaacacgcgcaaaaacagcagaaggagaaaactcgatggctcaacacaccaaatacataccttagagttaacgttgcagatgaagtgcagagaagtatgggctctcccaggcctaaaacaacctggatgaaagcagatgaggtggagaaatctagctccggaatgcctattaggattgagaatcccaatcagtttgtgcctttatatacagatccccaagaagtgctggagatgcgaaacaagattagagaacagaaccgccaagatgtgaagtcagccggaccgcagagccaactcctggcctcagttatcgccgagaaatcaagatctccttcaactgaatcacagttgatgtcaaaaggggatgaagacacaaaagatgatagtgaggaaactgtcccaaacccattctcccagttgactgatcaggagttggaggagtacaagaaggaggtcgagaggaaaaaattggaactggatggggagaaggaaacagctccagaagagccaggatcgcccgctaagtccgcgcctgccagtcccgtccagtccccagctaaggaagccgagacgaagtcacctctagtgtctccatccaaatccctggaggaggggacaaaaaagaccgagacaagcaaggccgctaccacggagcctgaaaccacacagccagaaggcgttgtagttaatggccgagaggaagaacagacagcggaagaaattctgtccaaaggactgagtcagatgaccacctcagccgatacagatgtggacacatctaaggacaagacagaatccgtcactagcggacctatgtctccggaggggagtccatccaaatccccctctaagaaaaaaaagaagttcaggacccccagctttctcaaaaagtcaaagaaaaaggagaaggtggaaagttag

SEQ ID NO: 213586 - DNA, 1680 bp, synthetic construct
  misc_feature 1..1680: note = Description of Artificial Sequence: Synthetic coding sequence
  source 1..1680: mol_type = other DNA
atgtccgaagaaacggtccccgaagctgccagccctccaccacctcagggccagccttatttcgaccgctttagcgaggacgacccagagtatatgcgcctgaggaacagggccgcagacctgcgccaggacttcaaccttatggaacagaagaagcgtgttacgatgatactccagagcccgtccttccgcgaggaactggaagggttgattcaggaacagatgaagaaggggaacaattcttccaacatatgggccctccgccagattgctgacttcatggcctcaacctcacacgccgtgttcccaacgagttccatgaatgtatccatgatgacccccattaatgatctgcacacggccgactcgctcaacctggcgaaaggagaaaggctgatgcggtgtaagattagctcggtctaccggctattagatctgtacggctgggctcagctctccgacacctatgtgaccctgagggtgagtaaggagcaggaccacttcctgatctcccctaagggagtaagttgctcagaagtgacagcatccagtttaatcaaggtgaacatcttaggtgaagtcgtcgagaaaggatcctcatgcttcccagtggacaccaccggattctgtttgcactctgcaatttatgcagccagaccagacgtgaggtgcattatacacctgcatactcccgctaccgccgcagtgtctgcaatgaaatgggggctcctccccgttagtcataacgcactgttggtgggagacatggcttactatgacttcaacggggaaatggagcaagaagctgataggattaaccttcagaagtgcttgggccctacctgtaagatccttgtattacgcaatcatggcgtggtagccctgggcgatacggtcgaggaggcattttacaaaatcttccacctccaggctgcgtgtgaaattcaggtctctgccctatcatccgccggtggtgtggaaaatctgatcctgttagaacaagaaaaacatcggccacacgaagtcggctcagtccagtgggcaggcagcaccttcgggccaatgcagaaaagcagattgggggagcatgagtttgaagctttgatgaggatgctggacaacttgggatatagaactgggtatacgtatagacatccattcgtacaggagaaaacgaaacacaaaagcgaagttgagattcccgctaccgtgactgcttttgtattcgaagaagatggcgcacctgtgcccgctctgaggcagcacgcccagaagcagcagaaagagaagacacggtggttgaatactccgaacacttacctgcgggtgaacgtggcagacgaagtacagcggagcatgggatctcctcgccctaaaacgacttggatgaaagccgatgaagtggagaaatcaagttccgggatgcctatcaggatcgaaaacccaaaccagttcgtgcctctttatactgatccccaagaagttctggaaatgcgcaataaaatcagggagcagaacagacaggacgtaaaatccgctggaccacaatctcagctcctcgcaagcgtgatcgccgagaagtcaaggtcacccgtggaacagcgcttacccctgaccggcggagaaacatgcctaccttccggaagttccgttcccggtgccggactccaagacccttag

SEQ ID NO: 213587 - DNA, 681 bp, synthetic construct
  misc_feature 1..681: note = Description of Artificial Sequence: Synthetic coding sequence
  source 1..681: mol_type = other DNA
atgtcagaagagaccgtgcctgaagccgcttcgcctccacctccccagggacagccttacttcgacaggtttagcgaagacgaccccgagtatatgagactccggaaccgtgccgctgatctcagacaggatttcaacctcatggagcaaaaaaaacgtgttaccatgatactccaatccccgtccttcagggaggagctggagggccttatccaggagcaaatgaaaaaaggtaacaattcaagtaacatatgggcgctcaggcaaatcgccgatttcatggcgtctacctcccacgcagtgtttcccacaagttcgatgaacgtcagcatgatgacgcccataaatgacctgcacactgccgacagtctcaatctggccaagggggaacggctgatgaggtgcaaaatcagctccgtgtacagactgttagatctctatgggtgggcccagttgagcgacacatatgtaaccctccgtgtgagcaaggagcaggatcacttcttgatcagtccaaagggggtgagctgcagcgaagttaccgcatcctccctgatcaaggttaacatcctcggcgaagtagtggaaaagggctccagctgcttccctgtggacaccaccggcttctgtctacattccgctatttatgctgctcgcccagatgtgcggtgcatcatatag

SEQ ID NO: 213588 - DNA, 432 bp, synthetic construct
  misc_feature 1..432: note = Description of Artificial Sequence: Synthetic coding sequence
  source 1..432: mol_type = other DNA
atgtcagaggagactgtgcctgaagctgcctcccctccccctccacagggacagccttacttcgatcgattcagtgaagacgatccggagtacatgaggctgcgaaatcgagccgcagatctccggcaggactttaacctgatggagcagaagaagagggttactatgattctccagtccccatcttttcgggaagagcttgagggcttaattcaggagcagatgaaaaaagggaataacagcagcaacatttgggccctgcggcagatcgccgactttatggcatcaacctctcacgcagtcttccctacctcaagtatgaatgtcagcatgatgacgcctatcaatgacctgcacaccgctgatagcctgaacctggccaaaggtgaacggttgatgcggtgcaaaattagctccgtgtatcgcttatag

SEQ ID NO: 213589 - DNA, 1728 bp, synthetic construct
  misc_feature 1..1728: note = Description of Artificial Sequence: Synthetic coding sequence
  source 1..1728: mol_type = other DNA
atgcccaggagaagagtcccgggtgccaactgcaaaccaaccggtaagatgtcagaggagaccgtgcctgaggccgcttccccaccacccccacaaggtcagccctacttcgaccgcttcagcgaggacgaccctgaatacatgcggctcagaaatcgtgccgctgaccttcggcaggactttaaccttatggagcaaaaaaaaagggtgaccatgattcttcaatccccttcgttcagagaggaactagaggggcttatccaggaacagatgaaaaaagggaacaattcatcgaatatctgggccttaagacagattgcggactttatggcctccacatcacacgcggtgttccctacaagttcaatgaatgtctccatgatgactcctatcaatgatctccatacagctgattctcttaacctggccaagggcgagcgattaatgcgctgtaaaatcagctccgtgtaccgattattggatctttatggatgggctcagctgagcgatacatacgtcactctccgggtgagtaaagaacaggatcactttctgattagccccaagggagtgtcctgtagcgaagtaaccgctagctccctgattaaagtgaacatcctcggcgaggtggtagaaaaaggcagctcttgctttccagtagatactaccggattctgtttacatagcgcgatttatgctgcccgaccagatgtgcggtgcatcatccacttacacactcccgcaaccgctgccgtcagtgctatgaaatggggactgctgccagtttcccacaacgcacttctggtgggtgacatggcctattacgactttaacggtgagatggagcaggaggcagataggatcaatctccagaagtgcctgggacctacctgtaagatccttgtgctgagaaaccatggagtcgtggccctgggagacactgtggaggaggccttctataagatcttccacctccaggccgcatgtgagatacaggtcagcgcactctcctctgccggaggcgtagagaatttgatcttactggagcaagaaaagcatcgaccccatgaagtgggctcagtgcaatgggccggatctacatttgggccaatgcagaagagcagactcggggagcacgaatttgaggctctgatgcgaatgctggataacttgggataccgaacaggctatacataccgccatccttttgtgcaagagaagaccaaacacaagtcggaggtcgagatcccggctaccgtcaccgcattcgtttttgaggaagacggtgcacctgtccccgcactgaggcaacatgcccagaagcagcagaaggagaaaacaaggtggctgaacacgccgaacacttacctgcgggttaacgtggcagacgaggtccagagaagcatggggtctcctcggccaaagacaacgtggatgaaagcagatgaagtcgaaaagagcagctctggcatgccgatacgaatcgaaaaccccaaccagttcgttccactgtatacagatccccaagaggttctcgaaatgaggaataagatcagagaacagaacaggcaggacgtgaaaagtgcaggtccacagagccagttactggcttccgtaattgctgaaaagagtcgcagtccagtcgagcagaggcttcctctgacaggtggcgagacatgtctacctagtggctcatccgtacctggagctgggctgcaggacccatag

SEQ ID NO: 213590 - DNA, 54 bp, synthetic construct
  misc_feature 1..54: note = Description of Artificial Sequence: Synthetic coding sequence
  source 1..54: mol_type = other DNA
atgtccgaagagacggtacctgaagccgcatccccccctcctccacaggggtag

SEQ ID NO: 213591 - DNA, 846 bp, synthetic construct
  misc_feature 1..846: note = Description of Artificial Sequence: Synthetic coding sequence
  source 1..846: mol_type = other DNA
atgagcgaggaaactgttcctgaagccgctagcccccctccaccccaaggacaaccctatttcgaccggttcagcgaggacgaccctgaatatatgaggctcagaaaccgtgcagcggacttgagacaagattttaatttgatggagcagaagaaacgggttacaatgattctccagtccccatcctttagggaagagctggagggcctcattcaagagcaaatgaaaaaaggcaataacagttcgaacatctgggccctacgacagatcgctgactttatggcctcaacatcccatgcagtgttccctaccagcagtatgaacgtgtctatgatgacacccattaatgatctgcacaccgcagactccctgaacctggccaaaggagagcgtctgatgaggtgcaagatatcctccgtgtatcggttgttagacctgtatggttgggcacaactttctgacacatacgtgactctgagagtgtctaaggagcaggaccattttctaatctctcctaaaggcgtgagctgtagtgaggtgacagctagctcgctggtgagtgaggtgctcgagatgcgcaacaagatccgcgaacaaaacaggcaggatgtgaagagcgcaggccctcaatctcagctgttggctagcgtgatcgccgagaagtcccgcagcccaagtaccgagtcccagctcatgtcaaaaggcgacgaagacacaaaagatgattccgaggagaccgtgccgaacccattcagccagctgaccgaccaagagttggaggagtataaaaaggaggtggaacggaaaaagcttgaactggacgcccctgggtggttctcaagctag

SEQ ID NO: 213592 - DNA, 1932 bp, synthetic construct
  misc_feature 1..1932: note = Description of Artificial Sequence: Synthetic coding sequence
  source 1..1932: mol_type = other DNA
atgagtgaggagaccgtgcctgaggccgcatctccaccccctcctcagggtcaaccatacttcgaccgctttagcgaggatgacccggaatacatgaggctgcgtaatcgcgcagcggaccttcggcaggactttaacctgatggaacagaagaagagggttactatgatcctgcagtccccctccttcagggaggaactggaaggacttatccaggaacagatgaagaaagggaacaacagctcaaacatttgggctcttagacagatcgcagactttatggctagcacttcccatgccgttttccctacatcctcgatgaacgtttcaatgatgaccccaatcaacgacctgcacacggcagatagcttaaatctggccaaaggggagaggcttatgcgctgtaagatctcttccgtataccgtcttctggacctctacgggtgggcccagctatccgatacttatgtcacactcagagtgagcaaagagcaagatcactttcttatctcccctaagggcgttagctgttctgaagtaaccgccagctcattaatcaaggtgaatatcctgggagaagtggtggaaaaaggcagttcctgctttccagtggacacaaccggattttgccttcactccgccatctacgccgcacgtccagacgtacggtgtatcattcacttgcacacaccggctacggcagcagtgagcgccatgaagtggggcctacttccggtatcccacaatgcccttttggtcggcgatatggcgtactacgacttcaacggtgaaatggagcaggaggctgaccgaattaacttacagaagtgtttgggccctacctgcaagatcctcgtgttgcgaaaccacggagtggtggccttaggtgatacagtcgaggaggccttctacaagatttttcacctgcaagctgcctgcgagattcaggttagcgccctttcctcagccggtggcgtggaaaatctcatcctgctggagcaggagaaacatcggccacacgaggtcggctctgtccagtgggccggatccacttttggtcctatgcagaagagcagattgggcgagcacgaattcgaggcgcttatgcgtatgctcgacaacctagggtaccgcacaggatacacctatagacaccctttcgtccaggagaaaaccaagcacaaatccgaggttgaaatcccagcaacagtgactgctttcgtgtttgaagaggatggtgctcccgtgcccgcactcaggcagcacgctcaaaagcagcagaaagagaaaacgcggtggctgaacacccctaacacttacttgagagtgaatgtggcagatgaggtccagcgctctatgggctcacctagacctaaaacaacctggatgaaggccgacgaggtggagaagagcagctccggcatgcctataagaatcgagaacccaaaccagtttgtgcctctgtacacagaccctcaagaggtgctggagatgcgtaacaagatccgcgaacagaacagacaagacgttaagtcggcaggtcctcagtctcagctgttagcctcagtgattgcagagaaaagcagaagcccctccacagagagccagctcatgtcaaaaggagacgaagacactaaagacgatagcgaagagaccgtacccaatcctttttcccagctgaccgaccaagaactggaggaatacaagaaggaggtggagaggaaaaagctggaactggatgagacgggccaggaaagagagccgggttctggtcccgctgtgtgcgagtttttctcagtggcactgcacatttggagcaatattctggaacgcaagaagctgcctcagaaaagcctggctcacttgcagagcctgcacctgctgttacagtgccgagcacaaaggcgccgacagcgccagagagccttgtag

SEQ ID NO: 213593 - DNA, 2025 bp, synthetic construct
  misc_feature 1..2025: note = Description of Artificial Sequence: Synthetic coding sequence
  source 1..2025: mol_type = other DNA
atgtcttcagatgcatcacagggtgtaatcacgactccaccgcctccaagcatgcctcacaaagaaagatattttgaccgaatcaacgagaacgatcctgagtacattcgggagcgaaatatgagtccagatctccggcaggatttcaacatgatggagcagcgaaagagggtgacgcagattttgcagtcacccgcatttcgagaggacctcgagtgtctgatccaggaacagatgaaaaagggccacaacccgactgggctactggcgctgcagcaaatcgcagattatattatggctaactcctttagcggattctcctcccccccattaagcctgggtatggttacaccaatcaatgacctgcccggagccgatactagttcatacgttaaaggtgagaagcttactaggtgtaagcttgcatctttatatcgccttgtcgatttgttcggatgggcccatctggctaatacatacatctctgtgagaatctcaaaggaacaggaccacattatcatcattcccaggggactatccttctccgaggcgactgcaagcaatctggtaaaggtgaacattattggtgaagtggttgatcagggctcaaccaatctaaagattgaccacaccggtttcagccctcacgctgccatctattcgaccaggcccgacgtgaagtgcgttatccacatccacacattggcaactgctgcggtaagctccatgaagtgtgggatactccccatatctcaggagagtctgctcctaggggatgttgcctactacgattaccagggctcactagaagaacaggaggaaaggatccaactgcagaaggtcctcgggcctagttgtaaagtgctggttctgaggaaccacggcgtggtcgcactcggggaaactcttgaggaagctttccactacatcttcaacgttcagcttgcgtgtgagatccaggtacaggccctggcgggtgcgggaggtgttgataatctacatgtgctggattttcagaaatataaagcattcacctacaccgtggccgctagcggcggaggcggagtgaatatggggagccatcagaagtggaaagtcggcgaaatcgaatttgagggactgatgaggaccctcgacaacctcggttaccgcacaggttatgcatacaggcaccccctgatcagggaaaagccccgacacaagagcgacgtggaaattcctgctactgtgacagcctttagcttcgaggacgacaccgtccctctgtcacccctgaaatatatggcccaacggcagcaaagggaaaagacaagatggttgaattcaccaaacacttatatgaaggttaacgttcctgaggagtcacgcaatggggaaacatcacccaggacaaagattacttggatgaaagccgaggactcgagcaaagtgtccggtggaactccaatcaagattgaggatcccaatcaattcgttcctcttaacaccaacccgaacgaggttcttgagaaaagaaataagatcagagagcaaaataggtatgacctaaaaactgccggtcctcaatcacagctcctcgctggtatagtggttgacaaaccgccatcgaccatgcagtttgaagatgacgatcacggacctcccgcaccacctaaccctttcagtcacttaactgaaggtgaactggaagagtataagaggacaattgaacgcaagcagcaaggactcgaggaaaaccacgaattattctccaagagttttatcagcatggaagttccggttatggtggtaaatggaaaggatgacatgcacgacgtggaggacgagctagccaaaagggtctccaggctgagcacaagtaccactattgagaatatcgagattacaattaaaagcccggagaaaattgaggaagtcctgtcacccgagggatccccatctaaaagcccatccaaaaaaaaaaaaaagtttcgcacaccctccttccttaaaaaaaataagaaaaaggaaaaagtggaagcgtag

SEQ ID NO: 213594 - DNA, 2121 bp, synthetic construct
  misc_feature 1..2121: note = Description of Artificial Sequence: Synthetic coding sequence
  source 1..2121: mol_type = other DNA
atgtccagcgatgcctctcagggcgtgattacaacacccccaccaccatctatgccccataaggaaagatacttcgacagaatcaacgaaaatgatcctgagtacatacgcgaaagaaacatgtcgcccgacttacgacaggatttcaacatgatggagcaaagaaagcgcgtgacccagatcttgcagtcccctgcatttcgcgaggatcttgagtgtctcatccaggaacagatgaagaagggccataatcccactggtctgcttgctctccagcagattgcagattacatcatggccaattccttttccggattcagttccccccctttgagcctgggaatggtgacaccgattaacgatctccctggcgctgatacaagtagttacgttaagggcgaaaagttgacaaggtgtaaattagcatccctttacagactcgttgatctattcggatgggcacacctggcaaatacctacatctcggtgcgcatctcgaaagaacaggatcatatcattatcattccacgaggtttatcattttcagaagccacggcttccaacttggttaaggtcaacattatcggggaagtcgttgaccagggctcaaccaatctgaaaatcgatcatacaggcttcagccctcacgccgcaatctattccacgcgtccagacgtgaaatgtgtcatccacattcatacattagcgactgccgctgtctcttctatgaaatgtggaatcctgccaatctctcaggaatctctacttttgggcgatgtggcatattacgactaccagggatctttggaggagcaggaagaacgtatacagctccagaaagtgctgggacccagctgtaaggtattagtgcttcgcaatcatggcgtggttgccctgggcgaaacattggaagaggcttttcattatatctttaacgtgcagctggcctgtgaaatacaggtccaggcattggccggtgccggaggggttgataatctgcacgtgctagattttcagaaatataaagccttcacctacaccgtagctgcgtccgggggaggaggggtgaacatgggcagccaccagaagtggaaagtgggagaaattgaatttgaaggactgatgcgcacccttgataacctgggctacagaacggggtacgcctatcggcatccgctgatacgagagaagcctcgtcacaagagcgatgtggaaatcccggcaacggtcacagctttcagttttgaggatgacaccgtgcctcttagtccacttaaatacatggcacaaaggcagcagagagaaaagacccgctggttgaattcccctaacacttatatgaaagtaaatgtgcccgaagagagccgaaacggagaaacttctccgaggacaaagattacatggatgaaggcagaggactcatctaaagtatccggcggaacaccaattaagatcgaagatcccaaccagttcgtccctcttaataccaatcccaatgaagtcttagagaaacgtaacaagattcgggagcagaaccgctatgacctaaagacagccggtcctcagtcccagctgctggcgggaatcgtagtcgacaagcctccctcgactatgcagttcgaagacgacgaccatggacctccagcacccccaaacccctttagccacctgaccgaaggggaactcgaagagtacaagcgaactatcgagcgtaaacagcaggggctggaggacgccgagcaagagttgctctctgacgacgcttccagtgtgagtcagatccagtcgcaaacacagtccccacagaacgtgcccgaaaaacttgaagaaaaccacgaactgttttctaaatctttcattagcatggaggtaccggttatggtagttaatggaaaagatgacatgcatgacgtagaagatgaactcgcaaaacgagtctcaagactctctactagcacgacaatcgagaacatagagatcaccatcaagtctccggaaaagatcgaggaagtccttagtccagagggttctccatccaagagcccgagcaagaagaagaagaaattcaggacgcctagcttcctaaagaagaacaaaaaaaaagagaaggtggaagcgtag

SEQ ID NO: 213595 - DNA, 2025 bp, synthetic construct
  misc_feature 1..2025: note = Description of Artificial Sequence: Synthetic coding sequence
  source 1..2025: mol_type = other DNA
atgtccagcgacgctagtcaaggtgtgatcaccactccccctcctccttcgatgccacacaaggaacgatatttcgaccggataaatgaaaatgatccagaatatattcgggaaaggaacatgtcccccgatcttcggcaggacttcaatatgatggagcagaggaagagagttacccagattcttcagtcccctgcttttagagaagacttggagtgcctcatacaggaacaaatgaagaaaggccataaccctaccgggttgcttgcgcttcagcagatcgcggattacatcatggcaaactcttttagtggcttctcttctcctccgctaagcttaggcatggtgacacccatcaacgacctgccgggagccgatacttcttcctacgtgaaaggagaaaagctgactcgctgtaagttggcaagtctgtatcgcctggtggatctgttcggctgggcccacctagctaacacctatattagtgtgcgtatatctaaggaacaggaccatataatcattattccccgtggccttagcttctcagaagctactgcatcaaaccttgtgaaggtcaacattatcggggaggtggttgaccagggctccacaaacctgaaaatcgatcacacagggttcagtcctcatgccgcaatttattcaacgcggccagacgtgaagtgtgtgattcacatccacactctcgctactgccgcagtgtcgagcatgaaatgtggcatcctgcccatttcgcaggagagcttgctgctgggcgacgtggcatattacgattaccagggctccctggaagaacaagaagaacgaattcagcttcagaaggtcctgggccctagctgcaaagtgctggtgttgagaaaccatggcgtggtagcccttggggagaccctggaggaagcatttcactatatctttaatgtacagctggcctgcgagatccaggtccaggccttggctggagccggaggggtcgacaatctgcacgtgctggattttcagaagtacaaggccttcacctatacagttgccgcttccggagggggaggcgtgaatatggggagtcaccagaagtggaaagtaggggaaatagagttcgaggggctgatgcgcactctagacaatctgggttaccgaacgggttacgcctatcggcacccccttattagggaaaagccaaggcacaagagcgacgtggagatcccggctacagtgacagccttctcatttgaggacgatacagtaccgctctctcctctaaagtatatggcacaaaggcagcagcgggagaagacgcggtggctcaatagcccgaatacctacatgaaggtcaacgttcctgaggagtcacgcaacggcgagactagtccacgtactaaaatcacttggatgaaggcagaggactcctccaaagtcagtggcggtacaccaattaaaatcgaggatcctaaccaatttgtgcctctaaacacaaatcccaatgaggttctggagaaaaggaacaaaattcgcgagcaaaatcgatacgatctcaagacagccggaccccagagccagttgcttgctggaattgtggtcgataagcctccgagcaccatgcagttcgaagacgacgaccacggccctcctgccccacctaaccccttctcacatttaacagaaggggagctggaagaatacaagcggacaatagagcgcaaacagcagggcctggaggagaatcatgaactcttttctaagagctttattagtatggaggtgccagtcatggtggtgaatggcaaggacgacatgcacgacgtcgaggatgagctggcaaagagggtgtctcgcctctcaaccagcacaaccatcgagaacatcgaaataacaatcaaaagtccagaaaaaatagaggaggtgctatctcccgagggctccccgagcaaaagtccatctaagaaaaaaaaaaaattcaggaccccatcttttctcaagaaaaacaagaaaaaggaaaaggtagaggcctag

SEQ ID NO: 213596 - DNA, 543 bp, synthetic construct
  misc_feature 1..543: note = Description of Artificial Sequence: Synthetic coding sequence
  source 1..543: mol_type = other DNA
atggctgacagcgagctgcagttagtggaacaaagaatcagaagcttcccggacttccctacgcccggtgtcgtgttcagggacatatcccctgtcttaaaggatcccgcatcatttcgcgcagcgatcgggctgctggccaggcatcttaaggcgacacatggcggtaggatcgactacattgctggcctggacagtcgcggttttctttttggcccaagtttagctcaggagctgggcctcggctgtgtcctcattcggaaacgcggtaagttaccagggccaaccctgtgggcgtcttatagcctggaatacgggaaagccgagctcgaaatacagaaagatgccctcgagcctggacaacgggtcgtagtcgtggatgacctgctggcaaccgggggtacaatgaacgccgcatgtgagttgctgggtcgcctgcaagcagaggtgctggaatgcgtgagtctggttgaactgactagtctgaaggggagggagaaacttgcgcctgtgccgttttttagcctgctgcagtatgaatag

SEQ ID NO: 213597 - DNA, 405 bp, synthetic construct
  misc_feature 1..405: note = Description of Artificial Sequence: Synthetic coding sequence
  source 1..405: mol_type = other DNA
atggccgattccgagctacagttggtggagcaacgaattcgaagtttccctgacttcccaacgcccggagtggtctttcgggacattagtccagtgctgaaggatcctgcttcgtttagagccgctatcgggctccttgccaggcatctcaaagcgacacatggtggccgaatcgactacattgccggtctggacagcaggggattcctgtttggaccctccctggctcaggagctggggctcgggtgcgtgctgattcgcaaaagggggaaattacccggtcccactctgtgggcatcctattcattagaatacgggaaggcggaactggaaattcaaaaagatgctttggaacccggtcagagggtagtggtcgtggacgacttactagctacaggcgtatag

SEQ ID NO: 213598 - DNA, 555 bp, synthetic construct
  misc_feature 1..555: note = Description of Artificial Sequence: Synthetic coding sequence
  source 1..555: mol_type = other DNA
atggatgggctgcggcaacgtgtcgaacacttcctggaacagaggaacctagtcaccgaggtgctgggtgccctcgaggctaaaacaggcgtcgagaagaggtacctggccgctggagccgtcacccttctgtccctttacctgctttttggatacggcgctagtctcctgtgtaacttaattggcttcgtgtatcctgcatatgcaagcatcaaggccatagagtcgccgtctaaggacgacgacaccgtgtggttaacatattgggttgtttatgcccttttcgggctggctgaattcttctcagacctgttgctgtcttggtttccattctactatgttgggaagtgcgcttttctgctattttgcatggccccaaggccgtggaacggtgcgttaatgctgtaccagagggtggtgcgaccgttattcttgcggcaccacggagccgtggatcgaataatgaatgacctcagtgggagagcactggacgctgctgcagggattaccaggaacgtaaaacctagtcagacaccccagccaaaggacaaatag

SEQ ID NO: 213599 - DNA, 6090 bp, synthetic construct
  misc_feature 1..6090: note = Description of Artificial Sequence: Synthetic coding sequence
  source 1..6090: mol_type = other DNA
atggcttcctctgttgccccttacgaacaactcgtgcggcaggtggaagcattaaaagctgaaaattcgcatctccggcaggagcttcgtgataactcctcccatctgtccaaattggaaacagagacatccggaatgaaggaggtcctcaagcatctacaagggaaactcgaacaggaggctagggttctggtgagtagcggccaaacagaggttttggagcaacttaaagctttgcagatggacatcacctcgctgtacaacctaaaattccagcccccaactctggggcctgaaccagccgctcgtacccccgaggggagcccagtgcatggcagcggcccttctaaagactcctttggggagctttcacgagccacaattcgcttactagaggagcttgaccgcgagcggtgctttctcctcaatgagatcgaaaaggaggagaaagaaaagctctggtactatagccagctccaaggcctgtccaaacgcctggatgagctccctcacgttgactatgagatgcacaagatgactcgggatcctcttaacttggccttgcgcagatatgctggaatgacactcaccaatctgacatttggtgacgtagcaaacaaggccaccctctgcgcccgacggggttgtatggaagccatcgtcgcacagctcgcctctgactcggaggagttacatcaggtggtgagcagcatcctgcgcaatctttcctggcgagctgatatcaactcaaagaaggtcttacgcgaggcaggctctgttactgcgttagtccagtgcgtcctgcgcgctaccaaggaaagcaccctgaagtcggtgttgagtgcgctgtggaacctgagcgcccattccactgaaaataaagcggctatttgtcaagtagacggtgcactcgggtttctggtgtcaaccctgacttataaatgccaatcgaacagcctagccatcatcgaatccggaggaggaatcttgcggaatgtatcttcactggtggctacacgagaggattaccgccaggtccttcgcgatcataattgccttcagacactgctacaacacttgacttcgcacagcctgaccatagtaagcaatgcctgtggcacactctggaacctcagtgctaggtccgcccgtgaccaggaactcctatgggatctcggtgccgtggggatgctccggaatctcgtgcattcaaaacacaagatgattgccatggggagcgccgctgcccttaggaacctgctcgcacacaggcctgccaagcaccaggctgccgcaacagccgtgagcccgggttcatgcgtgccctccctgtatgtgcggaaacagcgcgctctggaggccgaactcgatgctcggcaccttgcacaggctttagagcacctcgagaaacaggggcctcctgccgctgaagccgcaaccaagaagcccctgcctcccctgaggcacctcgatgggctcgctcaagactatgcaagcgattccggctgcttcgacgacgatgacgcgcctagctctctggcagccgcagcagctacgggtgagccagcctcaccagcagcgctcagtttgttccttggttccccattcctgcaggggcaggctctggccagaacacctcccaccaggagaggtggtaaagaggccgagaaggacacatccggcgaagccgcagtggcagcaaaggcgaaggctaagctcgctctcgcagtcgctcggatagaccaactggtggaggacatctcagccctgcacaccagttctgatgattcctttagcctgagcagcggtgatcccggacaggaggcaccccgtgaggggagagcccagtcgtgcagtccttgcagaggcccagaagggggtcgtcgcgaggctgggagtcgcgcacatcccctactacggcttaaggccgctcacgcgtctctatccaacgactccctcaacagcgggagcgcctcagatgggtattgcccgcgagaacatatgctcccttgccccttagccgcattagcttccaggagagaggatcccagatgtggccagccgagaccttccagactggatttggatctgcccggttgtcaagccgaacctcctgccagagaggcaacttctgcagatgctcgtgtcaggactatcaagttaagccctacataccagcacgtgccccttctggagggcgctagtagggctggcgctgagcccttagcgggaccagggatatcgcccggtgccaggaagcaagcctggctgcccgctgatcatctgtcaaaagtcccagagaaactggccgcagccccattgtccgtggcgagcaaggcgctccagaaactcgccgctcaggaaggtccactgtcactctcacggtgctcttcactcagtagcctgtcctccgcgggacgccctgggccaagcgaaggtggggatcttgatgactcagactcctccctggaagggctggaagaggccggtcctagcgaggctgaacttgacagcacctggcgcgctcccggtgccacaagcctccccgttgcaattcctgctcctaggcgaaatcggggaaggggactcggggtggaggatgcaacaccatccagttcctccgaaaattacgtgcaagaaacaccactcgttttatctcgctgctcttctgtcagcagcctgggcagcttcgagagtcccagtatcgcgtctagtataccctctgagccatgttctggccagggaagcggtacgatatccccatcagaactgcccgattctccaggacagacaatgccccctagcaggtcaaagacacctccgctggcacccgctccacaggggccaccagaggccactcagttttctctccagtgggagtcatacgtcaaacgttttttagatatcgctgattgcagagagaggtgtaggttgcccagtgagctggatgccggatcagtgagattcaccgtggagaagcccgacgagaatttctcttgcgcctccagcctgtcggccctggccttgcacgagcactacgtgcagcaggacgtcgagctccgcctactgccaagtgcctgtcctgagaggggtgggggagcgggaggcgctggcctacattttgctgggcaccggcgacgcgaggaaggtcccgctcctacgggatcaagaccgagaggggctgctgatcaggaactggagctgttgagggagtgcttgggcgcagccgtgccagcccgtctgcggaaagtggcctccgccttggtgccgggacgtcgcgctctgccagtcccggtttatatgctagtgccagcccctgctcctgcccaggaggacgattcctgtaccgactcagcagaaggaaccccagtcaattttagttctgcagccagtctttctgatgagacgctccaaggaccgcctcgagaccaaccgggtggccctgcgggaaggcagcgcccaacaggcagacccacctcagcgaggcaggccatggggcaccgccataaagcaggaggggcaggacgatcggcagagcagtcgcggggtgccggaaagaacagagctggcctggaactccccctgggacgacccccaagcgcacccgctgacaaggatggctctaagcccggaaggaccagaggggacggcgctttgcaatcattatgtctcaccacaccaactgaggaagccgtctactgcttctacgggaatgacagtgatgaggagcctccagctgccgcacctaccccgacccatcgtaggacgagcgccatacccagagcgttcacccgcgaacggccacagggccgtaaggaagctccagccccaagcaaggccgcaccagctgcccctccacctgctagaacgcagccttccctgatagcagatgaaacccctccttgctatagtctgagttcatctgctagcagtttatctgaaccagaacccagcgagccacccgcagtacatccaagggggcgtgagcccgcagttaccaaggaccctggccctgggggtggacgtgacagcagtcctagccctcgtgcagctgaagaactactgcaaagatgtatctcatctgccctcccgaggcgacgcccacccgtgtctggcttaaggcgcaggaagccgcgagccacaagactagacgagcgtccagccgaaggctctagagaaagaggtgaggaggctgctggaagtgacagagcgagcgatctcgattccgtagagtggcgcgctattcaggaaggcgctaactcaattgtgacctggctgcaccaggccgcagctgccaccagggaagcttccagcgaatcagacagtatcctgtccttcgttagcggactttcggtcggaagcacacttcagcccccaaaacaccgcaagggtagacaggccgaaggtgagatgggcagtgcaaggcgccctgaaaaaagaggcgcagcttccgtgaaaacatccggaagtccgagatccccggctggccctgagaaaccaaggggaacacagaagaccacaccaggcgtgccagcggtgctcagggggcgaacggtgatctacgttcccagtcctgctccacgtgcccagccaaaagggacccccggacctcgggcaacaccacgcaaagtcgcaccaccttgcctggcccagcctgccgctcccgcaaaggttccctccccgggacagcagcggtccagatctcttcacagacccgctaaaacaagcgagttagccactctgtcacagccgccaagatccgccacgccaccggctagactggctaagactccgagttcatcgtccagccagacaagccctgccagtcaaccactcccccgaaaacggcctccagtgacgcaagcagcgggtgcactaccagggcctggcgcaagtcccgtgcctaaaacacccgctcgaactttactggccaaacagcacaaaacacaaagatcacccgtgagaattccctttatgcagcggccagcgaggagaggaccaccccctctggccagggcggtacccgagcccggaccacgtggaagggccggtacggaggctggtccgggagccaggggtggtcgcttgggactggtgagagtcgccagtgcactctcctccggatcagagtcaagcgaccggtcggggttcaggagacagctgacatttatcaaagagtcgccgggtctccggagaagacggagcgaactgtcctccgctgagtctgccgctagtgctccgcagggcgcttcacctaggaggggacggccagcattaccggctgtgtttctttgttcaagtcgttgtgaggagttgcgtgccgcaccaaggcagggtccagctcccgcacgacaacggccacccgcagccaggccaagtcccggtgaacgccctgccagacggacgactagcgaaagtccttcacggctgccagtcagggccccagccgctagacccgagacggtaaaaagatacgcctcacttccccacatcagcgttgcccgtaggcccgatggggcagtccccgcagcccctgcttcagctgacgcagcacggaggagttctgatggagaaccacgtcctttacccagggtcgcagcccctggtaccacctggcgccgaatccgcgacgaagatgtaccacacattctgcggagcacgctgcctgcaactgcgctccctctcagagggagtacacctgaggacgccccagcgggtcccccaccaaggaaaaccagcgacgccgtggttcaaaccgaagaagtcgccgcacccaaaacaaacagctcaaccagtcctagtctcgagacacgcgaacctcctggcgcacccgcaggaggccagctgtctctactcgggagtgatgtcgacgggccttccttagcaaaggcccctatatcagccccattcgtgcatgaaggtctcggcgttgccgttggaggcttccccgcaagccgtcatggcagtccctcccggagtgccagagtgcctccctttaactatgtgccatcacctatggttgtggctgccacaactgatagcgctgccgagaaagcacccgcaactgcctcagccaccctgctcgagtac

SEQ ID NO: 213600 - DNA, 6911 bp, synthetic construct
  misc_feature 1..6911: note = Description of Artificial Sequence: Synthetic coding sequence
  source 1..6911: mol_type = other DNA
atggcctcatcagtcgccccatacgaacagctggttcggcaggtcgaggccctgaaagcggagaatagtcatttaaggcaggaactccgcgacaatagctctcatctgtctaagcttgagaccgaaacctctggaatgaaagaggtcctaaagcatctgcagggcaaattagagcaggaggcaagggttttggtgagctcaggacaaactgaagtgcttgaacagctgaaggctctgcaaatggatattacttctctgtataacttgaagttccagccgcctaccttaggacctgagcccgcagctcggactccggaaggatcaccggtccatgggtccgggccttccaaagactctttcggcgagttaagcagagccaccatccgacttctcgaggaacttgacagggaacggtgcttcctgctgaacgagatcgaaaaggaagaaaaagagaagctgtggtactatagccaactgcagggcctgagcaaacgcctggacgaacttccgcacgtggaaacgcagtttagcatgcaaatggatttgatacggcaacagctggagtttgaagctcagcacatccggagcctaatggaagagaggttcggcactagcgacgaaatggtccagcgcgctcaaatacgtgcttctcgacttgaacagatcgacaaggaattgctcgaagcccaggacagagtgcagcagaccgagccacaggccttgcttgctgtgaagtctgtgccggtggacgaagatccagaaaccgaggtgccaactcatcccgaggacggtactccccagcctggcaactctaaggtcgaggttgttttttggttgctgtctatgctcgcaactagagaccaggaagataccgcgcgtacactcctggctatgtcatcttcacccgagtcgtgtgtggcaatgagacggtccggctgcctgcccctcctcctacagattctgcacggcaccgaagccgcagccggaggcagggcaggcgctccaggagctcctggtgctaaggatgccagaatgagagctaatgcggcactgcacaatatcgtattctcacaaccagaccaggggctggccagaaaggagatgcgcgttctacatgtgcttgaacagattcgcgcttactgtgagacctgctgggactggctgcaggcaagggatggaggcccagaggggggtggggcagggtcagctccgatccctatcgagccccaaatttgccaggcaacttgtgccgtaatgaagctgtcattcgacgaggagtatcggcgagcaatgaacgagcttggtgggctgcaggctgtggcagaacttctgcaggtggattatgaaatgcataaaatgaccagagaccctctcaacctagccctcagaagatacgccggaatgaccctgaccaacctgacgttcggagacgtggctaacaaggcaacgctctgtgctcgtcgagggtgtatggaggcaattgtagctcagctcgcctcagactctgaggaactgcatcaggtggtgagcagtatcctcagaaatctgagctggcgggctgatatcaattcaaagaaggtgttgagggaggctgggtccgtgaccgctctggtccagtgtgtactgcgggctacaaaggagtccaccctgaaaagtgtgctcagcgctctgtggaacctttctgcacactctactgaaaataaggcagccatctgtcaggtggatggcgcacttggctttctagtctctaccctaacgtacaaatgccagagtaattctctggcaatcattgagtctgggggaggaatccttcggaatgtgtcctcccttgtggctacaagggaagactacaggcaggtgctccgggatcacaactgtctacaaactctccttcagcacctgacgtcccacagtctgacaatcgtctccaatgcgtgtggcaccctctggaacttatccgcccgaagcgccagggaccaggaactcctgtgggatctgggagccgttggcatgttgagaaatttggttcattccaaacacaaaatgattgcaatgggctcagccgctgcactccgcaatctgctggcccacagacccgctaaacatcaggcagcagcgactgccgtttctcccggtagttgcgtcccttcactgtacgtacggaagcaaagggccctcgaagccgagctggatgccaggcacttggcccaggcgcttgagcacctggaaaagcaggggccacccgcagcagaggccgctacgaagaagcccctgccacccctccgacatctcgatggcctggcacaggattacgcctctgattccgggtgcttcgatgatgatgacgccccttcttccttggctgccgctgctgcaacaggcgagcctgcgtcccctgcagccctatctctgttcttagggtccccttttctgcaggggcaggcccttgcccgtacacctccaacacgccgtggaggtaaggaagccgaaaaggatacttccggagaagcagccgtcgcagctaaggctaaagcaaaactagctctggcagtggcacgaattgaccagctggtagaagatatctctgccctgcataccagttccgacgacagcttctctttgtcatccggagatcctggccaggaggcccctcgggagggcagggcacaatcgtgctccccgtgtcggggaccggaaggaggccgacgggaagccggatcacgggcacaccccctgctgagactcaaggcggctcacgcatccctctctaatgactctctaaatagcgggagtgccagtgacggatactgcccacgagagcatatgttgccctgtccactggctgcacttgcatcaagaagggaggatcccagatgcggccagcccaggccatctcgattagaccttgacttacctggatgtcaggcagaacccccagcgagagaggcgaccagcgccgatgccagggtgcgcaccattaaactcagccctacttatcaacacgttccgctgttagaaggagcaagccgcgcaggtgccgaacctctggcaggacccggtatatcacctggggctcgtaagcaggcctggttgccagctgatcatctctcaaaggtaccggaaaagctcgccgcagctccgctgagcgtcgcgagtaaggcgctgcagaagctcgctgcacaggagggccctctcagtttaagccgatgttcatccctgtcatctctcagttctgccggtcgccctgggccatcggaaggaggggacctggacgatagcgactcctcattagagggcttggaggaggccggaccatcggaagcagaacttgacagcacatggcgcgcaccaggcgcaacctccctaccagtcgccattccggcacctaggagaaatcgtgggagggggttgggcgtggaagacgctactccttcttcttcttccgaaaattacgtacaagaaacacctctcgtgctaagcagatgtagttcagtgtcctcactgggttctttcgaatcacccagtatcgcttcaagcataccctccgagccttgttcaggtcagggaagtgggactatcagccccagtgaactccccgattctccaggccagactatgcccccttcaaggtccaagacacctccactcgccccagctccacaagggcctcccgaggccacccaatttagtcttcaatgggagtcttacgtaaagcgatttttggacatcgctgactgccgcgagcgttgtcgcctgcctagcgaattagacgccggaagcgtacgattcacagtggaaaagcccgatgaaaacttttcctgcgctagttccttatctgccctagcattgcacgagcattacgtccagcaggatgtggaactaaggttacttccaagtgcctgtccagaaaggggcggaggagccggaggggctggtctgcatttcgccggacatcggaggcgcgaggagggccctgcacctacgggatctcggccacggggagccgcagaccaggagcttgaactgttgcgagagtgcctgggcgctgcagtgccggctaggctccgcaaagtagccagcgctcttgtgccaggacgtcgggcactaccagttcccgtgtatatgttggtgccagccccagctccagcccaggaggatgactcctgtactgactcggccgagggcactcctgttaatttctcctccgcagcttccctgagcgacgagactttgcagggtcctccgagagaccagcctgggggacccgctggtcgacagcgcccaaccgggaggcccacctcggctcgacaggccatgggccacaggcataaggcaggcggagctggccgatccgcagaacagtcgcgaggcgctgggaaaaatagagcaggactcgaacttccactcggtcggcctccgagtgccccagcagataaggacgggtccaagcccggaagaacgaggggggatggcgctctgcagagcctgtgtttgacgacacctaccgaggaggcagtctactgtttctatggaaacgacagcgacgaggagccacctgccgctgctccgactccaactcatcgccgtacttctgcaatccctcgagcgtttactcgcgagcgaccacagggcagaaaggaggcccctgctcccagcaaggcagctccagctgcgccaccgccagccaggacccaacccagcttgatcgccgatgaaacaccaccttgctactcattatcaagttcggcctcaagcttaagtgaaccggaaccatccgagcctcctgcggtgcacccccgaggccgtgagcctgccgtcactaaggacccaggtcccggagggggaagagactcaagcccctccccacgagctgctgaagagctgcttcagagatgcattagctccgctctgcctagacgaaggcccccagtctcaggactgcgacggaggaaaccaagagcgacaaggttagatgagcggccagccgaggggtcacgcgaaaggggagaggaggctgccggttctgatcgcgctagcgatctcgactcagtggaatggcgtgctatacaagagggcgcaaactctatcgtcacatggctgcaccaggcggctgccgcaacacgggaagctagttctgagagcgatagtattctgtctttcgtgtccggattgagcgtcggaagtacactccagccccctaagcataggaagggcagacaggcagaaggagaaatgggctccgccagacggcctgaaaaaagaggagccgctagtgtgaagactagtggtagtcctcgcagcccagccggtccagaaaagcctcgcggtactcagaaaaccactcccggtgttcctgccgtccttcgaggtcgaactgtgatatatgtgcctagtcctgccccacgggctcaacccaaggggaccccaggcccacgcgcaacgccccgaaaagtggccccaccttgcctcgctcagccagccgcaccggctaaggtaccctcacccggtcagcagcgatcccggtccctgcatcggccagccaagacctcggaactcgcaacgctgagccagccaccccgtagcgctacgcctcccgctcgcctggccaaaactccctcttcctcatcatcccagacctcccccgcaagccagcccttgcctcgcaaacgtcctcccgtgacgcaggcagctggtgccttgcccggaccgggtgctagtcccgtccccaagacccctgcgagaacgctgctggcgaagcagcataaaactcagcgctctccagtcaggatacctttcatgcagcggcctgctagaagagggcctccacccttagctcgcgctgtcccagagcctggacccagaggacgtgctggaaccgaggctgggccaggtgctaggggtggcagacttgggctcgttagagtggccagtgccctcagctcagggtctgaatctagtgatcgtagcggatttaggcgccagcttacatttattaaggaatcaccgggtctcagaaggcggaggtccgagctctcctccgccgaatccgcagcatcagcgcctcagggcgcaagccccaggcgaggaagacctgccctccctgcagtctttctctgtagttcccgatgcgaagagctccgagccgctcccaggcagggtccagcacccgcacggcagagaccccctgcagctagaccgtcacccggagagcgtccagctaggcgaaccacgtctgaatcgccaagcaggctgcctgtgagagcacccgcagcgcgtcctgagacagtaaagagatatgcatccctgccccatatttcggttgcccgacggccagacggagcggtccctgctgccccagcatcggccgatgctgccaggcggtcatcagacggcgaacccagacctcttccgcgagtggcagcgccaggaacgacctggcgcagaattagggacgaggatgttcctcacatccttcgttctacactgcccgctaccgcgctcccactgcgtggaagtacacccgaggatgctcctgcaggccctccacccaggaagacaagcgacgctgtcgtccagactgaggaagtggcagcacccaagacgaatagctctacttcgccttctctggaaactagggagccccctggcgctcctgctggagggcagttatccctgctgggcagtgatgtcgacggaccatctctggccaaggcccctatttcagcacctttcgtacatgaaggcttaggcgtggccgtcgggggatttccagcatcccggcatggctcacccagcagaagcgcaagggtccctcccttcaattacgttccatcacccatggttgtcgcagccactacggactccgcagcggagaaggcccctgcaactgcctccgcgactctactggagta

SEQ ID NO: 213601 - DNA, 1545 bp, synthetic construct
  misc_feature 1..1545: note = Description of Artificial Sequence: Synthetic coding sequence
  source 1..1545: mol_type = other DNA
atgtcatggcccagaagactgctgctacgatatctcttcccagctttgctcctacacggcctgggcgagggttccgctctcttgcaccccgacagccgctcccaccccagaagtctggaaaagtccgcctggagggcgttcaaggagagtcagtgtcatcacatgctgaaacacttgcacaatggtgcccgaattacagtccagatgcctccaacaatagaagggcactgggtgtctacaggatgtgaagtccgctcaggacctgaatttatcaccagatcttacaggttctaccataacaacaccttcaaagcatatcaattctactacggttcaaatcgctgcacaaacccaacatatacactcattatcaggggcaagatacgcctcaggcaggcgagttggattattaggggcggtacggaggctgattaccagctccacaatgtgcaggtgatctgtcatactgaagccgtcgccgagaagctaggacaacaagtgaaccgcacctgccctggattcctggcagatgggggaccatgggtccaggatgtggcatatgacttgtggcgggaagagaacggatgtgagtgcaccaaggccgtcaatttcgctatgcacgaattacagctcattcgagtggaaaaacagtatttacaccataacctcgatcatctggtggaggaactatttttgggggatattcacacagacgccactcaacgcatgttttaccgcccttcctcatatcagcccccactgcagaatgccaagaaccacgatcatgcatgcattgcttgcagaatcatttaccggagcgacgagcatcatccacccatcctcccccctaaagctgaccttactattggcctgcatggagagtgggtcagtcagcggtgtgaggtgcgacctgaggtcttgtttctcactaggcatttcatcttccacgacaacaacaacacatgggaagggcattactaccactactccgacccagtctgcaagcaccccacattttccatttatgccaggggccgatactcgaggggggtactgagttctagggtgatgggtggcactgagttcgttttcaaagtaaaccatatgaaggtcacccctatggatgccgcaactgcttcactcctaaacgtgtttaatggaaatgaatgcggggcagagggtagttggcaggtaggcatccagcaagacgtaacacatacaaacggctgtgttgccttggggattaagctgccccatactgagtacgagatcttcaagatggagcaggacgcgagaggccgttacctcttgttcaacgggcaacggcctagtgatggttcttcacccgacaggcctgagaagcgggcaacaagctaccagatgccacttgtgcagtgcgctagctcctcccccagggcggaggaccttgcagaagacagtggttcctcgctgtatggcagagcacctggacgtcacacatggagcctcctgttggcggctctagcgtgcttagtccctttgctgcattggaacatccgacggtag

SEQ ID NO: 213602 - DNA, 1698 bp, synthetic construct
  misc_feature 1..1698: note = Description of Artificial Sequence: Synthetic coding sequence
  source 1..1698: mol_type = other DNA
atgaagagaaggtgttcttgcggcggtggaggaggccactgttcttcagagcggagacgcacaagacccgaggccgaaggtagagctcgagcccagctgcccggacaccagatcggcgctagaagagcaggtggcccaagggccggactggagatgagctggccacgtagactcctattacggtacctctttccggctttactgctgcacggtctgggcgagggctcagcactattgcaccctgatagccggtcgcaccccagatctctggagaaaagcgcctggcgtgccttcaaggagtcccagtgtcatcacatgctcaaacacctccacaatggggcacgaatcacagttcagatgcctcctactatcgagggtcattgggtttctaccggctgcgaggtgcgctccggacccgaatttataacccgctcctataggttctaccacaataacacattcaaagcctaccagttttactacggttctaaccggtgtactaaccccacatatactctaatcattcgcggtaagattaggctgcgccaagcgtcctggatcattagaggaggcaccgaggctgattatcaactgcataatgttcaagtgatttgtcacacagaagctgtggccgaaaaactgggacagcaggttaaccgaacatgtccgggtttcttggccgatggcggtccatgggttcaggacgtcgcgtacgatctctggcgcgaggagaacggttgcgagtgtacgaaagccgtcaattttgctatgcacgagctgcaacttatccgtgtcgaaaaacagtacttgcatcataatctggatcatttggttgaggagctcttcttgggggacatccatacggacgcgacccagcgtatgttctatcggccaagctcctatcaaccaccactgcaaaatgcaaaaaatcacgatcacgcgtgtattgcctgccgcattatatacagatccgacgaacaccatcctccaatcctgcctcccaaggctgatctcaccataggcctccacggggagtgggtgtcacaaagatgtgaagtaagaccagaggtacttttcctgactaggcacttcatatttcatgataacaataatacttgggaaggccactattaccactacagcgaccccgtctgtaaacacccaaccttcagtatctacgctagagggcgatactctagaggtgtgttgagtagccgggtgatgggaggtacagaatttgtcttcaaggttaaccacatgaaagtaacacctatggatgctgcgacagcctccctcctgaacgtgttcaatgggaacgagtgtggggctgaagggagctggcaggtaggaatccagcaggacgttacacataccaacggttgtgttgctctcggtatcaaactgccgcataccgagtacgagatcttcaagatggaacaagacgcaagaggtaggtatctgttattcaacggccagcgacctagtgacggttcttcccccgaccggcctgagaaaagggcaacttcctaccagatgccgttggtccagtgtgcttcttcctccccgcgtgcagaggatctggccgaggacagtgggagttccttatacggcagagcccctgggagacatacatggagcctgttgctggcggcactagcctgcctagtcccccttctccattggaacattcggcgttag

SEQ ID NO: 213603 - DNA, 981 bp, synthetic construct
  misc_feature 1..981: note = Description of Artificial Sequence: Synthetic coding sequence
  source 1..981: mol_type = other DNA
atgccacctagcataagtgcgtttcaggctgcttacattggaatcgaagtactgatagctcttgtcagtgtgccagggaacgtgctcgttatttgggccgtcaaagtgaatcaggcgcttagagacgccacattctgctttatcgtctctctggccgttgccgatgtggccgttggcgcactcgttatccccctcgccatcttgattaacattggtcctcaaacctattttcacacgtgcttgatggtggcttgcccagtgttgatactgacacaatccagcatcctcgcgctgcttgctatagctgtcgacaggtacctgcgcgtgaagattccgctgaggtacaaaatggtcgtaacacctcgccgtgccgcagtcgctatcgcaggttgctggatcctcagttttgtggtggggctaacccctatgttcggttggaataacttgagtgccgtggagcgagcatgggccgctaatggatccatgggggagcccgtgatcaagtgtgagtttgagaaagttattagcatggagtacatggtgtactttaatttcttcgtgtgggtgctgccacctctgctgctgatggttctgatttatctcgaagtcttttacctgattcgaaagcaattaaataaaaaggtcagtgccagcagtggtgacccgcagaagtactatggtaaggagttaaagattgcgaaatcactggcactgatcttatttctgtttgcactttcttggctcccactccatattctgaattgtattaccttgttctgcccgtcctgccacaagccctccatcttaacttatatcgccatttttttgactcacggaaactccgctatgaatcccatagtttacgcgttcaggattcaaaagttccgggtgacttttcttaagatttggaacgaccactttcgctgtcaacctgccccacccattgacgaggacctgcctgaagaacggccagatgactag

SEQ ID NO: 213604 - DNA, 981 bp, synthetic construct
  misc_feature 1..981: note = Description of Artificial Sequence: Synthetic coding sequence
  source 1..981: mol_type = other DNA
atgcctcccagcatctctgcttttcaagctgcatacattggcatcgaagtgctgatagctttagtaagcgtgcccggaaatgtgctggtcatctgggcggtgaaagttaatcaggcactgagagacgctacattctgcttcatcgtctcccttgcggtggccgatgtcgctgtgggtgcacttgtcatccctttggctattctcatcaatatcgggcctcagacctacttccatacgtgtctgatggtggcgtgcccggtgctgatcttaacccagtctagtattctggcattgctggcaattgcagtcgatagatacctgcgtgtcaaaattccactgcgctacaagatggtcgtcacgccgcgacgcgcagctgtggcaatcgccggatgttggatcctgtctttcgtagttggtctgacgccaatgttcggttggaacaacctgtcggcagttgagagagcttgggccgctaacggctccatgggcgagccagtgatcaagtgtgaattcgaaaaggttatatccatggagtatatggtctacttcaactttttcgtatgggtgctgcccccactcttgttgatggtgctgatctacctggaagtcttttacttaatcaggaagcagctgaataagaaagtatccgcttcctccggcgatccccagaagtactatgggaaggagttgaagatcgccaagtccctggctttaatcctgttcctcttcgccctaagttggttgcccttgcatattctcaattgcatcacactgttttgtccaagctgccataaaccttcaattcttacatacatcgctatcttccttacccacggaaacagcgctatgaatcccattgtttatgcattccgcatccagaaattccgggtgacatttctaaagatctggaacgatcacttcaggtgccagcctgctccccctatagatgaggacctccctgaagagcgcccagacgactag

SEQ ID NO: 213605 - DNA, 378 bp, synthetic construct
  misc_feature 1..378: note = Description of Artificial Sequence: Synthetic coding sequence
  source 1..378: mol_type = other DNA
atgcccccttcaatatccgcgttccaggccgcttatataggtattgaagtgcttattgcactggtcagcgtccctggaaatgtgctcgtgatctgggccgttaaggtcaaccaggcattgagggacgctactttctgcttcatcgtttctctagccgtggcagacgtggcggtgggtgccctggtcataccacttgctattttgattaatatcggcccacagacatacttccacacctgcctcatggtggcgtgtcccgttcttattcttacacagagctccatattagcactgctggctatagctgtggaccgatacctgcgtgttaaaatccctttgcgtagaatcagccagtgcatggcttccactaagtcgtag

SEQ ID NO: 213606 - DNA, 981 bp, synthetic construct
  misc_feature 1..981: note = Description of Artificial Sequence: Synthetic coding sequence
  source 1..981: mol_type = other DNA
atgcctccttccatctccgcattccaggccgcttacatcggtatcgaggtgctgatcgctctggtgagcgtcccaggaaatgtgctcgttatttgggcagtgaaggttaatcaggcactccgtgacgcaaccttctgtttcattgttagcctggctgtcgccgacgtggctgtgggagctttggtaattcctctggctatcctgatcaatatcggcccacagacctactttcacacttgcctcatggtggcatgcccagtgctgattcttactcagtcctccatcttagccctgctagccatagcagtggatagatatctgagagtcaaaatcccgctacgatacaagatggtagtgacacctagacgggcagcagtggcgatagccggatgctggatcctcagctttgtggttggcctgactccaatgttcggctggaacaatctgtccgccgtggagcgtgcctgggccgcaaatgggtccatgggggagcctgtcattaagtgtgaattcgagaaggtgatcagcatggagtacatggtttacttcaatttcttcgtatgggtgctacctccccttctcctcatggttctgatatatctggaggttttctatctgatccgcaagcagctgaacaagaaagtgtctgccagctctggggatcctcagaaatactacgggaaggaactgaagattgccaagtccttagctctgatcctctttctgttcgccttaagttggcttcctctccacatactaaattgcatcacactcttctgcccttcttgtcacaagccctcaatcttaacatatattgcgatatttcttacacatgggaatagcgctatgaatccaatagtatatgcttttcggattcagaaatttagagtgacttttttgaaaatctggaatgaccacttccgttgtcaacctgcgccacccatcgatgaggatctgccagaggaacggccagacgactag

SEQ ID NO: 213607 - DNA, 1239 bp, synthetic construct
  misc_feature 1..1239: note = Description of Artificial Sequence: Synthetic coding sequence
  source 1..1239: mol_type = other DNA
atgcccattatggggtctagcgtatacataacggttgaattggctattgccgtcctggccattctggggaacgtgttagtttgttgggcagtctggttgaatagcaacctgcagaacgtcactaactattttgtcgtgagcctggctgctgccgatatcgctgtgggggtccttgccattcctttcgctattacaatctcgacagggttttgtgcagcttgccatggctgcctttttattgcatgttttgtgctggtgctgactcagtctagtatcttctcactgcttgccattgccatagataggtatattgcaatacgcattccgctgcgttataatggtctggttaccggaactagggccaagggaattatagctatatgttgggtattatcatttgccatcggcttaactccaatgcttggatggaacaattgtggccagccaaaggaagggaagaatcattcacaaggctgcggcgagggacaggtcgcctgcctattcgaagacgtggtacctatgaactacatggtgtattttaacttttttgcttgcgtgttggttcctctcctactgatgctgggcgtgtacttacggatttttctggctgctaggagacagcttaaacaaatggaaagccagccccttcccggagagagagctaggtcaacactccagaaagaagtgcatgccgcaaagtctctggctatcattgtcgggctgttcgcactctgttggcttccgttgcacattataaactgttttactttcttttgccctgattgttcccacgccccattgtggctgatgtatctggcgatcgtgctgagtcacactaacagcgttgtgaatccatttatatacgcttaccggatcagggaatttcgacagaccttcagaaaaatcatacggtcccatgtgctgcgacagcaggaaccattcaaggccgcaggcacttcggcaagagtcttggcagcccatggttcagacggagaacaggtctcattgagactgaacggccacccaccgggagtttgggcgaatggatctgccccacatcccgaaaggcgaccgaacggctatgccttggggttggtgagtggcggatccgcacaagagagtcagggaaataccggcctacctgacgtcgagttgttatcacatgagttgaagggggtttgccccgaacccccagggttggacgaccctctggcacaggatggcgctggtgtgtcttag

SEQ ID NO: 213608 - DNA, 1239 bp, synthetic construct
  misc_feature 1..1239: note = Description of Artificial Sequence: Synthetic coding sequence
  source 1..1239: mol_type = other DNA
atgcctatcatgggatctagtgtttacattacagtagaacttgccattgcagtcctggccatcctgggtaatgtcttggtttgctgggccgtctggctcaattccaacctgcagaatgttacaaattattttgtggtatccctcgcagctgcggacatcgcggtgggagtcctggctatccctttcgcaatcaccattagcacgggtttttgcgctgcctgtcacggatgcttgttcattgcctgcttcgttcttgtgctgactcagagttctatcttttcccttctggccatcgccattgatagatatattgccatccgcatacctctgagatataatggtctcgttaccggcacaagagccaaggggatcatagctatctgctgggtactgtccttcgctattggcctgacgcctatgctgggatggaataactgcggccagccaaaagagggtaaaaaccactcccaaggatgcggagagggacaagtagcctgccttttcgaggatgtggtaccaatgaactatatggtgtactttaatttcttcgcttgcgttttagtgcccttattgctcatgctcggcgtatacctgagaatattcttagctgcgaggcgacaattgaaacaaatggaatctcagccactgcctggtgagcgcgctaggagcactctgcaaaaagaagtgcatgccgctaaaagtctcgccataattgtcggcttgtttgctctgtgctggctgcctctgcatatcatcaactgctttaccttcttctgccccgattgttcgcatgctccactctggctcatgtacctggccatagtactttcccataccaatagcgtcgtgaacccgttcatatatgcttaccggatcagagagtttagacagacatttaggaaaatcataagatcccatgttttgcgccagcaagaacccttcaaagccgctggcacatctgcgagggtgcttgccgcacacggatcagacggggagcaggtatccttacggttgaacggtcaccccccaggagtgtgggcgaatgggagcgcaccgcatcctgagaggagacccaacggctacgcattggggttggtgagcggtggtagcgctcaagaatcccaggggaatactggcttgcccgatgtggaattactgtcccatgagctgaagggagtctgtccagagccacccggtctcgatgaccccctggcgcaagacggggcaggagtctcttag

SEQ ID NO: 213609 - DNA, 267 bp, synthetic construct
  misc_feature 1..267: note = Description of Artificial Sequence: Synthetic coding sequence
  source 1..267: mol_type = other DNA
atgcctattatgggctcaagcgtgtacattacagtggagctggctatagcggtgctggccatcttaggaaacgtgcttgtttgctgggcagtgtggctaaatagtaatttacagaatgtgacgaattactttgtggtatcactcgccgctgccgatatcgctgtgggggtgcttgctatcccttttgctattacaattagcactgggttctgtgccgcatgccacggctgtctgttcattgcatgctttgtcttggtgctcacatag

SEQ ID NO: 213610 - DNA, 195 bp, synthetic construct
  misc_feature 1..195: note = Description of Artificial Sequence: Synthetic coding sequence
  source 1..195: mol_type = other DNA
atgcctattatgggaagctctgtttatatcaccgtggaactggccattgctgttttagctatcctggggaatgttctagtctgttgggctgtgtggctgaactctaatttacaaaatgtcactaactactttgtggtctctctggcggctgcggacatcgcagtgggggttctggccatcccattcgctatctag

SEQ ID NO: 213611 - DNA, 231 bp, synthetic construct
  misc_feature 1..231: note = Description of Artificial Sequence: Synthetic coding sequence
  source 1..231: mol_type = other DNA
atgcctatcatgggaagcagtgtatatattaccgtcgaactcgccatcgccgtgctggcaatcctggggaacgtcctggtctgttgggccgtgtggctgaactctaatttacagaacgttacgaactactttgtggtaagtctcgctgcagcagatattgccgttggggtgctcgctatacctttcgccatcactatatcaaccggtttttgtgccgcttgtcacgggtag

SEQ ID NO: 213612 - DNA, 1098 bp, synthetic construct
  misc_feature 1..1098: note = Description of Artificial Sequence: Synthetic coding sequence
  source 1..1098: mol_type = other DNA
atgcccattatgggaagcagtgtgtatatcaccgtcgaactcgcaatagctgtgctggctatcctgggtaatgtgctggtgtgctgggccgtgtggttgaactccaatctgcagaatgtcacaaactacttcgttgtgtcactagccgctgccgatattgcagtcggggtccttgccatccccttcgcaattactatttctaccgggttttgcgcggcttgtcatggctgccttttcatcgcctgtttcgtgttggtactcactcagagctcgatcttctctctgctggccatcgcgatcgataggtacatcgcaatccgcattcctcttcggtataatggtctagtcaccggcactagggcgaaaggaattatcgctatttgttgggtccttagttttgccattggcttgacacccatgttgggatggaataactgtggtcaaccaaaagagggaaagaatcactctcagggttgcggggaaggccaggtcgcctgtctgtttgaggatgtcgttcctatgaactatatggtgtactttaatttcttcgcttgcgtgctggtgcctcttctgcttatgctgggcgtgtatttacgcatttttcttgcagctcggagacagctgaaacagatggaaagtcagcctctccctggggagcgcgcacggtcaacactgcagaaggaggttcatgcagcgaagtccctagcgattatcgtcggattgtttgctctgtgctggctgccactgcacatcataaattgctttacgtttttctgccccgactgtagccacgctccactctggctcatgtacctggctatagttctctcacacacgaactctgtcgtcaatccttttatatatgcctaccgcattagagaattccgccagactttccgaaagatcattagatctcatgtgcttaggcaacaggaaccgtttaaagcggcaggcacatccgccagagttcttgctgctcacggcagcgacggggaacaggtttcactgaggctgaacggacaccccccaggagtgtgggccaatggtagcgctccccatccggaacgaagaccaaatgggtacgcactgggtctatag

SEQ ID NO: 213613 - DNA, 1239 bp, synthetic construct
  misc_feature 1..1239: note = Description of Artificial Sequence: Synthetic coding sequence
  source 1..1239: mol_type = other DNA
atgccgatcatggggtcaagcgtgtacatcacagttgaactggctatagccgttttggctatcctcggaaatgttttggtatgttgggctgtttggctgaattctaacctgcaaaatgtcactaattacttcgtggtgtctctcgctgcagccgacatcgccgtaggagtcttggcgatacccttcgccattactatctcaaccgggttctgtgccgcatgccatggctgcctgttcatcgcctgtttcgtgctggttctgactcagtctagtatcttcagtctgcttgctatcgcaatcgaccgatacattgccatcagaatccctctgcggtacaatggattggttaccggcacacgtgccaaaggcattattgctatctgttgggtcctgtcgtttgccatcggcctcactcctatgctggggtggaataattgtggacagccaaaggaggggaaaaaccactcccaggggtgcggggagggccaggtggcttgcctctttgaggacgtagttcccatgaactacatggtgtatttcaatttttttgcgtgcgtgcttgtgcccctcttgctcatgttaggggtatacctcagaatcttccttgccgcacggagacaacttaagcagatggagtcacaaccactcccgggtgagcgcgcacgctcaacattgcagaaggaggtccacgccgcaaagagcctggccattattgtgggcctttttgccttgtgttggctgcctctgcacatcattaactgcttcacatttttctgtccagactgctcgcatgccccactgtggcttatgtatctggcaattgtcctgagtcacacgaactctgttgtaaatcccttcatctatgcatatagaatccgtgaattcagacagacatttcgaaaaatcatccggtcacacgttcttcggcagcaggaaccatttaaagcagctggaacttccgcccgagtccttgccgctcacgggagcgatggagaacaggtcagtctccggctgaacgggcatcctcccggtgtgtgggctaacggatctgcccctcaccccgagaggaggccaaacgggtacgcactgggcctcgttagtgggggatccgcacaggagtcacagggcaacactggcctccctgatgtggaactgctgtcccatgagctgaaaggcgtctgcccagagccccctggacttgatgatcccctggctcaagatggcgctggtgtgtcatag

SEQ ID NO: 213614 - DNA, 999 bp, synthetic construct
  misc_feature 1..999: note = Description of Artificial Sequence: Synthetic coding sequence
  source 1..999: mol_type = other DNA
atgctgctggaaacccaagacgctctgtacgtcgcactcgagctggttattgcagccctcagcgtggcaggaaatgtccttgtgtgcgccgcagtgggaactgccaacactctccagactccaactaactacttcctcgtatctctggccgctgccgacgtggcggttggactctttgcgattcctttcgcgatcactatctcgctggggttctgcaccgatttctacggttgtctctttctggcctgcttcgtactggttctgactcagagctcaatattctctcttctagcagtagccgtggacagatacctagccatctgtgtgcccttgaggtataaatctctggtgaccggtacccgcgctcgcggagtaatagcagtgctatgggtgttagcatttgggatcggactaacaccattccttgggtggaactccaaggactccgccacaaacaactgtacagaaccttgggacgggacaactaatgagagttgttgccttgtcaagtgcttattcgaaaatgttgtgccaatgtcatatatggtatatttcaatttcttcggctgtgtgctaccaccacttttgattatgctggttatctatattaaaatattccttgtcgcttgtagacagctgcagaggaccgagctgatggaccatagtcgaactacgcttcagcgtgaaattcatgccgctaagagtttagcgatgatcgtgggcattttcgctctctgctggctgccggtccacgccgtgaactgtgtgaccctatttcagcccgctcagggaaagaataaacccaagtgggcaatgaatatggccatcttgctaagccatgccaacagcgttgtgaaccctatcgtgtatgcctacagaaatcgggacttccgctatacttttcacaagattataagtaggtatctgctctgtcaggcagatgtgaagtcggggaacggtcaggccggtgtgcagccagcactaggagtggggctgtag

SEQ ID NO: 213615 - DNA, 957 bp, synthetic construct
  misc_feature 1..957: note = Description of Artificial Sequence: Synthetic coding sequence
  source 1..957: mol_type = other DNA
atgccgaataattctaccgccctgtctcttgccaacgttacctacatcaccatggagatcttcataggcctttgcgcgattgtcgggaacgttctggtgatatgcgtggtcaagctaaatccaagcttgcagactaccacattttattttatagtcagtttagctctggctgatatagctgtgggcgttctcgttatgcctctggctattgtggtcagtctgggcatcaccatacacttctactcttgtctcttcatgacgtgcctgctgctgatctttacccacgccagtattatgtctttactggctattgcggtggatcgctacctgagagtcaaactcaccgttcggtataagagagttaccacccaccgcagaatttggttggctttaggcctgtgctggttggtatcgttcctcgtgggcttgacccctatgtttggttggaatatgaaactaacctctgaataccaccggaacgttacctttctatcatgtcagttcgtgtctgtcatgcgaatggattacatggtatatttctctttcctgacctggatattcataccccttgtcgtaatgtgtgctatttacctggacatcttttacataattcgtaataagctctccctgaatctgtccaattcaaaggaaactggagccttttacggacgtgaatttaaaacagccaagagccttttcctggttcttttcctgtttgccctttcctggctgccgctctctataatcaactgtatcatctatttcaatggggaggttcctcagctggtgctgtacatgggcatcctgctttcacacgctaactcaatgatgaatcctatcgtatacgcctacaagatcaaaaaattcaaagagacctacttattgatcctgaaggcctgtgtagtgtgtcacccttctgattccttggacaccagcatcgagaagaacagcgagtag

SEQ ID NO: 213616 - DNA, 537 bp, synthetic construct
  misc_feature 1..537: note = Description of Artificial Sequence: Synthetic coding sequence
  source 1..537: mol_type = other DNA
atggaaggttccccagcaggacccatcgaacagaaggaggccaggtgggaaagttcctgggaggagcaaccggactggactttggggtgtctcagccccgaatctcacacgaatcacgtcgccctgcgcgatacgggcaatcagctgatagtaaccatgtcctgcctgacaaaagaggatacgggttggtactggtgtggtatccaaagggacttcgctagagatgatatggacttcactgaactgatcgtaacagacgacaaaggtaccttggctaacgacttctggagcgggaaagatctttctgggaacaagactagaagctgtaaggctcctaaggttgttcgaaaggctgatagatccaggaccagcattctgattatttgcatcctgatcaccgggcttggcataatcagcgtgattagtcatctcaccaagagacggaggagccagagaaaccggagagtgggaaacacactcaagccttttagccgagtcttgacccctaaggagatggctcctacagaacaaatgtag

SEQ ID NO: 213617 - DNA, 1044 bp, synthetic construct
  misc_feature 1..1044: note = Description of Artificial Sequence: Synthetic coding sequence
  source 1..1044: mol_type = other DNA
atgccaaacaactctactgcgctgagtctggctaatgtcacatacatcaccatggagatctttattggcctttgtgctatcgttgggaacgttctggtgatatgtgttgtcaagctgaatccttcattgcagacaaccacattctactttatcgtgtcgttagccttagccgacatcgccgtaggcgtcttggtcatgcccctcgctatagtggtgtcactcggaattactattcatttttattcatgtctgttcatgacatgcctgctgctgatcttcacccatgcctctataatgagtctcttagccatcgccgtggacaggtatctcagggtgaaactgacggtgaggttcaggatcccaggtcttcctggctgcattctgagttttcagcttaaagtatgcttcctgcctgttatgtggctgtttatactgttatccctcgccctgatctctgacgctatggtgatggatgagaaggtaaagaggtcattcgtgctggacaccgcatctgcgatctgcaactataacgctcattacaagaaccaccctaagtattggtgccgcggttattttcgcgactactgcaacataatcgctttcagtcccaacagtacaaaccatgttgccctacgtgatactggcaaccaactgattgttactatgagttgtctcactaaggaagatacaggttggtactggtgtggcatccaacgggattttgccagagatgatatggacttcactgaactaatcgtcaccgatgacaagggaactctggccaacgatttttggagcggcaaggacttgagcggcaataaaactcgctcttgtaaagcccctaaggtggtccgaaaagccgaccgctcacggactagcattctgatcatttgcattctgattacagggctcgggataatttctgtgatctctcacctaacaaaaaggcggcgatctcagagaaaccgcagggtgggtaacacactaaagcccttctccagggtattgacacccaaggaaatggcaccaacggagcaaatgtag

SEQ ID NO: 213618 - DNA, 801 bp, synthetic construct
  misc_feature 1..801: note = Description of Artificial Sequence: Synthetic coding sequence
  source 1..801: mol_type = other DNA
atggagggttccccagctggcccaatcgaacagaaggaagccaggtgggagtcttcctgggaggagcagccggattggaccctcggatgtttgtcccccgagtcgcagtttcgcattccaggcctgccaggctgtatcctttcatttcagctcaaggtttgctttctcccagtcatgtggctgttcatcctcctgtctcttgcactaatttccgatgcaatggtaatggatgagaaggtcaagaggtctttcgtactggacaccgccagcgccatttgtaattataacgcacattacaagaatcacccaaaatactggtgtcgcggttattttagagactactgcaacatcattgcattcagccctaacagcactaaccatgtcgcactgcgagataccggcaaccaactgatcgtaactatgagctgcctcaccaaagaggacacaggatggtattggtgcgggattcagagagacttcgcccgtgatgatatggactttacagaacttattgtgactgacgataaggggacactcgcgaacgatttttggtccggtaaggacctctctggcaataagacccgctcatgcaaagcccctaaagtagtgagaaaagctgacagaagccggacatccatactcatcatctgcattctcattacaggtctcggaattatcagtgtgatcagccacttgacaaagcgcaggagaagtcagcggaacaggagagttggcaacacactaaaaccattctctcgggttctgaccccaaaagagatggctccaactgaacagatgtag

SEQ ID NO: 213619 - DNA, 624 bp, synthetic construct
  misc_feature 1..624: note = Description of Artificial Sequence: Synthetic coding sequence
  source 1..624: mol_type = other DNA
tagccccaggctctgcaaggcccaccaagctctaacgacgcaatggttatggatgaaaaggtgaagcgttcctttgtactcgataccgcgtcagcaatttgcaattacaacgctcattacaagaatcaccctaaatactggtgtagagggtactttcgcgattattgtaatatcatcgctttttcccctaactctaccaatcatgtggctctccgcgatacaggaaatcagctgatcgtgaccatgtcttgtcttacaaaggaggataccggatggtactggtgtggtattcaacgcgattttgccagagacgacatggatttcactgaacttatagtgacagacgataagggaacgctcgccaacgatttctggtctggcaaagacctcagtggaaacaagacaagatcatgcaaagccccaaaggtggtccgtaaagcagaccgctccaggacgagtattctgattatttgcattctaatcacaggactggggatcatttcggtgatttcacatctcacgaagaggagaagatcccaaaggaatagaagagtgggcaacacactgaagccctttagcagagtcctcacacctaaagagatggcacctacggagcagatgtag

SEQ ID NO: 213620 - DNA, 348 bp, synthetic construct
  misc_feature 1..348: note = Description of Artificial Sequence: Synthetic coding sequence
  source 1..348: mol_type = other DNA
tagccctctagccacgtagcactccactccactctcctgggctcccatttcagcacaaaccacgttgctctaagagacacaggaaaccaactgatcgtgacaatgtcatgtctgactaaagaagatacgggctggtattggtgtggcatccaacgggactttgccagggacgacatggatttcacagagctcatagtcacggacgacaaaggaacgctggccaacgatttctggagtgggaaagatcttagcgggaacaagacccggtcctgtaaagcacctaaagtcgtgagaaaggccgaccgctctagaacaagtattctaatcatttgcatactcattacctag

SEQ ID NO: 213621 - DNA, 519 bp, synthetic construct
  misc_feature 1..519: note = Description of Artificial Sequence: Synthetic coding sequence
  source 1..519: mol_type = other DNA
gggccaatcgagcagaaagaggcacgttgggagagctcgtgggaggaacagcctgactggacacttgggtgtctcagcccagagtctcacaccaatcacgtcgcactccgcgatacaggaaaccagctgatcgtcacaatgtcatgtctgacaaaagaggatacgggttggtactggtgcggcatacagcgcgattttgcccgtgacgatatggatttcactgagctgatcgtgacagatgacaagggcactctggctaacgatttctggagcggtaaggatttgagcggcaataaaactagatcctgtaaagcacccaaagttgtccgaaaggcggatagaagcagaacgtccatacttataatctgtattttaatcacagggctgggaatcatctcagtcatctcacacctgacaaaaagaagaaggagtcaacgcaatcgacgcgtgggtaacaccctgaagccattcagtagagtgctgacacccaaagaaatggccccaacagaacagatgtag

SEQ ID NO: 213622 - DNA, 1092 bp, synthetic construct
  misc_feature 1..1092: note = Description of Artificial Sequence: Synthetic coding sequence
  source 1..1092: mol_type = other DNA
atggcccagacccccgcatttgacaaacctaaagtcgagcttcacgttcatctcgacggcagcatcaagcctgagacaatcctgtactacggtaggaggagaggcatagccctccctgccaataccgcagaaggacttctgaacgtcattggcatggacaagccccttacattgcctgatttcttggccaaatttgactactacatgcccgctatcgcgggatgtcgggaagcaatcaaacgaatagcttatgagtttgttgaaatgaaggcaaaggaaggcgttgtctacgttgaagttagatactccccacatctactcgccaactcgaaagttgaacctatcccttggaaccaggctgaaggtgatctcactcctgacgaagtcgtcgcactggtaggacagggccttcaagaaggagagcgggactttggcgtgaaggctaggagtattctatgctgcatgaggcaccagccgaattggtcccccaaagtggtcgaactctgcaagaaataccagcaacagaccgtggtggcgatcgatttggctggtgacgagactatccccggtagcagcttgttgcctggccatgtgcaagcttaccaggaagccgtgaagagcggtattcaccgcacagttcatgccggtgaggttggttctgctgaggttgtgaaagaggccgtcgatatcttaaagacagaacgcctcggccacggttaccatacgctcgaggatcaagcgttgtacaatcgcctccgtcaggaaaatatgcattttgagatctgcccatggtcctcttatttgacaggtgcatggaagcccgacaccgagcacgccgttatccggctcaaaaatgaccaagccaactacagccttaacaccgatgatcctcttatcttcaagtcaacattggacaccgactatcagatgactaagagggacatgggttttactgaggaagagtttaagcggctgaacattaatgcagcaaagtccagcttcttgccggaggacgagaaacgcgaactgttggacctgctctataaagcctacggaatgcctccttccgcttcggccggtcagaacctgtag

SEQ ID NO: 213623 - DNA, 1731 bp, synthetic construct
  misc_feature 1..1731: note = Description of Artificial Sequence: Synthetic coding sequence
  source 1..1731: mol_type = other DNA
atggcaagtaataaccactggttccagagctctcaggtacctagttttgctcaaatgcttaagaaaaatctgccagttcagccagctacaaaaaccatcaccacaccaaccgggtggagttctgaaagttatggcctgtctaagatggcctcgaaggtcacccaggtgacagggaactttcctgagccgctgctgtccaagaacctctcttccataagcaaccccgtattgcctcctaagaaaatccccaaggagtttattatgaagtacaagcggggagagatcaaccctgtttcagcgctccaccagttcgcccagatgcagcgcgtgcagctcgacttgaaggaaaccgtgactacaggaaatgtgatgggcccatattttgcattctgcgccgtcgtagatggtatccagtacaagacaggcttaggacaaaataaaaaggagtcacgatctaatgcggctaaacttgcactcgacgaactcctacagctggacgaaccagaacccagaatcctcgaaacttcaggcccacctccattcccagcggagcctgtcgtgctcagtgagttggcctatgtctctaaagttcattacgaaggaagacacatacaatatgccaaaatcagccagatcgtaaaagaacggtttaatcaactgatttctaataggtctgagtacctgaagtactcctcttctctggccgcttttataatcgagagagcaggtcaacatgaggtcgtggccatcggaacaggggaatataactactctcaggacattaagcctgacggcagggtgctgcacgatacccacgccgtggtaaccgcgagacgctctttactgcgctacttctaccgacagcttctcctgttctattcaaaaaaccccgctatgatggaaaaatccattttttgtaccgagcctacatccaatcttctgacgcttaagcaaaacatcaacatctgcctatacatgaaccaactgccgaaaggaagcgctcaaataaaaagccagttgaggctcaacccccattccattagtgctttcgaagctaatgaggagttgtgtctgcatgtcgccgtggagggaaagatctatctgacggtatactgcccgaaggatggcgtgaatcgaatatcaagcatgagttcaagcgacaaactcaccagatgggaggttctcggcgttcagggggcactcttgagtcactttatacaaccggtttatatatccagcattctgattggggacggcaactgcagcgatactaggggactggaaatcgctattaagcagcgtgtggatgacgcgctgacgagcaagctgcctatgttctacttagtgaatcggccacacatcagcctggtgcctagcgcatatcccctccaaatgaaccttgagtacaagtttcttagtctgaactgggctcagggggacgtgagtcttgagatcgtggatggactatccggcaaaatcacagaatctagtcccttcaaaagcggaatgtcaatggcctcaaggttgtgcaaggccgctatgctgtctcgctttaatctccttgccaaggaggccaagaaagaactgctggaagcgggaacgtatcatgccgctaaatgtatgtcggctagttatcaggaggccaaatgcaagcttaaatcttacttacagcagcacggatacgggtcttggatcgtgaaatctccctgcattgagcagtttaacatgtag

SEQ ID NO: 213624 - DNA, 1698 bp, synthetic construct
  misc_feature 1..1698: note = Description of Artificial Sequence: Synthetic coding sequence
  source 1..1698: mol_type = other DNA
atggcatcaaacaatcattggttccagagcagtcaggtgcccagtttcgcacaaatgcttaaaaagaatttgccggtacagccagccaccaaaacgatcacaacccctacaggctggagcagtgagtcgtacggtctcagcaaaatggcaagtaaggtcacccaagtgacaggcaattttcccgagccactactgagtaagaatttatctagtatcagtaacccagttctccctccaaaaaagatacccaaggagtttatcatgaagtataagaggggggaaataaacccagtgtccgccttgcatcagttcgcgcagatgcagcgcgtgcagttagacctgaaagagactgtgactaccggaaatgttatgggcccatatttcgccttctgtgcagttgtggatggaattcaatataaaactgggctcgggcagaacaaaaaagaatcccgctctaatgcggcaaaactggcccttgatgagctgctgcagttggacgaacccgagcctagaatcctcgaaacttccggacctccaccctttccagccgagccagttgtcttgtcagaactggcgtacgtatcaaaggtgcattatgaaggtcggcacattcaatacgcaaagattagccagatagtcaaggagcgtttcaaccaacttatttccaataggtctgagtacctgaaatattcttctagcttggcggcattcatcatcgaacgcgctggccagcacgaggtggtggcaatcgggaccggcgaatacaactattctcaagacattaagcccgacgggcgagttctgcacgacactcatgccgtcgtcacagcgagacggtccctgttgtcaaagaatccagcaatgatggaaaagagtatattttgtacagaaccaaccagtaacttactaacattaaagcaaaatataaacatctgcctctacatgaatcaactgcccaaaggctcagcacagataaagagtcaactccgactgaatccacattctatctccgcctttgaagccaatgaagagttgtgccttcatgttgccgtggagggaaagatttatttgactgtatattgtcctaaggatggagtgaatcggatctcttcaatgtcaagctccgacaaactgactcgatgggaggtgctgggagttcagggtgcactcctttcgcatttcatccagccagtgtacatctcaagcatcctgataggcgacggcaactgttcggacactaggggcctcgaaatcgcaattaagcaaagagtggacgatgccctcacctcaaagctaccaatgttttatttggtcaaccggcctcatatcagccttgtgccgtccgcataccctctgcagatgaacctcgagtataagtttttatctctaaattgggcccagggggacgtatctttagagatagtggatggcctttccggcaagatcaccgaatcctctccatttaagtccggaatgtccatggcctcccgcctctgtaaagccgctatgttgagcaggttcaacctgttagccaaagaagccaaaaaggagctgttagaggctggcacgtaccacgctgctaaatgtatgtcagccagctaccaagaagcaaagtgcaaattgaaatcctatctgcaacagcacgggtatgggagctggatcgtgaagtcaccatgcatagagcagtttaatatgtag

SEQ ID NO: 213625 - DNA, 726 bp, synthetic construct
  misc_feature 1..726: note = Description of Artificial Sequence: Synthetic coding sequence
  source 1..726: mol_type = other DNA
atggccagtaataatcactggttccaaagtagccaagtgccttcatttgctcagatgctgaaaaaaaatttgcctgtgcaacccgctactaaaaccataactaccccaacaggatggtcaagcgaatcctacgggcttagtaaaatggcttcaaaagtgactcaggtgacaggaaactttcctgaacctctgttgagtaaaaatctcagtagcatcagtaatcctgtgttgccccctaaaaagatacccaaggaattcatcatgaaatacaagcggggtgagatcaaccccgtctccgcactccaccagtttgcccagatgcagagggtgcaactggatttgaaagaaacggttactacaggaaatgtgatgggaccctactttgctttttgcgcagtcgtggatggtatccagtacaaaactgggctggggcagaataagaaagagtcgcgttctaatgcagcaaaactggccctggacgagctcctgcaactggatgagccagagccacggatactcgaaacttcagggccaccgccattccccgctgagcccgtggtgctttctgaactcgcctacgtgagcaaggtgcactacgaaggcaggcacattcagtatgcaaaaattagtcagattgtcaaagagcgcttcaaccagttgatcagcaacaggagcgagtacttgaaatactcaagctctctggcagcctttataatcgagagatag

SEQ ID NO: 213626 - DNA, 471 bp, synthetic construct
  misc_feature 1..471: note = Description of Artificial Sequence: Synthetic coding sequence
  source 1..471: mol_type = other DNA
atggcttccaataaccactggtttcagtctagccaagtgccttcctttgctcagatgctgaaaaaaaacctgcccgtgcaacctgccacaaagacaatcactactccaactggttggtcatctgagagctatggactttcgaaaatggcaagtaaggtcacccaggtcactggtaatttcccggaacctttactgtctaaaaacctctccagcatcagtaatcctgtgttaccgccaaagaaaattcctaaagagttcattatgaaatacaagcggggtgagatcaatcccgtgagcgcactgcatcaattcgcacagatgcagcgcgtgcagctcgatctgaaggagaccgtgaccaccggcaatgtgatgggcccatacttcgccttctgtgctgtcgtggacggcatacagtataaaacaggcctgggtcaaaacaagaaggagtcaagatctaacgccgcaaagtag

SEQ ID NO: 213627 - DNA, 1677 bp, synthetic construct
  misc_feature 1..1677: note = Description of Artificial Sequence: Synthetic coding sequence
  source 1..1677: mol_type = other DNA
atgctgaagaaaaatttaccagttcagccagccaccaagactatcaccacccctaccggctggtcctcggagtcttatggtctgtctaaaatggcctccaaagtgacgcaagtgaccggcaattttcccgaacccttgttgtctaagaatctgagcagtatttctaacccagtgctgccacccaagaagattcctaaggagtttatcatgaagtacaagcggggtgaaattaatcccgtgagcgcgctccatcagttcgcgcagatgcaacgggttcagctagatttgaaggaaactgtgacaaccgggaatgttatggggccatacttcgcgttttgtgctgtagttgacggcatccaatataaaacaggtctcggccagaacaagaaagagagccgttccaatgctgctaaactggccttagacgaacttctgcagcttgatgagcccgaaccacgcatcctcgagaccagcggccctccgccattcccagcagagcctgttgtactgtccgaacttgcatatgtgtcaaaagtacactacgaaggtagacacatccaatacgccaagatctcacagatcgttaaagagaggtttaatcagctgatatcaaatcgctctgaataccttaagtattccagcagcctggcagcgttcattatagagagagcaggtcaacacgaggttgtcgccataggaacgggagaatataattattctcaagacatcaagcctgacggccgagtgttacacgatacacacgccgtggtgacggcaaggagaagtttattgaggtacttttaccggcaactgttactgttttactcaaagaaccctgctatgatggaaaagtctattttttgcaccgagcctacttcaaatctcctgacgctgaaacagaatatcaacatctgcctgtacatgaaccagctgcctaaagggtccgctcagatcaagtcccaactccggctcaatccccattccatttcagccttcgaggctaatgaagagctatgtctgcatgttgctgtcgagggaaaaatctaccttacagtctactgtcctaaggacggcgttaataggatttcctcaatgtcctcatccgacaaactgaccaggtgggaggtgctcggcgtccaaggcgctttactgagccactttatccaaccggtgtacatctctagcattttaatcggcgacgggaactgttccgacacccgcggactggaaatcgccatcaaacagcgagtggatgatgccctcacctcaaagttgcctatgttctacctggtaaatcgaccccacattagcctcgtgcccagcgcgtatccactgcagatgaatttggaatacaagtttctgtcactgaactgggcccagggggatgtgtctctggagatagtggacggactgagtgggaagataaccgagtcctccccatttaagagtggcatgtcaatggcatctcggctgtgcaaggcagcaatgctgagtaggtttaaccttctcgcgaaggaggccaagaaagaactgctggaagctggaacttaccacgcggctaaatgtatgtctgcttcctatcaggaagctaagtgcaagctgaagagctacctacagcagcacggctacggcagctggattgtgaagagcccttgcatcgagcaattcaatatgtag

SEQ ID NO: 213628 - DNA, 3810 bp, synthetic construct
  misc_feature 1..3810: note = Description of Artificial Sequence: Synthetic coding sequence
  source 1..3810: mol_type = other DNA
atgatgagcccgatctgcgaccagaccattgacagcagactcaaagtcgaaaaagccacttggtggggcagggtcggagggggtagccgcccacactggcagtcccctggggtgcggccatgtcctgaagaggtgcaggaccccggatactccctgtccggatattacacccacccattccaaggttacgagcaccgccagttgcggtaccaacagccgggacccggttcttccccatcgagctttctgctcaagcaaattgaatttctgaaagggcagctgccggaagcaccggtgattggcaaacagactccttcgctccccccttcactccccggattgaggcctcgctttcctgttcttctcgcttcatccacacgcggtcgacaggtcgatatcaggggcgtcccccgaggggtgcacttaaggagccagggactgcagcgtggctttcagcacccatcccctaggggcaggagcctacctcagcggggtgtcgattgtctgtcctctcattttcaggaactctctatttaccaggatcaagaacagcgtattcttaaatttttggaggaactcggagagggaaaagccacaacagctcatgacttgagcggcaaactgggcaccccaaagaaggagataaacagggtgctgtactctttggccaagaaaggcaaactgcagaaggaggccggtaccccacccctgtggaaaattgctgtcagtactcaagcttggaatcaacactctggcgtggtcaggccagatggccatagccagggtgcacctaattctgatccatctcttgagccagaagatcggaacagcacctcagtctctgaggatctgctagaacccttcatcgctgtttccgcccaggcgtggaaccagcactccggtgttgtgaggcccgactcccactcccagggctctcctaatagtgaccccggacttgagccagaagatagtaatagtacatctgcccttgaagacccgttggagttcctagacatggccgagatcaaggaaaagatctgtgactatctgttcaacgtcagcgattcttctgccctaaacttggccaaaaacataggtctgacaaaggcacgggatatcaacgctgtcctgatcgacatggaacgccagggagatgtatatcgccaggggacaactcccccaatctggcacctgacagacaaaaagcgtgagcgcatgcagatcaaacgaaacacaaattctgtccccgagactgcccctgccgcaattcctgagacgaaaagaaacgccgaatttctgacttgcaacattccaacatcaaacgcctcaaacaacatggtgacaactgagaaagtcgagaacggccaggaaccagtgatcaagctggaaaaccgccaggaggccaggcccgaacccgctagactcaaacctccagttcactataacgggccaagcaaagccggttatgtcgattttgagaatggtcagtgggccaccgatgacatccctgacgatctgaattccatccgtgcagccccaggcgagtttagagccataatggagatgccctccttttatagccatggtcttcccagatgtagcccttataaaaagctgacagaatgtcaacttaagaacccaattagcggcctactggagtatgcccaattcgcatctcaaacctgcgagtttaacatgattgaacagagcggcccaccccacgagcccagattcaagtttcaagttgtgattaacggcagggagttcccaccggcagaagctggctccaagaaggtggcaaaacaagacgccgctatgaaggcgatgaccatactgctggaggaggcaaaggctaaggatagcgggaaatccgaggaatcatctcattatagtacggagaaggagtccgagaagactgcagagtctcaaactcccacaccaagtgctactagcttcttcagcggcaagagcccagtcactaccctcttggagtgcatgcacaaacttgggaactcttgtgagtttcggctgctgagtaaggaaggaccggctcacgaaccaaaattccagtactgcgttgccgtaggcgctcaaacctttccgtctgtgtctgccccttctaagaaggtcgctaagcagatggcggcagaggaagcaatgaaggccctccatggtgaagctactaattccatggcctccgacaatcaacccgaggggatgatcagcgagtcacttgataatctggaaagtatgatgcccaacaaagtgaggaagataggagaactggtgcgatacctaaacactaaccccgtggggggactgctggaatatgccagatcccatggattcgctgctgagtttaagctggtcgaccagtcggggcctccccatgagcccaagtttgtgtaccaggccaaagtgggcggaagatggttccccgctgtttgcgctcactcaaagaaacaggggaagcaggaagccgctgatgcagccctgcgtgtgctgattggtgagaacgagaaggctgagagaatgggcttcacagaggtcacgccggtgacaggtgctagtctcagacgaaccatgcttctgcttagccggtcaccggaggctcagccaaagaccctgccccttacaggcagcacctttcacgaccagatcgccatgctgagccataggtgtttcaataccctcactaattcattccagccgagtctgctgggtagaaagatactggctgctatcattatgaagaaagattccgaagatatgggcgttgtggtttccctgggcaccgggaacaggtgtgtcaaaggcgactctttatccttgaagggcgaaactgttaacgattgccatgccgagatcatatcccggagaggatttattcggtttctttacagcgagctgatgaagtataattctcagaccgctaaagattcaattttcgaaccagccaaaggtggtgaaaagttacagatcaagaaaacagtgtcttttcacttgtacatctccacggctccatgcggggatggagccttatttgacaaatcttgtagcgatcgggcaatggagtccacagaaagccgtcactaccctgtgttcgagaaccctaagcagggtaaattacgcaccaaggtggagaacggagaagggaccataccagttgaatcttctgacattgtccctacctgggatgggatacgcctaggcgaacgcctgaggaccatgagttgcagcgataagattctgaggtggaacgtgctcggattacagggcgctttgctcacccactttttgcagcccatatacctgaaaagtgtcacactgggatatcttttttctcagggacacctgacgagagctatctgttgccgtgtgactcgggacggctccgcgttcgaagacggcctgcgacatccctttattgtcaaccatcccaaagtgggacgcgtgtccatctatgactcaaaacgccaatcaggaaagacaaaagaaacttccgttaactggtgcctcgcggacgggtatgacctcgagatattggacggtacacgtgggaccgtggatggacctcggaatgagctcagcagagtttccaaaaaaaatatcttcctgctgttcaagaaactctgctcctttcgataccgcagagatctcctgcggctgtcgtatggggaagccaaaaaggcggctcgtgactatgaaaccgccaagaactacttcaagaagggtttgaaagacatgggttatggcaactggattagcaaacctcaggaggaaaaaaatttctacttatgccccgtgtag

SEQ ID NO: 213629 - DNA, 159 bp, synthetic construct
  misc_feature 1..159: note = Description of Artificial Sequence: Synthetic coding sequence
  source 1..159: mol_type = other DNA
atggcaaatgagcacacattaattcaccccgctagcatcgaagatcccctggaggctcggcctatgtccgacgaagaccccgaagacgaggatgccctgcccgctcgatggaagaaggagatgggacggaagcgcaagcgtaccatcgctacgctgtag

SEQ ID NO: 213630 - DNA, 2106 bp, synthetic construct
  misc_feature 1..2106: note = Description of Artificial Sequence: Synthetic coding sequence
  source 1..2106: mol_type = other DNA
atggacattgaagatgaggagaacatgtcgagttccagcaccgatgtgaaggagaaccgcaacctagacaatgtgtcgccaaaagatgggagcacccccggacccggtgagggctcacaactctccaacggagggggaggcggaccgggacgcaagagaccactggaggaaggatccaatggtcactctaagtaccggcttaaaaaacgccgtaagaccccagggcctgtgttgcctaagaatgccctcatgcagctcaacgaaatcaaacctggattacagtatacattgctcagccagactgggccagtgcatgcccctctgtttgtgatgtcagttgaggtcaatggtcaggtgtttgaagggagtgggccaaccaaaaaaaaagcgaaattacatgctgcggagaaagctctgagatccttcgtccagtttcccaatgccagcgaggcgcatttagccatggggcgaaccctcagcgtgaacaccgatttcacatccgatcaagcagacttccccgacacgctgttcaacgggtttgaaacacccgataaagcggaaccaccattttacgtggggagtaatggagacgatagcttctctagctccggagacctgtccctctcggcgtctccagtgccagcctctctcgcgcagcctcctctgccagtccttcctccatttccacctccctccgggaaaaatcctgtgatgatactgaatgagctcagaccaggacttaaatatgactttctttccgaaagcggtgaaagtcacgccaaatctttcgtgatgtcagtggtcgtggacggtcagttctttgagggctcaggcagaaataaaaagctcgccaaagcccgagcagcccagtctgccctggctgctatttttaacctgcatctggatcagactccctcacgccaacccatcccttccgaaggccttcaactgcatctgccccaggtgctcgcggacgctgtgtctagactggtgctcggaaagtttggagaccttaccgacaactttagctcaccacatgctaggcgcaaagttctggccggagtcgtgatgacgaccggcactgatgtgaaagatgcaaaagtaatcagtgtgtctaccgggactaagtgcatcaatggagagtacatgagtgaccggggtttggctctgaacgattgtcatgcggagatcatctctcgaaggtcactccttcggtttctctacactcagttggagctgtatcttaataataaggatgatcagaagcgcagcattttccagaaatccgagagggggggattccggttgaaggagaatgtgcagttccatctctatatcagtactagcccatgtggtgacgcacgcattttcagcccacacgagcccatcctggaagagcctgcagatagacaccctaaccgaaaagcccgtggccagctgcgcactaaaatcgagtcaggtgaagggactatccctgtgagatctaacgcttcaatccaaacctgggatggggttcttcaaggtgagaggctgttgaccatgtcttgttctgacaagattgccaggtggaacgtggtgggaatacagggaagcttactgtcaatctttgtggagccaatctatttctcttcaatcatcctcggaagtttgtaccacggggatcatctttcacgtgctatgtaccaacgaatcagcaacattgaggaccttcctccgttgtacaccctgaacaagccactgctctcaggcatctcaaacgcagaagctaggcaaccagggaaagctcctaacttctccgtcaactggacagtcggggactctgcgattgaggtgattaatgccacaactggtaaggacgagctggggcgtgcaagcaggctttgcaagcatgctctttactgcagatggatgagggtgcacgggaaagtcccatcccaccttctgagatccaaaattacaaaacccaacgtctatcatgagagtaagttggcagctaaagagtatcaggcggctaaagccaggctgttcaccgcgttcataaaagcagggctgggcgcttgggtggaaaagcccactgaacaggaccagttttccttgactccctag

SEQ ID NO: 213631 - DNA, 2226 bp, synthetic construct
  misc_feature 1..2226: note = Description of Artificial Sequence: Synthetic coding sequence
  source 1..2226: mol_type = other DNA
atggatatcgaagacgaggagaacatgtcctcaagttccactgatgtaaaggagaaccgaaatctcgataacgtctctcctaaagatggctctacaccaggccctggggagggttcgcagctaagtaatggcggtggcggaggcccaggcaggaaaaggcctctggaggagggaagcaacggccattctaaatatagactaaagaagcggcgtaaaactccaggtcccgttctacccaagaatgccctgatgcagctcaatgaaattaagcccggactgcagtacactttgctgagccagacaggcccagtccacgctcccttgtttgtcatgtccgtagaggtgaatggccaagtctttgagggaagtgggccaacaaaaaagaaggctaaactgcacgcagccgagaaggccctgcgctcctttgtccagttccctaatgcctcagaagcacacctggcgatgggtagaactctcagcgtcaatacggactttacttccgaccaggctgattttcctgacaccttgtttaacggcttcgagactcctgataaagccgaaccccctttttatgtgggatcaaacggagacgatagtttcagctcttccggcgatctgtcactgtctgcatctccagtcccagcatcgctggctcagcctcctttgccagtccttcccccttttccccctcccagtgggaagaatcctgtcatgatcttgaatgagctcagacctggactcaaatatgactttttgagcgagagcggcgagtctcacgccaagtcctttgttatgtctgtggtggtcgacgggcagttcttcgaggggtctgggaggaacaagaaactggcgaaggctagggccgcacagtccgccctggccgctatcttcaatctgcacctggatcagacgccctcccgccaacctattccctctgagggactgcagctgcacctgcctcaggtgctggctgacgcggtaagccggcttgtgctggggaagtttggtgatctgacagacaatttctcatctccccatgccagaagaaaggtactggccggagtggtgatgacaacaggcaccgatgtgaaggacgctaaggtcatctctgtgtccaccgggaccaagtgtataaatggagagtatatgtcggatagagggctggccctgaacgactgtcacgccgaaatcattagtagacggtccttgctgcgcttcctctacacacaacttgagctgtacttaaataacaaggatgaccagaaaagatccatatttcagaagagcgagcgcggaggattccgactcaaagaaaacgttcagttccatctttatatcagcacatcaccatgtggtgacgctaggattttcagccctcacgagccaatccttgagggatcccgctcgtatacacaggcaggcgtccagtggtgcaatcacggcagcctgcagccgaggccccctggtttgctgtccgacccctccacctctacatttcaaggagccggtaccacagaacccgctgatcggcaccccaatagaaaagcccgtggacagctgaggaccaaaatagagtctggcgaggggacaatccccgtgcgcagcaacgctagtatccagacctgggatggagtgcttcagggcgagcgactgctgactatgtcttgttccgataaaattgccaggtggaatgtcgtgggaatccaaggctccctcttgtccattttcgtggagcccatttattttagcagcatcatcttggggtccctttaccacggcgaccacctctcccgtgcaatgtaccagcgcatttcaaatatcgaagatctgccacctttatataccctgaacaaacccctgttgtcaggtatttcaaacgccgaagcacgccagcccggaaaagcacccaatttctcggtgaattggacagtgggagattctgccatcgaggtcataaatgccaccacgggcaaggacgaactgggacgggcatctaggctgtgtaaacacgcactgtactgtcgctggatgcgcgtgcatggaaaggtgccttcccacctgttgagaagcaaaatcacaaagccaaacgtgtaccacgaatcaaaattggcagccaaagagtaccaggctgccaaggcacggctctttaccgcctttattaaggcagggctgggggcttgggtggaaaagccgactgagcaggaccagtttagcctcactccttag

SEQ ID NO: 213632 - DNA, 2145 bp, synthetic construct
  misc_feature 1..2145: note = Description of Artificial Sequence: Synthetic coding sequence
  source 1..2145: mol_type = other DNA
atggacatcgaagacgaagagaatatgtcttcctcgtccaccgatgtcaaagagaaccgcaacctcgacaatgtgtctcctaaggatggaagtacccccggacctggagaaggcagccagttgtcgaatgggggtggcggtgggccaggccgaaaacgcccactggaggagggaagcaacggtcacagcaaataccggctgaaaaagcggcgtaagacccccggtcctgtacttcccaagaacgcacttatgcagcttaatgagatcaagcctggactacagtacaccctgctcagccaaactggcccagtacacgccccactcttcgtcatgtctgtcgaggtaaacggccaggtattcgagggatccgggcctaccaaaaagaaagcgaagctgcacgcagccgaaaaagccttgcgctctttcgtacaatttcctaacgcctctgaagctcacttggctatgggaaggacgctgtccgtgaacacagattttacatccgatcaggcagatttcccagacacattgttcaacggatttgagactcctgataaggcagagccgccattttacgtaggctcaaacggagacgactcattcagctcaagcggcgaccttagcctctctgcctctccagttccagcaagtctggcccagccccctttacctgtgctgcccccattccctcctccttctgggaaaaacccagtcatgatactcaacgaattgcgcccaggtctaaagtatgattttcttagtgagagcggcgagtcccatgccaagagttttgtgatgtctgtggtggtcgacgggcaattctttgagggctctggtagaaacaagaagcttgccaaggcacgagcagcccaatccgcattagccgctatctttaacttgcacctggaccagactcctagcagacagccaatcccgtcagaagggcttcagctgcatctgcctcaggtgctggcggatgcagttagtagactcgtactcggaaaatttggggacctcaccgacaatttttctagtccccatgccagacgcaaagtgctggctggcgtagtgatgacaacgggcacggacgtcaaagacgctaaggttatcagtgtcagtacaggcaccaagtgtataaacggggaatacatgagcgacagagggcttgcgctgaatgattgtcacgctgaaatcataagcagacgctccctgctgcggttcctgtatacacaacttgaactatacttaaataacaaagatgatcagaagagatcaatattccagaaaagcgaacgaggcggtttcagactgaaagaaaacgtgcaatttcacctatacattagcaccagcccatgcggtgacgctaggatatttagtccgcacgagcctatcctcgagggctcacgctcctacacacaagcaggagtccagtggtgtaaccacgggagcctgcagccaaggcccccaggtctcctctcagatccatcaaccagcacattccagggggcagggacaactgaacccgctgatcgtcatcctaaccggaaggcacgaggacagttaaggacaaaaatcgagtcgggcgaggggacgatccctgtgagatcaaatgctagtattcagacctgggacggggtgctgcagggagaacggctgctcacaatgtcttgcagcgataaaatcgcccgatggaatgtggtcggcatccaaggaagtctcctgtcgatattcgtggagccgatctacttttccagcatcatcctgggatccctgtaccatggggaccatttaagccgggcaatgtaccaacgtatctccaacatagaagacctcccaccgctttacactctaaacaaaccgctgctgtccggaatcagcaatgccgaagctcgccagcccggaaaggcacctaacttctccgttaactggaccgtgggtgactctgccatcgaggtgattaacgccacaacgggcaaagacgagctcggaagggccagccgattgtgtaagcatgcgctgtattgtcggtggatgcgggtccatgggaaagtaccgtcacaccttctgcgaagcaagatcaccaagcccaacgtatatcatgaaagcaagcttgccgcaaaggagtatcaggcagccaaggtgcattag

SEQ ID NO: 213633 - DNA, 39 bp, synthetic construct
  misc_feature 1..39: note = Description of Artificial Sequence: Synthetic coding sequence
  source 1..39: mol_type = other DNA
atggatatagaagacgaggagaatatgtccttttcctag

SEQ ID NO: 213634 - DNA, 426 bp, synthetic construct
  misc_feature 1..426: note = Description of Artificial Sequence: Synthetic coding sequence
  source 1..426: mol_type = other DNA
atggacatcgaggacgaagagaacatgtcctctagcagtaccgacgtcaaagagaatcggaacctcgataacgtgtcccccaaagatggtagcactccgggaccaggtgaaggaagtcaattgagtaacggaggagggggtggaccgggaagaaaaaggccccttgaagaggggtcaaatgggcacagtaagtatcgcctcaagaagaggcgcaagacacccggacccgtcctccccaaaaacgcactcatgcaactgaatgaaatcaagcccggattgcagtacacactgctcagccagaccggtcctgtccacgcccctctgtttgtgatgtcagttgaagtaaacggccaggttttcgaaggctcgggacccaccaagaaaaaggccaagttacacgcggcagagaaagccctacgatcttag

SEQ ID NO: 213635 - DNA, 2226 bp, synthetic construct
  misc_feature 1..2226: note = Description of Artificial Sequence: Synthetic coding sequence
  source 1..2226: mol_type = other DNA
atggatatcgaagacgaagaaaatatgagttcctctagtaccgatgttaaagagaacagaaatctggataacgtttctccaaaggacgggtccactcccggacctggggagggttcccagctgagcaatgggggtggcggagggcctggcaggaagcgtccactggaagaaggctcgaatggccactccaagtataggctcaaaaaaagacgaaagacgcctggcccagtgctgcccaagaacgcactgatgcaacttaacgagatcaagcctgggctccagtatacgctgttaagtcagactgggccagtgcacgcgccactgttcgtgatgtccgtagaggtaaacggacaggtctttgaaggtagtggtcccaccaagaaaaaggcaaagctgcacgctgccgaaaaagctttacgaagttttgtccagtttcccaacgcgtcagaagcgcatctcgccatgggacggacactgagcgtcaacacagattttacgagcgatcaggcagacttccccgacactctgtttaatggctttgagacacctgataaagctgagcctccattctacgttgggagcaacggagacgacagctttagttccagtggagacctgtccttgtctgctagtccagtcccagctagcctggctcagcctcccctgcctgttctgccaccctttccacccccatcaggcaagaaccccgtgatgatattaaacgagcttcgtcccggtctcaagtatgacttcctctcggaatcaggggaatctcatgctaagtcttttgtgatgagcgtcgttgtcgatggccagttttttgagggatcagggaggaacaaaaaactcgccaaagctcgggcagcccagagcgctctggccgctatcttcaatctgcacctggaccagaccccatctcggcagcccatccccagtgaggggcttcagctgcacctcccacaggtcctggctgatgcagtgtcccgccttgtacttggcaaatttggagatctcaccgacaacttctcttccccccatgccaggcggaaggttctggctggggtggtaatgactactggaacggatgttaaggacgctaaggttatcagcgttagtaccgggactaaatgcattaacggagaatacatgtcagaccggggtttagctttgaacgactgtcacgctgaaattatctctaggcgctcactgctaagattcctatacacacaactcgaattatacctcaataacaaggatgaccaaaaaagatctatattccaaaagagcgagagagggggtttccgcttaaaggaaaacgtgcagttccatctgtacatctccacatccccatgtggtgatgctcgcatcttcagcccccacgaaccgatcctggaaggatctcgatcctacacacaggcgggtgtgcaatggtgcaaccacggcagtctccagcctcggcctcctggcttgctgtccgacccgtcgactagtactttccagggtgccggaacaacagagccagcggaccgtcatccaaatcggaaagctcgtggccagctgaggactaaaatcgaatctggggaaggaactatccctgtgcgttccaatgcctctatccagacctgggacggagtgcttcagggcgaaagactcctcaccatgagttgcagtgacaagatcgctaggtggaatgtagtcggtattcaaggctctcttttgagcattttcgtcgaacctatctatttttcgagcatcatccttgggtcactgtatcacggggaccatttatctcgcgctatgtaccaacgcatttccaatatcgaggacttgcctccgctctacacattgaacaaacctctgctgtctgggatctcaaatgcagaagccagacagccaggcaaggctcccaactttagcgtcaactggacagttggggactctgctatagaggttataaatgcaaccactgggaaggatgagctgggcagggctagtcgtttatgtaagcatgccttgtattgccggtggatgcgcgttcatgggaaggtgccatcacatctcttgagaagcaaaataaccaagccgaacgtgtatcacgagagcaaacttgctgctaaggaatatcaggcagccaaggcccgactgttcacagcgttcatcaaagcaggactgggggcttgggtggaaaagccaactgagcaggaccagttcagtctgactccatag

SEQ ID NO: 213636 - DNA, 2226 bp, synthetic construct
  misc_feature 1..2226: note = Description of Artificial Sequence: Synthetic coding sequence
  source 1..2226: mol_type = other DNA
atggacattgaagacgaagaaaacatgtcctcgtcctccacggatgtgaaggaaaacagaaatctcgataacgtgagtcctaaggacggctcgactccgggacccggtgagggcagccaactgtccaatgggggagggggaggcccagggaggaaaagacccctggaggagggctctaacggccattccaaatacagactgaagaaacgacggaaaaccccaggacctgtcctgcccaagaatgctctaatgcagttgaacgaaattaagcccggtttgcagtatactctgttgagccagacgggaccagtgcatgctccgctgtttgtcatgtccgtcgaagtgaatggccaggtctttgagggaagcggtccaaccaaaaaaaaggctaagttgcacgcagcggagaaggcactgaggagtttcgtgcagttccctaacgcttctgaggcccaccttgccatggggagaacgcttagtgtgaacactgactttactagcgatcaagcggactttcctgatactctgtttaatggttttgagacccccgataaggctgaaccgcctttctacgtaggttcgaatggggatgactccttttcttccagcggggatctcagtctttcggccagccctgttcctgccagcttggcgcagcctcccctacctgttttgccgccttttcccccaccgtcaggaaagaatcctgtgatgatcttgaacgagctccgccctggactgaagtacgatttcctctcagagtccggggaaagccacgcgaagagcttcgtgatgtccgtcgttgttgatgggcagtttttcgaggggtcagggaggaacaagaagctcgcaaaagctcgagccgcacagtccgccctggctgccattttcaacctgcatctggaccagacgccctctaggcagcccataccctcagagggcttacagctccaccttccccaggtcttggcagacgcagtttctcgcttagttcttgggaagtttggagatctaaccgacaatttctccagtccccacgctagacgcaaggttctggccggtgtcgtaatgactacagggaccgacgtgaaggatgcaaaggtcattagcgtctctacaggcacaaaatgtatcaacggagagtacatgagcgatcgtggcctagcccttaatgattgccacgctgaaattattagcaggcgctccttgctgcggtttctgtatacccaactggaactttatctcaacaataaagacgaccagaagcggagcattttccagaagtcagagcgcggaggctttcgcctgaaagaaaacgtgcagtttcatttgtacatctcaacgtcgccctgtggagacgctaggattttctctccccatgaacccattctggaagggtctcgctcttatacacaggcgggtgtccaatggtgcaatcacggatcactgcagccacgaccacctggtctgcttagcgaccctagtacaagcacctttcagggggcaggaacgactgagccggcagaccgtcatccaaacagaaaggccagggggcaactccggactaagatagagtccggggaaggaaccattccagttcgctctaatgcctcaattcaaacatgggacggggtgctgcaaggcgagagattgctcaccatgtcatgcagcgataagatcgcgaggtggaatgtcgttggaatacagggcagcctcctgagtatctttgtggaaccaatatatttctcttcaatcattctcggctccctgtaccatggcgatcatctgtcccgagctatgtaccagcgcattagtaatatcgaagacctgccacctctctacactctgaacaagcctctcctgagtggcatttctaacgccgaagctaggcagccaggaaaggcaccgaatttttcggtgaactggaccgtgggagattctgctatcgaggtgatcaatgctaccaccgggaaggacgagctcgggcgagccagtagactctgcaaacacgctctttactgtagatggatgagagtgcatggcaaagtaccttctcacctcctgcgctccaaaatcaccaaaccaaacgtgtatcacgagtcaaaattagctgcaaaggaatatcaggctgccaaagcaaggcttttcactgctttcattaaggccggattgggggcttgggtcgaaaaacctaccgagcaggatcagtttagtctgactccatag

SEQ ID NO: 213637 - DNA, 2097 bp, synthetic construct
  misc_feature 1..2097: note = Description of Artificial Sequence: Synthetic coding sequence
  source 1..2097: mol_type = other DNA
atggacattgaggacgaggagaacatgtccagttctagcacagatgtgaaagagaaccggaatctcgacaacgtgtctcctaaggacggatccactccgggacccggagagggatcacaactaagcaacggcggaggcggaggccctggaaggaagcgaccactcgaagaggggtccaacggccattctaaataccgtttgaagaagagacggaaaactcccggtcccgtcctgcccaagaacgccttaatgcaacttaacgaaatcaagccaggtcttcagtacacgctgctttctcagaccggtcccgtgcacgcacccttgtttgtgatgtctgttgaggtcaacggacaggtgtttgagggcagtgggccaacaaagaaaaaagcaaagctgcacgccgctgagaaggctctgcggtctttcgtgcagttcccaaatgcgtcagaagcacatttagctatgggaagaacactgtccgtcaacaccgatttcaccagtgatcaggccgacttcccggataccttatttaatggtttcgaaactccggacaaggcggagccgcctttctacgtcggatccaatggagacgactcctttagcagcagtggagatctgtccctgtccgcctcccctgttcccgctagcctcgcccagccacccctgcctgttcttccaccattcccccctcctagcggcaaaaacccagttatgattttaaacgaactccgacccggtcttaagtacgactttttgagcgagtctggcgagagccacgccaaaagtttcgtgatgtcagtggtcgtggatgggcagttcttcgaaggctctggcagaaacaaaaaactcgccaaggcccgagccgcacaatctgcattagctgctatctttaatctccaccttgatcaaactccctcacgacagccaattccctctgagggcctgcagttgcatctgccccaggttctggccgacgcagtgtcaagattagtgctgggcaaattcggcgacctgaccgataacttctcttccccacatgctagacggaaggtattggccggagtcgtaatgaccacaggtaccgatgttaaggacgctaaggtgatctccgtctctacgggtaccaaatgtattaacggcgaatatatgagcgaccgaggcctggcccttaacgattgtcatgctgagataatctctcgtagatccttattgaggttcctgtacactcaactcgagctttacctgaataataaggatgaccaaaagaggagcatatttcagaaaagtgaacgtggcggattccgtctaaaggaaaatgtgcagtttcacctttatattagtacatcgccctgcggagatgcccgtatcttttccccacacgagcctatcttggaaggatctcggagttatacacaggccggagtccagtggtgtaatcacggatctctgcagcccagaccccctggcttactgagtgacccgtcaacctcgaccttccaaggcgcagggaccaccgaaccagcggaccggcaccctaaccgcaaggctcggggacagctgagaactaaaatagaatccggagagggcactatcccagtacggagcaatgcttcaatccagacttgggacggcgtgctgcaaggcgagaggctcctgaccatgtcctgttccgacaagatcgctcgctggaacgtggtgggtatccagggttctctgctcagcattttcgtagagcctatctatttttcctccattattctgggcagcctttaccacggagaccacctctctagagcaatgtatcagcgaatctctaacatcgaagaccttcccccactctacaccttgaacaagcccttattgtccggaatcagtaatgcagaagctcgccagccgggaaaagcccctaatttttccgttaattggacagtgggagacagtgcaatcgaggtgatcaacgcaacaactggaaaagacgagctgggcagggcatcccggctgtgcaaacacgcactctattgtcggtgggcctgcgcgaggcaggggagtttgcccctaactaccctgcaagactatcaggcccagcgggtgccttag

SEQ ID NO: 213638 - DNA, 426 bp, synthetic construct
  misc_feature 1..426: note = Description of Artificial Sequence: Synthetic coding sequence
  source 1..426: mol_type = other DNA
atgagccacagaatggaaggtgtcggccaattgcctgcctcttacaggcacaatagaccgttattaagtggtgtgagtgatgcggaggcgagacagccgggtaaaagcccccctttcagcatgaactgggtagtcggatccgcagatttggaaatcatcaacgctactaccggaagacgcagctgcggcggtccctcacgcctttgtaagcacgtactctctgcacgctgggccaggctttacggcagactttcaacccgcacaccatcaccaggggataccccatcaatgtactgtgaagctaaactgggcgcacatacctaccagagcgttaaacaacaattatttaaggcctttcaaaaagccggtttaggcacatgggtccggaaacctccggagcaacagcagttcctgctaactctctag

SEQ ID NO: 213639 - DNA, 747 bp, synthetic construct
  misc_feature 1..747: note = Description of Artificial Sequence: Synthetic coding sequence
  source 1..747: mol_type = other DNA
atggggttgtggtcccccgtccccggtaattcggttccacgcgctccagtcatggctgggctgggactgggacattcacaaggtgcgccacagggcccacacgatggcaagactgaccggtcatccggacctggtcggaggagaaccgagagaacgcgcctgcctggtcttctcggtggagccccattaacagccggtagcccacaccgctggaacgtgttgggtctgcagggcgcactgctgtcacattttgtggaacctgtctacctgcagtcgatcgtcgtgggctccttacatcacaccggacacctggctagagttatgtctcatcggatggagggggtgggccagctgcccgcttcttatcgccataaccgcccactcctgtctggggtgtcagacgcagaggcaaggcagcccggtaaatcacctcccttttctatgaattgggtcgttggcagcgcggatctggaaataatcaatgcaaccacaggaagaagaagttgcggagggccatctcggctctgcaaacacgttctgagtgcccgatgggcgagactctacggtaggctgtcgacgagaacccctagccctggagacaccccaagtatgtactgcgaggccaagctaggagcccatacataccagtcagtaaaacagcagctttttaaagcattccagaaggctggactcggtacttgggttcgtaaaccacctgagcagcagcagttcttgcttacactttag

SEQ ID NO: 213640 - DNA, 2220 bp, synthetic construct
  misc_feature 1..2220: note = Description of Artificial Sequence: Synthetic coding sequence
  source 1..2220: mol_type = other DNA
atggcatcagtgcttgggtctgggagaggctctggtgggctgagctcacaattaaaatgtaagtctaaaaggcggcgaagacggcgtagcaagcgcaaggataaggtcagtatcttgagcacgttcctggcaccctttaagcatctctccccgggaatcacgaacacggaggacgacgacacattgtctaccagctctgctgaggtgaaggaaaaccgaaatgttggcaatctggctgctagaccaccccctagcggagacagggcccgagggggagcacccggtgctaagcgtaaacgaccgctggaggaagggaacgggggtcatctttgcaagcttcagttagtctggaaaaaactcagctggtctgttgctccgaaaaatgccttggtgcagctacatgaactgcggcctgggctgcagtaccgcacagtatctcaaacagggcctgtgcacgcccctgtctttgccgttgccgtagaggtgaacggcctcacctttgaggggacaggacccaccaaaaagaaagccaagatgcgagcagcagagttggctctgcggtctttcgtccaattccccaacgcgtgccaagcccacctggccatggggggagggcctgggcctgggaccgatttcacatccgaccaagctgatttccccgacacactctttcaggaatttgaaccacctgctcccaggcccggattagctggcggtcggccaggagatgccgctctgctatccgcagcctatggacgcagacgactcctctgtcgggcactggacctggtagggccaactccagctacacccgctgctcccggtgagaggaaccctgtggttttactaaatagactaagagcaggcctgagatatgtttgcctggccgaacccgctgaaagaagagctagaagctttgtgatggcagtgtccgtcgatggcagaacgttcgaaggatcggggcgaagcaagaaattggcgagggggcaggccgcacaggccgctcttcaagagctgttcgacatccaaatgcctggccacgccccaggccgagcacgcaggactcctatgccgcaagaattcgccgattctatatctcagctcgtgacccagaagtttcgtgaggtcaccaccgatctgactccaatgcacgctcgccacaaggcccttgctgggatcgtcatgacaaaagggctggacgcacgccaggcccaggtagttgcccttagctctgggactaagtgcataagtggggaacaccttagtgatcaaggtctggtagtgaatgactgccacgcggaggtggtggcacggagggctttcctgcatttcctctatactcaactggaattgcacctcagtaaaagaagagaagacagtgaaagatcaatctttgtgaggctcaaggagggaggatatcggctccgcgaaaacattttattccatctttacgtgagtaccagcccctgcggcgacgcaaggctccactctccatatgagatcacgacagacctccactccagtaagcacctagtgagaaagttcaggggtcacttgcgaactaaaatagaaagtggggaaggcacggttcccgtgcggggacccagcgcggttcagacttgggacggagtgctcttaggggagcagcttataacaatgtcatgtaccgacaaaatcgcccgttggaacgtgttgggtctgcagggagcactgctgtcgcatttcgtcgaacctgtgtatcttcagagcattgtggtcggcagcctccaccacaccggccacctggcgagagtgatgagccacaggatggaaggcgtcggccagctgcctgccagttacagacacaacaggccgttgctctccggcgtgtctgatgccgaggccaggcagcctggcaagagtccccctttcagcatgaattgggtggtcggctccgcagatctggaaattatcaatgcaacgacaggaagacggagttgtgggggtccttcaaggttgtgtaagcacgttctgtctgcgagatgggcgaggctatatggaaggctgtctacccgcaccccaagtcctggtgacacaccaagcatgtattgcgaggctaagttaggcgctcacacgtaccaaagtgtgaaacagcagctcttcaaagcttttcagaaagccggattaggcacgtgggttcgcaagcccccagagcaacagcagtttctgctgaccttgtag

SEQ ID NO: 213641 - DNA, 1509 bp, synthetic construct
  misc_feature 1..1509: note = Description of Artificial Sequence: Synthetic coding sequence
  source 1..1509: mol_type = other DNA
atgtggacagctgacgaaattgcccaactttgttatgagcattacggaatcagactgccaaagaagggtaagccagagccaaatcatgaatggaccctgttagcggctgtcgtcaagatccagtctcccgctgataaagcctgtgatacgccagacaaacccgtccaggtgactaaagaggtagtgtctatggggaccggcacgaagtgcatcggccaaagtaagatgcgcaagaatggcgacattctcaacgattcacacgccgaggttatcgcgagacgatcatttcagcggtatctccttcatcagttgcagctggcagccaccctgaaggaagactcaatctttgtgcccggtactcagaagggagtgtggaagctgagacgtgacctgatcttcgtattcttttcatcgcacactccttgtggagacgcctctatcatacccatgctggaatttgaagaccaaccctgctgccctgtcttcagaaattgggcgcataattcttccgttgaagccagcagtaatttggaagccccagggaacgaacggaaatgcgaggacccagacagccccgtcacaaagaagatgcgcctggaacccggtactgccgcaagagaagtcacaaatggggcagcacaccatcagagctttgggaagcagaaatccggccctatttctccagggatccactcatgcgatctgacagttgaaggtttggcgacagtgaccaggattgcccctggcagcgctaaggtaattgacgtgtaccgtacaggtgcgaaatgcgtgcctggggaagccggagacagcggaaaacccggagccgcatttcaccaggttggcctcctacgggtcaaacccggtcgaggtgaccgcacgagatctatgtcatgttccgacaaaatggcaaggtggaacgtcctagggtgccaaggagctctcttgatgcatctgttagaggaacctatctacttgagtgccgtggtgatcggcaaatgtccttatagccaggaggctatgcagagggccctgatcggcaggtgccaaaacgtgtctgccctgcccaaggggttcggagtccaggagctcaaaatcttacagtccgatctgctatttgagcagtcccgaagtgccgtgcaagccaagcgggcagattcgcctgggcgtctcgtcccctgcggagctgcgatttcctggtctgccgtccctgagcagccccttgatgtcacggcgaacggatttccccaggggaccactaaaaagaccatcggttcgctccaggcacggtcccagatttcaaaagtcgagctgttccgttcttttcagaagttgctcagtaggatagctagggacaagtggccgcacagtcttcgcgtccagaagctcgacacatatcaggaatacaaggaggctgcctcctcgtatcaggaggcatggtccacgcttcgcaagcaggtcttcggatcatggatcaggaatccacctgactatcatcagttcaagtag

SEQ ID NO: 213642 - DNA, 1422 bp, synthetic construct
  misc_feature 1..1422: note = Description of Artificial Sequence: Synthetic coding sequence
  source 1..1422: mol_type = other DNA
atgtggactctgcttgcagccgttgttaagatacaatctccagccgacaaagcctgcgacacccctgataagcccgtgcaggttacaaaggaggtggtgtccatggggacagggacaaaatgcatcggacaatccaagatgaggaaaaacggcgacatcttgaatgatagccacgccgaggtgatcgcccgacgcagttttcagcggtatctgctgcaccagctgcaattggctgcgactctcaaggaggattctattttcgtccccggtactcaaaagggggtctggaagctccgccgtgacttaatttttgtgttcttctcaagccacacaccttgtggagatgcctcaataatccctatgctggaattcgaggaccagccgtgttgcccagtctttaggaattgggctcataactcaagcgtcgaagcttcctcaaacctggaggcgcctggaaacgagaggaaatgtgaagatcccgacagccccgtgaccaaaaagatgagactggaacccggaacagcggctagggaagttaccaacggggctgcacatcatcagtcctttggaaaacaaaagtctgggccaatttccccgggaatccattcttgcgacctcacagtggaagggctcgccacagtcaccaggattgctcctgggtccgccaaggtgattgacgtgtaccgcaccggagccaagtgtgtgcccggagaggcgggtgattctggtaaaccaggagctgcttttcaccaggtagggcttctgcgggtcaagcctggcagaggagaccgcacaagatctatgagctgctctgacaagatggcgcgttggaacgtacttggatgtcagggtgcgcttctgatgcatttactggaagaaccaatctacctctccgccgtagtgatcggcaagtgcccctacagtcaggaagccatgcagagagcgctgatcggaagatgtcagaacgtgtccgcattgcccaagggcttcggggtccaggaactgaagatcctgcaaagcgatcttctatttgagcaaagtcgatctgctgtccaggcaaagcgcgctgactctcctgggaggctggtgccctgtggggcagccatctcctggtccgcagttccagaacagccactcgacgtgacagcgaacggcttcccccaggggacaaccaagaaaaccattggatcattgcaagcaaggtcacaaatatccaaggtcgaactgtttcgttctttccaaaaactgctgagccgaatcgctcgagacaaatggccacacagtctgagggtgcaaaagttagatacttaccaggaatataaagaggcagctagctcttatcaggaggcttggagcaccttacgtaaacaggtgttcgggtcatggatacggaatcctccagactaccaccaatttaaatag

SEQ ID NO: 213643 - DNA, 1089 bp, synthetic construct
  misc_feature 1..1089: note = Description of Artificial Sequence: Synthetic coding sequence
  source 1..1089: mol_type = other DNA
atggctgctgccgaggaggaacccaaaccgaaaaagctcaaagttgaggcacctcaagcgttgcgtgagaatatcctgtttggcatgggaaatcctcttctggacataagcgcggttgtggacaaggatttccttgacaagtactccctgaagcccaatgaccagattctggctgaggacaaacataaagaactctttgacgagctggttaaaaagtttaaagtggaatatcacgcaggagggtctactcaaaatagcattaaggtggcgcaatggatgatacagcagccccataaagcagcaacttttttcgggtgtatcggaattgataaattcggggaaattctgaagcgcaaagcagcagaagcacatgtagacgcccactactacgaacagaacgaacagccaaccggcacctgcgcggcatgtataaccggggataatagatcgctaatcgctaatctggccgctgccaattgttacaaaaaggagaagcatctggacctagaaaagaactggatgctggttgagaaggctagggtgtgctatattgctggcttttttctcacagtgtctccagagtccgttttgaaagttgctcatcacgcttccgagaacaaccgaattttcaccctcaacttatccgccccttttatttcccagttttataaagagagcctgatgaaagtcatgccttacgtcgacatcctttttgggaacgaaacagaggccgcaacctttgcacgggagcagggattcgagaccaaggatattaaagagatcgccaaaaagacccaggctttgccaaagatgaattctaagcggcaacgaattgtgatctttacacaaggtcgtgacgacacgatcatggccacggagtccgaagtcaccgcctttgcagttttggaccaggaccaaaaggaaatcattgatactaatggtgcaggggacgcttttgtgggaggattcctgagccagctggttagtgacaagcccttgacagagtgcatccgggctggccactatgccgcttcaattataattaggaggacagggtgcacctttcccgagaaacctgatttccactag

SEQ ID NO: 213644 - DNA, 1038 bp, synthetic construct
  misc_feature 1..1038: note = Description of Artificial Sequence: Synthetic coding sequence
  source 1..1038: mol_type = other DNA
atgacctcagtaagagagaatattctctttggcatgggtaatcccctgcttgacatctctgctgtagttgacaaggacttcctggacaagtatagcttaaagccaaatgaccagatactggcagaggacaaacacaaggaattgtttgatgagctcgtgaagaagttcaaggttgagtaccacgctgggggatctactcaaaactcaataaaagtcgcccaatggatgattcaacagccgcataaagcagcgacatttttcggctgtatcggaattgacaaatttggagagattttaaagagaaaagcagcagaggcccacgtggatgctcactattatgaacagaacgagcagcctaccgggacttgcgcggcatgcataacgggcgataacaggagcctcatagccaacttagctgccgctaactgctacaaaaaagaaaaacacctggatcttgagaaaaactggatgctcgtggaaaaagctcgagtgtgttacattgccggtttctttctgacggtcagcccagagagcgtgctcaaagtggcccatcacgcatcagagaataatcggatctttaccctcaacttatcagctcctttcatttctcagttctacaaggaatcccttatgaaagtgatgccctatgtcgacatactgtttgggaacgagaccgaggctgcgacttttgcacgggaacagggtttcgagactaaagatattaaagagatcgccaagaagacccaggccttacccaagatgaacagtaagaggcagcgcatcgttatctttacacagggtagggacgataccatcatggccaccgaaagcgaagtgactgcgtttgcagtgctggatcaggatcaaaaggagatcattgacacaaatggggctggcgatgccttcgttggcggatttcttagccagctggtctctgacaagccattgaccgagtgtatcagggctggccactatgccgctagtattatcatccgacggaccggttgtacttttcctgagaaacctgatttccactag

SEQ ID NO: 213645 - DNA, 918 bp, synthetic construct
  misc_feature 1..918: note = Description of Artificial Sequence: Synthetic coding sequence
  source 1..918: mol_type = other DNA
atggccgcagctgaagaagagccgaagcccaaaaagctgaaggtagaagctccacaggctctgcgggaaaacatactcttcggaatggggaacccactcctggacatttctgccgtggtggataaagacttcctggacaaatattctctcaagcccaatgaccaaattctcgcagaagacaagcacaaggagctgtttgatgaacttgtgaaaaaatttaaggtggagtatcacgctggcggttcaacccagaactccatcaaagtagcacagtggatgatccagcagcctcataaggccgctacttttttcggctgcattggaattgataagttcggagaaatcctcaaacgaaaagccgcagaggcacacgtagatgctcactattacgagcagaatgagcagcccacaggcacttgtgccgcatgcattaccggcgacaaccgcagcctgattgcaaacctggcagctgccaactgctataagaaggagaagcacctcgatctggaaaagaactggatgcttgtcgagaaagcgcgagtgtgttatatcgcagaggccgctacctttgcacgcgagcagggattcgaaacaaaggacatcaaagagatcgccaagaaaacacaggccttgccaaagatgaattcaaaaaggcagcggatcgttattttcacgcagggccgagatgataccatcatggccactgagtctgaggtcaccgctttcgctgtgctcgatcaggatcagaaggaaattatcgacacaaacggcgctggagacgcgtttgtagggggtttcctatctcaactggtgagtgataaacccctcactgagtgcatacgagccggacattatgctgcctccattattattcggagaaccgggtgtactttccccgaaaagcctgactttcactag

SEQ ID NO: 213646 - DNA, 984 bp, synthetic construct
  misc_feature 1..984: note = Description of Artificial Sequence: Synthetic coding sequence
  source 1..984: mol_type = other DNA
atgacttcggtgagagaaaacattctctttggtatgggcaaccctctgctggatatatccgccgtggtggataaggatttccttgacaagtttgacgagctagtgaaaaagtttaaagtggagtaccatgctggtggttcgacgcaaaacagcataaaagtggcccagtggatgattcaacaaccacacaaggctgcaactttctttggttgtatcggcattgataagttcggagagatacttaagcggaaagcggctgaagcacatgtggatgcacactattatgagcaaaatgagcagcccacagggacctgtgcggcttgcatcactggcgacaaccgctccctgatcgccaaccttgccgctgccaactgttacaagaaagagaagcatctcgacttggagaagaactggatgctggtggaaaaggcacgtgtatgctatatagcgggattctttctgaccgtgtcaccggagagcgtcttgaaggtggcacatcacgcttcagagaataatcgtatcttcactctcaacctgtctgcaccctttatttctcagttttacaaggagtcgctcatgaaagtcatgccctacgtcgatatcctttttggtaacgagaccgaggctgctaccttcgcacgcgagcagggattcgagaccaaagatatcaaagaaattgccaaaaaaactcaggccctgcctaaaatgaactctaagagacagagaattgtgatttttactcaggggagggacgatactattatggccaccgagagcgaggtgacggccttcgctgtcctggaccaggatcagaaggagatcatcgacaccaatggagcaggcgacgctttcgtgggcggattcctgagtcagttggtgtccgataagcccctcactgaatgcatccgggctggtcactacgccgcatctatcatcatccggagaaccggttgcacctttcccgagaagccggatttccactag

SEQ ID NO: 213647 - DNA, 2244 bp, synthetic construct
  misc_feature 1..2244: note = Description of Artificial Sequence: Synthetic coding sequence
  source 1..2244: mol_type = other DNA
atgccgctgttcaaactgcctgcagaagagaaacagatcgacgatgccatgaggaactttgccgagaaggtgttcgccagcgaggttaaggatgagggcggaaggcaagaaattagtccctttgacgtggatgaaatttgcccgatcagtcaccacgaaatgcaggcccacatctttcacctggagacactatcaacgagtactgaagcacgccgaaagaagcgcttccagggtaggaaaactgtcaatttatccattcctctttcagagacaagctccacgaagctgagtcatattgatgaatatatttcctccagccccacttaccagaccgtcccagacttccagcgagttcagataactggcgactacgcttctggcgtcacagtcgaagatttcgagattgtgtgcaagggactgtaccgtgcgttatgtatcagggaaaaatatatgcagaagtccttccagcgttttccaaaaacaccgtctaagtaccttcggaatatcgacggcgaggcgtgggtggccaatgaaagcttttaccccgtgtttacacctcctgtgaaaaaaggtgaggaccctttccgtaccgataatctgccagaaaatttgggataccatctgaaaatgaaagatggcgtagtttacgtataccccaatgaggccgcagtcagtaaggacgagcctaagcccctgccataccctaacttggacacgttcttggacgatatgaactttctactggcactcatagcacagggacctgtgaaaacatacacccatcgtaggttgaagttcctgtcttcaaaattccaagtgcatcagatgcttaatgaaatggacgaattgaaggaactgaaaaataacccccacagagatttttataattgtagaaaagtcgacacccatattcacgctgcagcgtgtatgaatcagaagcacttattgagatttatcaagaaatcttaccaaatcgacgcagaccgggtagtctacagcacaaaggagaaaaacttgactctcaaggagttgttcgctaaactgaagatgcatccatatgatctcaccgtggatagcctggatgtgcacgccggaagacagacctttcagcgctttgacaaatttaacgataagtacaacccagttggagcctctgaactgagggatctttacctgaagacagacaactacatcaacggggaatacttcgcgacaattattaaggaggtaggtgcagacctggttgaagctaagtaccagcacgcagaacccaggctgtccatctacgggcgttctcctgatgagtggtccaagctgtccagttggtttgtgtgcaaccgtatccactgccccaatatgacctggatgatacaggtgccacgcatttacgacgtatttcggagcaaaaacttcctcccacatttcgggaaaatgctggagaacatcttcatgcctgtgttcgaggctaccatcaacccgcaagctgacccagagctgtcagtgtttctgaagcacatcactggatttgattctgtggatgacgagtctaagcactccggacacatgttctcatccaaaagcccaaagccacaggaatggacactggaaaagaacccctcttacacgtactacgcgtactatatgtacgccaacataatggtgcttaattcgttgcgcaaggaacgtgggatgaataccttcctgtttcggcctcattgcggtgaagcaggggctctgacacatctgatgacagcgtttatgatagctgacgatatctcacacggattgaatctgaagaaatcaccggtgttgcagtacctttttttcctggcccagattccaatagcgatgtcgcctctgagcaacaattccctgtttcttgagtatgccaagaatccttttctggatttcttgcaaaaaggcctgatgatttccctatcaacagatgacccaatgcagtttcacttcactaaggagcccctcatggaagagtacgcaatcgcagcgcaagtgtttaaactgtccacttgtgatatgtgcgaggtggcaagaaacagtgtccttcaatgtgggatatcccacgaagaaaaagtgaagttcctgggagataactatcttgaagagggtccagccggaaacgacatccgacgtactaatgtggcccagatcagaatggcatatagatatgaaacatggtgctacgagttgaaccttatcgccgagggactaaagagtaccgaatag

SEQ ID NO: 213648 - DNA, 2343 bp, synthetic construct
  misc_feature 1..2343: note = Description of Artificial Sequence: Synthetic coding sequence
  source 1..2343: mol_type = other DNA
atgaatgttcgaattttctactctgtgtcccaatctcctcactccctcctgtctctccttttctactgcgccatcctggagtcaagaataagtgctactatgccactcttcaagttacccgctgaggaaaagcagatagacgatgcaatgcgtaattttgcagagaaagtgtttgcgtccgaagtcaaggatgagggaggtcggcaggaaatcagcccattcgacgtggacgaaatctgccccatcagtcatcacgagatgcaggctcacatcttccatctcgagacactgagcacatcaaccgaggcgcgaaggaaaaagcgcttccaggggcgtaagacagtgaacctcagcattcccttgtccgagacaagctctactaaactatctcatattgacgaatacatttctagcagccccacctatcagactgtgccagatttccaaagggtgcagataaccggagactatgcgtctggggtgacggttgaagactttgaaatcgtgtgcaaggggctgtaccgagctctgtgcatccgggagaagtatatgcagaaatcatttcagaggtttccaaagacgccctccaaatatctgcgcaacatagatggcgaggcgtgggtcgccaacgaatccttctatccagtgttcacaccgccagtcaagaagggggaggatccttttcggaccgacaacttacccgagaacctcggatatcacctgaaaatgaaagatggagtcgtgtatgtttacccgaatgaagccgctgtaagcaaggacgagcctaagcccctgccatatcctaatctggacaccttcctggacgacatgaattttttgctcgcgctgatagcccagggccctgtaaaaacctacacacatcgacggttgaagtttctttccagcaaattccaagtgcaccaaatgctcaatgaaatggatgagctcaaggagttaaaaaacaaccctcatcgtgacttctacaactgtcggaaggtagatacgcatattcatgctgcggcatgtatgaaccagaagcatctgctgcgcttcatcaaaaagtcttatcagatagatgctgacagagtggtgtattccaccaaggaaaaaaatttaaccctcaaagagctgttcgccaaacttaagatgcacccctatgacctcacagttgactccttagatgtgcatgctgggcgacagaccttccaacgctttgataagtttaacgataagtacaaccctgtcggcgcttccgaactcagggacctgtatctgaagacagacaactacattaatggcgagtattttgcaaccatcatcaaagaagtgggagccgacctcgtggaagctaagtatcagcatgctgaacctaggctgagtatttacgggcgttcccccgacgaatggtctaagctgagctcctggttcgtatgcaaccgtattcactgtcctaacatgacgtggatgatccaggttccacgcatttacgacgtattcaggtccaagaactttctgccgcactttggaaagatgcttgagaacatattcatgccggtgttcgaagccaccatcaacccccaagcggatccagagctctccgtgtttctgaaacacattacagggttcgactcagtcgatgacgagtccaaacacagtgggcacatgttttcttccaagagcccaaaaccccaggagtggactctggagaagaacccatcatatacctactatgcctactacatgtacgcgaacattatggtgttgaactccctacgaaaggaaaggggtatgaataccttccttttcagaccccattgcggtgaagcaggggctttaacacacctcatgacggccttcatgatagctgatgatatatctcacgggttaaatctaaagaagtcacctgtgcttcagtacctgttctttctggcccagatccccatagctatgtcacccctctccaacaatagcctctttctggagtacgccaaaaatcccttcctggactttctccaaaagggactaatgataagcctctccactgatgatccgatgcagttccactttaccaaggagccactgatggaagaatatgcaattgccgcacaggtttttaagctttctacctgcgacatgtgcgaagtggcaaggaactcagtgctgcaatgtggtatcagccacgaggagaaggttaagttccttggcgacaattacttggaagagggaccggcagggaatgatatccgcaggactaacgtggcccagatacgaatggcttatcgctatgagacttggtgctacgagttaaaccttattgctgagggtctgaaaagtacagaatag

SEQ ID NO: 213649 - DNA, 2331 bp, synthetic construct
  misc_feature 1..2331: note = Description of Artificial Sequence: Synthetic coding sequence
  source 1..2331: mol_type = other DNA
atgaacgtccgcatattttattcagtgagccaatcacctcattcactactgtctcttctgttctactgtgccattttggaatccagaatttctgccaccatgccactgtttaaactcccagagatagatgacgctatgaggaatttcgccgaaaaagtcttcgcatctgaagtaaaggatgaaggtgggagacaggagatcagtccgttcgatgtggatgaaatctgccctatttcacatcatgaaatgcaggctcacatattccacctcgaaacacttagcacgagcaccgaagcacgcagaaagaagcgcttccaggggcgaaagacagttaacttgtcaattcctttgtctgaaacatcatcaactaaactgagtcacatcgacgagtacattagttcttccccaacataccagaccgtgcccgatttccaaagagtgcagataactggggactacgcatctggcgtgacggtggaagactttgaaatcgtgtgcaaggggttgtaccgtgcattgtgcatccgcgaaaagtacatgcagaagagcttccagcggtttcctaaaactccctctaagtatctgaggaacatcgatggggaggcctgggtggctaacgagtcgttctaccccgtgttcaccccacccgttaaaaaaggggaagacccctttagaacagacaacctgccagagaacttagggtatcacctgaaaatgaaggatggagtagtttatgtctatcccaacgaggcagcggtgtccaaggatgaacctaaaccgctgccatatccaaacttggacacttttttagatgatatgaacttcctgctcgctctgatcgcccagggtcccgtgaaaacatatacgcaccgaaggctaaagttcttaagcagcaagtttcaggtgcatcaaatgttgaacgagatggacgaactgaaggaactgaagaataatccccaccgggatttctataattgcaggaaggtcgacactcatattcacgctgccgcatgcatgaaccagaagcacctgctccgattcattaagaagtcctatcagatcgacgcagatcgggtcgtttatagcactaaggagaagaacctcacccttaaggaattgtttgccaagcttaagatgcatccatacgatctcacggtggattcactcgacgtacacgccggtcgccaaaccttccagcggtttgataaatttaacgataagtacaaccctgttggcgctagtgagttgagggatttatacttgaagacagataactacatcaatggcgagtacttcgctactatcattaaggaggttggagccgacctggttgaggccaagtaccagcacgctgaacctcggttgtcaatctacggcagatcccccgacgagtggtcgaagctctcctcttggttcgtgtgtaaccgtattcactgccccaacatgacgtggatgatccaggttcccagaatatacgatgtcttcagatccaagaactttttaccccacttcggaaaaatgcttgaaaacatattcatgcccgtatttgaggcaaccatcaacccccaggccgatcccgagctctctgtgtttttgaagcatataacgggctttgatagcgtggacgatgagtctaagcattctggtcatatgttctcatctaaaagcccgaaaccacaggagtggactttggaaaaaaaccccagctatacctactatgcatattacatgtatgccaacattatggtgctcaacagccttcgaaaggagcggggaatgaacacatttctctttcgtccccactgcggcgaagctggcgcactgactcatctgatgactgcattcatgatcgcagacgacatcagtcacgggctgaatctgaagaagagccctgtacttcaatacctcttctttctagctcaaattcccatcgctatgtccccccttagcaataattcgttattcctggaatacgcgaaaaaccctttcctggattttctgcagaagggactgatgatcagcctctctaccgacgacccaatgcagtttcacttcactaaggaacccctaatggaggaatacgccatcgcggctcaggtgtttaagctgtcaacttgcgacatgtgtgaggtagccagaaactctgtgcttcagtgcggcataagccatgaagaaaaagtgaagttcttaggagacaattatttggaggaaggtcctgctggaaatgatattagaagaactaacgtggcccaaattcgtatggcctataggtatgaaacgtggtgctacgaactcaatctcatcgccgagggtcttaaaagcaccgaatag

SEQ ID NO: 213650 - DNA, 2640 bp, synthetic construct
  misc_feature 1..2640: note = Description of Artificial Sequence: Synthetic coding sequence
  source 1..2640: mol_type = other DNA
atgaggaacaggggtcaggggctgttccgcttgagaagccggtgcttccttcaccagtcactacccctcggagccggtcggaggaagggactcgatgttgccgagcctgggccatctagatgcagatccgatagccccgcagtcgccgcagtagtgccagcaatggcatcttatccctctgggtctggaaaacctaaagcaaagtacccatttaagaaacgcgcttcactacaggcctcaacggcagccccagaggcgcgtggcggtctgggggcaccccctctccagagcgcgcgatctctcccgggtcccgctccttgcctgaaacacttccctctggacctcaggactagcatggatggcaagtgcaaagagatcgcagaagaactcttcactcgctcattggccgagtccgagctgaggtccgcaccatatgagtttccagaggagtctcccatcgaacaactggaggagcgccgacaacgtctggaaaggcagatttcacaggacgtcaaacttgaaccagacatcttgctgagagccaagcaagattttttaaagactgattctgacagcgatctccagctgtacaaagagcagggggaaggacagggcgaccgctccctgagagagcgtgacgtcctggagagggagtttcagagggtcaccatttctggtgaggaaaagtgcggcgtcccgtttaccgatctgctcgatgctgccaaaagtgtggtgagagcattgtttattcgggaaaagtatatggccctttcactacagtcgttctgtcccactaccagaaggtatctgcagcagcttgccgagaaaccactggagacacggacctacgagcaggggccagacacacctgtctctgctgatgctccagtgcaccctccagccttagagcagcatccctatgaacattgcgagcctagtacaatgcccggagacctcgggctgggtctgcggatggtgagaggtgtcgtccacgtatacacccgacgcgaacctgacgagcactgctctgaggttgagcttccctacccagatctgcaggagtttgtggccgacgtgaacgttctgatggccctcatcattaatgggcctatcaaatctttctgctataggagactgcagtacctgtcaagcaagttccaaatgcacgtgcttttgaatgaaatgaaggagttagccgctcagaaaaaagtcccccaccgagacttctacaatattcgaaaggtggacactcacatccatgcatcatcatgcatgaaccagaagcacctactgcgcttcattaaacgcgcaatgaagcgacacctggaagaaatcgtgcatgtggaacagggccgtgaacagaccctgcgagaggtattcgaatctatgaacctgacagcttatgacctgagtgtggacacactcgacgttcacgccgaccggaatacattccacaggttcgacaagttcaacgctaagtataaccctatcggtgaatctgttctgagggaaattttcatcaagaccgacaatcgcgtgagtgggaagtactttgcacatataattaaggaggtgatgagtgacctggaggagagcaagtatcagaatgccgaactacggttgtcaatctatgggaggtcgcgagacgagtgggacaagttggcacgctgggcggtcatgcacagagtgcactcccctaatgtaagatggttggtgcaggtacccaggctgtttgatgtgtaccgaaccaagggccagctggcgaattttcaggagatgctggagaatatcttcctgccactcttcgaagccacagtgcatcccgcatctcacccggagcttcacctgtttctcgaacacgttgatggcttcgacagtgtagacgacgaaagcaagcctgaaaaccacgtgttcaacttagagtctccactccctgaagcgtgggtcgaggaggataatcctccgtacgcctactatctgtactacacgtttgccaacatggccatgctgaaccatctgagaagacagagagggtttcacactttcgttctacgccctcattgtggagaggcaggaccaattcatcatttggtcagcgcgttcatgctcgccgagaacattagccatggtctgttactgagaaaagcacctgtgctccagtatctttattatttggcccagattgggatcgcaatgtccccgctgtcaaacaactcactgtttctgagctaccacagaaatcccctccccgagtacctgagccgagggctgatggtgtcgctgagcaccgatgatcccttgcaatttcacttcactaaagaacctctcatggaagaatactctatcgcgacacaggtttggaagctctcgtcttgtgacatgtgtgagctcgcacggaattctgtgcttatgagcgggtttagccataaagtgaagtcgcattggcttggacctaattataccaaagaaggacctgaaggcaacgacatacgcagaaccaatgtgccagatattcgagtggggtataggtacgagactttgtgccaggagctggccctgataacccaggcagtccagtccgagatgttggagacgattccagaagaggcaggcatcacgatgtctcctggccctcaatag

SEQ ID NO: 213651 - DNA, 2397 bp, synthetic construct
  misc_feature 1..2397: note = Description of Artificial Sequence: Synthetic coding sequence
  source 1..2397: mol_type = other DNA
atggcctctgaggccaggggcggactgggtgcccctccattgcagtcagcccgaagcctccccggaccagccccatgcctgaagcactttcctttggatttgaggacaagtatggatggtaagtgcaaggaaatcgcagaggaactatttaccagaagcctggccgagtctgagctgcgctctgctccttacgaatttcctgaggagtcacccatcgaacagctcgaggagaggaggcagcgcttggaacgacaaatttcacaggatgtcaaattggagccggacatactgcttcgagccaaacaggacttcctcaaaaccgatagcgacagcgacttgcagctttacaaagagcagggagaagggcagggagaccgaagtttacgtgagagggacgtccttgagagggaattccagcgtgttacaatctccggcgaggagaaatgcggggttccgttcacggacctgctcgacgccgctaagagcgtcgtgcgggctctgtttatccgcgagaagtatatggctctgtctctccagtcattttgtccaactacacgcagatacttgcagcagctggctgagaaaccgttagagacccgcacttatgaacagggcccagacactcccgtgtccgccgacgctcctgtgcatcctccggcacttgagcagcatccttatgagcactgtgagcctagcacaatgccaggcgatcttggattgggcctccgaatggttcgaggcgttgtgcacgtatacacgcgaagagaacctgacgagcactgtagcgaggtggaacttccctacccagaccttcaggagttcgtggctgacgtgaacgtcctgatggccctgatcattaatggcccaattaaaagcttctgttaccggcgtctgcagtacctctcctcaaagtttcagatgcatgtgctgcttaatgagatgaaagagctggccgcacaaaagaaggtgccacaccgcgacttctacaacatcaggaaggtcgacacccatatccacgctagctcctgtatgaaccagaagcacttgttaaggtttattaaacgggctatgaagcgacatttagaggaaatagtacacgttgaacaagggcgtgaacagactctccgggaggttttcgagagcatgaacctgaccgcctatgacctgtccgtagatacactggatgtccacgccgataggaacacattccacaggtttgacaagttcaacgccaagtataatccgattggtgagtcggtcttacgagagatttttatcaagaccgacaaccgtgttagcggcaagtacttcgcgcacatcatcaaagaggtcatgagcgacctagaggagtcaaagtatcaaaacgccgagttacgcctatcgatctatgggagatctcgagacgagtgggataaacttgcacgctgggctgtgatgcacagggtgcatagccctaacgtgcgatggctggttcaggttccaagactgttcgacgtctatcggacaaaggggcagctcgctaattttcaggagatgctcgagaatatttttctccctctgttcgaggcaaccgtccaccctgcaagtcaccccgagcttcatctgttcctggaacacgtcgatggttttgactccgtggacgatgagagcaaaccagagaatcacgtctttaatcttgaaagcccactgcccgaggcttgggtagaggaggataatcctccctacgcatactatctttattatacatttgctaacatggctatgttgaaccaccttcgaagacagcgcggattccatacttttgtccttagacctcactgcggagaagctggcccaattcatcaccttgtttccgccttcatgcttgctgaaaacatttcccacggtctattgcttagaaaggctccagtgcttcagtacctttactacttggcacagatcgggatcgccatgtcacctctgtccaataactctctgtttcttagctaccacagaaatccactacccgagtacctctcgcgcggattgatggtatccctttccactgacgacccactgcagtttcactttaccaaagagcccctgatggaggagtattccatcgcgacacaggtctggaaactttccagttgcgacatgtgcgaactggctagaaactctgtactcatgagcggctttagccacaaggtgaagtctcattggctcggtccgaactacacaaaagaaggacccgaaggaaacgatattcggaggacaaacgttcccgacatacgggtgggctacagatacgagacattatgtcaagaacttgccttgatcacccaagccgtgcagagcgagatgctggaaaccattcctgaagaggcagggatcaccatgagtcccggaccccaatag

SEQ ID NO: 213652 - DNA, 2415 bp, synthetic construct
  misc_feature 1..2415: note = Description of Artificial Sequence: Synthetic coding sequence
  source 1..2415: mol_type = other DNA
atgtggcagagccaagccccagcaggagccgcacagacgcctcccttaagccctccttggagtcagccatggcatcccatccatcttgcactagccagcccaaggcccaacatccctcttaggtcaggccctgcttgtagacccccactgcagcttcaagaactgttcacgagatcacttgccgaaagtgagcttcgcagcgctccctacgaattccccgaagaaagccccatcgagcaactagaagaaaggagacagaggttggaacgccagatctctcaggacgtgaagttggagcctgatatactcctcagggccaagcaggatttcctcaagaccgactctgacagcgatctccaactttacaaagaacagggcgaaggacagggagaccggagcctccgggagcgggatgtgctggagagagagttccagagagtaaccatctcaggcgaggaaaaatgtggagtgccattcacagacctgctggacgcagctaaatcggtggtcagagccctgtttatccgagaaaaatacatggctttgtctctgcagtctttttgcccgaccacacgcagatatcttcaacagctggcagagaagcctctggagactaggacctacgagcagggacccgacacacccgtgtccgcggatgcgccagtgcatcccccagccctagaacagcacccgtacgaacactgtgaaccttctaccatgccaggcgacttgggactgggactgagaatggttcgaggagtagtgcacgtgtatacccggagagaaccagatgagcattgctctgaggtggagctgccttatccagacctgcaggagttcgttgcagacgtgaacgtgctcatggccttgataattaacgggccaattaagagtttctgttaccgccgactgcagtacctgagctctaaatttcagatgcatgtgcttctgaatgagatgaaagagctcgccgcacaaaaaaaggtgccacacagggacttttacaacattaggaaggtcgatacgcacatccacgcgtcttcatgcatgaaccaaaagcatctgctgaggttcattaagcgcgcaatgaagcgacacctggaagaaattgtacacgtcgagcaaggacgggagcaaactctccgcgaggtgttcgagtcaatgaaccttacagcgtacgacctgagcgttgatactctggatgttcacgcagaccggaataccttccacagattcgataagttcaatgcgaagtataatcctataggcgaatccgtgcttagagaaatctttattaagacagacaaccgcgtttccggcaagtacttcgcacacattatcaaggaagtgatgagcgacctggaagaaagcaaataccagaatgctgagctcaggctcagcatatatggcagatcaagagatgagtgggacaaactcgccagatgggccgtcatgcatagggtccactccccaaatgtgaggtggctggttcaggtgccacgcctgttcgatgtctaccgaactaaaggacagttggctaatttccaagaaatgctggagaacatttttctcccactgttcgaagccactgtgcatcccgcatcccacccagaactgcacctttttctggaacatgttgacggctttgacagcgtagacgacgagagtaaacctgagaatcacgtgtttaatttggagtcccctttgcctgaggcctgggttgaggaggacaaccccccatatgcctactatttatactacacgtttgcaaacatggccatgctgaaccacctcaggagacagcgagggtttcacacattcgtgttgagacctcactgcggagaggctggaccaatccaccacctcgtgagtgcatttatgctagcggaaaacataagtcacggacttctgcttcgcaaagcgcctgtcctgcagtatctttattaccttgctcagattgggattgcgatgagtcctctaagtaataactcactctttctgagttatcaccggaacccactgccggagtatctgagccggggtctcatggtaagcttatcaactgatgacccactgcagttccactttaccaaagagcctcttatggaggagtactctatagccacccaggtttggaaactgtcttcgtgtgacatgtgtgaactggccagaaattctgttcttatgtccggcttctctcataaggtgaagtcacactggctcggccctaattacactaaagaagggcctgagggcaatgacatcaggcggacgaacgtccccgacattagggtcgggtatcgatacgagactctgtgccaggaattggcgctgattacacaggctgttcagtcagaaatgcttgagacaatccccgaggaggctggcatcaccatgtcgcccggacctcagtag

SEQ ID NO: 213653 - DNA, 2283 bp, synthetic construct
  misc_feature 1..2283: note = Description of Artificial Sequence: Synthetic coding sequence
  source 1..2283: mol_type = other DNA
atgctgaccttcctgcccagccctcaggagttgtttactcgctccctggctgagtcagagctgcgttctgccccttatgagttcccggaagaatcaccgatcgagcagctcgaagagcggagacaacgactcgagaggcagatctcgcaggatgtcaaactcgaacccgacatccttctgcgggcaaagcaggattttctcaagacagacagcgatagcgacttgcagctctacaaggaacagggggaggggcagggcgaccggtcgctaagagaaagagatgtgttggagcgagagtttcagcgcgtcaccatcagtggcgaggaaaaatgtggcgtccctttcacagatctgctggacgccgctaagtcagtggtgcgcgctctttttatccgagagaagtatatggccttgagtctacagagcttttgtcctacgactagacgctaccttcagcagctcgcagaaaaacccctggaaacgcggacctacgaacaggggcctgatacaccagtgagtgccgatgctcctgtgcatccccctgcacttgagcaacatccgtatgagcattgtgagccaagcaccatgccaggtgatcttggcctcgggttgagaatggtgaggggcgtggtccatgtttacactcgcagggaaccagacgaacattgttcggaggttgagctcccgtatcctgatctgcaggagttcgtggccgatgtcaacgtcttaatggccctgattataaacggacctatcaaatcattttgttataggaggttacaatacctctcctctaaatttcagatgcacgtgctgctgaacgagatgaaagaattagcagctcaaaagaaagtgccccacagggatttctataacatccgcaaggtggatacccacatacacgcatcctcttgcatgaatcagaagcatttgttacggttcatcaagcgcgcaatgaaacgccacttggaggaaattgttcacgtggaacaaggccgtgaacaaactctcagagaggtgtttgagtctatgaatctcacggcctatgacctgtctgtagataccttggatgtacacgctgaccggaatacctttcaccgcttcgataagttcaacgccaagtataatccaattggcgaaagtgttctacgcgagatcttcattaaaacggacaaccgggtgtccggaaaatatttcgcacatatcatcaaggaggtcatgagtgacctggaagagtcgaagtaccagaacgccgaattgcggctgtcaatctacggacgctctcgcgatgagtgggataagctggcgcgttgggccgtcatgcaccgggtgcactctcctaatgttcggtggcttgtacaggtaccaaggctgttcgacgtgtacaggactaagggacagctcgcaaacttccaagaaatgttggagaatattttcctcccactcttcgaagctacagtacaccctgcttcgcaccccgagctccacctgttcctggaacatgtggacgggttcgattctgtcgatgacgaaagtaaacccgaaaaccatgtattcaatctcgaatccccactgcccgaagcctgggtcgaagaagataatcctccctacgcctactatctgtactacacctttgcgaacatggccatgttgaatcacctgcggcgacaacgaggcttccatacattcgtgctaaggcctcattgtggtgaggctgggcctatccatcacttggtctcggcgtttatgctggctgaaaacatctctcacgggctactgctgcgtaaagctccagtgctccagtacttgtactacctggctcagataggaattgcgatgtcaccattgtctaataattcactgtttctgtcttaccaccgaaacccccttccagagtacctgtctcggggattaatggtttctctatccacagacgatcccttgcagttccactttaccaaagaaccgctcatggaagagtacagcattgccacgcaagtgtggaagctgtcgagctgtgacatgtgcgagctcgcaaggaatagcgtgttaatgagcggattttcacacaaagtgaagtcccactggctgggtcccaactacacgaaagaaggccctgagggcaacgatatcagacgaaccaacgtgcctgatatcagggtggggtatcgatacgaaacgctgtgtcaggagctggcactgataacacaggctgtgcaatctgagatgttagaaaccattcccgaggaagctggaattaccatgagtcctggcccacagtag

SEQ ID NO: 213654 - skipped

SEQ ID NO: 213655 - DNA, 2640 bp, synthetic construct
  misc_feature 1..2640: note = Description of Artificial Sequence: Synthetic coding sequence
  source 1..2640: mol_type = other DNA
atgcgaaatcgaggccaggggctttttcggctcaggagcaggtgcttcctgcaccagagtctgcccctgggtgcaggaagacggaagggcctggatgtggcggaacccggacccagccggtgccgaagcgacagccccgcagtcgccgcagtggtccctgcgatggcttcctatccctctggctctggcaaaccgaaggcaaaatatcccttcaagaagagagctagtctacaggccagcaccgctgcgccagaggcgcgaggcggactcggcgcacccccactccaaagtgcaagaagtcttccaggcccagcgccatgcctcaaacactttccgctcgacctacggacgagtatggacggtaaatgtaaagagattgcggaagagctatttacacggagccttgcagagagtgagctgcgcagtgccccttacgagtttcctgaggaaagtccaattgagcagctggaagaaagacgccaaagactcgagcgccagataagccaggatgtgaagctcgagccagatatcttgctccgtgccaaacaagactttctcaaaacggatagtgactccgacctccaattgtacaaggaacaaggagaggggcaaggtgatagaagtctcagggagcgcgatgtgctggagcgcgaattccagcgggtaacgataagcggcgaagagaagtgtggagtgccattcactgatctgcttgacgccgcaaagtcagtagtccgcgcattgttcatcagagagaaatacatggctctctctttgcagagcttctgtccaaccacacggaggtatctgcagcagttagctgaaaagcctctggaaacacgcacgtacgaacagggtcccgacacccccgtctccgcagatgctcccgtgcatccacccgcattggagcagcacccgtacgagcattgtgaacctagtacgatgcccggagatctggggctgggactgcgtatggtgcgcggagttgtgcacgtctacacgcgccgagagcccgacgagcattgtagcgaagtggagttgccttaccctgacttgcaggaattcgtcgccgatgtgaacgtgctgatggcactcattatcaatggacccattaagtcgttctgttatcgtaggttacagtatttgtcctctaagttccaaatgcatgtgcttctgaatgagatgaaggagctcgctgcccaaaagaaagtgccccatagggacttctacaacatcagaaaggtggacacccatatacacgcatcatcatgtatgaatcagaaacacctccttagatttatcaagagagctatgaagcgtcatttggaagaaattgttcatgtggagcagggcagagagcagaccttacgagaagtttttgaatctatgaacttgaccgcatatgacctgtctgtggatacgcttgatgtgcacgccgacaggaacacctttcacagattcgacaagttcaacgccaagtacaaccccataggggagtcagtgctgagggagatcttcatcaagactgataatcgggtttcaggaaagtatttcgctcacattatcaaagaagtaatgtcagacttggaggaatcaaagtatcagaacgccgaacttaggttgagtatctacgggagatcacgcgacgagtgggataagttagcacgctgggccgtaatgcaccgggtccattctcccaatgtgcgctggctagttcaggttccacgactgtttgatgtgtatagaaccaaaggacaactcgccaactttcaagaaatgctcgagaacatcttcttgcctctgttcgaggctactgtgcatcccgcaagccaccctgagttacacctctttctggagcacgttgatggtttcgacagtgttgacgatgagagtaaacctgagaaccatgtttttaacctagagtctcctcttcccgaagcgtgggtggaggaggataacccaccttatgcatactatttgtattatacgttcgctaatatggctatgctcaaccatctgcgtagacagagaggcttccacacctttgtgctgaggcctcactgcggagaagctgggcctattcaccatctagttagcgcgttcatgttagcggagaatatcagccatggactactattgcgaaaagcccctgtcttacaatatctctattatcttgcgcaaataggcatcgcaatgtcaccactctccaataattcactgttccttagctaccacagaaatcctttaccggagtatcttagccggggacttatggtcagtctatcgaccgatgacccattgcaattccacttcacaaaggagccacttatggaggagtactccattgccacccaggtttggaaactcagtagctgtgatatgtgtgaactggccaggaattctgtcctcatgtctggctttagtcacaaagtgaaatctcactggctgggcccaaactatacaaaagagggaccggagggcaacgacatccgcaggactaatgttcccgatatacgcgtgggttacagatatgagaccctgtgtcaagagcttgcgcttattacccaagcagtacaaagcgagatgctggagaccattccagaggaagcaggcattacgatgtcccccggtcctcagtag

SEQ ID NO: 213656 - DNA, 312 bp, synthetic construct
  misc_feature 1..312: note = Description of Artificial Sequence: Synthetic coding sequence
  source 1..312: mol_type = other DNA
atggcctccgaagcacgcggaggcctcggggcacccccactccagagtgcgaggagtctgcctggcccagccccatgcttaaagcatttccctttagacctgagaacaagtatggacgggaaatgcaaggagatcgctgaggagctgttcactcggagtttagcagaaagcgagctgcggagcgcgccatatgaattccccgaggagagtcctatcgaacaactggaggaaagaagacagcggctggaacgccagatcagccaagacgtgaagctggaaccagacattctcttgcgtgccaagcaggactag

SEQ ID NO: 213657 - DNA, 2304 bp, synthetic construct
  misc_feature 1..2304: note = Description of Artificial Sequence: Synthetic coding sequence
  source 1..2304: mol_type = other DNA
atgcccaggcaatttcccaagctgaacatttccgaggtcgacgagcaggtccgactactggccgagaaagttttcgcgaaagtactccgcgaagaagattccaaggatgccttgagtttattcaccgtgccagaggactgtcctattggccagaaagaagcaaaggagagagagctccagaaggagttagcagagcagaagtcggttgagactgccaagcgaaagaagtccttcaagatgattcgatcgcagtcactgagtttgcagatgccaccccagcaggattggaagggacctcccgctgcgtccccagctatgtcaccaaccacccctgtggtgaccggtgctacaagccttcccactcccgcaccctacgccatgcctgaattccagcgagtgactatttcaggagactattgtgccggtatcaccctggaggactacgagcaagcggctaagtctctcgcgaaagcactgatgattagggagaagtatgctcgactggcttatcaccggttccccaggattacgtcccagtaccttggccacccacgagccgacaccgcccctcctgaagaaggacttccagatttccaccctccacctctaccccaggaagacccatactgcctggatgacgcccctccgaacctcgactaccttgtccatatgcagggcggaatcctcttcgtgtacgataacaaaaagatgctcgaacaccaggagccgcattctctgccttatcccgaccttgagacgtatacagtcgacatgtctcatattctagccctgatcaccgacggtcctacaaagacatattgccaccggaggttgaattttctggagagcaagttttcacttcatgaaatgctgaatgaaatgtctgaattcaaggaattgaagagcaatccacatagggatttttacaatgttagaaaagtcgatacacacatccatgccgcagcttgtatgaaccagaagcatcttcttcgatttatcaaacacacctatcagactgaacctgatcggactgttgccgagaaaaggggacgaaaaatcaccctgcggcaggtttttgacgggctgcatatggacccatatgatctcactgtcgattctctagacgtgcatgctggacgtcagaccttccaccggtttgacaaattcaacagtaagtataacccagttggcgcttccgagcttagagatctgtatttgaaaacagagaattacctgggtggtgagtacttcgccagaatggttaaggaagtcgccagggagctggaagagtctaagtaccagtacagtgagcctaggctctccatttatggacgatcgccagaggagtggcctaacttggcctattggtttatccagcataaagtgtacagtcctaatatgcggtggatcatccaggtacccagaatttatgatatctttcgaagcaagaaactattacctaacttcggaaagatgctggaaaatatattcctgccactgttcaaagctacaatcaacccccaagatcatcgggaattacatttgtttctcaagtacgtgacaggcttcgactcagtggatgatgagtctaaacactccgaccacatgtttagcgacaagtctcccaatcccgacgtctggacctccgagcagaacccaccttattcttactacctgtattacatgtatgctaatattatggtgctcaataatttaagacgcgaaagagggctatccacctttctgttccggcctcattgcggtgaggcaggaagcatcacacatttggtgagcgcattcctgaccgctgacaatatctctcacggcttactgttaaagaaaagcccggtccttcaatacctgtactacttagctcaaattcctatcgccatgtctccgttatcaaacaattccctgtttctcgaatacagcaagaatccgctgagggagttcttgcacaagggattgcatgtttctctttcaacagacgacccaatgcagttccactacacaaaagaggctcttatggaggagtatgctatagctgcccaagtttggaaactaagcacatgtgatctgtgtgaaattgcccgtaatagcgtcctgcaatctggcttgtcacatcaggaaaagcaaaaattccttggacagaactactataaagaaggtccagagggcaacgacatcagaaagactaacgtggcccagataaggatggccttccgatatgagacgctatgtaacgagctgtctttcctgtccgacgccatgaaatcagaagaaatcactgctctgacaaattag

SEQ ID NO: 213658 - DNA, 2331 bp, synthetic construct
  misc_feature 1..2331: note = Description of Artificial Sequence: Synthetic coding sequence
  source 1..2331: mol_type = other DNA
atggcgttgtctagcgaacccgctgagatgcccaggcaattcccaaaactgaacatcagtgaggtggacgagcaggtcagactgctggctgaaaaggttttcgccaaagtgttgagggaggaagacagcaaggatgccctaagcctgttcaccgtgcctgaagattgcccaatcggacagaaggaagcaaaagagagagaattgcagaaagagttggccgaacagaagtccgtcgaaactgcaaagcgtaaaaagagtttcaagatgatcagatcacagtctctgtcccttcagatgccaccccaacaggattggaaagggcctcccgcagcctctcccgcaatgtcccccaccactccagtggtcaccggggcaacatcactccctaccccagccccatacgccatgcccgagtttcagagagtcactatcagcggagactactgcgccggaattaccctagaggactatgagcaggctgccaaaagccttgcaaaagcactcatgattagagagaaatatgccaggctcgcgtaccacagattcccccgtattacatcccagtacttgggacatcccagggccgacaccgcgccacctgaggaggggctgcctgactttcacccccctcccctgcctcaggaagacccttattgcctggacgatgcgccacctaacctcgactatctggtgcatatgcagggtggcattcttttcgtgtatgacaacaaaaaaatgctcgaacaccaggagccacattcattgccctacccagatctcgagacatacactgtagacatgagccatatcctggcgctgatcacggatgggccaactaaaacttactgccaccgcagactcaattttctagagagcaagttctctctgcacgagatgctgaatgaaatgtccgagttcaaggagcttaaatccaacccacacagagacttctataacgtaagaaaagtggacacccacatacacgccgcagcctgtatgaaccaaaagcacctcttaagattcatcaaacatacgtatcagacggagcccgacaggaccgtggccgagaagcggggaagaaaaatcactcttcgtcaagtgtttgacggcctgcacatggacccctacgacctgacggtggattccctcgacgtgcacgccggtcggcagacgttccaccggttcgataaattcaacagtaagtacaatcccgtcggagcatcagagctgagggatctctatttaaagaccgagaattacttaggcggagagtattttgccaggatggtgaaagaggtggctagagagctggaggagtccaaataccagtatagcgagcccaggctgagtatttatggtcgctctccggaagagtggcccaatcttgcgtattggttcatccagcataaagtatattctcccaatatgaggtggatcattcaggtccctcgcatctatgatatatttcggtccaaaaaacttctgccaaactttggaaagatgctggagaacatattcctgcctctcttcaaggcaacaatcaatccacaggatcaccgcgagctgcacctttttctgaaatacgtgacaggattcgatagcgtcgatgacgagtccaaacacagtgatcacatgttctccgataaatcaccaaatcccgatgtctggacctctgagcagaacccgccatacagctactatctgtactatatgtacgccaacatcatggtgctaaataatctgagaagagagagaggactgtcaaccttcttgtttcggcctcactgcggcgaagccggtagtattactcatctcgtaagtgcatttctgaccgcagacaacatctctcacggcctgctcctgaaaaagtcgcctgtgctccagtacttgtattatttagcacagatccccatcgccatgagcccactttctaacaacagtctattcttagaatatagtaagaatcccctgcgcgagtttcttcacaaaggactgcacgtgtccttaagcaccgatgaccccatgcagttccattacactaaagaggcactgatggaggaatatgctatagctgctcaagtctggaagctctctacttgtgatctgtgcgaaatagccagaaatagcgtcttacagagcggcctgagccaccaagagaaacaaaagttcctcggccagaattattacaaagaaggaccagagggcaacgatataagaaaaaccaacgtagcccagatccgaatggcttttcgctacgagaccctgtgtaacgagctgagtttcctgtctgatgctatgaagtcagaggagattacagccctgaccaactag

SEQ ID NO: 213659 - DNA, 1827 bp, synthetic construct
  misc_feature 1..1827: note = Description of Artificial Sequence: Synthetic coding sequence
  source 1..1827: mol_type = other DNA
atgataagagagaagtacgcacgcctggcataccatcggttcccccgaatcactagtcagtacctaggacacccacgcgcagacaccgcccctccagaagagggattgcctgattttcacccacctccactgccccaagaggacccctattgtctggacgatgctcctccaaatctcgactaccttgtgcacatgcagggaggcattctgtttgtctatgacaataagaaaatgctggagcatcaagaaccgcattctctcccatatcccgacttggagacatacacagtcgacatgtctcatattttggctctcatcactgatggcccaacaaagacctactgccatcgacggctgaatttcctcgagtctaaattctcccttcacgaaatgcttaacgaaatgagcgagttcaaagaattgaagagtaaccctcatcgggatttctataacgtgagaaaggtcgacactcacatccatgctgcagcttgcatgaatcagaagcacctcctaaggttcataaagcacacgtaccaaactgaacctgaccggaccgtggctgaaaagagaggacggaaaatcactctgcgtcaggtttttgatggcctccacatggacccctatgatctgactgtggattccctcgatgtgcacgcaggccgacaaacatttcatcgctttgacaaatttaactctaagtataatcccgtcggggcaagtgaactccgtgatctgtacttgaagaccgagaactaccttgggggagagtatttcgctcgaatggtgaaagaggtcgccagagaattggaggaaagtaagtatcagtactccgaaccacgactgagcatatacgggaggtctccggaagagtggcctaacctggcgtattggttcattcagcataaggtgtatagtcctaatatgcgttggatcatccaagtcccccgaatatacgacatttttcgtagcaagaaactactcccaaactttggaaaaatgctggagaatattttcctgcctttgttcaaagcgactatcaatccccaggaccatcgggaattacatctctttcttaagtacgtaactggctttgacagcgtcgatgatgagtcaaagcattccgaccacatgttttcagataaatccccgaacccggacgtgtggaccagcgaacaaaaccctccctattcgtattatctgtactacatgtacgccaacattatggtgctcaacaacctgaggcgggaaagaggtctgtctacctttttgttcagaccccactgcggcgaagcaggctccataacacatctggtgtccgcctttctcacagcagataacatttcccatggactgttgctgaagaagtcacctgttctccagtatctgtattatctcgcacagatacccattgccatgtcacctttgtctaataactctctttttctagaatattccaaaaacccacttagagaattcctccacaagggtctccatgttagcctctccaccgatgacccaatgcagtttcactacactaaagaggccttgatggaggagtacgccatcgcagcccaggtctggaaacttagcacttgtgacctatgcgagattgctagaaactccgtgctgcagtcaggattgagccaccaggagaaacagaagttcctggggcaaaactactacaaagaaggcccagagggcaatgacatccggaaaacaaatgttgctcagatccgcatggcgttccggtacgaaactctgtgcaatgagctgagctttctgagcgacgcgatgaaaagtgaagaaatcacagccctcaccaactag

SEQ ID NO: 213660 - DNA, 804 bp, synthetic construct
  misc_feature 1..804: note = Description of Artificial Sequence: Synthetic coding sequence
  source 1..804: mol_type = other DNA
atgccaagacagtttcccaagctcaatatcagcgaggtcgatgagcaagttcggcttcttgcggaaaaagtgtttgcgaaggtgctgcgtgaggaagattccaaggatgcacttagcttgttcacggtgcctgaggattgtcccatcggacagaaagaggccaaagaacgcgaactgcagaaggaactagcagagcagaaaagtgtggagacagccaaacgtaaaaaaagcttcaaaatgatcagatcacagtctctatctctgcagatgcctcctcagcaggattggaagggcccacctgcggcttctcctgcgatgtcccctaccacgcccgtggtcacaggtgcaacaagcctgcctaccccggctccatatgctatgccagaattccaaagagtaaccatttctggggactactgtgccggaatcacattagaggattatgagcaagccgcaaagagtttagccaaggcccttatgatccgcgagaaatatgccagactggcgtaccaccggtttccgaggattacttcacaatacctggggcacccaagggccgatactgcaccccctgaagagggtcttcccgactttcacccaccaccactccctcaggaggatccatattgtttagatgatgccccaccaaacctggattatctcgtgcacatgcagggaggaattctgtttgtgtatgataataaaaaaatgctagaacatcaggaacctcattcgctgccttatccagacctagagacatataccgtcgatatgtcacacattttggctctcatcacagactag

SEQ ID NO: 213661 - DNA, 2325 bp, synthetic construct
  misc_feature 1..2325: note = Description of Artificial Sequence: Synthetic coding sequence
  source 1..2325: mol_type = other DNA
atggaacctgggagcgcagagatgccaaggcagtttcctaagctgaatatttccgaggtggatgaacaagtgcgtctgctggcagagaaggtgttcgccaaagtgctccgggaggaggactcaaaggacgccttgtcgctgtttaccgtacccgaggattgccctataggccaaaaagaggcaaaagagcgggaactgcagaaggaacttgccgaacaaaagtccgtggagacagccaaacgaaagaaatcctttaagatgattcggtcccagtccctctctcttcagatgcctccacagcaggattggaaaggtccaccggcagcatctccagccatgagccctacaacccccgtggtcaccggtgctactagtctgccgacgccagcaccatacgccatgcctgagttccaacgggtgacaatctcgggggattattgtgcgggaatcaccctggaagattatgaacaggcagccaagtctctcgctaaagccctcatgatcagggaaaaatacgctcgactcgcctaccatcggtttccacgtattacttcgcagtacctcggccaccctagagctgataccgctccaccagaggaaggtttgccagatttccatccacctcccttgccccaggaggatccttactgtctggatgacgctccgcctaatttagactatctcgtgcatatgcagggaggcattctcttcgtttatgacaacaagaagatgcttgaacaccaggagccacactccctgccatacccagacctggagacctataccgtggacatgtctcatatactggctcttattacagacggccctactaaaacctactgtcatcgcaggctgaattttctggagtctaagttctcccttcacgaaatgttgaatgagatgtctgagttcaaggaactgaagtcaaacccgcacagagacttctataacgtccggaaagtggacacccatattcacgctgctgcctgtatgaatcagaagcacttactaaggtttatcaagcacacatatcagacagaacccgacagaaccgtagctgagaaacgagggcgtaaaatcacactgcggcaggtcttcgacggcctacacatggatccctatgatctgactgtggacagcctggacgtgcatgctgggagacaaacctttcacaggtttgataagtttaacagtaagtacaatccagttggtgccagcgagcttcgagacttatatctgaaaacggagaattacttaggcggtgaatacttcgcacgcatggtgaaggaggttgcaagggaattagaagaatcgaaataccagtattcagagcccagactgtccatctatggaaggtctcctgaagagtggcctaacctggcctattggttcatccagcacaaagtgtactccccaaatatgaggtggatcatccaggtgcccaggatctatgatatttttcgaagcaagaagttactaccaaatttcggaaaaatgctggagaacatttttttgccactgttcaaggcgaccatcaatccacaggatcacagggagctgcacttgttcttaaagtacgttaccggattcgacagcgtggacgatgaaagcaaacactcagaccacatgttcagtgacaaatcccctaaccccgacgtatggacatcagagcaaaacccgccttactcttactacttgtattatatgtacgccaacataatggtgctgaacaacctcaggagggagagaggcctgagtacgttcttgtttcgaccccattgtggagaagccggtagcataacccacttagttagcgcatttctgacagccgataatattagccacgggcttcttctgaagaaaagccctgtgctgcagtacttgtattacctggcccagatcccaattgcaatgagtcccttatcaaataactctcttttcctcgagtactccaagaaccctttgagggagtttctccacaaaggacttcacgtctcactgagtaccgatgatcccatgcagttccactataccaaagaagccctgatggaggagtatgccatcgcagctcaggtgtggaagctgagcacgtgcgatttatgcgagatcgccagaaatagcgtgttacaatctggcctgagtcatcaggagaaacaaaagtttctgggacagaattattacaaggagggacctgagggcaatgatattcgtaaaaccaatgttgctcagattagaatggcctttcgctacgagaccctgtgcaacgaactgtcttttctttcggacgccatgaagtctgaggagatcacagccttgaccaattag

SEQ ID NO: 213662 - DNA, 2304 bp, synthetic construct
  misc_feature 1..2304: note = Description of Artificial Sequence: Synthetic coding sequence
  source 1..2304: mol_type = other DNA
atgcccagacagttccccaaactcaacatttctgaggttgatgagcaggttagattactcgctgaaaaggtatttgctaaggtgctgagagaagaggacagtaaggacgcactgtccctcttcacagtgccggaagactgccccatcggccagaaggaagccaaggagagggagctgcagaaagagttggcagaacaaaaatcggtggagacagctaaacgtaagaaaagttttaagatgatacgctcccaatcactttccttgcagatgccccctcagcaggattggaaaggaccacctgctgcgtcccctgctatgtctccgactactcccgtcgtgactggcgctacaagtctgcccaccccagcgccatatgccatgccagagttccagagagttaccatctctggcgattattgcgctggaattaccctcgaggattacgaacaggctgcaaaatcgcttgctaaggccctgatgattcgggaaaagtacgccaggctggcttatcacaggttccctcgaatcacaagccagtaccttggccacccgcgagcagatacggcccctccagaagaggggctgccagatttccatccccctcctcttccccaggaggacccctattgcctggacgacgccccacccaatctggactatctggtgcatatgcagggaggcatcctctttgtttatgacaataagaagatgttagagcaccaggagccgcatagtttgccgtatccagaccttgaaacttacaccgtggatatgtctcacatcctggccctcattacggacgggccaactaaaacctactgccaccgcagactgaatttcctcgaaagtaagtttagcctccatgaaatgctgaacgaaatgagtgaattcaaggagctcaaatcaaacccacatcgagacttttataacgtgcggaaggtagacacccacattcatgctgcggcatgtatgaaccagaagcatcttctgagatttatcaagcacacctaccagacggaaccagataggacagtcgctgagaagcggggacgcaagatcaccttgcggcaggtcttcgacggcttgcacatggatccttatgacttgaccgtcgactccctggacgtccacgccggtcgccagacttttcaccgctttgacaagtttaattccaagtataaccctgtgggcgcatcggagctgagggatctgtatctgaagaccgaaaactacctggggggtgagtatttcgcccgaatggtgaaggaagttgcaagggaactggaagagtccaaatatcagtatagtgagccacgattgtcaatctatgggcgatcccccgaggaatggcctaatcttgcatactggttcattcagcacaaggtgtacagtccgaatatgcgatggattattcaggtcccccgtatttacgatatcttccgctccaaaaaactgctgcccaacttcggcaaaatgctcgaaaatatatttctacccttgtttaaggctactataaatccacaggaccacagggaactgcatcttttcctgaagtatgtgaccggcttcgattccgttgatgacgaatccaagcattctgatcacatgttcagtgataagagtcccaacccagacgtgtggacctccgagcaaaatccaccttattcctactacctgtactatatgtacgctaatatcatggtgctgaacaacctcaggagagagagaggcctatcaacctttctatttcgtccgcactgtggagaagcaggaagtataacacacctggtctctgctttcctcactgctgataacatttctcacggacttcttctcaaaaaaagcccagttctgcagtacctgtactatttggcccagattcccatagccatgtcccccctcagtaataactcgctgtttctcgaatattctaagaaccccctcagggagttcttgcacaagggactacacgtgagtctgtcgaccgacgaccccatgcagttccattataccaaggaagcactgatggaagaatacgctatcgccgcacaggtttggaagttgtcaacctgcgatttgtgcgaaattgctaggaactctgtattgcagtccggccttagccaccaagaaaagcaaaagttcctggggcaaaattactacaaggagggcccagagggaaatgatattaggaagaccaacgtggcacagatccgtatggccttccgctacgagactttgtgtaacgagctttccttcttgagtgacgccatgaaatcggaggagatcacagcactgaccaactag

SEQ ID NO: 213663 - DNA, 336 bp, synthetic construct
  misc_feature 1..336: note = Description of Artificial Sequence: Synthetic coding sequence
  source 1..336: mol_type = other DNA
atgccaaggcaattccctaagttaaatatttccgaggtggatgaacaagtccgccttctcgctgaaaaagtgttcgctaaggtgctgagggaggaggactccaaggatgcactatccctgtttactgtgcccgaagattgcccgataggacagaaggaggctaaggagcgtgagttacagaaagagctggccgagcagaaatccgtggagaccgctaagcggaaaaaaagtttcaagatgattagaagccagagtctttcgctgcagatgccaccacagcaagactggaaagggccacctgccgcatcccccgctatgagccctaccaccccatag

SEQ ID NO: 213664 - DNA, 426 bp, synthetic construct
  misc_feature 1..426: note = Description of Artificial Sequence: Synthetic coding sequence
  source 1..426: mol_type = other DNA
atggcacggccactgtgcaccctgttactcctgatggcgaccctggccggtgccctggctagctccagcaaggaagaaaatcgcattattccagggggaatttatgacgcagatctcaatgacgagtgggtccaacgtgctctccactttgctatctccgagtataataaggccacagaggacgagtattaccgcagaccacttcaggttcttcgcgcacgtgaacaaactttcggcggagtaaattatttttttgacgtggaagtgggacgcacaatttgcacaaagagccaacctaacttggacacctgtgctttccacgagcagccagaactgcagaaaaagcaattgtgtagcttcgagatatatgaagtgccttgggaagacaggatgtcccttgtcaattctagatgccaagaggcttag

SEQ ID NO: 213665 - DNA, 1215 bp, synthetic construct
  misc_feature 1..1215: note = Description of Artificial Sequence: Synthetic coding sequence
  source 1..1215: mol_type = other DNA
atgcccggactcatgcggatgcgcgaaaggtattccgcttccaagcctctgaaaggcgctaggattgccggatgcctgcatatgaccgtcgaaaccgccgtgctgatcgagactctagtgacactgggagcagaggtgcaatggagctcctgtaatattttttccacccaagatcatgccgcagctgcaattgcaaaagccggaatcccagtgtacgcttggaagggcgaaaccgacgaggagtatctgtggtgtatcgagcaaaccctgtactttaaagatggaccccttaacatgatactagatgacgggggagacctcaccaacttgattcataccaaataccctcagctcttgcccggtatcaggggtatcagtgaggaaacaacaaccggtgtccacaacctctataaaatgatggcaaacggcattttgaaagtacctgccatcaacgtgaatgactccgtgacgaagtcaaagttcgacaacttgtatggctgtagggaaagcctcatcgatggaatcaagcgggctacagacgtgatgatcgcaggcaaggtcgccgtcgtggccggttacggcgacgtaggtaagggctgcgcgcaggcgctcagaggtttcggggctcgagtcattattacagagattgatcccatcaacgcacttcaggcagccatggagggttatgaggtcacaacaatggatgaggcgtgtcaggagggtaacatttttgtcaccaccaccgggtgtatcgatatcatcctaggtcggcattttgaacagatgaaagatgacgcaatcgtgtgtaatattggtcatttcgacgtggagatcgatgtgaaatggctgaatgaaaacgctgtagaaaaagttaacattaaacctcaggtagacagatatcgcctcaagaacggccgacgcatcattctgctggctgaagggaggttggtcaatctgggatgcgccatgggacacccatctttcgtcatgagcaactcctttacaaaccaggtgatggcccagatcgagctatggacacaccctgataagtaccccgtaggggtccacttcctcccaaagaagttggatgaagcagtcgcagaggcacacctcggtaagttgaatgttaagctcaccaaattgaccgaaaagcaagctcaatacctgggcatgtcgtgcgacggcccttttaagcctgatcattaccggtattag

SEQ ID NO: 213666 - DNA, 798 bp, synthetic construct
  misc_feature 1..798: note = Description of Artificial Sequence: Synthetic coding sequence
  source 1..798: mol_type = other DNA
atgttcgtgtccaaaagacgcttcatcctgaagacctgtggtaccaccctgcttctgaaggcccttgtgcctctgttgaagttggccagagactacagtggtttcgactctatccagtcgtttttttacagtcgaaagaatttcatgaagccttctcatcaaggctaccctcaccggaactttcaggaggagattgaatttctgaacgccatattcccaaacggtgccgcttactgcatggggaggatgaactcagactgttggtatctatacactctggattttcccgagagccgtgttatctcccagcccgaccagaccttggaaatccttatgtcagagttagaccctgccgtgatggaccagttctatatgaaagatggagttactgctaaggatgtgacacgagaaagtggcatcagagatctcatccctggaagtgtaatcgatgccaccatgttcaatccctgtggctactctatgaacgggatgaaaagtgatggaacctactggactatacacattacccctgaaccagaattttcttacgtgtcgttcgagaccaatctgtcccaaactagctacgatgatcttatcagaaaagttgtcgaggtgttcaagcccggtaagttcgtcaccactctgttcgtgaatcagagctccaaatgtagaaccgtgctcgcctccccccaaaaaatcgaagggtttaaacggttggactgccagtcagccatgtttaacgactacaatttcgtattcaccagtttcgccaagaagcaacaacagcagcagagttag

SEQ ID NO: 213667 - DNA, 918 bp, synthetic construct
  misc_feature 1..918: note = Description of Artificial Sequence: Synthetic coding sequence
  source 1..918: mol_type = other DNA
atggaagccgcacattttttcgaagggaccgaaaaactgctcgaggtctggttcagccgccagcagcctgatgccaaccagggaagtggagatctgcgaacaataccttccgagtcctcaatgttcgtcagcaaaagacgctttattctgaagacgtgtgggacgactctgctgttaaaggcactggtgcccttgctcaaactggccagggactactcaggcttcgactccattcagtctttcttctattctcgcaaaaattttatgaaaccctcccatcagggctatcctcatcgaaactttcaagaggagattgaattcctgaatgcaatattccctaatggggcagcctattgcatgggacgaatgaactctgactgctggtatttatacaccctcgactttcccgagagccgggtgatttcacagccagaccagactcttgaaatcctcatgtccgagctggatcctgccgtgatggatcagttttatatgaaggacggcgtcactgcaaaggatgtgacgcgggaaagcggcattagggacctcatccctgggtccgtcatcgacgccactatgtttaacccatgcgggtactctatgaatgggatgaagagtgatggtacatactggactattcacatcaccccagagcccgagttctcgtacgtatcattcgagacaaatctctctcagacatcttatgacgacctcatccgaaaggtcgtggaagtatttaagcccggtaagtttgtgactactctcttcgttaaccagagctcaaaatgccgtacggtcctggcttccccccagaaaattgagggcttcaaaagattagattgccagagcgcaatgtttaacgattacaattttgtcttcacttcctttgcaaagaagcagcagcagcagcagtcttag

SEQ ID NO: 213668 - DNA, 561 bp, synthetic construct
  misc_feature 1..561: note = Description of Artificial Sequence: Synthetic coding sequence
  source 1..561: mol_type = other DNA
atgggcaggatgaactctgactgctggtatctgtacacattagacttccccgaatcacgggttattagccagccagatcagacactggaaattctgatgagtgaactggaccccgctgtgatggaccaattctacatgaaagatggtgtaactgcaaaggatgtcacaagagagtcaggaattcgggatctcatccccggtagcgttattgacgcaactatgtttaatccttgcggatatagcatgaatggcatgaagtccgacggcacatactggacaatacacattactcccgaaccagaattttcgtacgttagctttgaaactaatttgtcccagaccagttatgatgatctcatccggaaagtcgtcgaggtctttaagcccggaaagttcgtgaccacactgtttgtgaaccaaagcagcaagtgcagaaccgtactggccagccctcagaaaatcgaagggtttaagcgactggactgccagagcgcgatgtttaacgattataactttgtcttcacaagctttgccaagaaacaacaacaacagcagagttag

SEQ ID NO: 213669 - DNA, 1005 bp, synthetic construct
  misc_feature 1..1005: note = Description of Artificial Sequence: Synthetic coding sequence
  source 1..1005: mol_type = other DNA
atggaggctgcccactttttcgaaggtacagagaaactgctggaggtttggttctcacgtcagcaacctgacgctaatcaaggatcaggggacctccgaacaatcccccgttccgaatgggatatcctattaaaggacgttcagtgctccataatttctgtgaccaaaaccgataagcaggaggcatacgtcctctctgagtctagcatgtttgtctcgaaacggaggttcattttaaagacgtgcggcacaactcttttgttaaaagcactggtgccattgctcaagctggctcgtgattattcagggtttgatagtatccagtcattcttctactctcggaagaattttatgaaaccctctcatcagggataccctcaccgtaactttcaagaggaaatcgaattcctgaacgctattttccctaacggcgctgcctactgtatgggcagaatgaattccgactgctggtacctctacaccctggactttccagaatctcgcgtgatctctcagccggatcaaacactggaaattctgatgagcgaactggaccctgcagtgatggaccaattttacatgaaggatggggtaaccgcaaaggatgtgacacgagagtctggcatacgggacttgatccctggttcagttatcgatgcaacgatgttcaacccgtgcggctactccatgaatgggatgaaatctgatgggacatattggacaatccacatcacccccgaacccgaattttcctatgtcagctttgagaccaacctgagccagactagttatgatgatctgatccggaaagtagtggaggttttcaaacccggaaagtttgtgaccaccctgtttgtgaatcagagttccaagtgcagaaccgttctggcctcccctcagaagatcgagggctttaagcggctggattgccagagcgccatgttcaacgactataactttgtcttcacatcttttgcaaagaagcagcagcagcaacagtcttag

SEQ ID NO: 213670 - DNA, 645 bp, synthetic construct
  misc_feature 1..645: note = Description of Artificial Sequence: Synthetic coding sequence
  source 1..645: mol_type = other DNA
atggaggccgctcatttctttgaggggactgaaaagctgctggaggtctggttcagtcggcagcagccagacgctaaccagggttcaggcgacttgcgcaccatcccaagatacctgtacacactcgatttcccagaatccagagtgatttctcaacccgatcagaccctagagattctgatgtcggaactagatcccgctgtaatggaccagttctacatgaaggatggcgtcactgccaaggatgtgaccagggaaagtggtatccgggatctgattcctggctcagtgatcgatgccaccatgttcaatccctgtggttattctatgaacggcatgaagtcagatggcacttattggaccatacacatcactcctgagccagaattttcttacgtgtcttttgaaactaacctaagccagacttcctacgatgacctgattcggaaggtggtggaagtctttaaacctggaaagtttgtgaccaccctatttgtcaatcaaagctccaaatgccgaacagtgcttgctagcccacagaagattgagggcttcaagcggctggattgccaatcagcgatgtttaacgattataatttcgtgtttacctccttcgccaaaaagcagcagcaacagcagagttag

SEQ ID NO: 213671 - DNA, 3360 bp, synthetic construct
  misc_feature 1..3360: note = Description of Artificial Sequence: Synthetic coding sequence
  source 1..3360: mol_type = other DNA
atggccggagccccacggggaggcggtggtgggggaggtggagcaggagagcctgggggagctgagcgcgcagctggtacgagtcgccgacgcggactccgcgcttgcgacgaggaattcgcctgccccgaactagaggccctgtttagagggtacactttgcgcttagagcaggctgctacactgaaagccttggcagtgcttagtttgctggctggcgcactggcactggcagaattgctgggggctcccggtcctgcgcctggactcgccaagggaagccatccagtccattgcgtgttgttcttggccctattggtggtgacaaatgtgaggtctctgcaagtgccccaactgcagcaagtgggtcagctcgctctcctattctcactcacttttgctctgttgtgctgcccatttgcgcttggtggaccagctcgtggctccgctggggcagccggtggaccagctacggccgagcagggggtgtggcaactcctgcttgtcacgttcgtctcctatgctcttctccccgtgcggtccctactggcgatcggattcggccttgttgtggccgcatcacacctcttggtgaccgccacattggtgcccgcaaagagacccagactgtggagaacactgggagcgaacgcgctcttgttcgttggcgtcaatatgtatggcgtattcgtcagaattttgacggagcgttctcagcggaaggccttcttgcaagcgagatcatgcattgaggaccgactgaggctcgaggatgaaaacgaaaagcaggagaggttgctgatgtcgctgttaccgagaaacgtcgcgatggaaatgaaggaagattttctcaaaccgcctgaaagaatcttccataagatttatatacagaggcacgacaatgtcagtattctgttcgcagatatagtcggtttcactggacttgcgagtcagtgcactgcacaggagctcgtgaaacttctgaatgaactgtttggcaaatttgacgagcttgccaccgagaaccattgccgaaggatcaaaatcctgggcgactgttactactgcgtctctggactgacacagcccaagaccgaccacgcccactgttgcgtggagatgggacttgatatgatcgatacaattacctcagtcgctgaagctaccgaggtggatctaaatatgcgggttggcctgcatacgggacgcgtgctctgtggagtgctcggactccgtaagtggcagtatgacgtgtggtctaacgacgtcaccctggccaacgtcatggaagctgccggattgcccggaaaagtgcatataacaaagactacattagcctgcctgaacggcgactatgaagtcgaaccgggatacggccacgagcggaattcttttctcaagacacataatattgagacttttttcatagtgccctctcaccggaggaaaatcttcccgggacttattctttctgatataaaaccagctaagagaatgaagttcaagactgtttgttacctgctggttcagctgatgcattgtcgcaaaatgtttaaggctgagataccctttagcaatgttatgacctgtgaagacgatgataaacggagagcgctacgcacagcctctgagaaactacgcaataggagttcatttagcactaacgttgtatacactacacctggaacacgcgtgaatcgctacatctctaggctgctggaggctaggcaaacagagctggaaatggccgaccttaacttttttaccctgaagtataagcatgtcgaacgagagcaaaaataccaccagctgcaggatgaatacttcaccagcgcggtagtgttgactctcattttagctgcccttttcggcctagtgtatcttctgattttcccccaatctgtggtggtgctactgttacttgtgttttgcatttgcttcctggttgcttgtgtgctttacttacacataactcgggtacaatgtttccccggatgtcttacaatccagattagaactgtcttgtgcattttcatcgtggtgctgatctattcagttgcccagggttgcgtggtgggctgcctgccttgggcctggtcatcaaaacccaatagtagcttggttgtgctaagcagtgggggacagcggaccgcgttacccactctcccttgtgagtcaacccaccacgcactcctgtgctgcctggtgggaactcttcctctcgccatattcttcagggtctccagcctgcccaaaatgatcctcctgagtgggctgacaacgagctacattctcgttttagagctgtctgggtacacgcgaaccggcggtggagctgtgagcggccgaagttatgagcccattgtagccattttgttattttcctgcgcactcgccctccatgcacgtcaggtcgacatccgactcaggctggattacctgtgggccgcacaggctgaggaggagcgggaagatatggagaaggtaaagctggataaccgtcgcatcttgttcaacctcctccctgctcatgtggcgcagcactttttgatgtcaaatccacgaaacatggatctgtattatcagagctactcccaagtcggtgttatgtttgcatctattccaaactttaacgacttctacattgaactggatggcaataatatgggcgtcgaatgtctgagattactgaatgagatcattgcagattttgatgagctgatggagaaagacttttacaaggacatcgagaagatcaaaacgatcggctccacctacatggctgctgtggggctcgctcccaccagcgggactaaggcaaaaaaaagtatctcctctcacttgtccacattggccgattttgcaatcgagatgtttgacgtcttagatgagattaactaccagagttataacgactttgtgttgcgggtcggtataaatgtgggcccagttgtcgcaggcgtcataggagctaggagaccccagtatgatatctggggaaacaccgtcaatgtggcctcaagaatggactcaactggcgtccaggggagaatccaggttacggaggaagtccatcgcctcctccgccgatgtccataccacttcgtctgtagaggaaaagtctcggtcaagggaaaaggcgagatgttaacgtatttcctggagggcaggaccgacgggaacggttcccaaattaggtcgttgggccttgatcggaaaatgtgtccatttggcagggctggcctccaaggacggcgtccacccgtttgccctatgccaggcgtgagcgtgagggccggtctgccccctcactctcccggacagtacctcccttccgcagccgctggaaaagaagcatag

SEQ ID NO: 213672 - DNA, 3174 bp, synthetic construct
  misc_feature 1..3174: note = Description of Artificial Sequence: Synthetic coding sequence
  source 1..3174: mol_type = other DNA
atggcaggagcccctcggggagggggaggcggtgggggaggcgcaggagagccgggaggtgccgaacgcgcagcaggaaccagccgacgcagaggattgcgagcctgtgacgaagaatttgcctgcccagagctcgaggctctatttcggggatatactctgcgcctggagcaggcagctacgctgaaggcgctcgccgtccttagtctgctcgcaggcgcactagcccttgcagagctgttgggcgctcctgggccagcaccgggtctggcaaagggatcccaccccgtgcactgtgtattgttccttgctctgctagttgtgactaacgttaggtccctgcaggttcctcaactgcagcaagtggggcaattagccctgctttttagcctgactttcgccctgttatgctgtcccttcgccctgggaggcccagcgaggggctctgctggcgctgctgggggacccgctaccgcggagcaaggcgtgtggcaactgctgcttgttaccttcgtcagctacgcactgctaccagttcggtctctattggcgattgggttcggactagtagttgccgctagccatctgctggtgaccgcgaccctcgtgccggctaagaggccccgtctctggcgtaccctgggagctaatgccctcctcttcgtgggagtgaatatgtatggtgtgttcgttcgaatcttaacagagaggagccagcgaaaggcatttcttcaggcacgctcgtgtatcgaggatagactgagattagaagatgagaacgagaagcaggaaaggcttctcatgtctctgctcccgagaaatgtcgccatggagatgaaggaagacttcctgaaaccacccgagaggattttccataaaatatatatccagagacacgataatgtttcaattttgtttgctgatattgtgggcttcacaggcctagccagccagtgtacggcccaggaattggtgaaactgcttaatgaattgtttggtaagttcgacgaactcgccactgagaatcactgcagaaggattaaaattcttggggactgctactattgtgtgtccggtctaacacagccaaagacagaccatgcccactgttgtgtggaaatggggctggatatgatcgacaccattacttccgtggccgaagctacagaggtggacctcaatatgagggtgggactccacacaggcagggtgctgtgcggggtgctgggtctgagaaaatggcagtacgatgtgtggagtaacgatgtgacattggccaatgtgatggaggcggctggactcccgggtaaggtccacattacgaagactaccttagcctgcctaaatggggattacgaggtcgaaccgggttatgggcacgagaggaacagctttttaaagacacacaatattgagaccttcttcattgtgccttcgcataggcgcaaaatcttcccaggactgatcctgagcgacattaagcccgctaaacgcatgaaatttaagactgtatgttacttgctggtgcagttgatgcattgtagaaagatgtttaaggccgagataccattcagtaatgttatgacctgcgaagacgacgacaagcgcagagccctcagaaccgcttccgaaaaattgaggaaccggagctcttttagcaccaacgtggtgtataccacccctggtacccgtgtaaacagatacatctccagactcctggaggccaggcagacggagttggaaatggccgaccttaacttctttactcttaaatataagcatgttgaaagggaacaaaaatatcatcagttacaggacgagtactttacgtccgcagttgttctgaccctcatccttgccgcactcttcggacttgtgtatctccttattttcccgcagagcgtggtcgtcctactgttgctggttttttgcatttgttttctcgtcgcatgcgtgctctacctgcacatcacgagagtccagtgctttcctggttgtctgaccatccagattagaaccgtactttgcatcttcatcgttgttttgatttactctgtcgcccagggctgcgtagtggggtgtctgccatgggcatggagcagtaagccgaattctagtctcgtcgtcctttcctcagggggacagcgtacagccttaccgaccctgccgtgcgagtcaactcaccatgccctgctgtgctgcctcgtgggaacgctgccactcgctatattttttagagtaagtagcttgccgaagatgatcctcctttctggcctgaccacaagctatattctcgtcctggagctatccggatacacccgaaccggcggtggagccgtgagcggccgatcttacgagccaattgttgcaattctgctgttctcctgcgccctcgccttacacgctagacaggtggacattcgtctgagattggactatctatgggcggcacaggcagaggaggaacgagaggacatggagaaggtcaagctggataatcgacgcatactgttcaacttgctgcctgcacatgtggcacagcactttctgatgagtaaccccagaaatatggatttgtactaccaaagttattcgcaagtgggggtcatgttcgcctccatcccaaatttcaacgacttctatattgaactggacggcaacaacatgggagtagagtgtctgcgcctgcttaacgagattattgccgatttcgatgagctcatggaaaaagatttttacaaagatatcgaaaaaatcaagacaatcgggtccacctacatggcggcagtggggctggcccctacatcaggcaccaaggccaaaaaatccatatcatcacacctgagtacacttgccgactttgctattgaaatgttcgatgtcttggacgaaatcaattaccaatcatataatgacttcgtcctccgcgtgggcatcaacgtagggccagtggtggcaggagtaatcggggctaggaggcctcaatatgacatctgggggaataccgtgaacgtcgcatcacggatggattctactggcgtccagggcagaatccaagtgaccgaagaggtccatcgcctgctgaggaggtgccccccactgtgtgtgcctcgccaatcccagtgtcagggtcagaggcgagacgttgatatcctgagtcgtaggcaggactag

SEQ ID NO: 213673 - DNA, 3276 bp, synthetic construct
  misc_feature 1..3276: note = Description of Artificial Sequence: Synthetic coding sequence
  source 1..3276: mol_type = other DNA
atgtggcaagaggccatgagacgcaggaggtacctccgggaccggagtgaagaggccgcaggcggtggagatggtctgcctagatccagagattggctgtacgagtcatactattgtatgtcccagcagcaccccctcatcgtttttctcctactgattgtcatgggcagctgccttgcacttcttgcagtctttttcgcactggggttggaagttgaggaccacgttgcttttctcatcaccgtccctactgcattggctattttctttgctatctttattctggtgtgcatcgagtccgtcttcaaaaagctcctccgtctcttctcattggtcatttggatttgtctggtggcgatgggttacctcttcatgtgcttcggaggcactgtgagtccctgggatcaggtgtcttttttcctatttataatctttgtcgtgtacacgatgttgccattcaacatgcgagatgctatcatcgcctcggtgcttacaagcagcagtcatacgatcgtactctccgtctgcttatcagcgacccccggtggaaaagagcacttagtttggcagatcctggccaatgtgattatttttatctgtggtaacctggctggagcatatcataaacatctgatggagttagcactgcagcagacataccaggacacctgtaactgcattaaaagccgcataaaacttgaattcgaaaagcggcagcaggaacgcttactgctcagcctactgcccgctcatattgccatggaaatgaaagctgagattattcagagattgcagggacctaaggcgggacaaatggagaatacgaataacttccataacctgtatgttaagcggcatacgaatgtttccatcctatacgccgacatagtaggcttcaccagattggctagtgattgtagccctggagaactggttcacatgctgaatgagttatttggcaagttcgatcagatcgccaaggagaatgagtgcatgagaatcaaaatactgggagactgctactactgcgtttctgggttgcccatctccctgcccaatcacgctaagaattgtgtcaaaatgggtctcgacatgtgcgaagctattaagaaggtcagggacgccacaggcgtcgatatcaacatgagggtcggtgtgcattccggcaacgttctgtgcggggtgattggtttgcagaaatggcaatacgacgtctggagtcacgatgtgaccctcgcgaatcacatggaggctggcggagtgcccggtcgggtgcacatcagtagcgtgacactggaacacttaaatggggcttataaagtggaagaaggcgatggggacataagggacccatacctgaagcagcacttggtgaagacatactttgtcattaatcctaaaggcgagcggaggagtccccagcatctgttccgtccgagacataccttggacggagcaaaaatgcgggcatcagtcagaatgaccagatatctggaatcttggggcgcagcaaaaccttttgcacacctccatcatcgtgattctatgaccaccgaaaacggcaagatatccactaccgacgtccctatgggtcagcataatttccagaatcggacactgagaactaagtcacagaagaaaagattcgaagaagagctcaatgaaagaatgatacaggcaatcgatggcatcaatgctcagaagcagtggctcaagtccgaagatattcagaggatcagccttctgttctacaacaaggtgttggagaaggagtaccgcgcaactgccttgcccgctttcaagtactacgtgacttgtgcctgtttaatttttttctgtatctttattgtgcagattcttgtactccctaagacatctgtcttgggtatttcctttggcgctgcatttttgcttctagccttcatcctgttcgtgtgttttgccggacagctgttgcaatgcagtaagaaggcctcccccctgctgatgtggctcctgaagagcagcggcattatcgccaaccggccatggcctcgtatttccctgactattatcacaactgctatcattctaatgatggccgttttcaacatgttcttcctttctgactctgaggagaccataccacctactgccaacactacgaacacatccttctccgcaagcaacaatcaggtcgcaatccttagggcacagaacctctttttcctgccatattttatttatagctgcatcctcggcctgatatcctgtagcgtatttctccgcgttaattacgaactgaaaatgctgattatgatggtcgctctcgtcggttacaatacaatacttcttcatactcacgcccacgtgctgggcgactacagtcaggtgctcttcgagcgccctggaatctggaaggatttgaaaacaatgggcagtgtctcactgtcaattttctttatcacgctgcttgttctcgggcgacaaaacgaatattactgccgtcttgacttcttatggaagaataagttcaagaaggaaagggaagaaatagaaactatggagaacttgaatcgggtgctgctggaaaacgtgctcccggctcatgttgccgagcacttcctcgctcgctcattgaagaacgaggaactctatcaccagtcttacgactgtgtctgcgtaatgtttgcgtccatccccgactttaaggagttttatacagagagcgacgtgaataaggaggggttagaatgtctacgcctgctgaacgaaatcatcgcggactttgacgacttgctgtcgaaacccaaatttagcggggtagagaagatcaaaactatcgggtctacctatatggccgcaaccggactgagcgccgtaccttcgcaggagcatagccaggagcctgagaggcaatatatgcacattggaaccatggtggagttcgccttcgcattggttggcaagctggacgccatcaacaagcactcgtttaatgacttcaaattgcgcgtgggtattaatcatggccctgttattgctggggtcattggcgctcagaagccccagtacgacatctggggtaacaccgttaatgttgctagtagaatggactctacgggagtactagataagatccaagtcaccgaagagacatccctggtgctgcagaccttaggctacacatgcacttgccgtgggataataaacgttaaaggaaaaggcgatctcaagacttacttcgtgaacactgaaatgtcccgtagcttatctcagtcaaatgtggccagctag

SEQ ID NO: 213674 - DNA, 612 bp, synthetic construct
  misc_feature 1..612: note = Description of Artificial Sequence: Synthetic coding sequence
  source 1..612: mol_type = other DNA
atggagaacctcaatcgggtgttactggagaatgttctgccagctcatgtggccgagcactttcttgccagatccctcaagaacgaggaactctaccaccagagctacgactgcgtatgcgtgatgttcgccagcatccctgactttaaggaattctataccgaaagcgacgtgaataaggagggtctggagtgcctccggttgctgaatgagatcatcgccgactttgacgacctgctctctaagcccaaattcagcggtgttgaaaagataaagaccattggctctacatacatggctgcgaccggtctgtctgcagttcccagccaagagcattcccaggagccagagaggcagtatatgcatatagggaccatggtggagtttgcctttgcccttgtggggaagcttgacgccatcaataagcactctttcaacgactttaaactgagggtaggggtgactgaggagacctctttggttttacagacacttggatatacatgcacatgtcgcggaatcatcaatgtaaagggcaagggtgatctgaaaacctacttcgtgaacaccgaaatgagtcgatctctgtcccagagtaatgtggccagttag

SEQ ID NO: 213675 - DNA, 2736 bp, synthetic construct
  misc_feature 1..2736: note = Description of Artificial Sequence: Synthetic coding sequence
  source 1..2736: mol_type = other DNA
atggacctgagatgggcccgagatctgcacttaagagaggccagtcggtcagtcgcctttacaaccttgagattgggtgccgtgacaacgggtctgctgacatttagggagcctggcgacaaggaaaaaagcggaaaggggcttggtaaacggtggcgaatacagagagaggagtcccaggagcggttgctactttctctactgcccgctcacattgctatggagatgaaggctgaaatcattcagagacttcagggtcccaaagctggacagatggagaatacaaacaacttccataatctctacgttaagcggcataccaacgtgagtattctgtatgcagatatcgtgggcttcactagactggccagcgattgctcccccggtgagttagtgcacatgctgaacgagctttttgggaagttcgaccagattgccaaggagaatgaatgtatgcgtatcaagattcttggagattgctactactgcgtctccggattgcctatcagcctacctaaccatgcaaaaaattgcgtaaaaatggggttggatatgtgtgaggcgattaagaaagtgcgcgatgctaccggagtggatataaacatgcgcgtcggcgtccatagcgggaatgtcctatgtggagtgattggactgcagaaatggcagtacgacgtgtggagccacgatgttacactggctaatcatatggaggccggaggcgtccctggacgagtacacatttcaagcgtgacattagaacatctgaacggcgcatataaagttgaagaaggggacggggatatccgggacccatacctgaaacagcacttggtgaagacatatttcgtgatcaatccaaaaggtgaaagacgctctccgcagcacctgtttcgcccacggcacaccctagacggtgctaagatgcgcgcatcggtgaggatgacgcgctatctcgaaagttggggcgcagccaagccattcgcccatctgcaccacagggattccatgacaactgaaaacggtaagatctccaccacagatgttcctatgggccagcacaattttcagaaccgcacactacggaccaagtcacagaaaaaacgcttcgaagaggagctgaacgagcgcatgattcaggccatagacgggattaacgcccagaaacagtggctgaagtctgaagacattcaaagaatcagcctgttgttctacaacaaagttctcgaaaaggagtacagagccactgctctgcctgcctttaagtactatgtcacgtgtgcatgccttatctttttctgcattttcatcgtgcagattctggttttaccgaaaactagcgtcttaggcatttcattcggtgctgcctttttgctgctagcctttatactgttcgtgtgcttcgctggtcagctcctccaatgtagcaaaaaggcctcgcctttactgatgtggttgttaaagtccagtggaatcattgccaatcgaccctggccgcgtatttcccttaccattatcacaacagccattatcctgatgatggctgtctttaatatgttcttcttatccgatagtgaagaaactattccacccaccgcaaataccaccaatacttccttctcggccagtaataaccaagtcgctatactcagagctcaaaacctcttcttcctaccttatttcatctattcttgcattttgggtttaatttcatgctccgtgtttctcagggttaactacgaattgaaaatgctcatcatgatggtggccttggtgggctataatactatcctgcttcacacccacgcccatgtcttgggtgattattcccaggtgctgttcgagcggcctggcatttggaaggacttgaagaccatgggatccgtgtccctttctatcttttttatcacgttactggtgcttggcaggcagaatgagtactattgccggctcgattttttatggaaaaataagttcaagaaggagcgggaagaaattgagaccatggagaatctcaatagagtgttgttggagaatgtcctaccagctcacgtggccgaacattttctcgctaggtcactcaaaaacgaggaactgtaccaccaatcttatgactgcgtgtgcgtgatgttcgcaagcattcctgactttaaagagttctatacagagtctgatgtgaataaagaagggctagagtgtctgaggcttctgaatgaaatcattgctgactttgatgacttgctatcaaagccgaagttcagcggggtggaaaaaatcaagactatcggatcaacctacatggctgcaacgggactgagtgccgtgcctagccaggaacactcccaggagcctgagcgccaatacatgcatattggcactatggtggagtttgctttcgcactcgtcggcaaacttgatgctattaacaagcacagctttaacgactttaagctcagagtggggataaaccatggacctgtcatcgccggagtgatcggggctcagaagccgcagtatgatatttggggcaatactgtcaacgtggctagcaggatggactctaccggggtgctggataaaattcaggttaccgaggaaacctcgttagtgctccaaaccctgggatatacctgtacttgtcgaggcatcattaacgtgaaaggcaagggagatctcaagacatatttcgtgaacacggaaatgagtcgctctttgtcccagagcaacgtagccagttag

SEQ ID NO: 213676 - DNA, 2775 bp, synthetic construct
  misc_feature 1..2775: note = Description of Artificial Sequence: Synthetic coding sequence
  source 1..2775: mol_type = other DNA
atgctccccttcaacatgcgcgacgcaataattgcttcagtattaacctcatcttcacacacaatagtcctgtcagtctgtttatcagccactcccggaggaaaagagcacttggtgtggcaaatcttggcgaatgtaatcattttcatttgtgggaatctagccggagcatatcacaagcatttgatggagctcgccctacagcagacataccaggacacctgcaactgcattaagagccggatcaaactggaatttgagaaacgccagcaggaacgcctattgctctccctgctgcccgcacatatcgctatggagatgaaggctgagattattcagaggttacagggtcctaaggccggtcaaatggaaaacaccaataactttcacaacctatatgtgaagcgccatactaacgtgtcaatcctctacgctgatattgtaggttttacccgactggcaagtgattgctctccaggcgagctggtccacatgctcaacgaactctttggcaagtttgatcaaatcgctaaggaaaatgaatgtatgcgcatcaagatccttggagattgctactattgcgtgtccggcctcccgatctccctgcctaaccatgccaaaaattgcgtcaaaatggggctcgacatgtgcgaggcaattaagaaagtgagggatgccaccggagtggatattaacatgcgcgtgggcgtacactcagggaacgttctatgcggagtgattggactccagaaatggcaatatgacgtctggtcacatgacgtaacactggcgaaccatatggaagccggaggggtccctggtcgggtgcacatctcctccgttacactggaacaccttaacggcgcttacaaggtcgaggagggcgacggcgatatacgcgatccctatctgaaacaacacctggttaagacgtacttcgtcatcaaccctaaaggcgaacgccgatctccgcagcatctgttccgccctcgacatacactggatggagcgaagccatttgcacatctgcaccaccgggactcaatgactaccgagaatggaaagatctccaccactgatgtgccaatggggcaacacaatttccagaatcggacactccgaaccaagtcccagaagaagagatttgaggaagagctcaacgagaggatgattcaagccattgacggaattaatgcacagaagcagtggctgaagtctgaggatatccagagaatatctctactcttctacaacaaagtgttggagaaagaatatagagccaccgcgctgcctgccttcaagtactacgtcacatgcgcgtgtctgatctttttttgtatcttcatcgtacagatcctcgtattgcctaagacatccgtgttgggcattagctttggcgctgcctttctgctcttggcgttcattctgttcgtttgtttcgctggccagctcctgcaatgcagcaagaaggcttccccgcttctcatgtggctgctcaagagtagcggaataattgccaaccggccatggccacgcattagcctcacaataatcacgaccgccatcatcctaatgatggcggttttcaatatgtttttcctgtcggactcagaggagaccatcccgcctacagcaaacactaccaacactagtttcagcgcctccaacaatcaggtggccatcctccgcgctcagaatctattttttctcccctatttcatctattcctgcatcctagggcttattagctgtagcgtgttcctgagggttaactacgaactgaaaatgctgatcatgatggtggctttggtcggatacaacactatccttctgcacacgcacgcccatgtgttgggcgactacagccaagtactcttcgagagaccaggaatttggaaggatctgaaaaccatgggctccgttagcctgtctatcttcttcattacattactggtactcggacgccaaaatgaatactactgccggctggattttttgtggaaaaacaagttcaagaaagagagggaagaaattgagacaatggaaaacctcaacagagtgcttctggaaaacgtgctgcctgcacatgttgccgagcacttcctcgctcgctcactcaaaaatgaggagctctatcatcagtcctatgattgtgtttgcgtgatgtttgctagcatccccgatttcaaagagttttacacggaatccgatgtgaacaaagagggcttggaatgtctgcggttattgaacgagatcatagctgacttcgatgacctgctctctaagccaaagttttccggagtcgaaaagatcaagaccatcggttccacatacatggctgcgaccggcctcagcgccgtccccagccaagagcactcccaggagcctgaacgccaatacatgcacatcggaactatggttgaatttgcattcgcactcgtcgggaaactcgacgcaattaacaagcactcctttaacgacttcaagctcagagtgggtataaaccacggccctgtgatagccggtgtaataggggcacagaagccgcaatacgatatttggggcaacacagttaatgtcgctagcagaatggactcaaccggcgttctagataagatccaagtgacagaggagacctccttggtcctccagacactcggctacacgtgcacttgccgcggaataatcaacgtcaagggtaagggggatctgaagacctacttcgtcaatactgaaatgagcagatcactttcacagtccaatgtggcctcctag

SEQ ID NO: 213677 - DNA, 3435 bp, synthetic construct
  misc_feature 1..3435: note = Description of Artificial Sequence: Synthetic coding sequence
  source 1..3435: mol_type = other DNA
atgccccgtaaccagggctttagtgagccagaatacagcgctgaatattctgccgagtacagcgttagtcttcctagtgatccagaccgcggagtgggtaggacacacgagatttccgtcaggaactccggtagctgcctgtgcctgccccgatttatgcggttaacctttgtgcctgagtctctggagaacctgtatcagacctacttcaagagacagcgacacgagactctcctggtgctagtggtatttgccgctttattcgactgctatgtcgtcgtcatgtgcgccgtagtatttagctccgacaagctggctagcttagccgtagcgggaatcggactcgtgctagacatcatcctgttcgtgctctgcaaaaagggtctgctgcctgatagggtgacgcgccgtgttttaccctacgtgctttggctcctgattactgcccagatttttagctatctcggactgaacttcgctcgtgcccacgcagcttctgataccgtgggatggcaagtgtttttcgttttcagcttctttatcaccctgccgctgagcctgagccccatcgtaataatatcagtcgtcagctgcgtggttcatacattggtgctcggggtcacggtggcccagcagcagcaggaagaattgaaaggaatgcaactgctgagggagatactcgccaacgtatttctgtacttgtgcgctatcgccgtgggcatcatgagttattacatggccgatcgtaagcaccggaaagcctttcttgaggctcggcagtccttagaagtcaagatgaacctggaggaacagagtcagcaacaggagaatctgatgctctccatcctgcccaagcatgtagcggatgagatgctgaaggatatgaaaaaagacgagtcccaaaaagaccagcaacagtttaatactatgtatatgtaccggcacgagaatgtgagtatactgtttgctgatatcgtgggtttcactcagctcagctctgcttgcagcgcccaggagctcgtcaaactgcttaatgaactgtttgctcgatttgataagttggctgctaagtaccaccaattgcggatcaaaatcctgggggactgttactactgtatttgcggcttacctgactaccgcgaggaccacgctgtctgctcgatccttatggggctggctatggtggaagccatctcatatgtgcgcgaaaagacgaagaccggtgtggacatgcgagtgggggtccacacgggcacagtgctcggcggtgtcctgggccagaagagatggcagtacgatgtttggagcaccgatgtgactgtcgctaataagatggaggccggtggcatccctgggagggtccacatttcccaatccacaatggactgcctgaagggagaattcgacgtggagcctggtgatgggggtagtaggtgtgactacttggaggaaaaaggtattgagacatacctgatcatcgcctccaagccagaagtaaaaaagacagccactcaaaacgggctcaatggcagtgcactcccaaacggtgcgccagctagctccaaaagctccagtcctgcactcatcgaaactaaggaacccaatggctccgctcatagctctggctcaacctctgagaaaccagaggagcaggacgcccaggccgacaatccctctttccctaaccccaggcgacgactgcgcttgcaagatctcgctgaccgcgtggtagacgcatcagaagacgagcacgagcttaaccagcttctgaatgaagctctgctggagcgcgagtcggcccaggttgtaaagaagaggaatacttttttactgagtatgcggtttatggatccggagatggagacaagatattcagtagaaaaggagaagcaatccggcgctgcgtttagctgctcctgcgttgtgttgctctgcacggctctggtcgaaatacttatagacccgtggttgatgacgaactatgtcacttttatggtcggggagatcctgctgcttatccttaccatttgttctctcgccgctatttttccacgcgctttcccgaaaaaactagtggccttttcgacttggattgatcgaactcggtgggccagaaatacgtgggcgatgctggccatatttatcctggtgatggccaacgtcgtagacatgttatcatgtttgcagtactataccggtccatctaacgcaaccgcaggaatggagactgagggaagctgcctggaaaatcctaagtattacaattacgtagccgtgctgagtctgatcgccaccataatgttagtgcaggtgtcccatatggttaaactgaccttaatgctgctggtggctggcgcagtggccaccataaatctctacgcgtggcggcctgtgttcgatgagtatgaccacaaaagatttcgcgaacatgaccttcccatggtagccctggaacagatgcaggggtttaatcctggactgaatggcactgatagactacccctcgtgccttctaaatactcaatgacggtcatggtgtttctcatgatgctatccttttactacttttctagacatgtggagaaactggcgcgtaccctattcctgtggaagatcgaagtgcatgaccaaaaagagagagtctatgagatgagaagatggaacgaagcccttgtcacgaatatgttgcccgaacatgtcgccagacattttctcgggtccaaaaagcgggatgaggagctttactcgcagacctacgacgagattggggtgatgtttgcttcacttccaaatttcgcagacttttacaccgaggaatctattaacaatggcggaatcgaatgccttagatttctcaacgaaataatttccgattttgactcccttctggacaaccctaaattccgtgtgataacgaaaatcaaaacaatcggtagcacttacatggcggcatcaggagtgaccccagacgtaaacaccaatggcttcgcatcgagcaataaggaggataaatcagaaagggagaggtggcaacatctggctgacctagcagacttcgccctcgctatgaaagatacactgacaaacataaacaaccagtcctttaataatttcatgctgagaataggtatgaacaagggcggagtcctggcgggagtcatcggggcaagaaagccccactacgatatctggggaaataccgtgaatgtggccagcagaatggaatctacaggtgtgatgggcaacattcaggtggtcgaggaaacgcaagtgatcctgagagaatatggcttccgtttcgtgagaagagggccaattttcgtgaaaggaaaaggggagctactgacattctttttaaaggggagagacaaattagcgacttttcctaacggcccttcggtgactctgccccaccaggtggtggacaattcatag

SEQ ID NO: 213678 - DNA, 3360 bp, synthetic construct
  misc_feature 1..3360: note = Description of Artificial Sequence: Synthetic coding sequence
  source 1..3360: mol_type = other DNA
atgccccgaaatcaggggttttccgagccagaatacagtgcggagtactcggcagagtatagtgttagcctcccccgatttatgagactgaccttcgtgcccgaaagtcttgaaaacctgtatcaaacctacttcaaacggcagcgccatgagacgctgctagtgctggtggtattcgccgctctgtttgattgctacgtggtggttatgtgtgcagtggtgttcagctccgacaagctcgcttcactggcagtggccggaattggtctcgtgctcgacataatcttgtttgtgttatgtaagaaaggcctgcttcccgaccgcgttactagaagagtccttccttatgtgctgtggctgctcataaccgctcagatattctcctacctgggacttaatttcgccagagcacatgcagcaagcgacacagtgggatggcaagtttttttcgtgttttccttttttattactctcccgttatccctgtccccaatagtgattatatcagtggtgtcctgcgttgtgcacaccctcgtgctcggcgtaaccgtggcccagcagcagcaggaggagttgaagggcatgcaactgctgagggaaattctagcaaacgtgttcctctacctttgcgccattgctgtagggatcatgtcttattatatggccgacagaaaacatcgcaaagcttttctggaagcccgtcagagcctagaggttaaaatgaatctagaggagcaatctcagcaacaggaaaacttaatgctgtccattcttcctaagcacgtcgcggacgagatgctcaaggatatgaagaaagatgagagtcagaaagatcagcagcagttcaataccatgtatatgtatcgacacgagaatgtgagtatcctgttcgcagacattgtgggattcacgcagctgagttccgcctgttcagcccaggagctggtcaaattgttgaatgaattatttgccaggttcgacaaactggcagccaaataccaccagctccgaattaaaatcctcggcgattgctattactgtatctgtggcctacctgactatagggaggatcatgcagtctgctcaattcttatgggtcttgccatggtcgaggcaatctcgtatgtacgggagaagacaaagaccggggtcgatatgcgcgtgggagtacacactggcactgtgcttgggggtgttctcggtcagaaacgctggcagtacgacgtgtggagtacagatgttacggtggcaaataaaatggaagccggtggcattccagggagagtacacattagccagagcactatggactgcctgaaaggcgagtttgacgtggagccgggagacggaggcagccggtgcgactacctggaagaaaaaggtattgagacctacctgatcatcgcaagtaagcccgaggtgaagaaaacagcaacccagaacggtttaaatggttccgcgctgccgaacggcgcaccagcctcttccaagagctcatcacccgctctgatagagactaaagagcctaacgggtctgcacattcctccgggagtacaagtgaaaagcccgaggaacaggacgcccaggccgacaatccatctttccctaatcctagaagacgactgagattacaagacctggctgatagagtagtcgacgcttctgaggacgaacacgagctgaatcagctgctaaacgaggccctgctggagcgggaatcagcgcaggtcgtcaagaagagaaacacctttctactgagtatgcggtttatggatccagagatggagacgcgttactcagtagaaaaggagaagcaatcaggtgcggctttctcctgctcatgtgtggtgctgctctgtaccgcattagtggagattcttatcgacccctggctgatgacaaactacgtgacatttatggtaggagaaatactcctactcattcttacgatttgttccctagcggcaatcttccctcgcgcatttcctaagaagttagtcgcattctctacctggatagacagaacgcgttgggcaagaaacacatgggcgatgctcgctatcttcatccttgttatggcgaacgtcgtcgacatgctgtcctgtttgcagtattacaccggccctagcaacgctacggcgggtatggagaccgaggggagctgtttggaaaacccaaaatactacaattacgtcgccgtcctttctctgattgcgactatcatgcttgttcaagtgtcccacatggttaaacttactctgatgctgctggtcgcgggtgcagtagccactatcaatctgtatgcatggaggcctgttttcgatgaatacgatcacaagagatttagggaacacgatttaccgatggtggccctggaacagatgcagggcttcaatcccggattaaatgggacagatcgtctccccctggtgccatctaaatattccatgacggttatggtgttcctcatgatgctcagcttttactactttagcagacatgttgaaaaactagccaggactctgtttctctggaagattgaagtgcatgaccagaaggaaagagtctacgaaatgagaaggtggaatgaggcgctcgtgacaaacatgctccctgagcacgtcgccaggcattttctcggtagcaagaagcgagatgaggagctgtactcgcagacctacgatgagataggagtgatgttcgcctctctgcctaacttcgccgatttttacaccgaggaatccataaacaatggtggaatcgagtgccttcgttttttaaatgagatcatcagtgatttcgattcactgctggataacccaaagttccgggtcataacaaagatcaaaacaattggttccacttatatggccgcatcaggcgtgacgcccgatgtgaataccaacggtttcgcatctagcaataaggaagataaatctgagagggagagatggcagcacttggcggacctcgcggactttgccctggcaatgaaagatacgttaactaatatcaacaaccagagttttaacaattttatgctacggattgggatgaataagggcggagtgctcgcaggcgtgattggagcacgcaaaccccactatgatatatggggaaacaccgttaacgttgccagtaggatggagtctacgggagtgatgggtaatattcaggtcgtggaagaaacacaggtcattctgcgagaatacggatttagattcgttaggcgagggccaatctttgttaaggggaaaggagagctgctcacatttttcctcaaggggagggacaagcttgctacctttcctaatggcccaagtgtcactctaccacaccaagttgtggacaatagttag

SEQ ID NO: 213679 - DNA, 339 bp, synthetic construct
  misc_feature 1..339: note = Description of Artificial Sequence: Synthetic coding sequence
  source 1..339: mol_type = other DNA
atgcccagaaaccaagggttctccgaaccggaatacagcgccgagtactccgcggagtactcagtgagcttaccaagcgaccccgacaggggtgtgggtaggacacatgaaatctcagttcggaactctggctcttgcctgtgtttaccaaggttcatgcgactcacttttgtgccagagtctctggagaacctgtaccagacgtatttcaaaaggcaacgacatgagacgttactagtccttgtcgtgttcgccgctttgtttgattgctacgtggtcgtcatgtgtgccgtggtgttttcctctgataagctcgcctccctagctgtggctggctag

SEQ ID NO: 213680 - DNA, 3234 bp, synthetic construct
  misc_feature 1..3234: note = Description of Artificial Sequence: Synthetic coding sequence
  source 1..3234: mol_type = other DNA
atggccaggttgttttcacccagacctccaccaagcgaggatcttttctacgagacatactattccctctcccagcagtacccactactcttactgttgctcgggattgtcctatgtgctcttgccgctttgctggcagttgcttgggcttctggacgagaattgacctctgatccatcgtttctcaccaccgtgctctgcgcgctgggaggtttttctttactattgggcctcgcctcgcgcgagcagagactgcagaggtggactcgaccgctctctggtctggtctgggttgccttgctcgccctggggcacgcatttttgttcactggcggtgtcgtctctgcatgggaccaagtcagttattttcttttcgtgatctttaccgcctatgccatgctgcccctcgggatgagggacgccgctgtagccggactcgcgagctccttgtcacatctgctggtgctgggactctacctcggccctcagcctgatagtcgtcctgccctcctgcctcaactagctgctaatgcggtcctatttctgtgcggcaatgtcgccggagtgtaccataaggctttgatggagcgagcccttcgcgctacctttcgagaggcgcttagttccctacactcaagacgcagactggatacggaaaaaaaacatcaagaacacctgcttttaagtatcctgccggcatatctagccagggagatgaaagctgaaatcatggctcgtcttcaggctggccagggaagtaggcctgagagtaccaacaacttccacagcctgtacgtgaagcggcaccagggcgtctccgtcctgtatgctgatatcgtagggtttactaggctggcctcggagtgttcgcctaaagaactggttctgatgctcaatgaactttttggcaaatttgaccagattgccaaggagcatgagtgcatgagaattaagatcctcggcgactgctactattgtgtgagtggacttccactatcacttccggatcacgcaattaactgcgttagaatgggtctcgacatgtgcagagcgatcagaaaactgagggccgctaccggagtagacatcaacatgcgagttggcgtgcattctggtagcgtgctgtgtggcgtaattggactacagaagtggcagtatgatgtgtggtctcatgacgttactctagccaaccacatggaggcagggggagtgcccggtcgcgtgcacatcacaggtgccacgctcgctttgctggcaggtgcatatgcagtggaggacgcagggatggagcaccgggacccttatcttagagagttgggggagccaacctaccttgttattgatcctagggccgaggaggaggatgaaaaaggcacagctggtggcctgttgagttctctggagggtctgaagatgcgaccaagcctcctgatgacccggtatctggaatcatggggagccgcaaagccattcgctcatctgtctcacggcgattcgcccgtgagcaccagtactcctctgccagagaaaacattagcatccttctctacccaatggagccttgaccgctccagaactccgcgaggcttggacgacgaattggacaccggggatgcgaagtttttccaggtcattgagcagctcaacagccagaagcagtggaagcaatctaaagacttcaatcctcttacattgtacttccgggagaaggaaatggagaaagagtaccgactgagcgcaatcccagcattcaaatactacgaggcgtgtacctttctagtgttcctttcaaactttataatccagatgcttgtcacaaaccgcccaccggctctggcaatcacctattcaatcacattcctgttgttccttctgatcctgtttgtctgcttcagcgaagatcttatgcgctgtgttctcaaaggtcccaagatgctacactggctcccggctctgtcaggcctggtagccacgcggcctggtctccgaatcgcactcggaacagcaaccattcttctggtgttcgccatggccatcacttccctgttttttttccccacatcctccgactgcccgttccaggctcccaatgtcagctctatgatctcgaatctgagttgggaactgcctggctctcttcctctgatctccgtaccgtactcgatgcactgttgtacccttgggtttctatcctgttcactcttcctccacatgtccttcgagctaaagctgttgttgctgctcctgtggttggcagctagttgcagcctattcctccacagccacgcctggctctccgaatgtctgattgtgcggttgtatctgggcccattggactccagacccggagtcctgaaggaacccaagctgatgggtgctatctcattttttatattcttttttaccctgctagttctagccagacagaacgagtactactgtcggctagatttcctgtggaagaaaaagctgcggcaggagagagaggagacagaaactatggaaaacctaactcggttactgctcgagaatgtgttacctgcccatgtagctccgcagttcatcggtcaaaatcggaggaatgaggacctgtaccaccaaagttacgaatgcgtgtgcgtactcttcgctagtgttcccgactttaaagagttttatagtgaatccaacatcaaccatgaagggctggagtgcctgcgactactcaatgaaataattgctgattttgatgaactgctgtccaaacccaaattttccggcgtggagaagattaagactattggatccacatacatggccgcaacgggattaaatgccacttcaggacaggacgcccagcaagacgccgagcggtcatgtagccacctgggcacaatggtggaatttgccgtggccctgggatccaaactagacgtgatcaataagcactcctttaacaatttccgcttaagggtcgggcttaatcacggcccagtagttgccggtgtgatcggagcccagaagcctcaatacgatatctggggtaatacagtgaatgtagcttcccggatggagagcacaggcgtgctgggcaagatccaggtgaccgaggagacagcatgggcactgcagtccctaggctacacctgctattctaggggggtgatcaaggtgaagggcaaaggacagctatgcacatacttcctgaataccgatctgaccagaactggtcccccatcagctaccctcgggtag

SEQ ID NO: 213681 - DNA, 1260 bp, synthetic construct
  misc_feature 1..1260: note = Description of Artificial Sequence: Synthetic coding sequence
  source 1..1260: mol_type = other DNA
atgagccgtggcaccagagaatccgcatgctgcatgctgacttcttgggcctcacgtggttggcccgcatctgttcctctgcgttcttggtgcagctgttcgatgtcaagtcttgcctctagtacccggcttccaaggaagcttcgagccgcaactggggtcgacattaatatgagggttggggtccattctgggagcgtgctttgcggggtgatagggctgcagaaatggcaatatgatgtatggtcccacgacgtcacactggccaatcatatggaagctgggggtgtgcctggccgagtccatattactggcgcaactctggccttactggctggagcatatgccgtcgaggacgccggaatggaacatcgcgatccttacctgagagagttaggtgagccaacctacctggtgatcgatccacgggcagaggaggaggatgagaagggtactgcgggtggccttttatcttctcttgagggtttaaaaatgaggccttctcttctgatgacccggtaccttgaatcatggggagccgcaaagccatttgcacaccttagccatggcgactcaccagtatcaacttctactcctctccccgaaaaaaccctagctagtttctctacgcagtggagcctcgatcggtcccgcacccctagaggtctcgacgacgagttggataccggcgatgcgaagttcttccaggttatcgagcaactgaactctcagaagcaatggaaacagagtaaagactttaacccactgaccctgtacttccgagaaaaggaaatggagaaggagtacaggctgtccgctattcctgcattcaagtattacgaggcttgtacattcctggtctttctgagcaactttatcattcagatgctggtgactaaccggcctcctgcattggccataacgtattcaatcacattccttctgtttttacttattttattcgtttgcttttccgaggacttaatgaggtgcgtcttaaaggggccaaaaatgcttcactggctacccgcactgtctggactcgtggccacacgacctggacttcggatagccttggggacggctactatcctccttgtctttgctatggcgatcacctcactgtttttctttccgacttcctctgattgcccattccaggctcctaacgtgtcatctatgatcagcaacttgtcttgggagctgccaggaagtcttccactaatttctgtccccgtgtccgtcccgacatgcccatag

SEQ ID NO: 213682 - DNA, 3234 bp, synthetic construct
  misc_feature 1..3234: note = Description of Artificial Sequence: Synthetic coding sequence
  source 1..3234: mol_type = other DNA
atggccagactcttttctcccagaccacccccatcagaagaccttttttatgaaacatactatagtctgtcccagcagtaccctctcctgctgttgctgctcggaatcgttttatgcgcgttggccgcactcttagcagtggcttgggcttccgggagagaactcacctcagatccttcttttttgaccactgtgctgtgcgccctgggaggtttttctctgctgttaggactcgctagccgagagcagcggctgcagcgatggacaagaccactgtcgggcctggtgtgggtggccctgttggccctgggtcatgccttcctctttacagggggagtggtctccgcgtgggaccaagtctcctactttctatttgtcatcttcaccgcttatgccatgctaccactcggcatgcgcgatgccgcagtagccggattagcatcaagcctctcccatttgctcgttttgggcctgtatctggggcctcagcctgactctaggccggctttgctgccacagctcgctgcaaacgctgtgttgttcctgtgcggcaacgtagccggagtttatcacaaagctctcatggaacgggcattgagggcgacatttcgggaagccttatcttcgctgcactcacgacggaggctcgacacagaaaagaaacaccaagagcacctactgctcagtatcctgccagcatatttggccagagaaatgaaggctgagattatggcccgtctgcaggccggacagggctctagacccgagtctacaaacaattttcattcattatatgtcaagcggcaccagggagtcagcgttctgtacgccgacattgtggggtttacccggcttgctagcgaatgtagtcccaaggagctggtgttaatgctaaacgagttgttcgggaagttcgaccagatagccaaggaacatgagtgtatgcgcataaaaatcttaggcgactgctactattgcgtgagcggcctccccttatctttgccggaccacgctataaattgcgtcaggatgggcctcgatatgtgcagggccatccgaaaattaagggccgctactggtgttgacatcaacatgagggtgggggtgcacagcggctcggtgttgtgcggcgtaatcggcttacaaaaatggcagtacgatgtttggtcccacgacgtgacgctcgccaatcacatggaggccggaggagtcccaggtagggtccacatcaccggtgcaactctagccttgctcgccggagcatatgcggttgaagatgcaggcatggaacaccgggacccctacttacgcgagctcggagagccgacatacctggtgattgacccgcgtgccgaggaggaggacgaaaaggggaccgcaggtggtctgctttcaagtcttgagggactcaagatgcgccctagtctcctgatgaccagatacttggagagctggggtgcggctaagcccttcgctcacctgagccatggcgactccccagtgagcacgtctaccccgcttccagagaagaccctcgctagtttcagcacccagtggagcctagatcgctctcgcaccccaagagggttggacgacgagctagatactggcgatgcaaaattttttcaggttattgaacagctcaattcccaaaagcagtggaaacagagtaaggactttaatcccctgacgttatattttagggagaaggaaatggagaaggagtaccgactttcagccatacctgcattcaaatattacgaggcatgcacattcctagtgttcctgtctaatttcattatccagatgctggtgaccaacaggccccctgccttagccatcacatattcgatcacttttttgctgttccttctgatattattcgtctgcttctctgaggacctgatgcgctgtgtcctgaaaggacctaagatgctgcattggctgccagctttgagtggcttagtggccacgcgacccggtctgcgaatcgcgctggggacagctacaattcttctcgtgtttgccatggccattacttcactttttttttttccgacgtcctctgactgtccctttcaggcccctaatgtatcatctatgatttccaaccttagctgggaactcccaggatcactgccactaatttccgtgccgtactccatgcattgttgtaccctcggcttcctttcctgtagtctctttctgcacatgagttttgaactgaaactgttgttgttactcctttggctggccgctagttgcagtttgttcctccacagccatgcatggctgtctgaatgcctgatagtgcgactgtacttagggccactggatagcaggccaggagtgctgaaggagccaaaactcatgggagctataagcttttttattttcttctttaccctattagtactggcaagacagaacgaatactattgccggctggatttcctttggaagaaaaagctgaggcaagaacgggaggagacggaaaccatggagaacttgactcgactcctcctcgagaacgtcctgcctgcgcacgtggcaccacaattcatcggccagaacagacgcaatgaggatctctatcatcaatcatacgagtgtgtgtgcgtgctgttcgccagcgtgcctgattttaaagagttttactccgagtcaaacatcaatcatgagggcctcgaatgtcttcggctccttaatgaaattatcgcggactttgacgagctgttgtcaaagcccaagtttagcggcgttgagaagattaaaactatcggaagtacatacatggcagcaaccgggcttaacgcaacatccggccaggatgcacagcaggatgccgaaagatcctgcagccatctcggaaccatggttgagtttgctgtagcactgggcagtaagctggatgtgatcaacaaacacagttttaacaactttcgccttcgagtcggcttaaaccatggacccgtggtggctggtgtgatcggggctcaaaagcctcaatatgatatctgggggaacaccgtcaatgtggcaagtcgcatggaatctacaggtgtgctggggaaaatccaggttactgaggaaacagcctgggccttgcagtccctaggctatacatgctacagcagaggggtaatcaaagtcaagggcaaaggacagttatgcacgtactttctcaacaccgatttgacccgcacaggcccacccagtgctacactgggatag

SEQ ID NO: 213683 - DNA, 3234 bp, synthetic construct
  misc_feature 1..3234: note = Description of Artificial Sequence: Synthetic coding sequence
  source 1..3234: mol_type = other DNA
atggccaggctgttcagtcctcgcccacccccatccgaagatctcttttacgagacatattattccctcagccaacaataccctctgttactgctgctccttggcatcgttctctgcgccttagctgctctgttggcagtggcttgggcctcggggagagagctgactagcgatccatctttcctgaccactgttctctgcgcattaggagggtttagcctactgttaggcctggcttcccgggagcagcgcctgcaaagatggacccgccctctatcagggttggtatgggttgccctcctggccctggggcacgctttcctgttcactggaggcgttgtgagtgcctgggaccaggtcagctactttttgttcgtgattttcacagcatacgccatgttgccgcttgggatgagggatgcagctgtagctggattagcttcctccctgtctcacctccttgtgctgggactgtacctcggtccgcagcccgattctcggccagcattgctgccacagctagcggcaaacgcagtcctattcctgtgcggcaatgtggcgggagtctatcataaagccttaatggagcgggctctgcgcgcaaccttccgcgaggcgctgagtagtctccatagtcgaaggcgacttgacactgaaaaaaagcaccaggagcatctcctgctctctatcttgccagcctacctcgccagagagatgaaggcagagattatggcgaggttacaagcaggacaaggctcacgacccgaatccaccaataacttccattccctgtatgttaaaaggcaccagggggtttctgtgctgtacgcggacatcgtcggctttactcggctcgcttccgaatgcagccccaaggaactcgttctcatgctaaatgagctgttcgggaaattcgaccaaatcgccaaggaacatgagtgtatgcgtatcaaaattcttggtgattgttactactgcgtgagcggtctgccactctcactcccagatcatgccattaattgtgtgcgtatgggactcgatatgtgtcgcgctatccgcaagctgcgggctgcaacaggcgtcgacattaacatgagggtgggagtccatagcgggtccgtgctctgtggcgtcattggcctacaaaaatggcaatatgacgtttggtcgcatgacgtcactctagctaaccatatggaggccggaggagtgccaggtagagtgcatatcacaggggcaaccctggccctcttggcaggagcttatgccgtggaagacgcaggcatggaacacagggacccatatttgcgcgagttgggagaacccacctacttggtaatcgacccaagggctgaggaggaagatgaaaaaggcactgcgggaggcctgctaagctctctggaaggcttgaagatgagaccatccctgctgatgacaaggtacctggaaagctggggtgctgccaaaccttttgcccacctgtcccacggcgatagtcccgttagtaccagcactccccttcctgagaagacgctggccagcttttccacccagtggagtctggatagatcacggactcctcgtggtctcgacgacgagctggacaccggagacgctaaattcttccaggttatcgagcagctgaacagccagaaacagtggaaacaaagcaaggactttaatcccctgaccctttactttcgagagaaagaaatggagaaagaatacaggctctctgctattccagcctttaaatactacgaagcctgcaccttcctggtattcctcagtaattttatcatccaaatgctcgtcactaaccgcccaccagcattagcaattacatattcgattacctttctgctgttcttgctgatattgtttgtctgcttttcagaggatctgatgcgatgcgtcctcaaaggccctaagatgctgcattggttacctgccctgtccgggctcgtcgcaactcgtcccggactccgcatcgcactcgggaccgcaacaattctgctggtgttcgcgatggccataacctccctcttcttctttcccaccagctccgactgtccattccaggctcctaatgtaagttcaatgatctctaatctgagttgggagctacccggttccttgcctctcatcagtgtgccctactccatgcattgctgcactctcggttttctcagctgttcgctatttctgcatatgtctttcgaactcaagctgctactgcttctgctgtggttggctgcatcttgttccttattcttgcactcgcacgcttggctctcagaatgcctgattgtacgtttatatttaggccctctagacagccgaccaggagtgttgaaggagcctaaattaatgggagccattagctttttcatattcttttttaccctcctggtcctggctagacagaacgagtattactgtagactcgattttctgtggaaaaaaaaacttcgccaggagagggaagaaaccgagacaatggagaacctcacgcgcctgttgctggagaatgtcctccccgcacatgtggctccacagtttatcggacaaaaccgcaggaacgaggacctatatcaccaaagttatgagtgtgtatgtgtgctcttcgcttcagtaccagactttaaagaattctatagcgaatccaacattaaccatgaaggactggagtgtctgagattgctgaacgaaattattgcagatttcgacgagctactgtcgaagcctaagttctctggggtagagaaaattaaaaccattggttctacatatatggcagcaacagggctcaacgcaacttcaggccaggacgcccagcaggacgccgagcggagttgcagccatctgggaaccatggtagagtttgccgtggccctgggttcaaaactggacgtaattaataaacatagcttcaacaactttcgactgcgagttggacttaaccacgggccagtcgtcgcaggggtgatcggcgcacaaaagccacaatatgacatttggggcaacacggtgaacgtggccagtcggatggagtctactggagttttaggaaaaattcaggtaaccgaggaaacagcctgggctctccaatctttggggtacacctgctattcacggggagtgatcaaggtcaaaggcaagggccagctgtgcacatactttttgaatactgacctgacgcggactgggcctcctagtgcaacactcggctag

SEQ ID NO: 213684 - DNA, 348 bp, synthetic construct
  misc_feature 1..348: note = Description of Artificial Sequence: Synthetic coding sequence
  source 1..348: mol_type = other DNA
atggcgcgactgttttcacccaggccgccaccgtctgaggatctgttttacgagacctattactcgctttcgcaacagtaccctctcctgctgctcctcctaggtatcgtgctgtgtgcactggcggcactccttgccgtcgcttgggcgagcggcagagagttaacttctgaccccagctttctgactactgtcctctgtgccctgggcggattcagtctacttctcggtctggcctcacgcgagcagcgactccagaggtggacccggccactgagcggtctcgtctgggtggcactgctggccctcggtcacgctttcctcttcacgggtggggtggtgtcctag

SEQ ID NO: 213685 - DNA, 2736 bp, synthetic construct
  misc_feature 1..2736: note = Description of Artificial Sequence: Synthetic coding sequence
  source 1..2736: mol_type = other DNA
atgaagagccagaaagagggctgttgtagtagaggagatctcagcatccaaaccggccctggcggagagtgggctcccaggcgtctcgtgtctaatgtcctgatcttttcctgcaccaatatcgtcggcgtctgcactcactatccagctgaagtgtcacagagacaggccttccaggaaaccagggaatgcattcaggctaggctccacagccaaagagagaatcagcagcaggagcgcctgctgttgagcgtcctgcccaggcatgtggctatggagatgaaagcagatatcaacgctaagcaagaagatatgatgtttcataagatttacattcaaaagcatgataacgttagtatcctatttgctgatatcgaggggttcacaagcctagccagtcagtgtaccgctcaggagctggttatgaccctaaatgagctgtttgcgcgtttcgataagctggctgcagaaaaccactgtctccgtatcaagatcctgggcgattgctattactgcgtgtctgggcttccggaagctagggccgaccatgcccactgttgcgtggagatgggaatggacatgatcgaagctatctctttggttagggaggttaccggcgtaaatgtcaacatgagagtggggatacacagcggccgagtacactgcggcgtactgggcttgcgcaaatggcagttcgacgtatggtctaacgacgtgaccctcgcgaatcatatggaggccggaggaaaggccggtcggattcacatcactaaggcgaccttgaattatctgaacggcgactacgaggtggagcctggttgtgggggagaacgcaacgcctatctgaaggagcactcaattgagacgttcctcatcttaaggtgtacacagaaaaggaaagaggagaaggcaatgattgccaaaatgaatcgccagaggactaacagtatcggtcacaatcctcctcattggggcgctgagcggcctttctataaccaccttggcggaaatcaggtctccaaggaaatgaaaaggatgggtttcgaagatcctaaggataagaacgcccaggagtcagccaaccccgaagatgaggtggacgagttcttaggcagggccatcgatgcccgaagtattgatcgccttcgctctgaacacgtgagaaaatttctgcttacatttcgggagccagacctggaaaagaaatactctaagcaggtggatgacagatttggtgcttatgtagcttgtgcctcgctcgtgtttctgttcatctgtttcgtgcagattaccatcgttccacactcaatttttatgttgagtttttatctgacctgctcccttctgctgaccctggtagtatttgtctcggtgatttatagttgcgtgaaactctttccgtcccctctacagacccttagtcggaaaattgttcgctccaagatgaatagtaccttggtcggagtgttcacgatcacactggtattcttggcggctttcgttaatatgttcacttgtaacagtcgcgatctgttgggatgtttggcccaggaacataatatatccgcctctcaggtcaatgcctgccacgtggctgaaagcgccgttaattacagtctgggggacgaacaaggcttttgtggatcaccatggcccaactgcaatttccctgagtatttcacttacagcgtcctgttgagtctcttagcgtgttccgtgtttctgcaaatctcctgcatcggtaaactggtcttaatgctggccattgagctcatttatgtgctgatagtcgaagtccctggcgtaaccctcttcgacaatgcagaccttttggtaacggccaacgctattgatttctttaacaatggaacatcgcagtgccctgagcacgcaacaaaggtagcccttaaagtggtgactcctattattatctcagttttcgtcctagccctttacctacacgcacagcaggttgagtccaccgctagactggacttcttgtggaagctgcaagccaccgaggagaaggaagaaatggaggagctacaagcttacaatcgcaggctgctccataacattcttccaaaggacgtcgccgcacatttcctggccagagaacgacgtaacgacgagctttactatcagtcctgtgagtgcgtagctgtcatgtttgcatccatcgccaatttctcagaattttatgtagagctggaagctaacaacgaaggcgtcgagtgccttaggctactgaacgagatcatcgccgatttcgacgaaattatcagtgaggaccgctttcgccaactcgagaagatcaagaccataggatccacttatatggccgcttcaggtttgaacgatagtacctacgacaaggtgggcaagacgcacataaaggctctcgcggattttgccatgaagctgatggaccagatgaaatacatcaatgagcacagttttaataatttccagatgaaaatcggcctgaacattggtcccgtcgtggcgggagtaataggtgctcggaagcctcagtatgatatatggggaaacacggtaaatgttgcctctcgtatggattctaccggggtgccagataggatccaggtgacaaccgacatgtatcaggttttggccgctaacacttatcagttagaatgcagaggagtggtgaaggtgaagggcaagggagaaatgatgacgtactttctgaacggaggacctcctctgtcatag

SEQ ID NO: 213686 - DNA, 3786 bp, synthetic construct
  misc_feature 1..3786: note = Description of Artificial Sequence: Synthetic coding sequence
  source 1..3786: mol_type = other DNA
atgagcggtagcaagtccgtgtccccaccagggtacgcggctcagaagacagcagctcctgctcctagaggcggtcctgagcaccgcagcgcttggggggaggctgactcacgcgcaaatggatacccccatgcccctgggggaagcgcgcgtgggtcaactaagaagccagggggagcggtgactccacagcagcaacagcggcttgcaagtcggtggagatctgacgacgacgatgacccaccattgtcgggcgacgacccgttggccggaggatttggtttttccttccggagcaagagcgcgtggcaggaacggggtggggatgactgcggtagaggctctagacgacagagacggggtgcggcatctgggggaagcacacgagctccacccgctgggggagggggaggtagtgcagcagcggcagcttccgccggtggcacagaagtgagacccaggagtgttgaagtgggcctcgaagaacggagaggaaaggggagggcagctgatgagcttgaagcgggagctgtggagggcggagagggatccggagatggcggtagtagcgctgattcagggagcggcgctggcccaggtgcagtgctctctctgggcgcatgctgcctggctctgttgcagatcttcaggagcaaaaaattcccaagcgacaagctggagaggctgtaccagaggtacttcttcagactcaatcaatcatcactaaccatgctgatggcagtgttggtactcgtttgcctagtcatgctggcgtttcacgccgcaaggccgcctttacagttgccttacctcgctgtcttggcagcagccgtcggagtcatactcatcatggctgttctgtgcaatcgtgctgccttccatcaggatcacatgggccttgcttgttacgcactgatcgcagtggtcttagccgtgcaagtagttggcctgcttttaccacagcctcgctccgcctccgagggcatctggtggaccgttttcttcatatatacaatctatacactgctccccgtgagaatgcgggctgcggttttgagcggagtcctgctatcagctctccacttagctatcgctctacggactaatgctcaggatcagtttttactgaaacagctggtcagcaacgtgctgatattttcctgcacaaatattgtcggtgtctgtacccactacccagcagaagtcagtcaacgccaggcttttcaggagacaagggagtgtattcaggcacggctgcacagccaacgggagaaccagcagcaggaacgccttctccttagtgttcttccaagacacgttgccatggagatgaaagccgacattaacgccaagcaggaagacatgatgttccataaaatttacattcagaagcacgacaatgtctctatcctattcgcggacattgaaggttttactagcctggccagccagtgcactgcccaggaactggttatgactctcaacgagctgtttgcaaggttcgacaaactcgccgctgagaaccactgtctgcggattaaaatactaggagactgttactattgtgtgtccggactccctgaggcgcgagctgatcacgcacattgctgtgttgagatgggcatggatatgatcgaggccataagcctcgtgagagaagtcaccggggttaacgtgaatatgcgagtgggaatccatagcgggagagttcactgcggagttcttgggcttcggaaatggcagttcgacgtgtggtctaatgacgtgacactggcgaaccacatggaagcgggtggaaaggccggacggattcatattacaaaagcgaccctgaactacctgaatggagattacgaggtcgaaccgggatgcggaggggaaaggaatgcatatctcaaagagcattccatcgagacattcctcattctgcgctgtacccaaaaacggaaggaggagaaagccatgatcgcaaaaatgaaccgacaaaggaccaactccataggccacaaccctcctcattggggtgccgaaaggccattttacaaccatcttggcggtaatcaggtgtccaaagagatgaaaagaatgggatttgaggacccaaaagataaaaacgctcaggagtctgctaatcccgaggatgaggtcgacgagttcctgggacgagccattgatgctcgttccatcgaccgccttagatctgagcacgtgagaaaattcctgctcacctttagagaacctgatctcgagaagaagtattcaaaacaggtggacgaccgcttcggcgcttatgttgcctgtgcctccctggtattcttgttcatttgctttgtacagatcacgatcgtacctcattctatattcatgctgagcttttatctgacttgcagtcttctgctgaccttagtggtctttgttagcgtgatttacagctgtgtcaaactcttcccttcgccgctccaaacgctgagtaggaagatcgttcgatctaagatgaatagcactctggtgggagtgtttaccatcacactggtgttccttgcagcatttgttaatatgttcacctgtaacagccgtgatctactgggttgtctggcacaggaacacaatatcagtgccagtcaggtgaacgcctgccatgttgctgagtctgcagttaattactcgttaggagacgaacaggggttctgtggctccccttggcctaattgtaactttcctgagtattttacatactcggtgctgcttagcctgttggcttgtagcgtgtttctgcaaattagttgcataggcaagcttgttctgatgcttgccattgagctgatctacgtcttgattgtggaggtacccggtgttactctgtttgacaacgccgatctgctggttaccgcaaacgctatagactttttcaacaatggcacctcccagtgtcccgaacatgctactaaggtagcactgaaggtggtcaccccaattattatctccgtgttcgttttagccctctacctgcatgcccagcaggtggagagtactgcccgactagattttttgtggaagctacaggctaccgaagagaaggaggagatggaggagttacaggcatacaaccgcaggctgcttcacaacatcctccctaaggatgtggccgctcattttctcgcaagagagcgccgaaatgatgagctctactatcagagctgtgagtgcgtggcagtgatgttcgcctccatcgccaacttcagcgaattctacgttgaactggaagcaaataatgagggggtggaatgccttagattgcttaacgaaatcattgccgacttcgacgagatcatatctgaggaccgcttcagacagctggagaagattaagacaataggcagtacctatatggctgcctcaggtttgaatgacagtacgtacgataaagtgggcaaaactcacataaaggcactcgccgattttgctatgaaactaatggaccagatgaagtacatcaatgaacacagctttaacaactttcaaatgaaaattggcctgaatatcggccctgtggtggcaggagtgataggcgctaggaaaccacagtacgacatttgggggaatactgtgaacgtcgcatcaagaatggactccactggtgtgcccgatcgcatccaggttaccacagacatgtaccaggtgctcgcagccaacacctaccagttggagtgtaggggagtcgtaaaggtaaagggtaagggggaaatgatgacttattttctcaatgggggtccacctttgtcttag

SEQ ID NO: 213687 - DNA, 2760 bp, synthetic construct
  misc_feature 1..2760: note = Description of Artificial Sequence: Synthetic coding sequence
  source 1..2760: mol_type = other DNA
atggctcccagtcgcttcaggacacagctggagctcgtgagcaacgtgctgatatttagctgcacaaatatcgtgggcgtttgtactcactatccagcggaggtgagccagagacaggcttttcaggagacgcgggaatgtatccaggcgcgactgcattctcagagagagaatcaacagcaggaacgtctcctgctctccgttctgcctagacacgttgcgatggagatgaaggccgacatcaacgctaagcaagaagacatgatgtttcacaaaatttacattcagaaacatgataacgttagtattttattcgcagatattgaaggatttacctctctcgccagccaatgtaccgctcaggaactcgtcatgactttgaacgagctatttgccagatttgataaattagctgctgaaaaccactgtctgaggattaaaattcttggcgattgctattactgcgtctctggcctcccagaggctcgcgcagaccatgctcattgttgtgtggaaatgggtatggatatgatcgaggctatctctctcgtacgcgaagttaccggagtgaatgtaaacatgcgggtcgggatccatagcggccgagttcactgcggtgtcctggggctgaggaagtggcagtttgatgtttggtcaaatgatgtgactctggccaaccacatggaggcaggcggaaaagcgggacgcatacatatcaccaaggcaaccctgaattacctaaacggggattacgaagtcgaacccggatgcggcggagaacggaacgcgtatctcaaggagcattctattgaaacattcctgatactgagatgtacccaaaagcgcaaagaggaaaaagctatgatagccaagatgaaccgacagagaaccaacagcatcggccataacccaccacactggggcgcagagcggcctttctacaaccatctcgggggtaaccaggtgtctaaagaaatgaaacgcatgggatttgaggaccccaaagataaaaacgcgcaggaatcagcaaatccggaggatgaagtagatgagttcctaggaagggctattgatgcccgaagcattgatcgactccgatccgaacatgtgaggaagttcctattgactttccgtgagccggacctggaaaagaagtactcgaaacaggtcgatgatcgattcggtgcatacgttgcatgtgcttctttggtgttcttatttatctgtttcgttcagattaccatcgtcccacattccatcttcatgctgagtttctacttaacctgttccctgcttttgacactggtggtcttcgtgtccgttatctattcttgcgtgaagttgttcccttctcctctgcagaccctgtccagaaaaattgtgcgctctaaaatgaattccacactggtcggggtattcacgattacactggtctttctagcggcttttgtgaacatgttcacatgcaacagccgggatctgctgggatgcctcgctcaggaacacaatataagcgccagccaggtgaacgcctgccacgtcgccgaatcagccgtcaactatagtctcggggacgagcagggcttctgcggatccccatggccgaactgcaattttcccgagtattttacctacagcgttttgctgtccctgttagcatgtagtgtatttttgcagatcagctgtattggaaagctggtcttgatgctcgccattgagttaatttacgtgcttatcgtggaggttcctggggtgacattatttgacaacgccgatttgctcgtgacagctaatgctattgacttcttcaataacggtacatctcagtggtctttatgtgagaacctgagacatcggagaatggaggctggaacctacttccccagcggcgtcaaagagcagagtcccgagcacgcaactaaagtcgccctgaaggtggtgactcctattatcatcagtgtgttcgtactggctctgtatctacacgcacaacaagtggagtctacggcaagacttgactttttatggaagttgcaggctaccgaggagaaagaagagatggaagagttacaagcctataatagacggcttctccacaatatcctgcccaaagacgtggcagcccatttcttggcccgagaaagaagaaacgacgaactgtactaccaatcttgtgaatgcgtggccgttatgtttgcatcaattgcaaattttagcgagttttacgtcgaactagaggcaaataatgagggggttgaatgcctacgactcttaaatgagatcatcgccgactttgacgagatcatctccgaagaccgctttaggcagctcgaaaaaattaaaactataggttctacatatatggctgccagcggtttgaatgatagtacgtatgacaaggtgggaaaaacccacataaaagcacttgcagacttcgccatgaaactaatggaccagatgaagtacattaatgaacactcttttaataatttccagatgaagatcgggctgaacattgggccagttgtggcaggggttatcggtgcaaggaagcctcagtatgatatttggggtaacactgtgaacgtggcaagtagaatggactcaactggggtcccggacaggattcaggtaaccacagatatgtaccaggtcctggcagccaacacttaccagttggagtgtcgtggcgtggtgaaagtaaagggcaaaggtgaaatgatgacttattttctgaacggtggaccgcctttgagttag

SEQ ID NO: 213688 - DNA, 3507 bp, synthetic construct
  misc_feature 1..3507: note = Description of Artificial Sequence: Synthetic coding sequence
  source 1..3507: mol_type = other DNA
atgagctggttcagcggtttgcttgtgcctaaggtcgacgaacggaagacagcgtggggggaacggaatgggcagaaaaggagccgccgtaggggaactcgggctggtggcttttgtaccccacggtatatgtcatgtttgcgtgacgcagagcccccaagccccacgccggctgggcctccgagatgtccctggcaagatgatgcctttatacgaaggggaggtcctggaaagggaaaagaactgggcctgagagccgtggctttggggtttgaggatactgaagtgacaacgacagccggaggcactgccgaggtagcgccagacgcagtccctaggtcagggcgatcgtgctggagacggctggtacaggttttccagtctaaacagttcagaagtgcgaagctggaacgtctttaccagcgctatttctttcaaatgaaccaatcttcccttacccttcttatggccgtccttgtactgctgactgctgtgctgctggctttccatgcagcccctgcgagaccccagcccgcttacgtagcactactagcctgcgctgccgctctcttcgttggcctcatggtcgtgtgcaatagacacagctttagacaagactccatgtgggtggtaagttatgttgtactggggattctggccgcagtacaggtggggggtgccttggccgctgatccaaggagcccctccgctggcttatggtgccctgtgttttttgtatatatcgcctataccctacttcccatcaggatgagagcagcggtactcagtggcctaggtctctctactctgcacctcatcctggcgtggcaactgaatcgcggagatgcattcctgtggaagcaactaggcgctaatgtgctcctcttcctctgcaccaacgttatcggcatctgcacccactaccctgccgaggtgtcccagagacaagcatttcaggagaccaggggctacatccaggcccgactgcacctgcaacatgagaacagacagcaggagaggcttctgctttctgttttgccccagcatgtcgccatggagatgaaggaggatatcaacacaaagaaggaggacatgatgttccataagatttacattcagaagcacgataacgtttcaatcttgtttgcagatatagaaggtttcacctcactcgcgtctcagtgtactgcgcaggaacttgttatgacactgaatgagctatttgcccgattcgacaagctggcagcagaaaaccattgcttgcgtatcaagatcctaggggattgttattactgcgtgtccgggctgccggaggccagagccgatcacgctcactgctgcgtagagatgggtgtagatatgatcgaggccatttcgctcgtccgcgaggttaccggggtgaatgtgaacatgcgcgtgggcatccattctggtagggtccactgtggcgtcctgggactcaggaaatggcaattcgatgtgtggtcgaacgacgttacgctggccaaccatatggaggccggaggtagggccggacggatacacataacaagagccaccctccaatatctgaacggagactacgaggtcgagcccggtcgtggcggagagagaaatgcatacttgaaggaacagcacatcgagactttcttgattcttggcgctagtcaaaagcgtaaggaggagaaggctatgctggccaagttgcaacggacacgcgctaattcaatggagggcctgatgcccagatgggtgcccgatagagcgttttcaagaactaaggactcaaaagcattcaggcagatgggaatagacgacagtagtaaggataacagggggacccaagacgcactgaatccggaggacgaggttgacgagtttctttccagagccatagacgcgcgatcaatcgaccagctgcggaaagaccacgttcggcgatttctgcttacgtttcagcgcgaagatctggagaaaaagtactctagaaaggtggatcctagattcggagcatatgtagcatgtgctctcctcgtcttttgtttcatctgctttatccagttgctgatcttcccccacagcactttgatgcttgggatctacgcgtctattttcctcctgctgctcatcactgtcctgatttgtgcagtctacagctgtggcagcctatttcccaaagccttgcagagactatctaggagcatagttcggtctagagcacactccactgccgttggaatttttagcgtacttttagtgtttacttccgcaattgcaaacatgtttacatgtaaccacacgccaattcggtcatgcgcagccagaatgttaaatcttaccccagcagatattacagcgtgccacctgcagcagctgaactatagcttgggactcgatgctccactctgtgagggaacaatgccaacctgttctttccccgaatactttatcgggaatatgcttctgtcattactcgcatcgtccgtttttctgcacattagctctataggcaagcttgctatgatctttgtactgggcctaatctatctggttctcctcttgctgggccctcctgctactatcttcgataattatgacttgcttttgggcgtccacggtctcgctagcagcaatgaaaccttcgatgggctggattgccctgctgccggacgggttgccctgaagtatatgaccccagtcatcttattggtgttcgctctagccctttacctgcatgcacagcaggtcgaatctaccgcaaggttggatttcctctggaagttgcaagcaactggagagaaggaggagatggaagagctacaggcatataataggagattactacataacatcctcccgaaggatgtggccgcacacttcttagcaagggagcggagaaacgatgaactgtactaccagagctgcgagtgtgtggccgtgatgttcgcatctatcgctaatttctcagaattttacgttgaactcgaagccaataatgagggggtcgagtgcttacggttactgaatgagattatagctgacttcgatgagatcataagcgaggagaggttccgccagctcgagaagattaaaacaattggctcaacttacatggccgcttccggattgaacgcttccacatatgaccaagtggggcgatctcacataacagccttggccgactatgcaatgcggttgatggaacagatgaagcatattaacgaacattctttcaacaatttccagatgaagattggcctaaacatgggacctgtcgtcgccggagtaataggggcaagaaagccgcagtacgacatatggggaaacacagtcaacgtgagtagcagaatggattccaccggggtgcccgatcgaatacaggtgacaaccgatttataccaagtccttgccgctaagggataccaactcgagtgcagaggggtcgtaaaggtgaagggaaagggggagatgaccacatacttcctcaatggcggtccgtcttcctag

SEQ ID NO: 213689 - DNA, 3348 bp, synthetic construct
  misc_feature 1..3348: note = Description of Artificial Sequence: Synthetic coding sequence
  source 1..3348: mol_type = other DNA
atgtcctggttctctggcctgcttgttccaaaagtcgatgagagaaagaccgcatggggagaaaggaatggccagaaaaggtcacgccgaaggggtactagggctggaggattctgtaccccgagatacatgtcttgtttaagagatgccgagccgccttctccaacacctgccggaccccctcgatgcccatggcaggatgatgctttcattcggagggggggacctggaaaaggaaaggagctcggcctaagagccgttgcgctggggtttgaggatactgaagtgacaacgaccgccggaggtaccgcagaagtggcacccgatgcggtgccccgatccggacgctcatgctggagacgcctcgtgcaggttttccaaagtaagcagtttagatctgctaagttggaaaggctgtatcaaagatattttttccagatgaaccagagtagcctgaccctgcttatggccgtgctggtgctgctgactgccgttttgctggctttccacgctgctcccgcaagaccccagcctgcttatgtagctcttctagcctgtgcagcagccctcttcgtgggattgatggtggtatgtaatcggcacagtttccgccaggattccatgtgggtggtgtcttacgtggttctgggaatcttggccgctgtgcaggtcggcggtgctctggccgcagatccacgtagcccctcggcaggcctgtggtgtcctgtgttcttcgtgtacatcgcctacacattgctacccatcaggatgagggcagctgtgctgtctggcctgggcctctctaccctgcatctcattctggcctggcagctgaataggggcgacgcttttctttggaagcagttaggagccaatgtgctcttgtttctatgtacaaatgtcatcggcatctgcacgcactacccagccgaagtgagtcaacggcaggcttttcaggagacccgaggctatatccaggcccgtttgcacctccagcatgagaaccggcaacaagaacgcctcctgctgtcggttctgccacaacacgttgccatggagatgaaggaagacattaacacaaagaaagaagacatgatgttccataagatctatattcagaaacacgataatgtgtccatcttatttgcggacatagagggatttaccagtctggcttctcagtgtaccgcacaagagctcgtgatgacactgaacgaactcttcgcacgatttgataaactggcagctgagaatcactgcctccgaattaagattctaggggactgttactactgtgtctccggcctgccagaggcgagagctgaccacgcccactgttgcgtggaaatgggagtggacatgatcgaggcaattagtcttgtgcgtgaggtcactggagtgaatgttaacatgcgcgtgggcatccactccggcagagttcattgtggcgtcctgggcctcagaaagtggcagttcgatgtttggtccaacgacgtgaccctggccaatcacatggaggccggaggccgagctggcaggatccacataacacgagctactcttcaatacttgaacggcgactatgaggtcgaaccaggacgcggaggcgaacgaaatgcctacctgaaagaacaacatatcgagacatttttgattttaggtgcttcccagaaacgcaaagaagaaaaggcgatgctggccaagctccagcggacacgggcaaactctatggaaggtcttatgccacggtgggtcccagaccgcgctttctcccgcacgaaagacagcaaagcttttcgtcagatgggcattgacgattcgtctaaggataacagaggcacccaggatgccttgaaccctgaggacgaagttgatgaattcttgtcgcgcgctatagatgccaggagcatcgatcaactgagaaaggaccacgtgcgcaggtttctcctgacatttcagagagaagacctggagaaaaagtatagccggaaagtagatccgcgattcggcgcttatgtcgcatgcgcactgctcgttttttgtttcatctgctttatacagctcctgatatttcctcatagcacccttatgttaggcatctatgccagcattttcctgttactgttgataactgtgctgatctgcgcagtctacagttgtgggagcctttttcccaaagccctccagcggctctcaaggagtatagtgcggagcagagctcactctactgcagtcggaatctttagcgtactgctcgtgtttacttctgccatcgcaaacatgtactttatcggaaatatgctcctcagtctgctggccagttcagtattcctgcacatatcctcgattggaaagctagctatgatttttgttctggggctgatatatttggtgcttctgctgttgggacctcccgctactatcttcgacaactatgacctgctcctaggcgtgcacggcctcgcttcaagtaacgagaccttcgatggcctcgactgcccagcagcaggaagggtagctttgaagtacatgacaccagtgatcttattggtgttcgctttggctctctacctccacgcgcagcaggtggagtctactgcccgattagacttcctgtggaagctgcaagccacaggcgaaaaggaagagatggaggagttgcaggcgtacaaccggagactgctgcacaacattctcccaaaggatgtggctgcgcacttcctggccagagagcgtagaaacgatgagctctactatcagtcctgtgaatgtgtggccgtaatgttcgcctcaatagctaatttctcagaattctatgttgagctcgaggcaaataatgagggcgtcgaatgcctgaggctgcttaatgagatcatcgccgattttgacgagatcatctccgaagaaaggttccggcaactggagaagataaaaactattggttctacatacatggctgcatctggcttgaacgcgagtacctacgaccaggtggggcgttcacacatcaccgctctggctgactacgcgatgaggctcatggaacagatgaaacatattaatgagcatagtttcaacaacttccagatgaaaattgggctcaacatgggacctgtggtagccggagttataggtgctagaaaaccccagtacgatatttgggggaacaccgtgaacgtttcatcccgaatggacagcacaggtgttcctgatcgcatacaagtgaccacagatctctatcaagttctggccgcaaaaggctaccaactggagtgtcggggagtggttaaagttaaaggtaaaggcgaaatgacaacttacttcttaaacggaggaccttctagctag

SEQ ID NO: 213690 - DNA, 3348 bp, synthetic construct
  misc_feature 1..3348: note = Description of Artificial Sequence: Synthetic coding sequence
  source 1..3348: mol_type = other DNA
atgtcttggttttccggactcctggtgcctaaagtagatgaaaggaaaaccgcatggggggagcggaacggacaaaagaggagtcggagaagagggacgagggctggcggattttgcaccccccgttacatgagctgcctaagagacgcggaaccaccaagccccacacccgctggtccccctcgctgcccatggcaggacgacgcattcattagacgtggaggtcccggtaaggggaaagaattaggtctgcgggctgtagccttgggtttcgaggacacagaagttactacaacagctggtggaacagcggaggtggccccagacgccgtcccacgctccggtcggagctgctggcgcagactggtgcaggtatttcagagcaagcagtttcggtccgctaaattggagcgcctgtatcagcggtacttctttcagatgaaccagtcttccctgaccttgctgatggctgtcctggtgttgctgacagcggtgcttttagcattccacgcagcacccgcacggccacagccagcctatgtggcattgttagcttgcgctgcggcactgttcgtgggcctgatggtggtctgtaaccgacattctttcaggcaggactctatgtgggtggtctcttacgttgtgttgggaatcttggctgccgtgcaggttggtggggctctggctgccgatccccgatctccctccgccggactgtggtgccccgtattttttgtctacattgcttacacgttgttacctatacgcatgagggctgcggtgctgtctgggctgggcctatcaacgcttcacctgatcttagcttggcagctgaaccgcggagacgcctttctctggaagcagctgggtgcaaatgtgcttctgttcctctgcaccaacgtaataggcatctgcacacattaccctgccgaagtgagtcaacggcaagctttccaggaaacacggggatatattcaggctcgactacatctgcaacacgagaacaggcagcaggaaagacttctgctgtctgtgctgccgcagcatgtcgcgatggagatgaaggaagacatcaacacaaaaaaggaggatatgatgttccataaaatatacatacaaaaacacgacaacgttagcattctgttcgccgacatcgagggatttactagcttggcatctcaatgtactgctcaagagctggtcatgacccttaatgaactgttcgcaaggttcgataagttggcggcagagaaccactgtctacggattaagatcctgggcgattgctattactgtgtgtctgggttgcctgaggccagggccgaccatgctcattgctgcgtagaaatgggtgtggatatgatcgaggcgatctctttagttcgtgaagtgacgggggttaacgtaaacatgcgcgtgggcatccacagtggcagagtacactgtggcgtattgggcttgaggaaatggcagttcgacgtttggagtaatgatgtgacgctggcaaatcatatggaggctggaggccgagccggaagaatccacattacgcgcgcaactctgcaatacctgaatggtgattacgaggtggagccaggaaggggaggagagagaaatgcctacctgaaagagcagcacatcgagacgtttctcatcctgggcgcaagccagaagcgtaaggaggaaaaagcgatgctggcaaaattacaacgcacaagagctaactcaatggaagggctaatgccacggtgggttcctgatcgggctttctctcggacaaaggactccaaggcttttcggcaaatgggaatagatgactcatctaaggacaaccggggtactcaggacgccctgaatcccgaagacgaggtcgacgaattcctcagccgagctatcgacgcacggtctatcgaccaactgcggaaagatcatgtgcgcagatttctcctcactttccagagagaagatctggagaagaagtacagcagaaaggtcgatcccaggttcggggcatacgtggcttgcgctttattagtattttgcttcatctgtttcatacaattgcttatctttccacactccactctgatgttggggatatatgccagcatctttttgttgcttctcatcacagttctgatttgtgcagtgtatagctgcggctctctgtttcccaaagctttgcagcgtctgtctagaagtatagtaaggagtagggctcattctacagccgtgggtattttcagtgtactgctcgttttcacatctgccatagccaacatgtattttatcggcaatatgctcttatccctcctcgcctcctcagtcttcctacacatttcctccatcggtaagctcgccatgatttttgttctgggactgatctatctggtgctgctactgcttggtccgcctgctaccatttttgacaactacgatcttctgctgggagtccatggtctggcgagcagtaacgaaacttttgacgggctggattgtccagccgcagggagggtggccctaaagtatatgacaccagtcatactgctggtgtttgcccttgccctgtatttgcatgcgcaacaggtggagtccacagcaaggctggattttctgtggaaacttcaagctactggggagaaggaggaaatggaagagctccaggcatacaacaggcgcctgctgcataacatactacctaaggatgtcgctgcgcactttctagcgagagagcggagaaacgacgagctgtactaccagtcatgtgaatgtgtcgctgtcatgtttgcttcgattgctaacttctcagagttctacgtagaactcgaggcaaacaatgagggtgtcgagtgtctgcgactactgaatgagataattgcagatttcgacgagattatttccgaggaacggtttcggcagcttgagaaaattaaaacaatcggctctacatatatggctgcttctgggctgaacgccagcacctacgatcaggtcggacgcagtcacatcacagctttggcagattacgctatgcggttgatggagcagatgaaacatattaatgaacatagcttcaataattttcagatgaagattggactgaatatgggtcctgtggtagctggagttatcggcgctcgaaaaccccagtatgacatttgggggaatactgtaaacgtgtcgtctaggatggactcgactggagttccggaccgaatccaagtaaccacagacctgtatcaagtgctggcagccaaaggctatcagttagagtgtcggggtgttgtgaaggttaaaggcaaaggagagatgaccacttactttttaaacgggggaccctcctcctag

SEQ ID NO: 213691 - DNA, 3243 bp, synthetic construct
  misc_feature 1..3243: note = Description of Artificial Sequence: Synthetic coding sequence
  source 1..3243: mol_type = other DNA
atgcccgctaagggtcggtatttcttgaatgaaggggaggagggtcccgaccaggatgctctctatgaaaaatatcagctcacttcccagcacggccctctgctcctgactctcctcctggtggctgcaaccgcttgtgtggcccttatcatcatagcgttttcccaaggggatccgtcccgccaccaggccatcttgggaatggcttttttggtgctggcagttttcgcagccctttctgttctcatgtatgtggaatgcctgctgcgaagatggctacgggcattggcacttttgacctgggcctgccttgtggctctcggctatgtgctggtgtttgatgcttggacaaaggccgcatgtgcgtgggagcaagtccctttcttcctgtttatcgtgtttgtcgtctatacactactgcccttctccatgaggggagctgtcgctgttggggcagtgagcaccgcatcacacctgctcgttctgggtagtctgatgggaggattcacgaccccctcggtcagagtcggtctgcagctcctggctaacgccgtaatctttctctgcggtaacctgaccggcgcatttcacaaacatcaaatgcaggacgcatcccgcgatctgtttacatacaccgtcaaatgtatccaaattaggcgcaaactccggattgaaaagaggcaacaggagaatcttctcttgtcagtactgcccgctcatatctcgatgggtatgaagctcgcaatcatagagcggctgaaagagcatggggaccgtaggtgtatgcctgacaacaacttccatagcctgtatgttaaaaggcaccagaatgtaagcatcctttatgcggatattgttggctttacccaactggcgagtgattgctcacctaaggaactggtagtcgtcttgaacgaactgtttggcaagttcgaccagatcgcgaaagcaaacgagtgcatgcggattaagattttgggagactgctattactgcgtttccggactgcccgtaagcctccccactcacgctagaaattgtgtgaagatgggactggatatgtgtcaggccataaaacaggtgcgcgaagcgacaggagtggacattaatatgcgggtgggcattcactccgggaatgtgctttgtggggtgattggcttgagaaagtggcagtatgatgtttggtcccatgacgtgtcactcgcaaatcgcatggaagccgcaggcgtgcccggacgagtgcacataactgaagccacactaaagcacttagataaggcctacgaggtggaggacggtcacgggcagcaaagggatccctatctgaaagagatgaatatccggacatacctcgtgattgatcctcgcagtcaacagcctcctcccccttcccagcacctgcctagaccaaagggtgacgcagctctgaaaatgcgtgcaagtgtaaggatgacgcgctatctagagtcatggggggctgcacgaccattcgctcacctgaatcatcgagagagcgtttcctccggcgaaacccacgttcccaacggacggagaccaaagtctgtgccccaacggcaccggaggacccctgacaggtcaatgtcccccaaaggtaggtcagaggacgactcctatgatgacgagatgctgtcagcaatcgaggggctgtccagtacaagaccatgctgctctaagtcagacgatttctacaccttcggttccatatttctcgaaaagggtttcgaaagggaatacaggctggcaccgatccccagggccagacacgacttcgcctgcgcaagcctgatcttcgtgtgcatattattggtgcacgtgctcttgatgcctagaaccgcagccctgggagtatcattcgggcttgtggcctgcgtgctgggattggtgttggggctgtgcttcgccaccaaattttcacgttgctgtcccgcacgtggaaccctgtgcaccatcagcgaacgggttgaaacacagcctctgctgcgccttacgctggcggtgctcactatcggatctctgctgacagttgcgatcattaacttgcccttgatgccctttcaggtacctgaactgcccgtcggtaacgagaccgggttgctcgcggctagcagcaagacacgcgcactgtgtgagccactgccctactacacgtgttcatgcgttctgggcttcatagcttgtagtgtctttctgcggatgagcctcgaaccgaaagtggtgttactaacagtggctctggttgcatacctggttctgttcaacctcagcccttgttggcagtgggattgctgcggtcagggcttgggaaatcttactaaacccaacggcactacgagtggaactccttcttgtagctggaaggatctgaaaacgatgacaaacttttatctcgtgctattttatattaccttgctcaccctgtcacgacagatcgactattactgtcgcttggactgtctctggaagaaaaaatttaagaaagagcacgaagagttcgaaactatggaaaacgtcaacagactgcttcttgaaaatgtcctccccgcacacgtcgccgctcacttcattggcgataagctgaatgaggactggtaccaccagagttacgattgtgtctgcgttatgttcgcctccgtgcctgactttaaagttttctatacagagtgtgatgtaaacaaagaaggcctggaatgtttacgcctgctcaacgagattatagcagattttgacgaacttctgctcaagcccaaattttcaggtgtggagaagatcaaaacaattggctctacatacatggcggcagccggattatccgtggcctccggacacgagaaccaggaactggagaggcagcatgcacacattggagtcatggtggagttttccattgcactgatgagcaagctagatgggatcaaccggcactctttcaactcctttcggctgagagtcggtattaaccacggaccagtaatcgctggcgttatcggagccaggaaacctcagtatgatatctggggcaataccgtgaatgtcgcctccagaatggaaagtacaggggagcttgggaagatccaggtcactgaggaaacttgcaccattctgcaaggtttaggctattcttgtgagtgtaggggattaatcaacgtgaagggcaaaggtgaactcaggacgtattttgtgtgtaccgacactgccaaatttcagggccttgggctgaattag

SEQ ID NO: 213692 - DNA, 3243 bp, synthetic construct
  misc_feature 1..3243: note = Description of Artificial Sequence: Synthetic coding sequence
  source 1..3243: mol_type = other DNA
atgcctgctaagggcaggtatttcctcaatgagggcgaggaaggtccggatcaagacgccttgtatgaaaaataccaactgacatcccagcatgggcctctgttgttaaccttattgttggtagctgccaccgcttgcgtggccttgatcatcatcgcttttagccagggagacccttcaagacatcaagctatccttggtatggcatttctggtgcttgcagtctttgccgcacttagtgtcctcatgtatgtcgaatgtctgctgaggcgctggttgcgcgctttggctttgcttacttgggcctgccttgtcgctttgggctatgtcctagtgtttgatgcctggacaaaagcagcttgtgcgtgggaacaggtgcctttttttttattcattgtttttgtggtttatactttactgccattcagtatgagaggagctgtggctgtcggagcggtgtcgactgcctcccacctattagtgttaggttccctgatgggtggctttaccactccttccgtgagagtcggattacagctgctggcgaacgcagttatctttttgtgcgggaacctgactggtgctttccacaaacatcagatgcaggatgcaagcagagatcttttcacctatacagtaaaatgcattcaaattcgccgtaaactgaggatcgagaagcgccagcaagaaaacctgctgctatccgtgctccctgctcacatttccatgggtatgaaattggccatcatcgaacgtttgaaggagcatggggatcggagatgcatgccagacaacaattttcattccctgtacgtgaaacgacaccagaacgtcagcatcctgtatgccgacattgttggcttcacacagttggccagtgactgttcccccaaagagcttgtagttgtgcttaacgaactgtttggaaaatttgatcagatcgctaaagccaacgagtgcatgcgaataaaaatcctgggggactgctactattgcgtctccggcctgcccgtttcgctacctactcacgctaggaattgtgttaaaatgggactggatatgtgccaagccataaaacaagtgcgtgaggcgacgggggttgatattaacatgagggtgggtatccattctggcaatgtcttatgcggtgtcataggtttaagaaagtggcagtacgacgtctggagccatgacgtctcactggccaaccgaatggaagcagcaggtgtgcccggtcgagtgcacataactgaggcaacactcaagcatttggacaaagcctatgaagtagaggatggccacggacagcagcgagacccttacctgaaggagatgaacatccggacttatctcgtgattgatcctcggagtcagcagccccctccgccttcgcagcacctcccacgcccaaaaggggatgccgcactgaagatgcgagcaagcgtgaggatgacaaggtaccttgaatcgtggggagcagctaggcccttcgcacacctgaatcacagagagtctgtctcttcgggtgaaactcacgtccccaacggacggagaccgaagtcagtgcctcagcggcaccgccgtacgcccgaccggtccatgagtccgaaaggcaggagcgaggatgattcctatgatgacgagatgctgagtgctatcgagggattatcatcaacacgtccatgctgttcgaaatctgatgatttttacacatttggctcaatcttcctggagaaaggttttgaaagggaatatagacttgcacccatccctagggccagacatgatttcgcctgcgcatcacttattttcgtgtgcatccttcttgttcacgtgctgctgatgccgaggacggccgctctcggggtaagttttggactggtcgcctgcgttcttggactcgttttgggcctgtgttttgccacaaaattttcacgctgctgtcctgctcggggaacactgtgtacaatatccgagagggtcgagacacagccccttcttcggctcactctggccgtcctcaccataggttctttactgacggtggctatcatcaacctgcccctgatgccgtttcaagttccagagctgcccgtggggaatgaaacaggacttttggctgcctcttcaaagacgagggctctgtgtgagccgcttccttactacacatgctcctgcgtgttgggcttcatcgcctgctcggtttttctccgcatgagtttagagcccaaggtcgttcttctcaccgttgcattagtcgcatacctggttttgtttaacctgtccccatgctggcaatgggactgctgtggacagggattgggcaatttaaccaaaccgaatgggacaacaagtggaactccgtcttgctcatggaaagacctgaagacgatgaccaacttctatttagttttgttctacataaccctgttaacgttgtctcgccaaatcgactactattgtcgcctagactgcctgtggaagaaaaagttcaagaaggagcacgaagagttcgagacgatggagaacgtgaatagactgctgctggaaaatgtcctccctgcccacgtcgccgctcactttatcggggacaagctaaacgaggattggtatcaccagtcctacgactgtgtgtgcgttatgttcgccagtgtgcctgatttcaaagtcttttacaccgagtgtgacgtgaacaaggagggccttgaatgcctgcggctcctcaacgagatcattgcagattttgacgagcttttacttaagcctaaattctccggcgttgagaaaatcaagaccataggaagcacttacatggctgcagcgggtctcagtgtcgcttctggtcacgaaaaccaggagctagaaaggcagcatgcacacatcggcgtaatggtggagttttccatcgcccttatgtcgaagctcgacggtataaaccgacactcctttaactcctttagattgagagttggaatcaatcacggacctgtgatagccggagtgattggcgctcggaagccacagtacgatatctgggggaacactgtgaacgtagcctctaggatggagtcaactggtgagctggggaagatacaagttactgaggaaacatgcaccatactgcaggggctggggtacagctgcgagtgccgtggactgatcaacgtaaagggcaaaggcgaactgagaacctacttcgtgtgtaccgatacagcgaagttccaggggctcggcttgaattag

SEQ ID NO: 213693 - DNA, 1302 bp, synthetic construct
  misc_feature 1..1302: note = Description of Artificial Sequence: Synthetic coding sequence
  source 1..1302: mol_type = other DNA
atgccagcaaagggtcgttatttcttgaatgagggagaggagggacccgaccaggacgcactgtacgaaaaatatcagctaacaagccagcacggaccattgctgctgaccctgctgctggtcgccgcaactgcatgcgtggcgctgatcattatcgccttttcccagggcgacccttctcggcaccaagcgatccttggtatggcctttttagtcctcgctgtattcgccgcactctccgtcctgatgtatgttgaatgcctgctccgtagatggcttcgcgctctggccctgctcacgtgggcctgtctggtggcgctggggtacgtcctcgtttttgatgcctggacaaaggcagcctgtgcgtgggagcaagtcccgttttttttgttcatcgtgtttgtggtttacacgctgctgcccttctctatgaggggggctgttgctgtcggagcggtaagtaccgcttctcacctcctggtactggggtcactaatgggaggattcactacaccctctgtgcgcgtaggcttacagcttttagcaaacgccgtgatcttcctgtgtgggaatctgaccggagcattccacaagcaccagatgcaggacgcttccagggacttgttcacatacacagttaagtgtattcagataagacggaaactgaggatagaaaagaggcagcaagagaatttactgctgagcgtgctgccagcccatatctccatggggatgaagctggcaatcatcgaacgactcaaagagcatggagaccggcgatgcatgcccgacaataatttccacagtttgtacgtaaagaggcatcaaaacgtcagtatcctgtacgccgacatcgttggattcactcagctggcctctgattgtagccccaaggagctggtggtcgttcttaacgagctctttgggaaatttgaccagatcgccaaagctaatgaatgcatgcgcatcaagattttaggggactgctactactgtgtgtctggccttcccgtcagtcttcctactcatgctagaaactgcgtcaagatgggactggacatgtgtcaggcaatcaaacaagttagagaagccacaggggtcgatatcaatatgcgggtgggcattcacagtggcaatgtgctgtgcggcgtgattggactgagaaagtggcagtacgacgtttggtctcacgatgtgagcctggccaatagaatggaggcggctggggttcccggtagagttcacatcaccgaagccacattgaagcatttggataaggccctgctgctgcaggtcaggtag

SEQ ID NO: 213694 - DNA, 2205 bp, synthetic construct
  misc_feature 1..2205: note = Description of Artificial Sequence: Synthetic coding sequence
  source 1..2205: mol_type = other DNA
atgccggcaaaagggcgttatttcctaaatgagggcgaagagggaccggatcaggacgcgctgtacgaaaaataccagctgacctcccagcacgggcctttattgctaactctgctgttggtggctgcaaccgcatgcgttgccctcataataattgcgttctctcaaggggacccttcccgacaccaggcaatactcggaatggcattcctcgtccttgcagtgtttgccgcactgagtgtcctgatgtatgttgaatgtctcctgcggaggtggctgagggcgctcgctctgctgacatgggcctgtctcgttgcacttggttacgtgctggtgtttgacgcctggacaaaggccgcttgtgcgtgggagcaggtgccttttttcctgttcattgtgtttgttgtctacactctgctcccgttttccatgagaggcgcagtggcggtgggcgctgtgtcgactgcttctcatcttctggtactgggaagcctgatgggtggctttaccacaccgtccgttagggttggattacagctgctggccaacgccgtgatcttcctctgcggcaatttgacaggcgctttccacaaacatcagatgcaagatgcttctcgcgatcttttcacctataccgtaaagtgcatacagatccggaggaagcttcggattgaaaaaagacagcaggagaatctgctgctctcagtgctgcccgctcatatcagcatgggtatgaagctggctattatcgagcgcctgaaagagcacggagataggcgctgcatgccagacaataatttccactctctgtatgtcaagcggcatcaaaatgtgtctatcttgtacgcagacatcgtgggctttacgcagttggcttccgactgctccccaaaggaattagtcgtggtgctgaacgagctgttcggtaaatttgatcagatcgccaaggccaacgaatgcatgcggattaagattctgggcgattgctactactgcgtctcaggtttgcccgtaagcctgcctacacacgccaggaactgcgtgaagatgggcctagacatgtgccaggctattaaacaggtgagagaggccaccggcgtcgatatcaacatgcgcgtaggcattcacagcgggaacgtcctctgcggagtcattggactcagaaaatggcaatatgatgtttggagccatgatgtctctttagcgaatcgcatggaggcagcgggtgtgcctggaagggtgcacattaccgaggcaacactgaaacatctggacaaggcatacgaagtggaggatggccacgggcagcagcgggacccatatttgaaagagatgaatattcgtacttacctagtgattgaccctcgctctcaacaacctccacccccttcccagcacctgccgagacccaagggcgacgctgcactgaagatgagagcaagcgtacggatgactcgatatttggaatcctggggcgcagcccgaccattcgctcacctgaaccacagagaatctgtaagctctggcgagacccacgttcctaacggaagacgtcctaagagtgtcccacagcggcatcgcagaacacccgaccggtccatgtcacccaaaggacgatccgaagatgactcttacgatgacgagatgctgagtgctatagagggattaagctccactcgaccatgctgctcgaagtctgatgacttttacactttcggttccatatttctcgaaaaggggttcgaaagggaatacagactcgcacctattccacgggctcgccacgacttcgcctgcgcgtccttgatctttgtttgcattctacttgtccacgtgctcctgatgcctaggactgccgctctgggagtgtcatttggcctggttgcctgcgtccttggtctggttctggggctgtgcttcgctacaaaattctccagatgctgcccagcccgagggaccctgtgcactatatccgagagagtcgaaactcagcccctgctccggttaacgctcgctgtgcttaccatcggaagcctgctgacagttgccattattaacctgccactgatgccctttcaggtgcccgagcttccggttggcaatgagactggacttctcgccgctagcagcaaaacaagggcactctgtgaaccactgccacatctgcacactgttttttctcgcctcaatgagctgacgtcctag

SEQ ID NO: 213695 - DNA, 3756 bp, synthetic construct
  misc_feature 1..3756: note = Description of Artificial Sequence: Synthetic coding sequence
  source 1..3756: mol_type = other DNA
atggagctttcagacgtcaggtgtctgaccggctccgaggagttgtacactatccatcccacacctccggctggggacggccgtagcgcatcccgtccccaacggttgttgtggcagacagcggtcaggcacatcaccgagcagagattcatacacgggcatagagggggtagcgggtctgggagtggcggatccgggaaagcaagcgatcctgcaggcggaggtccgaaccaccacgccccacagctgagtggggactcagccttacctctctattcgttagggccaggagaacgagcgcactcaacttgcggaactaaggtgtttccagaacggtcaggctccgggagtgcctctggaagtgggggtgggggagatctggggttcctgcacctcgattgcgctccttccaactccgattttttcctcaatgggggttattcttaccgtggggtcatttttcctactctgcgtaacagctttaaaagtcgcgatttggaaaggctgtatcaacggtattttctagggcagcgcagaaagagcgaggtagtgatgaacgtgcttgacgtgctgaccaaattgactctgctggttcttcacctctctctcgcatctgcacccatggatcctctgaagggcatactgttgggcttcttcaccggtatcgaagtagtgatctgcgccctggtggttgtgcggaaagacactacttcacatacatacctgcagtattccggcgtggtgacgtgggtcgccatgaccacccagattcttgcagctgggcttggctacggcctattaggagatggcattggctacgtcttattcacccttttcgctacttactcaatgttgccactgcccctgacctgggctatactcgccggactgggaacgtctctgttgcaagttatccttcaggtagttatccctagattggcagttataagcatcaatcaagttgtggcccaggcggtcctgttcatgtgcatgaacacagccggtatttttatttcctacctgagtgatagggcccaaagacaggcctttctggagactagacgctgtgttgaggccagactgagactggagacagaaaatcaacgacaggaacgcctagtgctttcagtgctcccaagattcgtggtactcgagatgataaacgacatgacaaacgtcgaggatgaacatctgcagcaccaatttcatagaatctacatacacaggtacgagaatgtttcaattctctttgctgacgtgaaagggttcactaacctgtccactacattaagcgctcaggaattggtgcgaatgcttaatgaactgttcgccagatttgacaggttagcacacgagcatcactgcctccgaattaagatcctgggcgactgttactactgtgttagtggtctgcccgaaccccgacaagaccacgcgcactgctgtgtggagatgggactgagcatgataaaaacaatccgctacgtgcgttccagaactaagcacgatgtggacatgaggataggcatacactccggatctgttctgtgtggcgtgctgggccttcgaaaatggcaattcgacgtttggtcttgggacgtcgatattgcaaacaagctggaaagcggtggcatacctgggcgtatacacatctcgaaggcaacccttgactgcctgaatggcgattataacgtggaagagggacatggcaaggagcgaaatgaattcctcaggaaacacaatatcgagacgtaccttattaagcagcctgaggattctctcctcagtctgccggaggacattgtcaaggaaagtgtttcgtccagcgacagacggaattcaggagcaacttttacagagggctcatggtcccccgaactgccgttcgacaatatcgtcggcaagcagaacaccctggctgctctgactaggaattctatcaatcttctgcccaatcacttagcacaggccttgcatgtgcagagcgggcctgaagaaattaacaagcggatcgaacacaccatcgatctgcgatcaggcgataagctacggcgtgagcatatcaagcctttcagcctgatgtttaaggatagctcactggagcataagtactcacagatgcgcgatgaggtgtttaaatccaatctggtctgtgccttcatcgttctccttttcatcaccgctatccagtcactactgcccagcagccgggtgatgcctatgacaatccagttctccattctcataatgctgcactccgctttggtactgatcacaaccgcagaagattataagtgtctccctttaatcctgagaaaaacatgctgctggattaacgaaacctacctggctcgtaacgtgattatttttgcttccatcctgataaattttttaggggcaatcctaaacatcctctggtgtgatttcgataagtccatcccactgaagaacctgacctttaacagcagcgccgtgtttaccgacatctgcagctatccagagtatttcgttttcacgggtgttttggcaatggttacctgtgcggtcttcttaaggctaaacagcgtcctaaagcttgcagtactccttatcatgatcgccatctatgctctcctgacagaaacagtctacgcgggactgtttttgagatacgacaatctgaaccactctggcgaagacttcctggggacaaaagaggtgtctttgctactcatggcaatgtttctcttagcagtattctatcacggacagcaactcgaatacactgcaaggctggacttcctgtggagagtacaggccaaagaagagatcaacgaaatgaaggaattgcgggagcacaatgaaaatatgctcaggaatatcctaccctctcacgtggctcgtcactttttggagaaggatcgagataacgaggaactgtacagccaatcttatgacgctgtgggggtcatgttcgctagcatcccaggttttgccgatttctactcccagaccgaaatgaataaccagggtgtggaatgtcttcgactcctgaacgaaattattgccgacttcgatgagctcctgggcgaagacagatttcaggatattgaaaaaatcaagacaattgggtccacctacatggccgtgtctgggctgagccctgaaaagcagcagtgtgaggacaaatggggccacctgtgcgccttagccgacttttctcttgcactgaccgagagcatccaggaaattaataaacacagcttcaataattttgaactgagaattgggataagccacggttctgtcgtggctggcgtgattggtgcgaagaagccacagtacgacatctggggaaagaccgtaaacctggcgtctaggatggatagcactggcgtgagtggtcggatccaggtaccagaggagacatatctaattcttaaggatcagggctttgctttcgattacagaggcgaaatctacgtaaaaggcatttccgagcaggaaggcaaaattaaaacttattttctactggggagagtccagcccaacccctttatcctgcccccaagacggttgcctgggcaatattctctcgccgctgtagtcctggggcttgttcagtccctaaaccgccagcgccagaagcagctgttgaacgagaataataacacagggattatcaaagggcactacaataggagaactctgctgtctccttctggtaccgagccaggtgcgcaagcagagggtacagataagagcgacctcccatag

SEQ ID NO: 213696 - DNA, 4062 bp, synthetic construct
  misc_feature 1..4062: note = Description of Artificial Sequence: Synthetic coding sequence
  source 1..4062: mol_type = other DNA
atggccagtccgccacaccagcaactgttgcatcatcactcgacagaagtcagctgcgattcgagtggggatagcaactctgttagagttaagatcaatccaaagcagctctcctctaattcacacccgaaacactgcaagtactctatttccagtagctgctcctccagcggcgatagtgggggagtgccccgaagggtgggcggaggcggaagactgcggcgacagaagaagcttccacagctgtttgagagagcctctagtagatggtgggatcctaaattcgatagcgtgaatctggaagaggcgtgcctggagcgatgttttccacagacacagcggcgattccggtatgcgctgttttacattggattcgcctgtctactgtggtcaatttacttcgcggtccacatgcgatcacgtttgatcgtgatggtggctccggctctttgtttcctcctcgtatgcgtcggcttctttctgttcaccttcacgaagctgtacgcaaggcactacgcctggacatctctggcactcactctgctggtgttcgcgcttaccctggcggctcaattccaggtgctaactcccgttagcggcaggggggacagtagtaatttgacggccaccgccaggcctactgatacatgtctgtcacaggtgggatcattcagtatgtgtatagaggtattgtttctactctatacagttatgcacctgcctctgtaccttagtctgtgcctaggggtggcctactccgtcttgttcgaaacgttcggctatcactttcgcgatgaggcgtgcttcccttctcctggcgctggtgcgttacattgggagctcctgagtaggggactgctgcacggatgcattcacgccataggcgtccatctgtttgtcatgtcccaggtacgatcaagaagtacgtttctgaaggtcggccagtctattatgcatgggaaagatttggaggtcgaaaaggctctgaaggaaagaatgatccattcagtgatgccacgcattatcgccgacgacttgatgaagcagggtgacgaggaatcggagaattcagttaaaaggcatgctacctcttcacccaaaaatcgcaaaaagaaatcaagcatccaaaaggcccctattgcatttcgcccttttaaaatgcagcagatagaggaagtcagtatcctgttcgccgacatcgtcgggttcacgaagatgagtgcgaacaaaagcgctcacgcactggtgggcctgctgaatgacctgttcggcagattcgatcggttgtgcgaggagaccaagtgcgagaagatctctaccctaggcgactgctactactgcgtggccggttgccctgaacctcgcgctgaccatgcttactgttgcattgaaatgggcctcggtatgatcaaggcaattgagcagttctgtcaggaaaaaaaagagatggtcaacatgcgcgtgggcgtccacacgggaacagtcttgtgcggtatacttggcatgaggaggtttaagtttgacgtgtggtctaatgacgtgaacctggccaatctgatggagcagctaggggttgccggaaaggtgcacatctccgaagccactgccaaatacctggatgatagatatgaaatggaggacggcaaggtcatcgagcggttgggacagagcgtcgtagcagatcaactcaagggccttaaaacttacttgatctctggacagcgggctaaggagtcgcgctgctcatgcgcagaagctctgctgtccgggttcgaggtaatcgacggctcacaggtatcaagtggacccagagggcagggtacagctagcagcggaaacgtgagcgatcttgcgcagacagtgaagacttttgacaaccttaagacttgtccctcatgcggcattacattcgctccgaagagtgaggccggagccgagggtggcgcacctcagaacggctgtcaagacgagcacaagaacagcactaaggcatccggcggacccaaccctaaaactcaaaatggcctgctttcacctcctcaggaagagaagctgactaactcccagacaagtctctgcgagatcctgcaggaaaagggcagatgggccggtgtgtctctggaccagtccgccctcctgcccttgagattcaagaatataagagaaaaaacagacgcccactttgtcgatgtaatcaaggaggattcactcatgaaagactatttcttcaaaccaccaattaaccagttctccttaaattttctcgaccaagagctggagcggagctaccgaacgtcataccaggaagaagtaattaagaatagcccagtgaaaacatttgcttctcctacgttcagttctctgttggacgtgttcctaagtaccacagttttcctgaccctgagtacaacttgctttttgaaatatgaggctgcaacagtgcctccaccgccagccgcacttgctgttttcagtgccgctctgctcctggaagttctgtcactcgcagtgagcatcaggatggtcttcttcctagaggatgtgatggcttgcaccaaacgcctgcttgagtggattgcaggatggctgcctagacactgcatcggcgctattctcgtctctctgcctgccctggctgtgtattctcacgtcacctctgagtatgaaacaaatatccatttccccgttttcaccggctcggcagccttgattgccgtggttcactactgtaatttctgccagctctcttcgtggatgagaagctctctcgcaacagtcgtgggggcaggtcctctgctccttctgtacgtctcactctgcccagactctagtgtcctgacatctcctctggatgccgtccagaacttttcctcagaacggaatccctgcaatagctcagtacccagggatctgaggcggccagcctcattgatcggccaggaagtggtcctagttttcttcttactgttgctcttggtgtggttcctgaatagagagttcgaagtgagctacagacttcattaccatggggatgtcgaagcagatctgcatcggacaaaaatacaaagcatgcgtgaccaagcagattggcttctgaggaatatcatcccttatcacgtagctgaacagctcaaagtcagccagacttattcaaaaaatcacgatagcggcggagtgattttcgctagtatcgtcaatttctctgagttttatgaagagaattacgaaggcggtaaggaatgttaccgagtactgaacgagctgatcggagacttcgacgagctactctctaagcccgattatagttcaatagaaaaaataaaaacgatcggagccacttacatggctgcaagtggactcaacactgcccaggcccaggacggctcacatccccaagaacatcttcagatattgttcgagtttgcaaaggagatgatgcgcgtggtggatgacttcaacaacaacatgctctggttcaacttcaagctccgtgtgggcttcaatcatggccctctgactgctggagtgattggcacaacaaagttgctgtacgatatttggggcgatacagtgaatattgcttctaggatggatacgaccggggttgaatgcaggatccaggtgagtgaggaatcctatagagttctgagtaaaatggggtacgatttcgactatcggggtactgtgaacgttaagggaaaaggtcagatgaaaacttatctgtatcccaaatgcaccgaccatcgagtcattcctcagcatcagctctctatcagccctgacatccgcgtgcaggtggacggcagcatcggtcggtctccaactgacgagatagccaacttggtaccgtcggttcagtatgttgacaaaacctctcttgggagtgatagttccacccaggctaaagatgctcacctctctcctaagcggccttggaaggagcccgtgaaggcggaggaaagggggaggttcgggaaggcgattgagaaggatgactgcgacgagacgggaatcgaggaggcaaatgagctgaccaagttgaacgtctccaagtctgtctag

SEQ ID NO: 213697 - DNA, 531 bp, synthetic construct
  misc_feature 1..531: note = Description of Artificial Sequence: Synthetic coding sequence
  source 1..531: mol_type = other DNA
atgacaatgtgctcaggtgcacggctggccctgctggtatatggcatcatcatgcatagcagtgtatactcaagtcccgcagccgctggactacggttccctggcattcgcccagaagaagaagcctacggagaggacggtaatccccttcctgactttgacggctctgaaccgcctggcgctggatcgcctgcgtccgcacccagggcagcagctgcctggtaccggcctgcgggtagacgcgacgtagcccatgggatattgaatgaggcatatcgcaaggtgctcgatcagctctccgcgggtaaacacctgcaatcactcgtggcgaggggagtgggcggatcactggggggaggcgcaggagacgacgccgagccgctgagcaagaggcactctgatggcatctttaccgatagttatagtcggtacaggaaacagatggcagttaaaaagtacctggcggcagtattagggaaaagatataagcaacgggtgaagaataagggcaggagaattgcctacttgtag

SEQ ID NO: 213698 - DNA, 531 bp, synthetic construct
  misc_feature 1..531: note = Description of Artificial Sequence: Synthetic coding sequence
  source 1..531: mol_type = other DNA
atgaccatgtgttcgggcgcacgcctggctctactagtgtatgggatcattatgcactcctcagtgtattctagccctgcagcagccggtctgcggtttcccggaatccggcctgaagaggaagcctatggagaagacggcaacccactgcccgactttgatggctcggaaccgcctggagccggatcacccgcttccgcccctcgagccgctgcagcgtggtacagacctgctggacgtagagacgttgcgcatggaattctgaacgaggcctaccgtaaagtgctggatcagctgagcgccggtaaacatctccagtctctggtggctcggggagtcggtggcagcctaggcggaggggctggcgacgacgccgagcccctcagcaagcgccattcagacgggatttttaccgactcgtactctcgatatcgcaaacaaatggctgtgaagaaatacctcgccgcagttcttgggaagagatacaaacaacgggtgaaaaacaaaggtaggagaatcgcctacctgtag

SEQ ID NO: 213699 - DNA, 948 bp, synthetic construct
  misc_feature 1..948: note = Description of Artificial Sequence: Synthetic coding sequence
  source 1..948: mol_type = other DNA
atgcttacgaagcgtgctctgcagaaaccttgttcggatcggttcctccgtacagcgcaaattaaccggtcccgacgaccagtgacatccgtgacttccggctcctcatctagatctagggcaagcccacatcgcccattgttcctgtcttcagcatctttatccgcgcctcccagtctcagggtgactttgcccccaggcagcgccagactccagacgtttgagcagaacacatctctaggcaagagggtcccccagcttcttcttctactacctctcgtgcccgctgcttccgcacagacaccaaccccagacggtgatgcaagtcgagtggtgacacccgctcaggagctggaggaagccctgtgtcctccctcatacctggccgctctcctcgctgcgggtggtgtcgagggcatgaccatgtgttccggcgctcgcctggcacttctggtctatggcatcattatgcatagcagtgtctatagtagtccggcagccgcaggtctgcggttccccggtattagacccgaagaggaagcctacggcgaggatgggaacccgcttcctgactttgatggttcagaaccacccggagccggatctccagcttctgctccgagggctgctgctgcatggtataggcccgcaggacgcagagacgtggctcacggcattttgaacgaggcataccgcaaagtactcgaccagctcagcgcgggtaagcacctgcagagcctggtcgcacggggagtggggggaagcctgggaggtggggcaggtgacgacgcagaacccctgagtaagcgacatagtgatggcatttttaccgattcttactccagatacaggaaacaaatggccgtgaaaaagtatctggctgccgtcctggggaagcgctacaaacagcgtgtcaagaacaagggacgacgaatcgcctacctctag

SEQ ID NO: 213700 - DNA, 531 bp, synthetic construct
  misc_feature 1..531: note = Description of Artificial Sequence: Synthetic coding sequence
  source 1..531: mol_type = other DNA
atgaccatgtgctctggggctagactcgccctgctcgtttacggcatcataatgcactccagtgtgtacagcagcccagccgcagccggacttaggtttccagggataaggcccgaggaggaggcatacggggaagatggaaacccactacctgactttgacggctcagagccacccggtgctggatctcccgcttctgctccccgagccgctgcagcgtggtatcgccctgccggtcggagagacgtggctcacgggatcctcaacgaagcttacaggaaggtcctagatcagctgtcagctggcaagcatctccaaagtcttgtcgcccgtggggttggtggctccctcgggggtggtgccggagatgacgcagaaccactgtctaaacgtcactccgacggaatatttaccgattcttactcaagataccgaaaacagatggccgttaaaaaatatctggccgcagtactaggcaagagatacaagcagcgcgtcaagaacaaaggtagacggattgcttacctgtag

SEQ ID NO: 213701 - DNA, 1407 bp, synthetic construct
  misc_feature 1..1407: note = Description of Artificial Sequence: Synthetic coding sequence
  source 1..1407: mol_type = other DNA
atggccggagtggttcacgtttcccttgctgctctgctcctgctccccatggcccctgcaatgcatagcgactgtatctttaaaaaggagcaggctatgtgcttggagaagatccagcgagcaaatgagctgatgggctttaacgacagctcacctggctgcccaggcatgtgggacaatattacatgttggaagccagctcacgtcggcgagatggtcctggtgtcatgccctgagttgtttcgcatctttaaccctgaccaggtttgggaaacagagaccattggggaaagtgacttcggcgactctaacagcctggacctgagtgatatgggtgtcgtttcgcgtaactgtacagaggacgggtggagtgaaccttttccccattacttcgatgcctgcggatttgacgagtatgaaagcgaaacgggagatcaggattactactatctgagtgttaaagccctgtacacagtggggtactccacctctctggtaacgctgactaccgccatggtgatcctctgtaggtttcggaagcttcattgcactcgcaattttatccacatgaacttgttcgtatctttcatgctcagagccatttctgtgtttataaaagactggattttgtatgctgaacaggactcaaaccattgttttatcagtacagtggaatgcaaggctgtgatggtcttctttcattattgtgtggtcagcaattatttttggctcttcatcgaaggcctgtacctgttcaccctcctcgtggagacgttttttcccgagcgtagatatttctactggtatacaatcattggatggggaaccccaacagtgtgcgtgacagtgtgggctaccctcaggctctactttgacgacactggatgttgggacatgaacgattccactgctctctggtgggttataaaagggcctgtggtgggatctatcatggtaaacttcgtgctgtttatcgggattatagttatcctcgtgcagaagctacagtcacccgacatgggcggaaacgagtcttcaatttacctccgcttagccagatctaccctgcttctgatccccctgtttggcattcactacacggtgttcgccttcagccccgagaatgtgtctaaaagggagcgactggtgtttgaactgggactcggctctttccagggattcgtggtggctgtcctatattgctttcttaacggcgaggtgcaagcagagatcaagcgcaagtggaggagctggaaagtgaataggtacttcgctgttgattttaagcacaggcatccatctttggcctcatcaggggtgaacggtggaacccagctgagcattctgtcgaaatcctctagtcagattagaatgtcgggcctcccagctgacaacctggccacatag

SEQ ID NO: 213702 - DNA, 594 bp, synthetic construct
  misc_feature 1..594: note = Description of Artificial Sequence: Synthetic coding sequence
  source 1..594: mol_type = other DNA
atggttttctttcattactgcgtggtctctaactatttctggttgtttatcgagggcttgtacctgttcactttgctcgtcgagaccttttttcccgagcgcagatacttctactggtacaccatcattgggtggggaacgccgacagtttgtgtcacggtctgggccaccctgaggctgtattttgacgacacaggttgttgggatatgaatgactctacagccctgtggtgggttattaagggcccagttgttggcagcattatggtcaatttcgtcctatttattggaatcattgtgatcctcgtgcagaagctgcagagccccgacatgggtggaaacgagtcgtcaatctacttgactaatctgtcccctcgggttccgaagaaagccagggaagatcccctgcccgtcccttcagaccagcattcgctgccgttcctgagttgcgtgcagaagtgttattgtaaaccccagcgggcacagcagcattcttgcaagatgtccgaactgtctaccatcacgctccgtctcgcaagaagcactctgttactcattcccttgtttggcatacactataccgtcttcgcttag

SEQ ID NO: 213703 - DNA, 1491 bp, synthetic construct
  misc_feature 1..1491: note = Description of Artificial Sequence: Synthetic coding sequence
  source 1..1491: mol_type = other DNA
atggccggtgtggtccacgttagtttggctgctctcctgctgctgcctatggctcccgctatgcattccgattgcattttcaaaaaggaacaggcaatgtgtctcgagaaaatccagagagctaacgaattaatgggatttaacgacagttccccgggatgtccagggatgtgggacaatattacctgctggaagcccgcacacgtgggagaaatggtgctcgtaagctgtccagagctttttaggatttttaatcccgaccaagtttgggagacagagaccattggagagagcgattttggggactctaacagcctggatctatccgacatgggggtggtgtcccgcaattgcacggaggatggttggtctgagcccttcccccattattttgacgcctgtgggtttgatgagtacgagtcagaaacaggagatcaggattattattatctgtcagtcaaagctctgtatacagtcggttattcaacatctctagtaacattgacgactgcaatggtgatcttgtgccggtttcgtaaactccactgcacccgaaatttcattcacatgaatctgtttgtttcttttatgctgcgagcgatatcggtgtttattaaagattggatcctgtatgccgagcaggattctaatcactgcttcatatcgacggtggaatgcaaggcagttatggtgttcttccactactgcgtcgtgtcaaattacttttggctatttattgagggactctacctgttcactttattggtcgaaacatttttcccggagaggcggtacttctactggtacaccattatcgggtggggtacacctacagtatgcgtcaccgtctgggccaccctccgtctctattttgatgatactggatgctgggacatgaacgattctactgcattgtggtgggttataaagggccctgttgtgggttcaattatggtgaatttcgtgcttttcatcggcattatcgtgatcctcgtgcagaagctccagtcccctgatatgggaggtaacgagtcaagtatctacttctcttgcgttcagaagtgctactgcaagcctcagcgcgctcagcagcactcctgcaaaatgtcagaactttccaccatcacactgagactcgcacgcagcactttactcctcatacccctgtttgggatccactataccgtgtttgctttctcgccagagaacgtgtctaaaagggagcgcctggtgtttgagctggggctcgggtcttttcagggattcgtcgttgccgtgctgtactgcttcttgaatggagaagttcaggccgaaatcaaaagaaagtggcgctcatggaaagtgaataggtatttcgccgttgacttcaagcacaggcacccatctctggcctcctctggggtgaatggtggcacgcagttaagcatacttagcaagtcatccagtcaaatcaggatgtctggcttgccggcagacaatttagctacatag

SEQ ID NO: 213704 - DNA, 1575 bp, synthetic construct
  misc_feature 1..1575: note = Description of Artificial Sequence: Synthetic coding sequence
  source 1..1575: mol_type = other DNA
atggcaggggttgttcacgtctcactggctgccctcctacttcttcccatggctccggctatgcattcggactgcatctttaaaaaagagcaggcgatgtgtttagaaaagattcagagagccaacgagctgatggggttcaacgactcttctccgggttgtcccggtatgtgggataacattacctgttggaagcccgctcacgtaggggaaatggtcctggtgtcctgcccggaactgtttagaatcttcaaccccgatcaggtttgggagacagagacaattggggaatcagacttcggggatagcaactccctggatctcagcgacatgggtgtggtcagcagaaattgcacagaggacggctggtctgagccgttcccccactacttcgatgcctgcggctttgatgaatacgaatccgagaccggtgaccaagactactactacttgtccgttaaggcgctctatacagtcggttactcgacttcacttgttacactgaccacagccatggtaatcctgtgtagatttcgcaaactccactgtaccagaaacttcatccacatgaacctcttcgtatccttcatgctgcgcgctattagtgtgtttattaaagattggattctgtacgctgaacaggactctaaccattgctttatcagcacagtggagtgcaaagcggtgatggtgttctttcattattgtgtagtgtctaattatttttggctcttcatcgagggtctgtatctgtttacgttgcttgtggagacattttttccagagcgaagatacttctactggtataccatcattggttgggggactccgacagtgtgtgtaactgtgtgggctaccctgcgcctatacttcgatgacacagggtgctgggatatgaatgatagcaccgctctgtggtgggttatcaaaggtcctgtggttggcagcatcatggttaactttgtcttgttcatcggtatcattgtcattctcgtccagaagctgcagagtcccgatatgggcggtaatgaaagttccatctacttaacgaatttaagccctagagtgccgaagaaggccagagaagatccgctcccagtgccttcagaccagcattcactgccgttcctgagctgtgttcagaagtgctactgcaaaccccagagggcacagcagcacagctgcaaaatgagcgagctgtctaccatcacactgaggctggctagatcaacccttttgctgatccccctgttcgggattcactacactgtcttcgctttctcgcctgaaaacgtgtccaaacgcgaaaggctcgtgtttgaactcggtctaggttctttccaggggtttgtcgtggccgtgctgtattgtttcctgaacggcgaagttcaggcggagattaaacggaagtggcgcagctggaaggtgaataggtattttgcagtggactttaagcatcgccacccgtctctggcctcctcgggcgtgaatggaggtactcagctgagcatcctcagcaaaagctcatcacagatacgcatgtcaggactgccggcagataaccttgctacctag

SEQ ID NO: 213705 - DNA, 225 bp, synthetic construct
  misc_feature 1..225: note = Description of Artificial Sequence: Synthetic coding sequence
  source 1..225: mol_type = other DNA
atggccggagtagtgcacgtctctctggcagccttacttctcctccctatggctcctgcgatgcactcagattgtatcttcaaaaaagagcaggctatgtgtctcgaaaagatccaacgggctaacgaacttatgggattcaatgattcaagccctgggtgccccggtatgtgggataacataacctgttggaaaccagctcatgtcggagaaatggtgctctag

SEQ ID NO: 213706 - DNA, 447 bp, synthetic construct
  misc_feature 1..447: note = Description of Artificial Sequence: Synthetic coding sequence
  source 1..447: mol_type = other DNA
taggcgacactccgactatatttcgacgacactggttgttgggacatgaatgattccacggcgctttggtgggtgatcaaaggcccagtggtgggctctatcatggtcaactttgtgctcttcatcggtatcatcgtcattctggtgcagaagctgcaatccccagacatgggagggaacgagtcctccatctaccttactaacctgtcacctcgcgttcccaagaaagctagagaagatccactaccagtaccctcagatcagcatagcctgcccttcttgaggctcgctaggagcaccctgctgctcatacccttgtttggtatccattatactgtgtttgcattcagtcctgagaatgtctctaagcgggagcgtctggtcttcgagctaggtctcggttcgttccagggcttcgtggtagcagtgctgtactgtttcctgtag

SEQ ID NO: 213707 - DNA, 1344 bp, synthetic construct
  misc_feature 1..1344: note = Description of Artificial Sequence: Synthetic coding sequence
  source 1..1344: mol_type = other DNA
atggcaggagtcgtgcatgtatcacttgccgcactcctacttctgcccatggctcccgctatgcactccgactgcatttttaagaaagagcaggcaatgtgtcttgagaagatacaacgagctaatgagctgatgggattcaatgacagcagtcctggctgcccaggcatgtgggataatatcacatgttggaaacccgctcacgtcggtgagatggttttggtgagttgccccgaactgtttaggatctttaatcccgatcaagacatgggcgtagtgtctaggaactgtactgaggacggctggtctgaacccttcccacactactttgacgcgtgcggatttgatgagtacgagagcgaaaccggggaccaggattattactatcttagcgtgaaagcactgtacactgttggatactccactagcctagtgactcttactactgcaatggtaatcctgtgcagatttcggaaactccactgcaccaggaactttatccatatgaatctgtttgttagctttatgttgagggcaatcagtgtgttcattaaagactggatattgtatgctgagcaagatagcaaccattgcttcatctccacagtcgaatgcaaagcagtaatggtgttcttccattattgtgtagtgtcaaattacttctggctgttcattgagggcttgtacctctttacactattggtcgaaacttttttccctgaacggagatacttctactggtacacaatcatcgggtggggcaccccaactgtgtgtgtgacggtctgggcgaccctgcggctgtacttcgatgatactgggtgctgggatatgaatgactccactgcattatggtgggtgattaaggggcctgtggtgggtagcataatggtcaatttcgtgctgttcatcggtatcatcgtgattttagtgcagaagcttcaatcacctgatatgggcggaaacgagagttccatatacctccgactcgctaggtctacactgctgctaatccccctctttgggatccattacactgttttcgctttcagccctgaaaacgtaagcaaaagggagcggctggtgttcgagctgggcctcggatccttccagggcttcgttgtggctgtcctctattgcttcctaaatggagaggttcaggccgaaatcaagagaaaatggcgatcctggaaagttaaccgctactttgctgtagacttcaaacacagacacccttctttagctagtagcggtgtgaacgggggtacacagttgagcatcctgtctaaaagtagtagccagattcgcatgagcgggctcccagcggacaatctggccacgtag

SEQ ID NO: 213708 - DNA, 705 bp, synthetic construct
  misc_feature 1..705: note = Description of Artificial Sequence: Synthetic coding sequence
  source 1..705: mol_type = other DNA
atggaccccggactgcagcaggctttgaatggcatggctcctcctggggacactgcaatgcacgttccagccggatccgtggcctcacatctgggaaccactagccggtcatacttttatctgacaacagctactctggctctctgcctcgtgtttaccgttgccacaatcatggtcctcgtcgtacagaggaccgatagtatccccaatagccctgacaacgtgccgctaaaaggcggaaattgtagtgaagacttgctctgcatattgaagcgggcaccctttaagaaatcctgggcctatctgcaggtagccaaacacttgaataagacaaaactgagctggaataaagacggcatcctgcacggggtccggtatcaggatggaaatctggtgatacagtttccgggactatatttcatcatttgccagctgcagttcttggttcagtgtcccaataatagcgtggatcttaaactcgagctgctaattaacaagcacatcaagaaacaggccctagtgactgtatgcgagtctgggatgcagacaaaacatgtgtaccaaaatctgtctcagttcctgctcgattatctccaggtgaacactaccatctccgtcaatgttgatacatttcagtacattgacacgagcaccttcccactagaaaatgtgttgagtatttttttatatagtaattccgattag

SEQ ID NO: 213709 - DNA, 585 bp, synthetic construct
  misc_feature 1..585: note = Description of Artificial Sequence: Synthetic coding sequence
  source 1..585: mol_type = other DNA
atggaggaaaagctgaaaaagacaaaaatcatttttgtggtgggcggaccagggtctggcaagggtacccagtgtgaaaaaattgtccagaagtatgggtacacccacttaagcaccggcgatctgctgcggagtgaggtcagttcagggagcgcccgtggcaaaaagctgagtgagataatggagaaaggacaactggtgccgctagaaactgttctcgatatgcttagagatgccatggtggcaaaagttaatacctctaagggcttcctcatcgacgggtatcctcgtgaggtccagcagggggaggaattcgagcgacgaataggccaaccaacgctcctgctctatgttgacgcaggccctgaaactatgactcagcggctccttaaacgaggggagacttctggtagggtcgatgacaatgaggagacgattaaaaagaggctggagacatactacaaggccactgagccagtgatcgctttttatgaaaagagggggatcgttagaaaggtcaatgctgaagggagtgtagattcagtattcagccaggtgtgcactcacctcgacgcactgaagtag

SEQ ID NO: 213710 - DNA, 585 bp, synthetic construct
  misc_feature 1..585: note = Description of Artificial Sequence: Synthetic coding sequence
  source 1..585: mol_type = other DNA
atggaggagaaacttaaaaaaacgaagatcatctttgttgtgggcggacccggtagtggtaagggcacacagtgtgaaaaaattgtccaaaaatacggatacacacatctctccacaggcgacctcctacgatcagaggtgagctcaggctccgccagaggaaagaaactgagcgagatcatggagaagggccagttagtacctctggagaccgtattggacatgttgagggacgctatggttgccaaagtgaacacttcaaaaggcttcttgattgatgggtaccccagggaggtgcagcaaggcgaagaatttgaacggcgtattgggcagcccactcttctgctctacgttgatgcagggccagaaacgatgacgcaaagactcctgaagaggggagaaacgagtgggagagtggatgacaatgaagagaccattaagaagagactggagacctactacaaggctacagagcccgtgattgctttttatgaaaagcgtggcatagttcgcaaggtgaacgccgagggcagcgtcgactcagtcttttcccaggtctgtacacatctagatgcacttaagtag

SEQ ID NO: 213711 - DNA, 720 bp, synthetic construct
  misc_feature 1..720: note = Description of Artificial Sequence: Synthetic coding sequence
  source 1..720: mol_type = other DNA
atggcaccgagcgtgccagctgccgagccagagtatcccaagggcattcgggctgtcctgttgggtcctcccggagcaggtaaggggactcaggcacctcggttggccgaaaatttctgtgtctgccacctggccaccggcgacatgttacgtgctatggtcgcatcaggatcagagctcggaaaaaagctgaaagctaccatggacgccggaaagctggtgtctgacgaaatggtcgtggaacttattgagaagaatctggagacccctctctgcaaaaatggcttcttgcttgacggctttcctcgcaccgtgcgccaggccgagatgctggatgacctgatggagaagaggaaggaaaaactggacagtgtcatcgaattttccatcccagattcgttactcatcaggcgcatcaccggccgattaatccatcccaagagtggtcggtcttaccatgaagaattcaatccacccaaagaacccatgaaggatgacattaccggcgagccactgattcggcgaagcgatgataacgaaaaggcacttaaaattagactccaagcctaccatacccagacaacacctctgattgaatattataggaagagggggattcattcagcaattgacgcctcacagactccggacgtcgtttttgcctcaatcctcgcagcatttagcaaggctacctgtaaggatctggtgatgtttatctag

SEQ ID NO: 213712 - DNA, 699 bp, synthetic construct
  misc_feature 1..699: note = Description of Artificial Sequence: Synthetic coding sequence
  source 1..699: mol_type = other DNA
atggcccctagcgtacccgctgcggagccggagtaccccaagggtatcagggccgttctcctcggtccacccggtgccggtaaggggacacaggctcctcgcctcgcagaaaacttctgtgtatgtcacctggctaccggcgacatgctccgcgctatggtggcctctggcagtgaactggggaagaagttaaaagcaacaatggacgccggaaaattagttagcgacgaaatggtggtcgaacttatcgaaaagaacctggagaccccactgtgcaaaaacggcttcctgctggatggttttcctcgcactgtgcgacaggccgagatgctggacgacctcatggagaagaggaaggagaaactggatagtgtaatagagtttagtatccctgatagcctgttgattcgaaggattactggccgacttattcacccaaagtctggacgatcttaccatgaggaatttaatccccctaaggagcccatgaaggacgacataacaggtgagccactcattagacgcagtgacgacaacgaaaaagcattgaagatcagactgcaagcataccacacccagactaccccattgattgaatactacaggaaacgaggcatccatagcgccatcgacgccagccagaccccagatgtcgtgttcgcaagcatccttgctgcattctccaaggcgaccagctag

SEQ ID NO: 213713 - DNA, 609 bp, synthetic construct
  misc_feature 1..609: note = Description of Artificial Sequence: Synthetic coding sequence
  source 1..609: mol_type = other DNA
atggcaccttctgtgccagccgctgaacctgagtacccaaagggaatacgtgccgttctcctgggacctcccggagccggaaagggcacccaagctcccagattggctgagaatttttgtgtctgccatcttgctacaggggatatgctccgggctatggtcgcttccgggtcagaattaggcaaaaaactgaaggcaactatggacgccggaaagctggtgtctgatgaaatggtcgtggaactgatcgagaagaacctcgagacacccctgtgcaagaacggattcctcttggacgggttcccccgtacagtgaggcaggccgagatgctggatgacctgatggagaaaagaaaggaaaagctggactcggtgattgagttctcaatcccggacagtctcctgattagacggattactggtaggctgattcatccgaaaagcggacgaagttaccacgaagagttcaacccaccgaaggagcccatgaaggatgatatcaccggagagcccctcatcaggcggagcgtgatcggacaggctaaaaggtcgttcctgcgtctcgccaaaatatcatttgatgtgttgataaagaaggctttagcatag

SEQ ID NO: 213714 - DNA, 474 bp, synthetic construct
  misc_feature 1..474: note = Description of Artificial Sequence: Synthetic coding sequence
  source 1..474: mol_type = other DNA
atgactaggctcgccctacatgaacttaagaatctcacacagtattcttggctgcttgatggctttcctcgaacgttgccgcaggctgaggccctagatagggcatatcagatagatactgtgatcaacttgaacgtgccttttgaagtaataaagcagcggctgactgcaagatggatacacccagcatccggtcgagtgtacaatattgaatttaacccccctaagactgtgggaatcgatgacctcacaggcgagcctctgatacagagagaggatgataaaccagaaaccgtaatcaagagactgaaggcgtacgaagaccaaacaaagccggtgctcgaatattaccagaaaaaaggcgttttggagaccttctctgggacggaaaccaataagatttggccgtacgtctacgccttcctgcaaacaaaagtgcctcagcgcagccagaaagctagcgtgacaccatag

SEQ ID NO: 213715 - DNA, 684 bp, synthetic construct
  misc_feature 1..684: note = Description of Artificial Sequence: Synthetic coding sequence
  source 1..684: mol_type = other DNA
atgggggcttccgccaggctcctacgtgccgtgatcatgggcgctccaggcagcggcaaggggacagtcagtagccgtatcactacccacttcgagctaaagcacctgagcagtggcgatctgctcagggataatatgctacggggtacagagatcggagtactggccaaagcctttatagatcaggggaagctgatccctgacgacgtaatgactagactggcgctacacgagctgaaaaatctgacacagtatagctggttgctcgatgggtttccacggacccttccccaggcagaggctctagacagagcctaccagatcgacactgtaattaaccttaacgtgccattcgaagtgatcaaacagcgattaactgccaggtggatacaccccgcatccggtagggtttacaacattgagttcaatccaccgaagacagtggggattgacgatctcacaggcgagccacttattcaaagggaggacgacaaacctgagactgtaattaaacggttaaaagcctatgaggaccaaactaaacccgttctcgagtactaccaaaagaaaggggtcctggagaccttcagcggcactgagacaaataagatttggccgtacgtatacgcctttttacagaccaaggtgccccagagaagccagaaagcctctgttactccttag

SEQ ID NO: 213716 - DNA, 564 bp, synthetic construct
  misc_feature 1..564: note = Description of Artificial Sequence: Synthetic coding sequence
  source 1..564: mol_type = other DNA
atgggggcttcagcaaggctgcttagggctgtgatcatgggggctccaggatctggcaagggcacggttagcagcaggataaccacccacttcgagctgaaacatctgagcagcggagaccttttacgtgataacatgctgcggggtaccggcttccctagaaccctcccgcaggctgaagccctcgacagggcctaccagatcgatacagtaatcaacctaaacgtacctttcgaggtaattaagcagcgcctgacggccaggtggatccatcccgcaagcgggagagtgtacaatatcgagttcaacccccctaaaactgtcggaattgatgacttgacaggggagcccctaattcagcgtgaggatgataaaccagagaccgtgatcaagcggttgaaggcttacgaggaccagaccaagcctgttctggagtactaccagaagaagggcgttctggaaacctttagtggaacagagactaataaaatttggccgtacgtgtatgcttttcttcagaccaaggtcccacagagatcccagaaagcgtcagtgactccttag

SEQ ID NO: 213717 - DNA, 474 bp, synthetic construct
  misc_feature 1..474: note = Description of Artificial Sequence: Synthetic coding sequence
  source 1..474: mol_type = other DNA
atgacccggctggcccttcacgaactgaagaacctgacccagtacagttggctgctggatggattccctcggactttacctcaagccgaggctctggacagggcttaccagatagacaccgttattaacctgaacgtcccattcgaagtcattaaacagcgtctgacggcaaggtggatccacccggcttcaggaagggtctataacattgaattcaaccccccaaaaacagtcggcatcgacgatttgactggagagccattaattcaacgtgaggatgacaagccagagaccgtgattaagcgactgaaagcttacgaagaccaaactaagccggtcctcgagtattatcagaaaaaaggtgtgttagagactttcagtggtacagaaaccaataagatctggccgtatgtctatgcttttctccagacgaaagtgccacagcgatcccaaaaagcaagtgtcaccccatag

SEQ ID NO: 213718 - DNA, 1611 bp, synthetic construct
  misc_feature 1..1611: note = Description of Artificial Sequence: Synthetic coding sequence
  source 1..1611: mol_type = other DNA
atgtgttcgaagcccgaagacccggtcgagtatctcgagtcgtgccttcagaaggtcaaggagctggggggatgtgacaaggtaaagtgggatacattcgtgagccaggaaaaaaaaacactgccaccactgaatggcggacagtcaagaaggagcttcctcagaaatgtaatgcctgaaaattctaactttccctaccgtagatacgatagattaccaccaattcaccaattttctatagagtccgacacagatcttagtgagacagctgaactcattgaagaatacgaggtcttcgacccgactcgaccacgccctaaaattatactggttatcgggggtccaggatcaggtaagggaacccaatcactaaagattgcggagcggtatggttttcagtatatctctgttggcgagttgttaagaaagaagattcactctacttcttcaaacaggaagtggtcactcatcgctaagatcatcacgactggcgagcttgcgccacaagagacaacaatcaccgagatcaagcagaaactgatgcagatcccggatgaagaagggatcgtcattgatggattcccccgtgacgtagcacaggctctcagtttcgaggatcagatttgcacccccgatttggtcgtgttcctggcgtgcgccaaccaaaggctcaaagaacggttgctaaagcgggctgaacagcagggcagaccagacgacaacgttaaggccacccaacggcgtctgatgaattttaagcagaacgcagccccacttgtaaaatatttccaggaaaagggtctcatcatgacctttgatgcagatcgggacgaggacgaggtgttttacgacattagcatggcagtggataacaagctgttccctaacaaggaagccgctgcaggatcgtctgacctggacccatctatgattctcgacacaggtgaaatcatcgacaccgggagcgactacgaagaccagggtgacgaccaactgaacgtgtttggtgaggacaccatgggaggcttcatggaagacctacgcaagtgcaagataatatttatcatcgggggtcccggttcaggtaagggcacccagtgcgagaagttagtcgaaaagtacggctttacacacttgagcaccggtgaactgctccgcgaggagctggcttctgagagtgaacgaagcaaactgatacgggatattatggaacggggagatctggtgcctagtgggatcgttttggagcttctcaaggaggcgatggttgccagtctgggagacacaaggggattcttaatcgacgggtaccctagggaagtgaagcagggggaggaattcgggaggcggataggcgacccacagctggtgatctgcatggactgctctgccgataccatgacgaacaggctcctgcagcgatcaagatcgtcattgccagtggatgatacaacaaagacaattgccaagcgtctcgaggcctactaccgggctagtatccctgtcattgcgtactacgaaactaagacacaactccacaaaatcaacgctgagggcacgcctgaggacgtgttccttcagctttgcacggctatcgactctattttttag

SEQ ID NO: 213719 - DNA, 1689 bp, synthetic construct
  misc_feature 1..1689: note = Description of Artificial Sequence: Synthetic coding sequence
  source 1..1689: mol_type = other DNA
atgaatacaaatgacgcaaaggaatatctcgccagacgtgaaatcccccaactgttcgaaagcctgctgaacggtttgatgtgctctaaaccagaggatccggtcgagtatttggagagctgcctgcagaaagtcaaagaactgggcggatgtgataaagttaaatgggacacatttgtctcacaggaaaaaaagactctgcccccactgaacggaggccagtcgaggagaagctttttgagaaacgtgatgccagagaatagtaacttcccttaccggagatatgatcgtctgccaccaatccaccagttctccattgagtctgacaccgacctgtccgaaaccgcagagctgattgaggagtacgaggtgttcgacccaacaaggcctcggccaaaaatcattctagtcattggcggacccggaagcggcaaagggactcagtcactcaagatcgccgagcggtacgggtttcagtatatttctgtcggcgagctcctgcgcaaaaagatccattctaccagcagtaacagaaagtggtcactaatcgctaagatcattacaaccggagaactcgcaccccaggagacaactatcaccgaaattaaacagaagcttatgcaaatcccagacgaggagggaattgtcatcgatggtttcccccgagacgtggctcaggctcttagcttcgaggaccaaatatgtacgccggacctggtagtcttcttggcctgcgctaaccagcggcttaaggagcgtctactcaagcgggctgagcagcaggggcgaccggacgataacgtgaaggccacacagcggcgtcttatgaacttcaagcagaatgccgctcccctggtaaaatattttcaggaaaaagggcttatcatgactttcgacgctgatcgggacgaagacgaggtgttctacgacatttctatggcagtcgataataaactattcccaaacaaggaggccgcagctgggtcgtcggacctggatcccagtatgattcttgataccggcgaaatcatcgataccggaagtgactacgaagaccagggggacgaccagctgaatgtcttcggcgaggataccatgggagggtttatggaggaccttaggaagtgcaagatcatattcatcatcggtggacccggttccgggaaaggaacacaatgtgaaaaactcgttgagaaatatggattcacacatctatcaaccggcgaactgttgcgcgaagagctggcctcggaatctgagagatcgaaactaatacgggatatcatggaaagaggcgacttggtgccgtcaggtattgtgctagaactgttaaaagaggccatggtcgcctcactcggagatactaggggattcctcatcgacggctacccaagggaagtcaaacaaggcgaggagtttgggcgtcgcattggcgacccacagctcgtgatatgtatggactgcagcgccgataccatgacaaaccgtctcttgcaaaggtcccggtcatcccttcctgtcgacgataccaccaagacgatcgcaaaacgtcttgaggcatattatcgagcctcgatccccgtcatcgcatactacgaaaccaagacccaactgcataagattaatgctgaaggtacccccgaagacgtctttctccagctttgcacagccatagactccatattctag

SEQ ID NO: 213720 - DNA, 531 bp, synthetic construct
  misc_feature 1..531: note = Description of Artificial Sequence: Synthetic coding sequence
  source 1..531: mol_type = other DNA
atgtgctcaaagcctgaagatccagtcgaatatctggagtcgtgcctccaaaaggtgaaagagcttggtggatgcgacaaggtcaaatgggataccttcgtgagtcaggagaagaagactttaccacccctgaatggcggacagagtaggaggagcttcctccgcaatgtcatgcctgagaatagcaacttcccgtaccgtagatatgacagattacccccaatacatcaatttagcatcgagtctgacacagatctgtccgagacagcagagctgattgaagaatacgaagtgttcgaccctactaggcctcggccaaaaatcatcctcgtaattggcggaccaggctccggaaaaggcacacagtcgctgaaaatcgctgaacgttacggattccagtatattagtgtcggcgagctcctgagaaagaaaatacactctaccagcagcaaccgcaagtggtcactgatcgcgaaaatcataaccaccggtgagctggctccccaggagaccaccatcacagaaatctag

SEQ ID NO: 213721 - DNA, 1647 bp, synthetic construct
  misc_feature 1..1647: note = Description of Artificial Sequence: Synthetic coding sequence
  source 1..1647: mol_type = other DNA
atggccaaattcatgacgcctgtgatacaggataacccttccgggtggggaccctgcgcagtgcccgaacagtttagggatatgccttaccagccattctccaaaggcgataggctgggcaaagtggccgactggacaggcgctacctaccaggataagaggtataccaataagtacagctcgcagttcgggggtgggagtcagtatgcttatttccacgaggaagacgagagctcttttcagctggtggataccgccaggacgcaaaaaaccgcctatcagcgcaacagaatgcgctttgcccaacgaaacctccggagagacaaagaccgcagaaatatgctccagttcaacctgcagattcttcccaagtccgcgaaacagaaagaaagggaaagaatccggctacagaagaaattccaaaaacagttcggggtgcgtcagaaatgggaccagaagagtcagaagccacgggatagtagtgtcgaagtgcgatctgactgggaggtaaaggaggagatggattttcctcagttgatgaaaatgcgctatctggaagtgtccgaaccccaggacatcgaatgctgtggcgctctagagtattatgataaggccttcgaccggattacaacccggagcgagaagccccttaggagcattaagcggatctttcacacggtaacaactacagatgatccagtgattaggaaactcgcaaaaacacaggggaacgtttttgccacggacgcaattctagccactcttatgtcctgcacccgatccgtttatagctgggacattgttgtgcagagggtcgggtcaaagctctttttcgacaaacgggataatagcgactttgaccttctcaccgtctcagaaacagcgaatgaacctcctcaggatgagggaaactcctttaactctccacgcaacctggcaatggaagccacttacattaaccacaatttctcccagcagtgtttgcgaatgggcaaagaacgctacaacttcccaaaccccaacccctttgttgaggatgacatggacaaaaatgaaatagcgtccgttgcatataggtaccgcagatggaagctcggcgatgatatagatctgattgtacgctgcgagcacgatggcgtcatgacaggggctaatggtgaggtttcttttattaacattaagacattgaatgaatgggacagccggcactgcaatggggtagattggaggcagaaactagacagccagcgcggagcggtgatcgccaccgaactgaaaaacaactcatataaattggccagatggacatgttgcgctctcctcgctggaagtgagtacttgaagctcgggtatgtttccaggtatcacgtgaaagactcttcacgccacgtgatactcggaacccaacagtttaaacctaatgagttcgcatcacagattaacctgagtgtagagaacgcgtggggcattttgaggtgcgtaatcgatatatgcatgaagctcgaggagggcaaatacctgatacttaaagaccccaataaacaggtcatcagggtgtacagcttacccgacggaacgttcagctccgatgaagacgaggaggaagaagaggaggaagaggaggaggaagaggaggaggagacgtag

SEQ ID NO: 213722 - DNA, 1278 bp, synthetic construct
  misc_feature 1..1278: note = Description of Artificial Sequence: Synthetic coding sequence
  source 1..1278: mol_type = other DNA
atggctgctggaggcgatcatggatcccccgattcctatcgcagccctttagcatctcgttacgcctcgcccgagatgtgttttgttttttcagatcgatacaagtttcgcacttggaggcagctgtggctctggcttgctgaggccgaacagaccctgggattgccgatcactgatgagcagattcaggagatgaaatcaaacctggaaaacatcgactttaagatggcagctgaggaagaaaaacggctccgacacgacgtcatggcacatgtgcatacgttcggccactgctgccccaaagcagcaggcatcatacatttgggagcaaccagctgttacgtgggggacaacactgacttgattattctgcggaatgcactggatttgctcctcccaaagttagcaagagttatttccaggctggctgattttgccaaagaacgggcttccctgcctaccctcggctttacacactttcagccggctcagcttactactgttggcaagcgctgctgtctgtggatccaggatctttgcatggacttgcaaaacctaaagagagttcgggacgatctaaggtttcggggtgtcaaggggacaaccggaacccaggcatccttccttcagctctttgagggcgatgatcacaaggtggagcagctcgataaaatggtgacggagaaagccggattcaaacgggcattcataataaccggacagacatatacaaggaaagtagatattgaagtactgagcgtacttgcaagccttggggctagtgtgcataagatttgcaccgacatccggcttctggccaatctcaaagagatggaggagccattcgagaagcagcaaattggcagcagtgcaatgccctataaacggaaccctatgaggtctgaaagatgttgttcactcgccaggcatcttatgaccctagtaatggaccccttgcagaccgcatctgtgcaatggtttgaacgaacgttggatgactcagccaacaggcggatttgtctggccgaggccttcctgactgcggataccattctcaacacactccagaatattagcgaaggcctggttgtgtatccgaaggttatcgaaagacggatccggcaagagctgccctttatggcaaccgagaacatcattatggccatggtaaaagcgggaggcagcagacaagttcagcgctttttggaggaggaagtgtaccctctgcttaagccgtatgaatcagtgatgaaagtgaaggctgagctgtgtttatag

SEQ ID NO: 213723 - DNA, 1497 bp, synthetic construct
  misc_feature 1..1497: note = Description of Artificial Sequence: Synthetic coding sequence
  source 1..1497: mol_type = other DNA
atggccgctggcggtgatcacgggtcccccgacagctaccgaagtccgttggcctcacggtacgcatcccctgaaatgtgtttcgtgttttccgatcgctataagtttcgtacctggcgacaactctggctgtggctcgctgaggccgaacagaccttgggtctgcccataacagacgaacagatccaggagatgaaaagtaatcttgagaatatcgactttaagatggcagcagaggaggaaaaaagattgagacatgacgtgatggctcacgtgcacacatttggccactgctgcccaaaggccgcaggcattatccacctgggcgctacgagttgttacgtgggggacaatacgtctctgattctttccaggggtgtaatcaaagcgtactgtaacttaagacttcctgggtccgacagcagtcctgtttccgtctctcagttggccagagtgatcagtaggctagctgatttcgccaaggagagagcctcgcttcctactttaggttttacccattttcaacctgctcagctgaccaccgtcggaaaaagatgctgcctctggatccaggatctatgcatggatctgcagaacttaaagcgcgtgagggacgatctcagatttaggggggtcaaaggcaccaccgggactcaggcaagctttctgcagctgtttgaaggagacgatcacaaagtggaacagctggacaagatggtgaccgaaaaagctggcttcaagcgcgcattcatcatcactggccaaacttacacccgaaaggtggatattgaggtcctgtcagtcctggcctctctaggcgcttcagtgcacaaaatttgcacagatataaggctgttagcaaacctgaaggaaatggaagaaccattcgagaaacagcaaattggatcctctgccatgccatataagagaaatcccatgcgctctgaaagatgctgcagccttgccagacatcttatgacacttgtcatggatcctctgcagacagcatccgtccaatggttcgaaaggacacttgacgacagcgctaaccggagaatctgcttagctgaagctttcctgaccgcagacactatccttaatactttacagaacattagcgagggtcttgtggtataccctaaggtaatcgagagaagaatccgacaagaactaccattcatggccacagagaacatcattatggccatggtcaaggctgggggttcaagacaggactgccacgaaaagatacgcgtgctgagtcagcaggccgcttcagttgtaaagcaagaggggggtgataatgatctgatcgagagaatccaggtggacgcttatttctctccgatccattcccaactggatcacctgcttgaccccagctcgtttacagggcgagcgagccagcaggtgcagcgttttctggaagaggaggtgtaccccctgctgaaaccgtatgagagcgtcatgaaagttaaggctgaactgtgtctgtag

SEQ ID NO: 213724 - DNA, 915 bp, synthetic construct
  misc_feature 1..915: note = Description of Artificial Sequence: Synthetic coding sequence
  source 1..915: mol_type = other DNA
atggacctgcagaacctgaaaagagtgcgggatgatcttaggtttcgtggagtcaaaggaaccacaggcacacaggcttcttttcttcagctcttcgagggagacgaccacaaggtcgagcaattggacaagatggttacggaaaaggcaggcttcaagcgggcattcatcattaccggacagacctacacaagaaaggtcgatatagaggtgctatctgtgctcgcctccctgggggcttccgttcataaaatctgcaccgacatcagactcttggctaacctgaaggagatggaggaacccttcgagaaacagcagattggtagctcagcaatgccttataagaggaatccaatgcggagcgagaggtgctgtagtctcgctcgccacctgatgactctagtgatggatcccctgcagaccgcatctgtgcagtggttcgagagaaccctggacgacagcgcaaataggagaatttgcctggccgaagcttttctgaccgctgacacaattctgaacaccctgcaaaacattagcgaaggtttggttgtttacccaaaagtcattgagcgtaggatccggcaggagcttccatttatggcaaccgaaaatatcattatggcaatggtgaaagcaggcggatcccgccaggactgccatgagaagattagggtgctgagtcaacaggcagccagcgtggtgaaacaggaggggggtgataacgacctgatagaaagaatacaagtcgacgcctacttttcaccaattcactcacaattggatcatctgctggacccttcaagttttaccggcagagcgtcacagcaggtccaacgcttcctggaggaggaagtctaccctttgctgaagccttacgagtctgttatgaaggtgaaggcagagctctgtctgtag

SEQ ID NO: 213725 - DNA, 384 bp, synthetic construct
  misc_feature 1..384: note = Description of Artificial Sequence: Synthetic coding sequence
  source 1..384: mol_type = other DNA
atggccgcagggggagaccacggaagcccagatagctacagaagccccctcgctagccgctatgcctcgcctgagatgtgtttcgttttttccgataggtacaagttccggacttggaggcagctgtggctgtggctcgctgaggccgagcagacactagggctccctatcaccgatgaacaaatccaagagatgaaatccaacctggagaatattgacttcaagatggcagccgaggaggaaaaaagactgcgtcatgacgtaatggcccacgtccacacatttgggcactgctgcccaaaggccgctggcattatccatctgggcgctacctcatgttacgtgggcgacaacaccgtcggagcctgcgtggtgtacacatag

SEQ ID NO: 213726 - DNA, 1371 bp, synthetic construct
  misc_feature 1..1371: note = Description of Artificial Sequence: Synthetic coding sequence
  source 1..1371: mol_type = other DNA
atggcgtttgctgaaacataccccgcagcttcctcactgccaaacggtgactgcggacgaccccgagctcgaccaggtggaaatagggtgacagttgtcctaggcgctcagtggggtgacgaggggaagggcaaagtcgtggatctgctcgcacaagatgccgacatcgtctgtcgctgtcaaggaggcaataatgccggacatacagtggttgtggattccgtagagtatgactttcacctgctgccgtccggtattatcaaccctaacgtgaccgctttcatcggaaatggggtcgtcattcatctgccaggactgtttgaagaggctgagaaaaacgtccaaaaaggcaagggactggagggctgggaaaagaggcttattatttctgatcgggctcacattgtgttcgactttcaccaagcagcggatggaatccaggagcagcagcggcaagaacaggccggtaagaatctgggtactacaaaaaagggcatcggtcccgtatactcatctaaagctgccaggtcggggctgcggatgtgcgacctggtgtctgattttgatggatttagtgagcggtttaaggtactcgccaatcagtataagtcaatttaccccacattggaaatcgatatagagggtgagctgcaaaaactgaagggctatatggagaaaatcaagccaatggtgcgggatggcgtctatttcctttacgaggcccttcacggaccccctaagaagattctagtcgagggcgcaaacgctgcactgctcgatatagactttggcacgtaccccttcgtgacctcatcgaattgcaccgtgggcggagtgtgtacaggccttggcatgcctccgcagaatgtgggggaagtgtatggtgtggttaaagcctataccacccgcgtagggattggtgcattccctactgagcaggacaatgagattggcgagctgctccagaccagagggagggagttcggcgtaaccacggggcgaaagcgccgatgcggctggttggacctcgttcttctgaaatatgcacatatgattaacgggtttacggcactcgcactcaccaagcttgatattctcgacatgtttacggaaattaaggttggggtggcctacaagctcgatggggaaattatacctcacatccccgctaaccaggaggtactaaataaagttgaagtccaatataagaccctccccggttggaatacagacatctccaatgctcgggcttttaaggaactaccagtgaatgcccaaaactacgtgcggttcattgaagatgaacttcaaatccctgtgaaatggattggagtaggcaaatcccgcgagagtatgatccagctcttctag

SEQ ID NO: 213727 - DNA, 1308 bp, synthetic construct
  misc_feature 1..1308: note = Description of Artificial Sequence: Synthetic coding sequence
  source 1..1308: mol_type = other DNA
atggctttcgcagaaacttacccagccgctagctctttgccaaatggtgattgcgatgagggcaaagggaaggtggtggacctcctggcacaggacgctgacatcgtatgcaggtgccaggggggaaataacgcagggcacacagtagttgtggactcagtcgaatacgactttcatttactgccctcaggcattatcaaccccaacgttactgccttcattggaaatggggtcgtgatacacctacccggtttgtttgaggaggcggagaaaaatgtgcagaaagggaagggtctcgaggggtgggagaagagactaattattagtgaccgcgcacacatcgtgtttgactttcaccaagcagctgatgggatacaagagcagcaaagacaggagcaagccggaaaaaatttaggaaccaccaagaaagggataggacctgtgtactctagtaaggctgcgagatccggactgaggatgtgcgatttggtttcggattttgacggattcagtgagcgattcaaggtgcttgccaaccagtacaagtctatttacccaacactcgaaatcgacatagagggtgaactgcagaagcttaagggttacatggagaaaattaaacctatggtgcgagacggggtgtattttttgtacgaagcattacacgggccacctaaaaaaatccttgtcgaaggcgctaatgctgccctcctcgacattgattttggcacctacccctttgtgacttcatccaactgtaccgtgggcggagtgtgcaccggcctcggaatgccccctcagaacgtgggcgaagtgtatggggttgtcaaagcttacacaactcgagtgggaatcggtgccttccccacggaacaggacaacgagatcggagagctgttacagacacgaggccgagaatttggggtgacaacgggacggaaacggagatgtggatggctcgacttagtactattaaagtatgcacatatgattaatggattcaccgcgttggctctgaccaaactggatatcctggatatgtttaccgagattaaagttggtgtggcctacaaacttgacggcgaaatcatcccccacattcctgctaaccaggaagtattgaataaggtggaagtgcagtacaaaacacttcctggttggaacaccgatatctctaacgccagagcattcaaggagctgcccgtcaacgcacaaaattacgtgagattcattgaggatgagctgcagatccccgtgaaatggatcggcgtgggcaagagtcgcgagtcaatgatccaactcttttag

SEQ ID NO: 213728 - DNA, 1236 bp, synthetic construct
  misc_feature 1..1236: note = Description of Artificial Sequence: Synthetic coding sequence
  source 1..1236: mol_type = other DNA
atgtggattcaacaactgttagggctgtccagcatgtccattcgatggcctgggagacctctgggaagtcacgcttggattctcattgccatgtttcagctggcagtagatctgcccgcatgcgaggcactggggcctgggccagaattttggctgctgcctcgaagtccgcctaggccaccacggctgtggagtttcagatcagggcagcccgcacgggtgcccgctccggtctggtctcctcgaccaccaagggtagaacggattcatgggcagatgcaaatgccgcgagctagaagggcccaccggcctcgcgatcaagccgcagccctggtgccaaaggctggactggcgaagcccccagcagcagcaaaaagttcgccatccttggcctctagttccagttcttccagttctgctgttgcgggaggcgctccggaacagcaggcccttctgaggcgcggaaagcgacacctgcaaggggatgggttgtcctcatttgattcaaggggaagtagaccaactaccgagactgagtttattgcttggggccctactggggacgaggaggccctggagagcaacacatttccgggagtatacgggcctaccacggtgtccatcctgcagacacgcaaaaccactgttgctgctactaccacaaccaccactaccgccaccccaatgacacttcagactaaaggtttcactgaatcacttgatccaagacgcagaatacctggcggtgtgagcacaaccgagccatccaccagtccgagcaataacggcgaagttacccagccgccacgcatccttggggaggcaagtggactggcggtgcaccaaatcatcactattaccgtgagtctgatcatggttattgcagccctgattaccaccttggttctgaagaactgctgcgcccagtctggaaacacacggagaaactcccatcagaggaagaccaatcaacaagaggaatcttgccagaatttaacagattttccgagcgctcgggtaccgagctcattggacatcttcaccgcttacaacgagacccttcagtgcagccacgagtgtgtgagggcgagcgttcctgtgtacacagacgagactcttcattccacaacgggcgagtacaagagcacctttaatgggaaccgtccatcgtcatctgacagacacctaatcccggtggcgttcgttagcgaaaagtggttcgaaataagttgttag

SEQ ID NO: 213729 - DNA, 1236 bp, synthetic construct
  misc_feature 1..1236: note = Description of Artificial Sequence: Synthetic coding sequence
  source 1..1236: mol_type = other DNA
atgtggatccaacagcttctcggtctttctagcatgagcatccgctggcccggacgtcccctgggcagccatgcttggattctcattgcaatgttccaactggccgtggatctgcctgcctgcgaggcattggggccaggcccagagttctggttgctccctaggtctcctccacggccaccccgactctggtcttttaggtcaggacagcctgctcgcgtccccgctcccgtgtggagtcccaggcctccccgagtcgaaagaatccatggacagatgcagatgccaagagcgagaagggcccatagaccccgagatcaagccgctgccctcgtcccaaaagcaggattagcgaaacctccggctgccgcaaaatcatctccctctctggcaagctcaagtagttctagcagttcagcagttgccggtggggctcctgaacagcaggctctgctccgtagaggtaaaagacatctgcagggcgatggacttagttctttcgatagccgaggcagcaggccaacaacagagacagaatttattgcatggggcccaaccggagacgaagaggctctggagagcaatactttcccaggcgtgtatgggccaactacagttagtatactccagacccggaaaactacagtggccgcaacaacaacgactacaaccacagccacccccatgacactgcagacgaagggatttactgagtcgctcgaccctaggaggcggatacctggaggagtaagcacaaccgagccatccaccagcccatctaacaacggggaggttacacagccacctaggattctgggggaggcgtctggcctcgccgtccaccagattattacaatcacagtttcccttataatggtgatcgcagcactcattactactctcgtactgaagaattgttgtgctcagtctgggaatacccgacggaactcccatcagaggaaaaccaaccagcaggaggagagttgccaaaatctgacggactttcctagtgcacgggtgcctagcagcctggacatttttacagcttacaatgaaaccctccagtgttcccatgagtgtgtgcgagcgagtgtgccagtatacacagatgagacccttcatagtactacaggagagtacaaatctacctttaacggcaataggccttcctccagcgaccgacacctaatcccagtggcctttgtgtcggagaagtggtttgagatcagctgttag

SEQ ID NO: 213730 - DNA, 1155 bp, synthetic construct
  misc_feature 1..1155: note = Description of Artificial Sequence: Synthetic coding sequence
  source 1..1155: mol_type = other DNA
atggtctctggtgactattcgctgggcctcaatgacctgaatgtcagccctcccgagctcacagtgcatgtgggagattcagcgcttatggggtgcgtgttccagtcaaccgaggacaaatgcatcttcaaaatcgactggaccttatctccaggggagcacgcaaaggacgagtatgtcctgtactattacagtaatctgtcagtccccataggacgcttccagaatcgagtgcacctaatgggcgacattctttgcaatgacggctctttgctactgcaggatgtgcaggaggcagatcagggtacgtacatctgcgaaatacggctgaaaggagagtcccaggtctttaaaaaagctgtggtgttgcatgtactgcccgaggagccaaaagaactgatggttcacgtaggaggcctgatccagatgggctgcgtgttccagagcactgaggttaagcacgttacgaaagtggagtggatctttagcggcagaagagcaaaggaggaaatcgttttccgttactaccataaactccgcatgtccgtcgagtacagccagtcatgggggcatttccagaacagggtgaatctcgtgggagatatttttcgcaacgacggatccatcatgcttcagggcgttagagaaagcgatggcggaaattatacctgctccatccacctgggaaacttggtgtttaagaagaccatcgtgctccatgtgtcccccgaggaacccaggactctagttaccccagcggcactgagacccctcgtgctgggaggcaatcaactggtgattatcgtggggattgtatgcgctaccatccttctgctgcctgtgctgattctgattgtcaagaaaacctgcggaaacaaatccagtgtgaatagtaccgttctcgttaaaaatacaaaaaagaccaaccccgagattaaggagaagccttgtcattttgagcggtgcgagggggagaagcacatctatagtcccattattgtgcgggaagtgatcgaggaagaggagccgtcagagaaatctgaggcaacctatatgacaatgcaccctgtctggccctcactccgatctgatcgaaacaatagtctcgagaaaaaaagcggcggagggatgccaaagactcagcaggctttctag

SEQ ID NO: 213731 - DNA, 1185 bp, synthetic construct
  misc_feature 1..1185: note = Description of Artificial Sequence: Synthetic coding sequence
  source 1..1185: mol_type = other DNA
atgttttgccccctgaagctgatactgctgcctgtgctcctggactactcgttagggttaaatgatctcaatgtatccccaccagaattaaccgtccatgtgggcgactcagcactcatgggttgtgtttttcagtcaactgaagataagtgtattttcaagatcgactggaccctctcccccggagagcatgctaaagatgagtatgtgctttactattattcaaatctctccgtccctattggtcgatttcagaatcgggttcatttaatgggtgacatcctgtgcaacgatggtagcctgctcctacaggacgtgcaggaggcggaccaaggcacctatatctgtgagattaggctcaaaggtgagtctcaggtgttcaaaaaagctgtggttctacacgttttgccagaggagcctaaggaactcatggtccacgtaggtgggctgatccagatgggatgcgtgtttcagagcaccgaggtgaaacatgtcaccaaagtcgaatggatcttttctggcagaagggccaaggaagaaatagtgttcaggtactatcacaaattgcggatgagcgtggaatactcccagagttggggtcattttcagaatcgagtcaatctggtgggtgacatttttcggaacgacggcagcattatgctgcagggggtgcgggaatcggatggcggaaactacacttgttctatccacttgggcaatctcgtgttcaagaaaaccatcgtgctgcacgtaagccccgaagaacccaggaccctggtcacccctgctgcattgagaccgctggtgctaggaggcaatcagctggtgattatcgtcggtatcgtgtgcgctactatccttctattgcccgtactaattctgatcgttaagaaaacatgtggtaataaaagctccgttaactctacggtgctggtgaagaacactaaaaaaactaatccagaaatcaaagaaaagccatgtcatttcgagcgatgtgagggagagaagcacatctatagtccaattattgttcgtgaggtcatcgaggaggaggagccaagcgaaaagagcgaggcaacctatatgaccatgcatccagtttggccctcccttcgcagcgatagaaataactccctagagaaaaaaagcggaggtggtatgcctaaaacacagcaggctttttag

SEQ ID NO: 213732 - DNA, 468 bp, synthetic construct
  misc_feature 1..468: note = Description of Artificial Sequence: Synthetic coding sequence
  source 1..468: mol_type = other DNA
atgttctgccctctgaagttaatattacttcctgtgcttctcgactatagtttaggtctgaacgatcttaatgtctcaccccctgagcttaccgtgcatgtgggggactctgcccttatgggttgcgtgttccagagtaccgaggacaaatgcattttcaagatcgattggacactgtcgcccggtgaacacgctaaggatgagtacgtgctctactactattcaaacctttccgtcccgatcggcaggttccagaatcgtgtgcacctcatgggcgacatcctctgcaatgatggctctcttttgttgcaggatgtccaggaggccgatcagggcacctacatctgcgagattagactcaagggcgagtcacaggtcttcaaaaaagccgtggtactgcacgtcctcccggaggagccaaaagaacttatggtgcacgtgggaggcctgattcagatgggctgctag

SEQ ID NO: 213733 - DNA, 663 bp, synthetic construct
  misc_feature 1..663: note = Description of Artificial Sequence: Synthetic coding sequence
  source 1..663: mol_type = other DNA
atggggtgtgtgttccagtctactgaagacaagtgcatctttaagatcgactggacattatcaccaggcgagcacgccaaggatgagtatgtcctgtattattactcgaatctcagtgtgccaatcgggcgattccagaatcgtgtccacctgatgggagatatcctttgcaatgacggaagcctattgctgcaggacgtgcaggaggctgatcagggaacttacatctgcgagataaggttgaagggcgagagccaggttttcaagaaggcagtggtgctccatgtgctgcccgaagagccaaaagagctgatggtgcatgtcggcggactgattcagatggggtgtgtcttccagtcgacagaagtcaagcacgttactaaggttgagtggatatttagcggcaggagagcaaaggaggagattgtgttccgctactaccacaaactccgaatgtccgtggaatactcacaaagctggggccacttccagaatagggttaatctagttggagacatctttagaaacgacggttcaatcatgctgcagggcgtaagagagtcagacggaggcaactacacatgcagcattcacttaggtaatcttgtcttcaagaagactattgtgctgcacgttagcccagaagagcctagaaaatggtag

SEQ ID NO: 213734 - DNA, 1128 bp, synthetic construct
  misc_feature 1..1128: note = Description of Artificial Sequence: Synthetic coding sequence
  source 1..1128: mol_type = other DNA
atgtcctcccataagggatcggtcgtggcacaaggaaatggggctccagcaagcaatagagaagccgatactgtcgagctggcagagctgggcccattattggaggagaagggcaagagggtcatcgcaaacccccctaaggctgaggaggagcagacttgtcctgtgccccaggaagaagaagaggaagtgcgcgtattgaccttgcccctacaagcacaccacgcgatggagaaaatggaggagttcgtctacaaggtttgggaaggacggtggagggtgattccttacgatgtgctgccggattggctaaaggataatgactacctcttacacggccaccgccctcccatgccctcgttcagagcttgctttaaatcaatctttcgtatccataccgagacggggaatatctggacgcaccttctcggctttgtgctcttccttttcttgggcattctgacaatgctgcggccaaacatgtacttcatggccccattacaggaaaaagtggtgttcggcatgtttttcctgggagcagttctgtgcttgtcattttcctggctcttccacactgtctattgtcactctgagaaggtctctagaaccttttccaaactggactatagtggcatcgccttattgatcatgggttcattcgtcccatggctctattatagcttctattgttctcctcaaccaaggcttatttatttaagtatcgtgtgcgttctgggtatcagtgctattattgtcgcacagtgggatcgcttcgccactcccaaacaccgccagacacgcgcaggagtgttcttgggtctaggcttaagcggagtggtgccaaccatgcacttcacaatcgcagaaggcttcgtcaaggctactacagtgggccagatggggtggttttttttgatggcggttatgtacataacaggggcaggcctgtatgcagcccgtatccctgagcgatttttcccgggaaaatttgatatctggttccagagtcatcagatcttccatgtgctggtggtcgcagcagccttcgtacatttttacggtgtgtccaatctgcaggaattccggtacgggctggaggggggttgcaccgacgacaccctcttgtag

SEQ ID NO: 213735 - DNA, 516 bp, synthetic construct
  misc_feature 1..516: note = Description of Artificial Sequence: Synthetic coding sequence
  source 1..516: mol_type = other DNA
atgagttcccacaaaggtagtgtggtcgctcagggcaacggcgcacccgcttctaacagggaagccgataccgttgagctggccgagcttggaccattgcttgaggagaaggggaagagggtaattgccaacccaccgaaggcggaggaggagcagacatgcccggtgccccaggaggaggaagaagaggtccgcgtccttacactgccactgcaagctcatcacgccatggagaagatggaagaatttgtgtacaaagtctgggaggggaggtggcgggtcatcccttacgacgtattgcctgactggctcaaagataatgactatctgctgcacgggcaccgccctcccatgcccagttttcgcgcttgctttaagagtatctttagaatccataccgagaccgggaacatctggactcacctgctcgctactgcccacctcccactgcatagactctgtccgggacacttctgtcatcattgtggggctgtgggtccagtgtgtcatagctag

SEQ ID NO: 213736 - DNA, 801 bp, synthetic construct
  misc_feature 1..801: note = Description of Artificial Sequence: Synthetic coding sequence
  source 1..801: mol_type = other DNA
atgtcttcccacaaagggagcgttgtggcgcaaggaaacggcgctcccgcaagtaacagagaagccgacacagtggaacttgcagaactgggcccattacttgaggaaaaagggaagcgtgtgatcgccaaccccccaaaggctgaggaagagcaaacctgcccagtcccccaggaagaagaggaggaagtgagagtcctaactctgcctctccaagcacaccatgccatggagaagatggaggagtttgtgtacaaggtatgggagggtcgctggagagtgatcccatacgatgtgctcccagactggctcaaagacaatgattacctcctccacggccacaggccgcctatgccctcgttccgcgcttgtttcaagagcattttccgtatccacactgagactggaaatatctggacacacctgctcggctttgttctcttcctgtttttggggatcctgaccatgctgcgccctaacatgtatttcatggcgccactgcaggagaaagttgtgttcggcatgtttttcttaggtgctgtattgtgcctatcattcagctggctgttccacaccgtgtactgtcactctgagaaagtcagtcgcactttcagtaaactagattattccggaatcgcactgctgataatgggatccttcgtcccatggctgtattattctttctactgtagccctcagccgaggctaatctatctcagtatcgtgtgcgtactgggcatatccgcaatcatcgtggctcagtgggacagatttgctactcccaaacatagacagacgtag

SEQ ID NO: 213737 - DNA, 618 bp, synthetic construct
  misc_feature 1..618: note = Description of Artificial Sequence: Synthetic coding sequence
  source 1..618: mol_type = other DNA
atgagctcccacaaaggctctgttgtggcccagggaaatggcgcaccagccagcaaccgggaggccgacaccgtggagttggctgagctgggcccactgctggaagagaaaggaaagcgtgtgatcgctaatccacctaaagcggaagaggagcagacctgtcccgttcctcaagaagaggaggaagaggtgagggtgctcaccttaccgctccaggctcatcacgccatggagaagatggaagaatttgtctacaaggtgtgggagggcagatggcgcgtgattccttatgacgtattgcccgattggctgaaagacaacgactaccttcttcatgggcataggcctcccatgccttccttccgcgcatgctttaaatctatattccgtattcatacagagactggcaacatctggacccatctgctgggttttgtcttattcctattcctagggattcttacaatgctgaggcccaacatgtatttcatggctcccctgcaggaaaaggtggtctttggaatgttttttctcggagctgttttatgcctttccttcagctggcttttccatactgtgtactgtcattcagagaaagtctctcggactttctcctag

SEQ ID NO: 213738 - DNA, 1128 bp, synthetic construct
  misc_feature 1..1128: note = Description of Artificial Sequence: Synthetic coding sequence
  source 1..1128: mol_type = other DNA
atgagctcccacaagggaagcgtggtggcccaaggcaacggggcaccggcttccaatcgagaagctgacactgtcgagctcgcagaattggggcctttgctggaagagaaagggaagcgggtgattgctaacccaccaaaagcagaagaagagcagacttgccccgtgccccaggaagaagaggaagaggtgcgagttcttaccttgcctctacaggctcaccacgccatggaaaaaatggaagagtttgtatataaagtttgggaggggcgatggagagttattccttacgacgtcctgcctgactggctgaaagataacgactacctcctccatggccatcgccctccgatgccttcattccgtgcctgtttcaaatctattttcagaattcacacagaaaccggaaacatctggacccacttgctcggtttcgttctgtttctcttcttgggtatcctgaccatgcttaggccgaacatgtatttcatggccccactccaggagaaagtcgtgttcggtatgttctttcttggggctgtgctgtgtctctctttcagctggctgtttcacacagtgtattgccacagcgagaaggtgtccagaaccttttctaaactcgactactctggtatcgccctactcattatgggtagctttgtgccctggctgtattactcattctactgttcacctcagccgagactgatctaccttagtatcgtatgcgtgctgggtataagtgcaatcatagtggcccagtgggaccgctttgcaacaccaaaacacagacagacgagggccggtgtcttcctggggctcgggctctcaggagtggtgccgactatgcacttcacaatcgcagaggggttcgttaaggcaacaacagtcggtcagatggggtggttttttttaatggctgtcatgtatattaccggcgcaggcctatatgcggcaaggatccctgagagattttttccgggaaaattcgacatttggtttcagagccatcagatctttcacgtgctcgtcgtcgccgctgcctttgtgcatttctatggagtgagcaaccttcaggagtttcggtatgggctggaaggcggatgtacagacgacacactgttgtag

SEQ ID NO: 213739 - DNA, 1161 bp, synthetic construct
  misc_feature 1..1161: note = Description of Artificial Sequence: Synthetic coding sequence
  source 1..1161: mol_type = other DNA
atgaacgaacccacagaaaatagattgggctgtagcaggacaccggaacccgacattcggctcagaaaaggacatcaactggacggtacacgcaggggtgataacgattctcatcagggtgacctagagccaattctcgaagctagcgttctgagcagtcaccacaagaaaagctctgaggaacacgagtactccgacgaggcaccccaggaggatgaaggcttcatggggatgtcccctcttctacaggcccatcacgctatggagaagatggaggaattcgtctgcaaagtgtgggaagggcgttggagggtgatcccccatgacgtactaccagactggttgaaggacaatgactttttgctccacggccatcgccctcccatgccatcttttcgcgcatgcttcaagagtatctttcgaattcacaccgagaccggaaatatttggactcacctcctggggtgcgtgtttttcctatgtttgggaattttctacatgttccgacccaacatttcctttgtggctcctctccaggagaaggtggtgttcggcctgttcttcctcggagctattctgtgcctgtccttctcctggctttttcacactgtctattgccactcagaaggcgtgtcccgactcttttctaagctcgactactctggaattgccctcctgatcatgggctcttttgtgccctggctctactatagtttctactgtaatccccagccatgcttcatctacctcatcgttatctgcgtcctgggaattgccgctattatcgtgtcacagtgggatatgttcgctactcctcagtacaggggcgtccgcgcaggggttttcttgggcctggggttaagcggcattattcccaccttgcattacgtcatatccgaaggctttctgaaggccgcaactattggccagattggctggcttatgctgatggcaagtctgtacattacaggggctgccctgtatgcagccagaattccggagcgattcttcccaggcaagtgtgacatatggttccatagtcaccagctctttcatattttcgtagttgcaggagcctttgtccactttcacggcgtaagtaatttacaggagttcaggtttatgatcggcggaggctgttccgaagaggacgccctgtag

SEQ ID NO: 213740 - DNA, 735 bp, synthetic construct
  misc_feature 1..735: note = Description of Artificial Sequence: Synthetic coding sequence
  source 1..735: mol_type = other DNA
atgcttctcctgggagccgtcctactgctcctggccctaccaggccatgatcaggagacgaccacacaggggcctggagtgctgcttcctctgcccaagggtgcgtgcaccggatggatggccggaatccccggtcaccccggacataatggagcccctgggagggacgggagggacgggaccccaggggaaaagggcgaaaagggggacccaggcctgattggccctaaaggtgatattggagagacgggggtgcccggagcggagggaccaagaggattccctggaatacagggcaggaagggcgagcctggggagggcgcttacgtttaccggtccgccttcagtgtagggctggagacctacgtgacaatccccaacatgccaatccggtttacgaaaattttctacaatcaacagaaccactatgatgggtccactgggaaattccattgcaacattcctggtttatattacttcgcatatcatatcacggtgtacatgaaggacgttaaggtgagcctttttaagaaagacaaagccatgctctttacctacgaccagtatcaggagaataatgtagaccaagcctctggatcagtacttctgcatctcgaagtgggcgaccaagtgtggttgcaagtgtatggagaaggcgagaggaacggtttgtatgcagacaatgataatgactcaacgttcactggcttcctcctttaccatgatacgaactag

SEQ ID NO: 213741 - DNA, 735 bp, synthetic construct
  misc_feature 1..735: note = Description of Artificial Sequence: Synthetic coding sequence
  source 1..735: mol_type = other DNA
atgctgctccttggggctgtcctcctcctccttgcattaccagggcacgaccaggagacaacgacccagggccctggggtgctgctcccactgccgaaaggcgcttgtaccggatggatggccggaatccccggacaccctgggcacaacggggctcccggacgggatggtcgagacggtacaccaggtgagaagggcgaaaagggagatcccggactcatcgggccaaaaggggacatcggcgagaccggagtcccaggggctgaaggcccacgcggtttccccggaatccagggcagaaagggggagcctggggaaggtgcatacgtttatcggtcggctttcagcgtgggtttggagacatatgttacaatccctaacatgcccatacgctttaccaagattttctataatcagcaaaaccactacgacggcagcacgggcaaattccactgcaacattccgggtctctactacttcgcctatcacattacagtctatatgaaggatgtgaaggtgagcttattcaaaaaggataaagctatgctgtttacctatgatcagtaccaggagaacaatgtggatcaggccagcggcagtgttctactgcacttggaggtgggcgaccaggtctggctccaggtatacggagagggagaaaggaacggtttgtacgcagacaatgacaatgattctacattcactggattcctactctaccacgatactaactag

SEQ ID NO: 213742 - DNA, 735 bp, synthetic construct
  misc_feature 1..735: note = Description of Artificial Sequence: Synthetic coding sequence
  source 1..735: mol_type = other DNA
atgctcctcctgggcgcagtattactgttgctggccctgccaggccacgaccaggagacgactacccagggccctggcgtgctgctaccactccccaaaggtgcttgtaccggctggatggcaggcatccctggtcacccaggacataacggggctccaggcagagatggaagagacggtaccccaggcgagaagggggagaaaggggacccaggcttgataggtcctaaaggggatatcggcgagaccggggtccccggagcggagggtcctaggggattcccgggtatacagggaaggaagggcgagcctggagaaggggcatatgtatatcgctctgctttcagcgtgggacttgaaacgtacgttaccatccccaacatgccaatcagattcacaaagattttttacaaccagcaaaaccattacgatggctctactgggaaatttcattgtaatattccgggactctactattttgcgtaccatataacagtgtacatgaaggatgtaaaagtgagcctgttcaagaaggacaaggccatgctgtttacctacgaccagtatcaagagaataacgttgaccaggcatcgggctcagtgctactgcatctcgaggtcggggaccaggtgtggctccaagtgtacggagaaggggaacggaatggtctttacgcggacaacgacaatgacagcacatttactgggtttctgctatatcatgacacaaactag

SEQ ID NO: 213743 - DNA, 1491 bp, synthetic construct
  misc_feature 1..1491: note = Description of Artificial Sequence: Synthetic coding sequence
  source 1..1491: mol_type = other DNA
atggctctctggaggggttctgcgtatgcaggtttcttagccttggccgtcggctgtgtctttttgctcgagcctgaacttcccggatctgcactcagaagcctttggagttcactgtgtctgggcccagcaccggctcccccagggcctgtctctcccgaaggcagactcgctgccgcatgggacgcactgatcgtgcgtcccgttcggcgttggagaagagtggccgtgggcgtgaatgcttgcgtggatgtcgtactctctggggtgaagctgctgcaggctctgggactgtcccctggaaacgggaaagaccactccatcttacactctcggaacgaccttgaggaagccttcatccacttcatgggcaagggcgctgctgccgagcgattcttcagtgataaggagaccttccacgatattgcacaggtggctagcgagttcccgggagctcagcactacgtgggtggtaacgctgcacttattgggcaaaagtttgcggctaattctgatctcaaagttctactgtgtggtccagtcggccctaagcttcacgaattgttggatgataacgtctttgtcccaccggaatcactgcaagaggtggatgagtttcaccttattctggaataccaggccggtgaggaatggggtcagttgaaggcaccgcacgccaatagattcatctttagtcatgatctctccaacggtgccatgaacatgcttgaggtgttcgtcagctccctcgaagagtttcagcctgatttggtcgtgttgtccgggttacatatgatggaaggccagagtaaagagttgcagagaaaaagactgctcgaggtcgtcacctccatcagcgacatcccaacaggcatccctgtgcatctggaactcgctagtatgaccaatcgcgagcttatgagttccattgtacatcaagtgttcccggctgtgacttctctggggctgaacgaacaggaactgctgtttctaacgcagtccgcaagtggtccccacagttccctgtcatcatggaatggcgttccggacgtcggcatggtgagcgatattctgttttggatcctgaaggaacacggacgctccaaaagccgggcatcagatctcacgcgcatacatttccacaccctggtttatcacatccttgccaccgtggatgggcactgggccaaccagctggcagccgtggcagcgggtgcacgcgttgctggtacacaggcctgtgcaactgagaccattgacacatccagagtgagcctgagagcaccacaagaattcatgaccagccactctgaagcaggtagtagaatcgtgctaaatccaaacaaaccagttgtggaatggcatagagagggcatatcctttcacttcacaccagtgttggtttgtaaggacccaattcgaaccgtcgggttaggggatgctatttctgccgaaggcctcttctatagcgaggttcacccccactactag

SEQ ID NO: 213744 - DNA, 1041 bp, synthetic construct
  misc_feature 1..1041: note = Description of Artificial Sequence: Synthetic coding sequence
  source 1..1041: mol_type = other DNA
atgggcaagggagccgctgctgaacgcttcttttctgacaaggaaacctttcacgatatcgctcaggtggcttcagagttccccggtgctcagcactatgttgggggtaacgccgcactgatcggtcaaaagttcgcggcaaactccgatctgaaggtgcttttatgcggccctgtgggacctaagcttcacgaactactggacgataacgtatttgtccctccagaatccttgcaggaggtcgacgagttccatctcatccttgaataccaggccggtgaggagtgggggcagcttaaagccccacatgctaaccgatttatcttctcacacgatctcagcaatggcgctatgaacatgctggaggtcttcgtgtcttccctggaggagttccagcctgacctggtggtgttatcaggcttgcacatgatggagggccagagcaaggaactgcaacgcaaaaggctgctggaagtggttacatcaatctcagacatccccacaggaatccctgtgcacttggagctagccagtatgacaaacagagagctgatgagttccatcgtccatcagcaggtcttccctgcagttacaagcctgggacttaacgagcaggaactcctattccttacacaatcagcaagtggacctcattcatccttgagttcttggaatggtgtaccagatgttggaatggtgagcgacatccttttttggattctgaaggaacatgggagatccaagtctcgggcttccgatctgaccagaattcacttccacactctggtttatcacatactggcaaccgtggacggccactgggccaatcagctcgcagcagtggcctcctcatgcggttgggatacagggctgagacatcggaatcatagacatcagccctccgtatctgaaggtaccccaagggtccacgatttccctttcggaggtaggcttcaagactgcattaaacccaaacaagccagctctaggatggcgcaacgaggaaacattctaccgcttcacacctctattggggtgtag

SEQ ID NO: 213745 - DNA, 1251 bp, synthetic construct
  misc_feature 1..1251: note = Description of Artificial Sequence: Synthetic coding sequence
  source 1..1251: mol_type = other DNA
atggcactctggcgcggatccgcctacgcaggctttctcgccctgggcctgtccccaggcaatgggaaggatcattccatcctgcacagtagaaacgacctcgaagaggcgttcatccattttatggggaagggagcggcagccgaacgattttttagtgacaaagaaacctttcatgacattgctcaggtagccagcgaattcccaggagcccagcactacgtgggagggaatgcagcattaattggacagaaatttgccgcaaactccgatctcaaagtgctcctctgcgggccagtaggtcccaagctccacgagctgttggatgataacgtcttcgtcccccctgaaagcctgcaggaggtcgatgaattccatttaatcctggaatatcaggctggcgaagaatggggccaactgaaggcaccccatgctaaccgctttattttcagtcatgaccttagtaacggagctatgaacatgctggaggtgtttgtctctagtctggaggaattccagcccgatctcgttgtcctctctggcctacatatgatggaaggacaatccaaggagttgcagaggaaacggttgctggaggtggtcaccagtatctcggacatccccacggggatccccgtgcatcttgaacttgcgtctatgacaaaccgggaattgatgtcttccattgttcaccagcaagtttttcctgcggttacctctctggggctgaacgagcaggaactgttattcttgacccagagcgctagcgggcctcacagctccctgagctcatggaacggagtgcctgatgttggcatggtgagtgacatactgttttggattctgaaagagcatggccgtagtaaatctagggcgtccgatctcacgcgtatacacttccacactctcgtttatcacatcctcgcgaccgtcgatggccactgggccaatcagctcgcagctgttgcggcaggagcccgtgtcgcgggtactcaggcctgcgccactgaaactatcgacacttcccgggtgtcattgagggcgcctcaggagtttatgaccagtcacagtgaggccggttcacgaattgtactgaacccgaacaagccagtggttgaatggcatcgcgagggcattagtttccacttcactcctgtactggtgtgtaaagatcccataaggaccgtcggcctgggtgatgcaatttctgcagagggactgttctattccgaggttcatccgcattactag

SEQ ID NO: 213746 - DNA, 669 bp, synthetic construct
  misc_feature 1..669: note = Description of Artificial Sequence: Synthetic coding sequence
  source 1..669: mol_type = other DNA
atggctgctagctgtagggttgtgacctcaatttctgatatccccactggtattccagtacacctcgagttggcaagcatgaccaatagggaactcatgtcatcgattgttcatcaggtctttcctgccgttaccagtcttgggctcaacgagcaggaactcctctttctcacacaaagtgccagtggaccccactccagcctttcctcctggaatggtgtgccagatgtggggatggtgtccgacattcttttctggatcctcaaggagcatggtaggtctaaaagcagagcctcagatctcaccaggatccactttcatacgctagtgtaccacatcctggctactgtggacggacactgggcgaaccagcttgccgctgtggccgcaggcgcaagggtcgccggaacgcaagcttgcgcgacagagaccatcgacacctcccgggtcagtctgagagctccacaagagttcatgacttcacattcggaggcaggtagtcggattgtgctgaaccccaataagcccgtcgtggagtggcaccgtgaaggtatatcttttcacttcaccccagtgctggtctgtaaggacccaataagaacggtcgggctgggggacgccatctccgcagagggcctattttactccgaagttcacccgcattactag

SEQ ID NO: 213747 - DNA, 546 bp, synthetic construct
  misc_feature 1..546: note = Description of Artificial Sequence: Synthetic coding sequence
  source 1..546: mol_type = other DNA
atgggaaatatcttcgccaatctatttaaagggctattcggaaagaaggaaatgcggatattgatggtcgggctggatgccgctgggaaaacgacaatcctgtacaaactcaaattgggcgagatcgtgaccactatcccaacaataggttttaacgtcgagacagtcgaatacaaaaacatatcctttacggtgtgggacgtgggaggacaggataaaatccgccctctctggagacattatttccagaacacccagggtctgatatttgtggttgatagcaacgaccgggaaagggtgaacgaggcacgcgaagaattgatgaggatgttggcagaggatgagctgcgtgacgcggtgctcctggtttttgccaacaagcaggatctcccaaatgcaatgaacgcggcagagataactgataaactcggacttcactcactgcgccatcgcaactggtatatacaagccacatgcgcgacctccggcgacggactgtacgagggccttgactggctgagcaatcagttacggaatcagaaatag

SEQ ID NO: 213748 - DNA, 546 bp, synthetic construct
  misc_feature 1..546: note = Description of Artificial Sequence: Synthetic coding sequence
  source 1..546: mol_type = other DNA
atgggaaatatcttcgctaacctattcaaaggtctcttcggaaagaaggagatgcggattttaatggttggcctcgacgccgctgggaaaacaaccattctgtacaaactaaagttgggtgagattgtaactacaatcccaacaatcggatttaacgtggaaaccgttgagtataagaacatttcctttacagtctgggacgttggaggccaggataagatcaggcccctttggcggcactatttccagaacacgcaaggactgatatttgtagtcgattctaatgatagagaacgagttaacgaagcaagggaggaactcatgcggatgctggccgaggacgaattgcgtgatgctgtcctgctcgtttttgcgaataagcaagacttacccaatgcaatgaatgccgctgagatcaccgataaactgggcctgcactcactgcgccacagaaactggtatatccaggccacctgcgccaccagtggagatggactgtacgagggcctggactggctctccaaccagctgcggaatcaaaagtag

SEQ ID NO: 213749 - DNA, 546 bp, synthetic construct
  misc_feature 1..546: note = Description of Artificial Sequence: Synthetic coding sequence
  source 1..546: mol_type = other DNA
atgggaaacatctttgccaacttgttcaaagggctcttcggtaagaaagagatgcggattctcatggtcggcctggacgctgcaggcaaaactactatactatacaaactcaagctgggcgagatcgttactactattccaaccatcggatttaacgttgagacagtggaatataagaacattagctttacggtctgggacgtcgggggtcaagataagatcagaccactgtggcggcattatttccagaatacccagggactgatttttgtggtcgactccaacgatagggaaagagtgaacgaagcacgcgaggagctaatgaggatgctggccgaagacgagcttcgggatgcagtacttcttgtcttcgccaataagcaagacttacctaacgcgatgaacgccgctgagatcacagataaattgggactgcattccctgaggcatagaaattggtacattcaggccacctgtgcaactagtggcgacggattgtacgaaggactggattggttatctaaccagctgaggaaccagaaatag

SEQ ID NO: 213750 - DNA, 519 bp, synthetic construct
  misc_feature 1..519: note = Description of Artificial Sequence: Synthetic coding sequence
  source 1..519: mol_type = other DNA
atgggtaacatctttgccaacttattcaagggcctctttggcaagaaagagatgcggatcctcatggttgggctggatgctgcaggcaaaaccaccattctgtacaaattaaaattgggcgaaatcgtcacaaccatccctacgatcggcttcaacgttgagacagtggaatataagaacatttcctttaccgtgtgggacgtaggcggtcaagataaaattcggccactgtggagacactattttcagaacacccagggtttaattttcgttgtcgattcaaacgaccgtgaacgagtaaatgaagcacaggatgaactaagggacgcggtgctgctcgtgtttgccaataagcaggatctgccaaatgctatgaatgcagcagaaattacagacaaactggggctgcactctttgcgacacaggaattggtacatccaggctacgtgcgcaactagtggggatggcctgtacgagggcctagactggctttcaaatcagcttcgaaatcagaaatag

SEQ ID NO: 213751 - DNA, 546 bp, synthetic construct
  misc_feature 1..546: note = Description of Artificial Sequence: Synthetic coding sequence
  source 1..546: mol_type = other DNA
atgggtaacattttcggaaacctgttaaagtctttgatcggtaagaaggaaatgcgaatcctgatggttggcttagacgctgcaggcaaaactaccatcctttataagctcaaactgggagagatcgtaacaacaatcccaactatcggcttcaatgtggaaactgtagaatacaaaaatatatcattcaccgtttgggacgttggcggtcaggataaaatccgcccattatggcgccattattttcaaaatacacagggtctgatttttgtcgtggattccaatgatcgtgagcgcgtgaacgaggctcgagaagaactgatgcgaatgctcgcagaggacgagctgcgtgatgcagttctcctcgtcttcgcaaacaaacaagacttgccgaacgccatgaatgcagccgagattactgacaagctcggccttcactcccttcgacaccgtaattggtacatccaagctacatgcgccacttccggcgacggcttatacgaagggctagactggctggccaatcaactgaaaaataaaaagtag

SEQ ID NO: 213752 - DNA, 435 bp, synthetic construct
  misc_feature 1..435: note = Description of Artificial Sequence: Synthetic coding sequence
  source 1..435: mol_type = other DNA
atgggtaatatattcggaaaccttcttaagtctctgatcggtaagaaggagatgagaattcttatggtgggtctcgatgcagctggcaagaccaccatattgtacaaacttaagctcggagagatcgtaaccacgattccaacaatcggcttaatatttgtagtagactcaaacgaccgagagcgagtgaacgaggcacgggaggagttgatgcgtatgcttgcagaggacgaactcagggatgctgtgttgctggtgtttgctaataagcaggatctgccgaacgcgatgaatgccgctgagattactgataagctcgggcttcactctctgagacatcggaactggtatatccaagcgacttgcgccacctcaggcgatggtctgtatgaaggcctggactggctggccaaccagttgaaaaataaaaagtag

SEQ ID NO: 213753 - DNA, 153 bp, synthetic construct
  misc_feature 1..153: note = Description of Artificial Sequence: Synthetic coding sequence
  source 1..153: mol_type = other DNA
atgggtaatatattcggaaatctgttaaaaagtctgattgggaaaaaagaaatgcgtatccttatggtggggctggacgctgccggaaaaaccaccattttgtacaagctgaagctgggagagatcgtgaccacaatcccaacgattggatag

SEQ ID NO: 213754 - DNA, 309 bp, synthetic construct
  misc_feature 1..309: note = Description of Artificial Sequence: Synthetic coding sequence
  source 1..309: mol_type = other DNA
atgggcaacatcttcggaaacctgctcaagagcctgattggtaaaaaagagatgagaattctgatggtgggcttggatgctgcaggcaagaccactatcttgtataaactcaagctcggggaaatcgtgactaccataccaactatcgggttcaacgtggaaactgtggagtataagaacatcagctttactgtatgggacgtgggcggtcaggacaagatccggccactgtggagacattattttcagaatacccagggcctgatcttcgtagttgattcaaacgatagagagagggtgaacgagtag

SEQ ID NO: 213755 - DNA, 546 bp, synthetic construct
  misc_feature 1..546: note = Description of Artificial Sequence: Synthetic coding sequence
  source 1..546: mol_type = other DNA
atgggtaacatttttggaaatctgctgaagagcttaatcgggaagaaggagatgcgcatcctgatggtggggctggatgccgctggtaaaaccacaatactgtacaaattgaaattaggagaaatcgtcaccactatccctaccatcggattcaatgtggagacagtagagtacaagaacattagcttcaccgtgtgggatgtggggggacaggacaaaatcagaccgctctggcgccactactttcaaaacactcaaggcctgattttcgtggttgattcaaatgacagagagagagtaaatgaggcaagagaggaactgatgaggatgctggcggaggacgagctgagagatgccgtgttgctggtcttcgccaataaacaggacctccccaacgcgatgaatgctgcggaaattactgacaagttagggctgcacagcctcaggcatcgcaactggtacattcaggctacctgtgcgacttccggagacggcctctatgagggtctggactggttggctaatcaactgaagaacaagaaatag

SEQ ID NO: 213756 - DNA, 123 bp, synthetic construct
  misc_feature 1..123: note = Description of Artificial Sequence: Synthetic coding sequence
  source 1..123: mol_type = other DNA
atggggaacatctttggcaatctgcttaaaagtttgattggaaagaaggagatgagaatcttgatggtagggctggatgcggctggtaagacaactattctatacaagctgaaacttggctag

SEQ ID NO: 213757 - DNA, 543 bp, synthetic construct
  misc_feature 1..543: note = Description of Artificial Sequence: Synthetic coding sequence
  source 1..543: mol_type = other DNA
atggggttgactatatcttctttattttccagactattcggaaagaaacagatgaggatactcatggttggtcttgacgcagcgggaaaaaccaccatcctgtacaagctcaagctgggcgaaattgtgaccactatccccacaatcggcttcaacgtggagacagttgagtacaagaatatctgcttcacagtttgggatgtggggggacaggacagaatccggcctctgtggaagcactattttcaaaacacccaagggttgatattcgtggttgattctaacgacagagaacgcattcaggaggtggccgacgaactccaaaagatgctgctcgtggacgagctccgcgacgccgtcctcctgttgtttgctaataagcaggacctgcctaacgccatggcgatctccgagatgacagataaactcggcctacagtccctgagaaatagaacttggtacgttcaagcaacatgtgccactcagggcactggattatacgagggcttggactggctatctaatgaattgtccaaaagatag

SEQ ID NO: 213758 - DNA, 384 bp, synthetic construct
  misc_feature 1..384: note = Description of Artificial Sequence: Synthetic coding sequence
  source 1..384: mol_type = other DNA
atgggacttacgatctcgagtttgttctcaaggttattcggcaaaaagcagatgaggatactcatggtcgggctggatgcagccggtaagaccaccatactttataaacttaagctgggcgaaattgtgaccaccattcccaccatcggctttaatgtcgaaactgtggaatacaagaacatctgttttacagtgtgggatgtgggtgggcaagaccgcatcagacccctttggaaacactactttcaaaacactcaggggctgatcttcgtggtggacagcaatgatcgtgaacggatacaggaggtagcagacgagctacagaagatgttgctagtagatgagcttagagatgccgtcctgctgcttttcgctaataagtag

SEQ ID NO: 213759 - DNA, 69 bp, synthetic construct
  misc_feature 1..69: note = Description of Artificial Sequence: Synthetic coding sequence
  source 1..69: mol_type = other DNA
atgggactgactatctcttccctgttctccagattatttggcaaaaaacaaatgcgcattctgatgtag

SEQ ID NO: 213760 - DNA, 543 bp, synthetic construct
  misc_feature 1..543: note = Description of Artificial Sequence: Synthetic coding sequence
  source 1..543: mol_type = other DNA
atgggcctgacagtttcagcactgttttcgcgcatctttggcaagaaacaaatgagaattctcatggtagggctggacgctgccggtaagactactattctgtacaagctcaagttgggtgaaatagtgaccaccatccccactattgggttcaacgtcgaaacggttgaatacaaaaacatttgtttcacagtgtgggatgtgggcggtcaggataagattcgcccactttggaggcactactttcagaacactcagggccttatcttcgtagtcgattcaaatgaccgggagagagtacaggagagcgctgacgagctgcagaagatgttgcaggaagatgagctgagagacgccgtacttctggttttcgcgaacaaacaggacatgccgaacgcaatgcctgttagtgagctgactgataaattaggtctccagcacctcaggagccgcacttggtatgttcaggctacttgcgccacacaaggaacagggctgtacgacgggttagattggctgtcacacgaacttagtaaacggtag

SEQ ID NO: 213761 - DNA, 1245 bp, synthetic construct
  misc_feature 1..1245: note = Description of Artificial Sequence: Synthetic coding sequence
  source 1..1245: mol_type = other DNA
atggcaagcccacgtactcggaaggtactgaaggaagtacgcgtacaggacgagaacaacgtgtgtttcgagtgcggggctttcaacccgcagtgggtgtccgtgacgtacggaatctggatatgtctggagtgtagcggccgacaccggggactgggagtacacttgagcttcgttagatctgtgacaatggacaaatggaaggatattgaactcgagaaaatgaaggcaggaggaaatgccaagtttagggaattcctagaaagtcaggaggactacgacccctgctggagtctgcaggaaaagtacaacagcagagccgctgccctgtttcgcgacaaggtggtggcacttgccgaaggcagggagtggagcctggagagctctcccgcacagaactggactccccctcaaccgaggaccctgcccagcatggtgcatcgcgttagcggccagccacaaagcgtgactgctagcagcgataaggcgttcgaggattggctaaatgatgacctgggatcctaccagggcgctcaggggaatagatacgttggcttcggcaatactcccccaccacaaaaaaaagaagacgactttcttaataacgcaatgagtagtctgtatagcggatggtcctcctttactacaggagcatcccgcttcgcctccgcagctaaggagggcgctaccaagttcggttcccaggcatctcaaaaattttggggccataagcagcagcctgagccagcatcagagctgggacactcccttaatgagaatgtactcaagcccgctcaggagaaggtaaaagaggggaaaatcttcgacgacgtaagttctggggtctctcaactcgctagcaagggggtcgggtccaaaggttggcgtgacgttacgacattcttttctggtaaggctgaagggcctcttgacagtccctctgagggacacagctaccagaacagtggactggatcacttccagaattcgaatattgaccagtccttttgggagaccttcggatccgcagagcctactaagacacgcaaatccccttctagtgattcttggacgtgcgccgacacatccaccgagcgtcggtcgagcgacagctgggaggtctggggcagcgctagcaccaaccgcaactccaatagcgacgggggagagggtggggagggtactaagaaagcagtgccacccgctgtgccaacggatgacggctgggacaatcagaattggtag

SEQ ID NO: 213762 - DNA, 1212 bp, synthetic construct
  misc_feature 1..1212: note = Description of Artificial Sequence: Synthetic coding sequence
  source 1..1212: mol_type = other DNA
atggccagccctaggactcggaaggtgctcaaggaagtacgcgttcaggatgagaacaatgtgtgttttgagtgcggtgcctttaatccccaatgggtgagcgtaacatacgggatttggatctgcctcgagtgttctggcagacaccgcggattgggtgtgcacctttctttcgtgaggtctgtcacaatggacaaatggaaggacatcgaactggagaaaatgaaagctggcggtaatgccaagttcagagaattcctggagtcccaggaggattacgacccttgttggtctctgcaagagaagtacaacagccgggcagctgccttgttcagggataaggttgtggccttagccgaagggcgagagtggtccctagaaagctcacctgcccagaactggacacctccccagccacgcactctgccctctatggtacacagggtatctggtcagccccagagcgtcacagcatcaagtgataaagccttcgaggactggctgaatgacgatctcggctcctatcaaggcgctcagggaaatcgttatgtggggtttgggaatacccctccgccacagaagaaggaggatgacttccttaacaacgcgatgagcagcctatatagtggatggtcaagcttcacaacaggggcatcacgctttgccagtgctgccaaggaaggagcaacaaagtttggctctcaagcatcccaaaaggcatccgagctggggcatagcctgaacgaaaacgttctgaaaccagcccaagagaaggtgaaagagggcaagatcttcgacgacgtgtcctccggcgtgtcacaacttgcaagtaaatgtcaacgtcgcctctgctgtcatcaaagccattgcagcgctggacacctgggtagggctttttgccccgtcagctggcacgaggctctgtgtgggcagactggaagggaggagcaagcgagcctactgccgcctaaacatgtggtaggggcactggaagtgtgcgctagggggtgcccgaggtgtcatgtgcctcacacacctggtacggctgctgagtggccgggaaggctttgtctgtctagggagagcgtcgtcagagatggcggtactagcccacctttttttcgagggaaacaaagggcaccttggactgcaccacggagagccacagtgatcagaactgcagtctggaccacctccaagacggctacctag

SEQ ID NO: 213763 - DNA, 1221 bp, synthetic construct
  misc_feature 1..1221: note = Description of Artificial Sequence: Synthetic coding sequence
  source 1..1221: mol_type = other DNA
atggcctcgcctcgtaccaggaaggttcttaaggaagtgcgtgttcaagatgagaataacgtctgtttcgagtgcggagctttcaaccctcagtgggtttctgtaacctatgggatctggatatgcctcgagtgttcaggccgacatagaggtctgggagttcacctgagctttgtgcgaagcgtcaccatggacaaatggaaggatatcgaactggaaaaaatgaaagctggaggcaacgccaagttcagggagtttcttgagtctcaggaggattatgatccatgctggagtctccaagagaaatataattcacgtgcagcagccttgttcagagacaaggttgttgcccttgccgagggacgggaatggtctttagaaagtagccctgctcagaactggactcctccacagcctagaactttgcctagcatggtacaccgagtctccgggcagccccagtcagtgacagcaagtagtgacaaggcattcgaggattggctgaacgatgacctgggaagttaccagggcgctcaggggaaccgctacgtggggtttggcaacacacctcccccacagaaaaaggaagatgatttcctgaataacgccatgagttcactgtacagcggctggtcttcctttacaacgggagcttctagattcgccagcgcggcaaaggagggagctactaaatttggctcacaagcttcacagaaagcctcagagttggggcatagcctgaacgagaatgtgctgaaacctgcgcaggaaaaagtcaaggaaggaaaaatcttcgatgacgtctcatccggggttagccagcttgctagtaaggtacagggagtggggagtaaagggtggagggacgtgactacgttcttttctggcaaggctgagggcccacttgactcccccagtgaagggcattcttaccaaaatagtggattggatcactttcagaatagtaacattgaccagtccttctgggaaaccttcggcagtgccgaaccaaccaagacacggaagagtccatcttcagatagctggacatgtgcagacacaagcacagaacgcaggtctagtgatagctgggaggtctggggttcagcttccaccaatagaaatagcaactcagatggtggggaaggcggagagggaaccaagaaggctgttccgcctgcagtgcctacagacgatggatgggacaatcagaattggtag

SEQ ID NO: 213764 - DNA, 882 bp, synthetic construct
  misc_feature 1..882: note = Description of Artificial Sequence: Synthetic coding sequence
  source 1..882: mol_type = other DNA
atgctgtcgagcgaaagttcttggagtcttcggcgtatcaccattttggctggtccctgccgcagaagcactacagccgagccgaggccgagtcttggtataagggtgagtggacagccacagagtgttaccgcttcctcggataaggcatttgaagactggttaaacgacgatctcggctcctaccagggagcacaagggaaccggtatgtcggttttggaaataccccaccaccacagaagaaggaggacgacttcctgaacaatgctatgtcttccttatacagcggctggtcgtcctttaccacaggagctagtaggtttgctagtgcagccaaagagggagcaaccaaatttgggtctcaagccagccaaaaggcctcagaactgggacactcgctcaatgagaacgtgcttaagcccgctcaggagaaggtcaaggaggggaaaatctttgacgatgtgtcaagtggcgtttcccaactggcttccaaggtgcagggtgtgggaagtaaagggtggcgggacgttacgacctttttctcaggaaaagctgagggtcccctagattctccttcggagggacattcctaccagaactctgggctggaccacttccagaactctaatatcgaccaatctttctgggagaccttcggatctgccgagccaacgaaaacccgcaaatctccgtcctcagattcatggacatgcgccgacacttctaccgagagacggtccagtgattcttgggaagtctggggatcagcgagcaccaataggaatagcaatagcgatggaggagagggcggtgaaggtacgaaaaaggcagttcccccagccgtcccaacggatgatggatgggataaccagaactggtag

SEQ ID NO: 213765 - DNA, 1086 bp, synthetic construct
  misc_feature 1..1086: note = Description of Artificial Sequence: Synthetic coding sequence
  source 1..1086: mol_type = other DNA
atgcgcactacctttgtgaggtcagtgacgatggataaatggaaagacattgaattagagaagatgaaggctggtggtaacgccaaattcagggagttcctggaaagtcaagaggattacgatccctgctggtccctccaggagaagtataattctcgcgcagccgctctcttcagggacaaggttgttgcacttgccgaggggcgagaatggtctttggaaagcagtcctgcacagaactggactccaccccagccccgaacgcttccctctatggtccatagggtatcaggacaaccccagtctgttacagccagctccgacaaggcgttcgaggactggctgaatgacgatctaggttcctatcagggggcacagggcaacagatatgtggggttcggaaacactccaccaccgcagaaaaaagaagatgattttttaaataatgctatgagcagtttgtattccggatggtctagtttcactactggcgcatctcgattcgccagcgccgcaaaggaaggcgctaccaagttcgggtcacaggccagtcaaaaattttggggccataagcagcaacccgagccagcttctgagcttgggcattccttaaacgaaaatgtgctcaaacccgcacaggaaaaggtgaaggagggcaagatatttgatgacgtaagctccggtgtgtctcagctggcctctaaaggcgttggctccaagggatggagagacgtaaccacttttttttcaggtaaggctgagggccctctggatagccccagcgagggccatagttaccaaaatagcggcctcgatcacttccagaactccaacatcgatcagtcattctgggagacatttggatccgcggaacctactaagacacgaaaatctccaagcagcgactcctggacttgtgccgataccagcacggagcggagatcatccgattcgtgggaagtatggggtagcgcaagcacgaatcggaactcaaattcagatggtggtgagggcggtgaggggacgaaaaaggcagttccaccagccgtaccaacagacgatggatgggataatcagaactggtag

SEQ ID NO: 213766 - DNA, 786 bp, synthetic construct
  misc_feature 1..786: note = Description of Artificial Sequence: Synthetic coding sequence
  source 1..786: mol_type = other DNA
atggccagtcccaggacacggaaggtactgaaggaagtgagagtacaggacgaaaacaatgtatgcttcgagtgtggtgccttcaatccacagtgggtttccgtcacatatggcatctggatttgcttggagtgtagcgggaggcacaggggcctgggcgtgcacttatcatttgtgcgatctgtcaccatggacaagtggaaagacatagagttggaaaaaatgaaggccggaggtaacgccaagttcagggagtttctcgagtcgcaggaggattacgatccatgctggagcctccaggagaagtataacagccgcgctgcggcactctttagagataaggtcgttgcgctggcagaagggcgtgagtggtcccttgaatcatcgcctgcccagaattggaccccgccacaacccagaaccctcccatctatggtgcacagagtctccggacagccccagtctgtgactgccagttccgacaaggcatttgaggactggctgaatgacgacctaggatcttatcagggggcacaggggaacaggtacgttggctttggcaacacacctcctccccagaaaaaggaagatgatttcttaaataatgccatgtcttcactctatagcggctggagcagctttacaaccggcgcatccaggtttgctagtgccgcaaaagagggggcaacgaaattcggatcgcaggccagccagaaggcctccgagctcgggcattcactcaacgagaatgtgctaaaacctgctcaggagaaagtgaaagaatag

SEQ ID NO: 213767 - DNA, 240 bp, synthetic construct
  misc_feature 1..240: note = Description of Artificial Sequence: Synthetic coding sequence
  source 1..240: mol_type = other DNA
atggcatccccccgtactaggaaggtcctcaaggaggtgagagtgcaagatgagaataacgtctgctttgagtgtggagccttcaatccacagtgggtcagcgtgacatatggcatctggatttgtttggaatgcagcggaagacatcgtggactgggcgtgcatctgtcttttgtccgctctgtcacaatggataaatggaaagacattgagctggaaaaaatgaaggccggtggatag

SEQ ID NO: 213768 - DNA, 369 bp, synthetic construct
  misc_feature 1..369: note = Description of Artificial Sequence: Synthetic coding sequence
  source 1..369: mol_type = other DNA
atggcttctccacgaacaagaaaggtactgaaggaagtgagggtgcaggacgagaataatgtctgtttcgagtgcggggcttttaatccccaatgggtgagcgtcacgtacggcatctggatctgtctggaatgctccggaagacatagaggtttaggtgtgcatttgtccttcgtccgctcagtgaccatggataagtggaaggatattgagctcgagaaaatgaaagccggaggaaacgctaagttccgggagtttctagaaagccaggaagactacgatccctgttggtcgcttcaggagaagtataactctcgagctgcagccctgtttcgagataaggttgtggccctagctgagggtcggtag

SEQ ID NO: 213769 - DNA, 759 bp, synthetic construct
  misc_feature 1..759: note = Description of Artificial Sequence: Synthetic coding sequence
  source 1..759: mol_type = other DNA
atggtggcgagtatgaggttggcttaccaggagttacagatcgatcggaaaaaagaggagaaaaagctgcaaaacctggaagggaagaaacgggagcaagccgagaggctaggcatgggcctggtgagccggagttctgtgagccactcggtgttgagcgagatgcaggtaattgagcaagaaacacccgtgtctgctaagagttcccgcagccagttggacctattcgacgatgtcgggacatttgccagcggtccaccgaagtataaagataatcctttcagtctgggcgagagcttcggcagtcgctgggatacagacgccgcatggggaatggaccgggtagaggaaaaagagcccgaagttaccatcagctccattaggcctatttcagagagggcaacgaatcgtcgagaagtggaaagtagatcctccggcttggaatcttcggaggcacgacagaaatttgccggagccaaagctattagctctgatatgttttttggcagagaagtggatgcagagtatgaggcccgttcgcgcctgcagcagctgagtgggtcctcagccatttcgagctctgacctgtttggggatatggatggagcccacggggctggctctgtatctctcgggaatgtcttgcctaccgctgatatcgcccagttcaagcagggagtcaagtctgtcgccggaaaaatggctgtgctcgctaacggagtgatgaattctctccaagatcggtacgggtcttactag

SEQ ID NO: 213770 - DNA, 1245 bp, synthetic construct
  misc_feature 1..1245: note = Description of Artificial Sequence: Synthetic coding sequence
  source 1..1245: mol_type = other DNA
atgcaggtcggagggaacgctaacgcgacagcatttttcagacagcacgggtgtacagccaatgacgcaaataccaaatacaactcccgagccgctcaaatgtacagagagaaaatcaggcagctgggaagcgccgctctggctcgccacggaaccgacccacctgcctgggatgctcccgcaaccgaacctagcgggactcagcaacctgcaccgtctaccgagtcttcaggccttgcccagcctgaacatggcccaaataccgacttgctcggcactagccccaaggcttcactggaactcaaaagctcaataatcggcaaaaagaaaccagccgctgcaaagaagggactgggtgcaaagaaggggctgggtgcacagaaggtgagctcgcagtcgttcagtgaaatcgagcggcaggcgcaggtagctgaaaaactgagggaacagcaagcagccgacgccaagaaacaggcagaagaaagcatggtggcttcaatgcggctggcctatcaggaactgcagattgatcgaaagaaggaggagaagaagctgcagaatcttgaggggaaaaaacgcgaacaggctgagcgcctcggaatgggcctcgtatccagatcttcagtgtctcattccgtgctcagtgagatgcaggtgattgaacaggaaacacccgtctctgctaagagttccaggtcccaactggacctcttcgatgacgttggcaccttcgccagtgggccacccaaatataaggataacccattctccctcggagagtcattcggttcacggtgggatactgatgctgcttggggaatggatagggtcgaagagaaggaaccggaggtcaccattagctctatacgcccaattagcgaaagagcgactaatagaagagaagtggaatcccggtcatccggcctcgagtctagcgaggcacgacagaagtttgctggagctaaggctatctccagtgacatgttcttcgggagagaggtggacgccgagtacgaagcaaggtccagactccagcagctgtcaggcagttcagccatttcaagttccgacttattcggtgacatggatggcgcacacggagcaggttccgtcagcttggggaatgttctcccaacagccgacattgcacaatttaaacagggagttaaatccgtagccggaaaaatggccgtcctggctaatggagtcatgaactcactccaggatcggtacggttcttattag

SEQ ID NO: 213771 - DNA, 1158 bp, synthetic construct
  misc_feature 1..1158: note = Description of Artificial Sequence: Synthetic coding sequence
  source 1..1158: mol_type = other DNA
atggcggctgaaccaaataaaaccgagattcaaacgttgtttaagcgactccgtgccgtgcccacgaataaagcttgctttgactgcggagccaagaatccctcctgggcatcgataacatacggtgtatttctgtgcatagactgctctggggtccatcgctcattaggagtacatctatccttcatcaggtcaaccgagctggactcgaactggaattggtttcagctccgatgtatgcaggtcgggggaaacgccaacgccctgggtgccaaaaagggtttgggagctcagaaagtgagtagtcaatcattctcggagattgagcgacaggcccaagtggccgaaaagctgcgggagcagcaggcagccgatgctaagaagcaagccgaagagagtatggttgcttctatgaggctggcctatcaagaattgcagatcgataggaagaaagaagaaaaaaagctccagaatctggaggggaaaaagcgtgagcaagcagagcggctgggaatggggctggtgtccagaagcagcgtatcacatagcgtcctatccgagatgcaggtcatcgaacaagaaacgcccgtcagcgccaaaagtagcaggtctcaactcgacctgtttgacgacgtcgggacatttgcttcaggtcctccaaagtacaaagacaacccgttctccttaggggaaagcttcgggagccgctgggacactgatgctgcatggggcatggatcgagttgaggagaaggaaccagaggtgacaatatctagcatcaggcccatcagtgaaagggcaacgaaccggagagaggtggaatccaggagttccggcctcgagtcgtctgaggcccgacaaaaattcgccggtgcgaaagccattagttccgatatgttctttgggagagaggtggatgcagaatacgaagccaggtcaagactccagcagctctccggatcttctgcaatctcctcgagcgatctgttcggagatatggatggggcacacggagctggtagcgtgtctctggggaacgtactccctaccgcagatattgcccaattcaaacagggcgtcaagtcggtcgccggaaaaatggcagtgttggccaatggggtcatgaactcactgcaggaccggtacggctcctactag

SEQ ID NO: 213772 - DNA, 1566 bp, synthetic construct
  misc_feature 1..1566: note = Description of Artificial Sequence: Synthetic coding sequence
  source 1..1566: mol_type = other DNA
atggccgcagagccaaacaagacagagattcagactctgttcaagcgactcagagcagtgcctactaacaaagcctgctttgactgtggcgctaagaatcccagctgggccagcataacttatggcgtgttcttgtgcattgattgtagtggtgtgcatagaagcctcggcgtccacttgtctttcatcagatccactgaactcgactcgaactggaattggtttcagttaaggtgcatgcaggtgggcggaaatgcaaacgcaacggccttctttaggcagcacggctgtaccgccaatgatgccaacaccaaatacaatagccgtgcagcccagatgtatcgcgagaagatccgccaactggggtcagccgcactggctcgccatgggaccgacctgtggatcgacaacatgagcagtgccgtgcctaaccacagccccgaaaagaaggattcggacttttttacagagcatacacagcctcccgcttgggacgcgcctgccacggagccctccggaacccagcagcctgctccaagtaccgagtcctccgggttggcccaaccggagcatggaccgaacacagatctgctgggcacatcgcccaaggcctctctggaactgaaatccagcatcataggcaagaagaaacccgctgctgctaagaaaggtttgggtgcaaagaagggattgggtgcgcagaaagtatcatcccagtcttttagcgaaatcgaacgacaggcccaggtggcagaaaagcttcgcgaacaacaggcggcagacgccaagaaacaggccgaggaatcaatggtggctagcatgcgtttggcctaccaagaactccagatcgatcgaaagaaggaggagaaaaagttacagaacctagagggtaaaaaaagggagcaggcagagcgcctgggcatgggactcgtcagccggtccagcgtgagccactctgtccttagcgagatgcaagtgatagaacaagagaccccggtgagtgccaaatcgagtaggtctcagttagatttgtttgacgatgtgggaacatttgcctctgggccacccaaatacaaggacaatcccttttcactgggggaatctttcggctcgcgctgggacactgacgccgcttggggcatggacagggtggaggagaaggaaccagaggtcaccatttctagcatcaggcctatctcagaacgggcaactaatagacgagaggtggaaagcagaagtagcgggctggagagttctgaagcacgacagaaattcgcaggcgctaaagccataagttcagacatgtttttcggccgagaagtggacgccgaatatgaggcaaggtcccggctacaacagctcagtggttcatccgctattagttctagtgacttgtttggagacatggacggagcgcacggcgcaggctcagtttccctgggtaacgtgttgcccactgcagacatcgcccaatttaaacagggagtcaagtccgtggctggcaagatggcagttttggcgaacggcgtaatgaactccctgcaagacaggtacggatcatactag

SEQ ID NO: 213773 - DNA, 1551 bp, synthetic construct
  misc_feature 1..1551: note = Description of Artificial Sequence: Synthetic coding sequence
  source 1..1551: mol_type = other DNA
atgggggatccaagtaagcaggatatcctaacaatcttcaagagactgcgttctgtgcccaccaacaaggtctgttttgactgtggggcaaagaacccttcttgggcgtcgataacctatggcgttttcttgtgcattgattgttccggcagtcatcggtctctgggcgtgcacctgtcattcatccgctcaacagagctagactctaattggtcctggttccagctgaggtgcatgcaggtgggaggtaacgctagcgcttcctcttttttccatcagcacgggtgtagcaccaacgataccaatgccaagtacaatagccgggcagcccaactgtacagagagaaaattaaaagcttagcttcacaggccactcgcaagcacggaaccgacttatggctggactcctgcgtcgtgcctcccctgtcaccacctcctaaggaagaagacttttttgcttcccacgtgtctccggaggtgagcgacaccgcctgggcctcggccatcgccgaaccatcctccctgacatctaggccggtggagaccaccttagagaataatgaaggtggacaggaacaaggacctagtgttgagggtctgaatgtgcctactaaggcaacactggaggtgtcatcaataattaagaagaaacccaatcaagcaaaaaaaggactcggagcaaagaaggggtctctgggggctcaaaagcttgccaatacttgtttcaatgaaattgagaagcaggcgcaggctgccgacaagatgaaggaacaagaggatctagctaaagtggtcagcaaggaggagagtatcgtaagcagccttagactggcttataaagatcttgaaatacagatgaaaaaagacgaaaaaatgaatatttctggaaaaaagaatgtcgactctgatcgcctggggatgggatttggcaactgcagatcagtaatctcgcactctgtgacttccgacatgcagacgattgagcaggaaagcccgatcatggccaagccaaggaaaaaatataacgacgactctgatgattcatacttcacgagcagctcctcatatttcgacgaaccagtggaactgaggtccagttccttttcatcctgggacgatagttccgactcatattggaaaaaggagacttccaaagatacagagaccgtccttaaaactacagggtattctgatagacccacagcgaggcgtaagcccgattacgagccagtcgaaaacacagatgaagctcaaaagaaattcgggaatgtgaaggccatttcgtcagatatgtattttggcaggcaaagccaggcagactacgaaacgcgcgctcggttggagcggctctcggcatccagctcaatcagttctgccgacctctttgaagaaccgagaaagcagccagctgggaattatagtctgagctccgtgctccccaatgccccagacatggcacagtttaaacagggcgtgaggagcgtggcgggaaagttgtcagtgttcgccaacggagtcgtcacttccatccaggacagatatggatcctag

SEQ ID NO: 213774 - DNA, 1335 bp, synthetic construct
  misc_feature 1..1335: note = Description of Artificial Sequence: Synthetic coding sequence
  source 1..1335: mol_type = other DNA
atgggcgatccctctaagcaagatattctcaccatctttaagaggctcaggtcagtgccaacgaacaaggtctgttttgattgcggagccaagaatccaagctgggcgtccataacatacggggtatttctatgcatcgactgctcaggctcccaccgcagtcttggggtacacctgagctttattcgctcgacagagctggatagcaactggagttggttccagctcaggtgcatgcaagtgggcggaaacgcaagtgcagtttcggatactgcgtgggctagcgccattgcggagccgtcaagtttgactagcagaccggtcgaaaccactctggaaaataacgagggcggacaggaacaggggcctagcgtcgagggcctgaatgttccaactaaggctaccctggaggtttcatctataattaaaaagaaacccaatcaggctaaaaaagggctgggagccaaaaaaggttcacttggggctcagaagctggccaatacctgctttaatgaaatagaaaagcaagcccaagctgctgacaagatgaaagagcaggaagatctggccaaggtggtctcaaaggaggagtccattgtgtctagcctgcggcttgcgtacaaggacctcgaaattcagatgaaaaaggacgagaagatgaacatttctggaaagaaaaatgttgactctgacaggctgggcatgggctttggcaactgccggtcagttatctcacatagtgtgacctcagacatgcagacgattgaacaggagagcccaatcatggccaaacctaggaaaaaatataacgatgacagcgacgacagctactttacatcatcgtcttcgtattttgatgaacctgtcgaactgcgtagcagcagtttcagcagttgggatgattcgtccgacagttactggaagaaagaaactagcaaggatacagagaccgtgctaaaaacaactgggtattctgacagaccaactgcacgtcgcaagccagactacgaacccgtggaaaacactgatgaagctcagaagaagttcggaaacgtgaaggcaatctcttcagacatgtactttggacgccagtctcaggcagattatgagacccgggctcggctggaacgtttaagtgcatcttcttccatttctagcgctgatctatttgaagaacccaggaaacaaccggcagggaattactcattgtctagtgtgctgcccaacgccccagatatggctcagttcaaacagggcgttcggtcggtggcgggtaaactcagcgtctttgccaatggcgtggtgactagtattcaggatcgctatggatcatag

SEQ ID NO: 213775 - DNA, 1419 bp, synthetic construct
  misc_feature 1..1419: note = Description of Artificial Sequence: Synthetic coding sequence
  source 1..1419: mol_type = other DNA
atgggagatccctcgaagcaggatatcttgactatctttaagagactccgaagcgtgcctacgaataaggtgtgctttgactgtggcgctaaaaatccaagttgggccagtattacctatggcgtgttcttgtgtatcgactgcagcggatcgcatagatccttgggtgtgcacctctcattcatccgtagtacagaactggattccaattggagctggtttcaattacgctgtatgcaggtggggggtaacgctagcgcgctatggctcgactcttgtgttgtgccgcctctgtcccccccaccaaaggaagaggattttttcgctagtcacgtgtcccctgaggtgtccgacaccgcgtgggccagtgccatcgctgagcctagctcattgacctctcgacctgtcgagactaccctggaaaataatgagggtgggcaagagcagggccctagcgtagagggtttgaacgttccgacaaaggccacactggaagtgtcttcaattattaaaaagaagcccaatcaggccaaaaagggactgggagcaaagaaggggagcctgggcgcacagaaactggccaatacttgcttcaacgaaattgagaagcaggcccaagccgcagacaaaatgaaggagcaggaggatcttgcgaaggtggtgtctaaggaggagagtatcgtttcctcgctgaggctggcgtacaaagatctcgagatccagatgaagaaggatgagaagatgaacatatctgggaaaaagaacgtcgactcggacaggctgggtatgggattcgggaactgccggtccgtgatcagccatagtgtaacaagcgatatgcagaccatagaacaggaatctcccataatggcaaaaccccgtaagaaatataacgacgacagcgacgacagctacttcacatcctcctcaagctattttgatgaaccagtagaactgagatctagcagctttagctcttgggatgactcaagcgattcttattggaaaaaagagacttcaaaggatactgaaacagttctgaaaacgaccggttattcagatcgccctaccgctcgaaggaaacccgattatgaacccgtggagaatactgatgaagcacagaagaagttcggaaatgtgaaggccattagctcggacatgtattttgggagacagtcgcaggctgactacgagacccgcgctcgcctggagagactgagtgccagctcaagtatctcttccgctgacctgtttgaagaaccaaggaagcaacccgcagggaactactctctttcgtccgtcttgcccaatgctcccgacatggcccaattcaaacaaggggtaagaagtgtcgccggaaaactttctgtgttcgctaacggggttgttacctcaattcaggatagatacggaagttag

SEQ ID NO: 213776 - DNA, 822 bp, synthetic construct
  misc_feature 1..822: note = Description of Artificial Sequence: Synthetic coding sequence
  source 1..822: mol_type = other DNA
taactggctctgtttcaagtctccgatacggcatgggcatcagctattgcggagccctcttcccttacctcccgtcccgtagaaaccactctcgagaacaatgaaggcggtcaggaacagggaccctctgtcgaaggattgaatgtgccgacgaaggcaactctggaagtcagtagtatcatcaaaaagaagccaaatcaggctaagaaagggctcggcgctaaaaagggctcactcggtgctcagaagctggccaacacatgctttaacgaaatcgaaaagcaggcccaggccgctgataagatgaaggagcaggaggacctcgccaaagtggtgtccaaagaggagagcatcgtgagttctcttcgtttagcctacaaggacctggagatacagatgaaaaaagacgaaaagatgaatatctctgggaaaaagaatgttgactcagatcggcttggcatgggttttggaaattgccgctctgttatctctcattccgtcacatcggacatgcagaccatcgaacaggaatctcctatcatggccaaaccacgtaaaaagtacaacgacgatagcgacgactcttatttcaccagcagttcccgccctaccgcacgcaggaaacctgactacgaacccgtggagaataccgatgaagcccagaagaagtttggcaacgtgaaggccatatccagcgatatgtacttcggcagacaatctcaggccgattacgagacccgtgctagattggaacgcctcagcgccagttcctccatatcctccgcagacctttttgaagagcctcggaaacagcccgcttag

SEQ ID NO: 213777 - DNA, 459 bp, synthetic construct
  misc_feature 1..459: note = Description of Artificial Sequence: Synthetic coding sequence
  source 1..459: mol_type = other DNA
atgggggacccgagtaaacaggacattttgacaatctttaagaggctgaggtcagtgcctacaaacaaggtttgcttcgactgcggtgctaaaaatcccagttgggcctctattacctacggagttttcctatgcatagattgctcgggctcgcacagaagcctgggcgtgcacctgtcctttattcggtcgaccgagctcgactccaactggagctggtttcagctgcggtgtatgcaggtaggtggaaatgcgtccgccgtcagcgacacagcttgggctagtgccatcgctgagccatccagccttacatcccggcctgtcgagacgaccctggaaaacaatgagggcggacaggaacagggccctagcgtggagggtttgaatgtgcccacgaaagccaccctggaagtgtcttcaataattaaaaagaagcctaaccaagccaagaagggctag

SEQ ID NO: 213778 - DNA, 5550 bp, synthetic construct
  misc_feature 1..5550: note = Description of Artificial Sequence: Synthetic coding sequence
  source 1..5550: mol_type = other DNA
atgtatgagggcaaaaagacaaagaacatgtttctgactcgggctttggaaaagatcttagccgataaagaagtgaaaaaggcccaccacagccaactccggaaggcctgcgaggtagccctcgaggagataaaagccgagaccgaaaaacagtcacccccacatggagaggcgaaggcaggcagttctaccctacccccagtgaagtccaagacgaactttatcgaggcggataaatatttccttccatttgagcttgcctgccaatcgaagtgccctaggattgtgtccacctctttggactgcctccagaaactaatcgcctacggccacctgactggcaacgcaccagatagcacaacccccggaaaaaagctgattgaccggataatcgagacgatttgcggttgcttccagggcccacagactgacgagggggtccagttgcagattattaaagctctgctgaccgctgttacatcacagcatatcgagatccatgaaggtaccgttctccaagcagtccgcacatgctacaacatttatctggctagcaaaaacctgatcaatcagacgaccgctaaggccaccctcacacagatgctcaatgtcatattcgcgaggatggagaaccaggctttgcaggaggccaaacaaatggaaaaggaacggcataggcaacaccatcacctgctacagagcccagtgtctcatcatgaacccgagagcccccagctgaggtacctccctcctcagaccgtggaccatatttcccaggagcacgagggcgatttggatctccacaccaatgatgtggacaagagtctacaggatgataccgagccggagaatggatccgacatctcatccgcagagaacgaacagacggaggcagatcaagcaaccgctgccgaaaccctgtccaaaaatgaggtgctatacgatggggagaaccatgactgtgaagaaaaaccccaggacatcgtccagaacatagtggaggaaatggtgaacatagtagtgggggacatgggcgaaggcaccactatcaatgccagcgctgatggcaacatcggtaccattgaggacgggtcagactcggagaacatacaggcaaatggcatccctggcacacctatttctgtggcgtacactccaagcctgcccgacgaccggctgtctgtcagcagcaatgatacccaggagtctggaaatagctctggaccatctccaggggctaaattttcacacatcctccagaaagacgcctttctggttttccggtctctgtgcaagttgtcgatgaagccactgtctgacggtccaccagatcctaagtcccatgagctccgttcaaagatcctgtccctacagctgctactgtctattctccagaacgccggtcccatttttcggacaaatgagatgttcatcaatgcaatcaaacaatatctctgtgtcgcactcagcaagaatggcgtctcttccgtcccagaggtcttcgagctgagcttgtctatttttctcaccctattgtctaactttaagacacatctgaagatgcaaatcgaggtctttttcaaagaaatatttttgtatattctggaaacgagcaccagctcattcgaccacaagtggatggtgatccagacgctcactcggatttgtgccgacgcccagtctgtcgttgacatttatgtgaattatgactgtgacctgaatgctgcaaatattttcgaaagactcgttaacgatctctcaaagatcgcgcagggtagaggaagtcaggagctgggcatgtctaacgtacaagagctgtctctgcggaaaaagggcctcgagtgtctcgtctcaattctgaagtgcatggtggaatggtccaaagatcagtacgttaaccccaactctcagacaactctggggcaggagaagccttccgagcaagagatgtccgaaatcaagcatccagaaacaatcaacaggtacgggtccttgaatagtttggaaagcacatctagctctggtattggctcatacagcacccaaatgagcggcacagataatcccgaacagttcgaagttctcaagcaacagaaggagattatcgagcaggggattgatctgttcaacaagaagcctaagcgcggaatccagtatttgcaggaacagggaatgctgggaacaacccccgaggacatcgctcagttcctccaccaggaagagcgcctggactctacccaggtcggagaattccttggagacaacgacaagttcaacaaggaagtcatgtatgcctacgtcgatcagcacgacttttcaggcaaggatttcgtttccgccttgagaatgttcttggagggctttagactccccggtgaagcccagaaaatcgaccgcctcatggagaagttcgccgctagatacctggaatgtaaccagggtcagaccctgtttgcctcggctgatacggcctatgtactggcctatagcatcataatgctcactaccgacctgcacagcccccaggtgaaaaacaaaatgacaaaggagcagtatattaaaatgaatcggggtattaatgactccaaagacctgccagaagagtacctctccgctatatataacgaaatagcagggaaaaaaatctctatgaaggagacaaaggagcttacaattcccactaaatcatccaaacagaacgtggcctctgaaaagcaaaggcgcctcctatataatctggaaatggagcaaatggcaaagactgccaaggccctgatggaagctgtgtcacacgtgcaggctccctttacgagtgccacccacctggaacatgtccggcctatgtttaaactcgcctggacaccattcctcgcagctttttctgttggcctccaggactgcgacgataccgaggtcgcctccttgtgccttgagggaatcagatgtgctattcgcattgcctgcatattcagcattcaactggaacgcgacgcctacgtgcaagccttggcgagattcactctcttgacagtgagtagtgggatcaccgagatgaaacagaagaacatcgataccattaagacattgatcaccgtcgcccatactgacggcaactacctaggaaattcatggcacgaaatccttaaatgcatatctcaattagaactagcccaactgattggaaccggagtaaaaccgagatacatttcaggcacagttagaggtcgtgagggtagtttgaccggtacaaaggatcaggcccctgatgagtttgtcggtctgggactggtgggaggtaacgttgattggaagcaaatcgccagtatccaggaatctataggggagacctcctcacagtccgtcgtggtggccgttgataggattttcaccggctctacgcggctggacggcaacgccatcgtcgactttgtgaggtggctatgtgctgtgtctatggatgaactactttctactacacatcctcggatgtttagcctgcagaagatagtggaaattagttactataatatgggacgcatcaggctgcaatggtctagaatttgggaagtcatcggcgaccattttaacaaagtcggatgcaatccgaatgaagatgtggccatattcgctgtagattccctgaggcagctttccatgaaattcctcgagaaaggagagctcgcaaacttcaggttccaaaaagacttcctgcgcccttttgagcatatcatgaagcgcaaccgctcacctactatcagggatatggtggtccggtgtatcgctcaaatggtcaattcgcaggccgcaaacattcggagcgggtggaagaacatttttagcgtattccacttggccgcttcagaccaggatgaatccatcgtggagctcgctttccagacaaccggtcacatagttaccctcgtctttgagaaacatttcccagctacgatcgattcctttcaggacgccgtgaaatgcctgtccgaattcgcctgtaacgcagccttcccagacacttcaatggaggccatacgccttattcgacattgtgcgaaatacgtttctgatcgcccacaggcctttaaggagtatacctccgacgatatgaatgttgcccctgaggatcgggtgtgggtacgtggctggtttcccatactcttcgagttaagctgcattatcaataggtgcaagttagacgtgcgcaccagaggactgactgtcatgtttgaaattatgaagacatacgggcacacatatgaaaagcactggtggcaggatctatttcggattgtgtttcgaatatttgacaatatgaaactcccagagcaacagacagaaaaggctgagtggatgaccactacttgcaaccacgctctgtatgccatttgtgatgtgttcacgcaatatcttgaagtgctctccgacgttctcttagatgacatattcgcccagttgtactggtgtgtgcagcaggacaatgaacagctcgcaaggtccgggaccaactgcttggaaaatgtggttatcctcaatggtgagaaatttacattggaaatctgggacaaaacctgtaactgcaccctcgatatctttaaaacaacaattccacacgcccttctgacttggagaccaaactcaggggagaccgcaccccctcccccttcacctgtgtccgaaaagccgctggatacgattagccagaaaagcgtcgatattcacgactctatccagcccaggtcagttgacaatcggccacaagcacctctcgtctctgccagtgctgtgaacgaggaagtctctaagataaaatctacagctaaattccctgagcaaaaactcttcgccgctcttctgataaagtgcgtggtccagctggagttaatccagactattgacaacatcgtgttttttcctgccactagtaagaaggaagacgccgaaaatctggccgctgcccagagggacgcagtggattttgatgtgcgtgtggatacccaggaccagggaatgtacaggttcttaaccagtcagcaactgtttaagttgctggattgtttactcgaatcacacaggtttgcgaaggcgtttaactccaataatgaacagcgcaccgcactttggaaagctgggtttaagggtaagtcaaaaccgaacttgctgaagcaggaaacatcttctttggcctgtggattgcggatcttattcaggatgtatatggacgagagccgggtgtcagcttgggaagaggttcagcagcggctgcttaacgtttgttctgaggccttgagttactttttaaccctcacatcagaatcccatcgggaggcttggacaaatctgctgctcctctttctgaccaaggtcttgaagatttccgacaataggttcaaggctcatgctagcttctactaccctctgttgtgtgagattatgcagttcgacctgattccggaactccgggcagtgcttcgacgcttcttcttgcgcatcggggtggtctttcagattagtcagcctccggagcaagagctcggaatcaataaacagtag

SEQ ID NO: 213779 - DNA, 5357 bp, synthetic construct
  misc_feature 1..5357: note = Description of Artificial Sequence: Synthetic coding sequence
  source 1..5357: mol_type = other DNA
atgcaagagtcacaaaccaaatccatgtttgttagtcgagccctcgaaaagatcttagctgacaaagaggtcaagaggcctcaacactcacagctgaggcgcgcatgtcaggtcgccctcgacgagatcaaggccgagattgagaaacagcggttgggcaccgccgctccccctaaagcaaatttcatcgaagcggacaagtacttccttccatttgagctggcctgtcagtctaaaagccctcgagtcgtatccactagcctggactgcctacagaagctcatcgcatatggacatattaccggaaatgcgcctgacagcggggcacccggaaaacggctgatcgaccgcatcgtcgaaaccatttgctcttgctttcaagggccacagacagatgaaggggtacagcttcagattatcaaagccctgctcacagctgttacgtcaccacacatcgaaattcatgagggaactatcctccagacagttcggacgtgttacaatatctacttggctagtaaaaatctaattaatcagacaaccgccaaagccacgctcacccagatgttgaatgtaatctttacacggatggagaatcaggtactgcaggaagctagagagctggaaaagccgatccaaagcaaaccccagtctccagtaatacaggctgccgctgtctcacctaagtttgtgcgtctaaaacattctcaggcgcagagtaagcctactacacccgagaaaacggacctgactaatggcgagcacgccaggagcgactccggcaaagtgagtactgagaatggtgacgcacctcgcgagcggggttcatccttatccggcacagatgatggggcacaagaggttgtcaaagatattctggaagacgtcgtgacttccgctattaaggaggctgccgaaaaacacggccttactgaaccagagcgagttcttggggagctggagtgtcaagaatgcgctatcccccctggtgtggatgaaaactcacaaactaacggcatcgcagatgataggcagtcgctctccagtgctgacaatctggagagtgatgcccagggccatcaggtggccgcaaggttctctcacgtcctgcagaaagacgccttccttgttttccgcagcctgtgcaagctgtccatgaaaccactgggggaaggaccgccagaccccaagtcacacgaacttcgatccaaggtcgtctccctgcaactgctgctctcggtgctgcaaaacgccggaccggtgtttcgcacccacgaaatgttcataaacgcaataaaacagtacctctgcgttgccttatctaagaatggcgtttcctctgtgccagacgtgtttgagctgtcgcttgctatttttctgaccttgctctcaaattttaaaatgcacctgaagatgcagattgaggtcttctttaaggagatcttcttgaatattttggagacttcaactagctcctttgagcaccgatggatggtgattcaaacactcacgagaatctgcgccgatgcacagtgtgtggttgatatctacgtgaactacgactgtgacctcaacgccgcaaacatcttcgagcgcctggtcaacgacctgagtaaaatagctcagggaagatctggtcacgaattagggatgacacccctgcaggagctctcccttcggaaaaagggactggaatgcctggtgtcaatactgaagtgcatggtggagtggtcaaaggatctctacgtcaatccaaatcaccagaccagcttagggcaggagcgcttaacagaccaggagatcggcgatggcaagggcctggacatggcccgacgatgctctgtgactagtatggagtccactgtgagctcaggcacacagacaactgttcaagacgacccagagcagtttgaagttattaaacaacaaaaagagatcatcgagcacggcatcgaactgttcaacaaaaagccaaaaaggggaattcagtttctccaagagcagggcatgctagggacctctgttgaagatatcgcacaattcctgcatcaggaagaacggctcgattcaacacaagttggagattttctgggggatagcgctcggttcaataaggaagtgatgtatgcatacgtcgaccagctcgatttctgcgaaaaggaattcgtttccgctcttaggaccttcttagagggcttcaggctcccaggagaggcccaaaagatcgatagattgatggagaagttcgcagctaggtacatcgagtgtaatcaggggcagacactcttcgcatctgcggacacggcttacgtcttggcgtacagcatcatcatgctcacgaccgacctgcattcgccgcaggtgaaaaacaagatgacaaaggagcagtacatcaaaatgaacagaggcattaatgacagtaaagatctgcccgaagagtatctgtcctctatttatgaggaaatagagggtaaaaagattgcaatgaaagagacgaaagaactgacaatcgcaactaagtcaactaaacaaaatgtggcgtctgagaagcagcgcagattgctgtacaacttggagatggaacagatggccaaaactgctaaggctctcatggaagccgttagtcacgccaaggccccatttacctccgctacacacctggaccacgttcggcctatgtttaagttagtctggacccccctgctcgccgcttattctatcggcctgcagaactgcgatgacaccgaggtcgcaagtctgtgtctggaaggcattcggtgcgccatccgaatagcttgtatttttggaatgcagctagagagggacgcttacgtgcaggcccttgcacggttctcccttctcactgcctcctcatccattactgagatgaagcagaaaaatatcgacacgattaagaccttgatcactgtggcccatacagatggcaattatctaggcaactcgtggcacgaaatactgaagtgtatctcacagctcgagttagctcaactgatcggcacaggagtgaaaacgcgttatctgtctggaagtgggcgagaaagagagggcagccttaaggggcatacactggcaggggaggaattcatgggccttggattggggaatttggtgagtgggggagtggacaaacgtcagatggcaagcttccaagaatccgttggagagactagcagtcagagtgtggtggtggctgtggaccgcatctttaccgggagcaccagattggatggcaatgctattgtcgactttgttagatggctctgtgccgtgtctatggacgagcttgcttcccctcaccaccctagaatgttctcactacagaagatcgtggagatatcatactacaatatgaaccggattagactgcagtggtccaggatctggcacgtgatcggggaccattttaataaagtgggctgcaatcctaatgaagacgtcgctattttcgcagtggacagtctccggcagctgtccatgaaatttctcgagaaaggggagctcgccaatttcagattccaaaaagattttttaagaccattcgagcatattatgaagaaaaataggagccccacaattcgggacatggccattagatgtattgcccagatggtcaatagccaggctgctaacatcagaagcgggtggaagaacatcttcgccgtgtttcaccaggctgccagcgaccacgatgggaatatagtagaacttgcctttcaaaccacgtgccacatcgtcacaactattttccagcaccatttccctgctgccatcgactccttccaagacgctgttaagtgtctatcagaatttgcttgcaacgcggcttttcctgacacctctatggaggctatccgtttgatcagattttgcggcaagtacgtttcagagcgtcctcgcgttttacaggaatatacctctgatgatatgaacgttgctccgggagatcgcgtctgggtccgtggctggttcccaattctgtttgagctgtcttgtataatcaacaggtgcaagctggatgtccgcacccggggattgacagtgatgtttgaaattatgaagagttacggccacacattcgagaagcattggtggcaggacctatttagaattgttttcaggatcttcgataatatgaagttacccgagcagctttcagagaagagcgaatggatgaccaccacttgcaatcacgcactatacgcaatctgtgatgtttttacacagttctatgaagccctgaacgaggtgctactctcagacgtattcgctcaacttcagtggtgtgtgaagcaggataatgaacagctggctcggtccggtactaactgcctggagaatctggtcatttccaacggcgagaaatttagcccggaagtatgggacgagacttgtaattgcatgctggatatcttcaagactacaattccccatgttttgttgacatggaggcctgtaggaatggaagaagatagtagcgaaaagcacctggatgtagacctggacaggcaatcccttagtagtatagacaagaaccccagcgaacgaggccaaagtcagctgagcaatccaactgatgacagctggaaaggcagaccttacgctaatcaaaagcttttcgcgtccttgctcataaagtgcgttgtccagctggagctgatacagaccattgataacatcgtgttctacccggcaacgtctaagaaagaggacgcagagcacatggtggcggcacagcaggataccctggacgctgacatacatattgagacggaggatcagggcatgtataaatacatgtcttcccagcacctgttcaaactgctggactgcttgcaagaaagccatagtttctcgaaagcctttaactcaaactatgaacaacgcaccgtcctgtggcgggcaggtttcaagggcaaaagcaagcccaatctgttaaaacaggaaacctcttccctggcttgttgcctccgcattctcttccggatgtatgtggacgagaacagacgcgattcctgggaggagatccagcagcgactcctgacagtgtgttcggaagctctggcatacttcatcaccgtgaactccgaaagtcatcgcgaagcatggacatcactgctgctcctactgctcacaaagaccctcaagatcaatgatgagaaattcaaagctcacgcatccatgtactatccatacctgtgcgagatcatgcagtttgacctcatcccggagctccgagcggttttacgaaagtttttcctccgtataggggtggtgtacaaaatttggattcctgaagagccctctcaggtgccagctgctctgtctccagtgtggta

SEQ ID NO: 213780 - DNA, 2499 bp, synthetic construct
  misc_feature 1..2499: note = Description of Artificial Sequence: Synthetic coding sequence
  source 1..2499: mol_type = other DNA
atgcaggagtcacagaccaagtcaatgtttgtgtctcgcgcattagaaaaaatcttggccgacaaagaggtgaaacggcctcagcactctcagcttcgacgcgcatgccaggttgcccttgacgagattaaagctgagatagagaaacagcgacttggaactgcagctccccctaaggcaaattttatcgaagcggataagtactttcttccttttgaattagcgtgtcagtctaagtcaccaagagtcgtgtccaccagcctcgattgtcttcaaaaacttatcgcttatggacacatcacggggaatgcccctgatagtggcgcacctggcaaaaggttaatcgacagaatcgttgagacaatatgtagttgctttcagggaccccagacagacgaaggtgtgcagctgcaaatcattaaggctctgcttactgcagtgaccagcccccacattgaaattcacgagggcacgattctgcagaccgtgaggacctgctataatatatacctggcctctaagaatctgattaatcagacaacggctaaagccactctcacgcagatgctgaacgtaatttttactcgtatggaaaatcaggtgctgcaggaggctcgtgaactggagaaacccatacagagtaagcctcagtctccggtgatacaggctgccgctgtgtctcccaaattcgtgagactaaagcactcacaggcccagtcaaagccgaccacgcccgagaagactgacctgacgaacggggagcatgcacgctctgactctggtaaagtctcgaccgagaacggtgatgctcccagagaaaggggatccagtctctcaggcactgacgatggtgcccaggaggtcgtcaaggatattctggaggacgtcgtgacttcggcaattaaggaggctgcagaaaaacatggattgacagagccagagcgggtcctgggagagctggagtgtcaggaatgtgccatccccccaggagtggacgagaactctcagaccaacggaatagctgatgataggcaaagtttgtcgagcgcagataatctggaatccgatgctcaaggccaccaggtggccgcaaggttcagccacgtacttcaaaaagacgcattcctggtgtttcgctcattatgcaagttatccatgaagccactaggggagggacccccagaccccaaatcccatgaacttcggtctaaagtagtgagcctgcaactcctgctttctgttctgcagaacgcaggacccgtctttagaacacacgagatgttcattaacgctattaagcagtatttgtgcgtagcattgtcaaagaacggggtgagcagtgtgccagacgtgtttgagctgagtcttgctattttcttgaccctgctgtctaattttaagatgcaccttaaaatgcagatcgaggtgtttttcaaggaaatttttctgaacatactggaaacctcaacaagttctttcgaacaccgctggatggtgatccaaacactgactcgcatttgtgccgacgctcaatgtgttgtggacatttatgtgaactacgattgcgatctcaatgctgcaaacatatttgaacgccttgttaacgatctgtccaaaatcgcccagggacgcagcggccatgaacttggcatgacacctctgcaggaactcagcctccggaaaaagggtcttgagtgcttggtgtccatcctgaagtgtatggtggagtggagtaaagatctatatgtaaatccaaatcatcagacatcactcgggcaggagcgactcaccgaccaagaaataggggacggcaaagggctcgatatggcaagaaggtgctctgtcacctctatggagtctaccgtgagctctgggacacagaccacggtccaggacgacccagaacagttcgaggtcataaagcaacagaaggagattatcgagcacggcatcgaactgtttaataagaaaccgaaacggggaatacagtttctgcaggaacaggggatgcttgggaccagcgttgaggacattgcccagttcctccatcaagaagaacgcctcgattcgactcaagtgggcgacttcctgggcgatagcgccaggttcaacaaagaggtgatgtatgcctacgtggaccagcttgatttctgtgaaaaggaattcgtatcagctttgagaaccttcctggaggggttccgactgcctggggaagcacagaagattgataggctgatggaaaagttcgcggctaggtacatagaatgcaatcagggccagacactcttcgcgtccgcagacactgcatacgtgcttgcctactccatcattatgctgaccaccgacttgcattcccctcaggttaagaataaaatgaccaaggagcagtacatcaagatgaaccgtggaatcaacgacagcaaggacctccctgaagagtacctctcaagcatctacgaagagatcgagggaaaaaaaatagctattaaaaagaattag

SEQ ID NO: 213781 - DNA, 591 bp, synthetic construct
  misc_feature 1..591: note = Description of Artificial Sequence: Synthetic coding sequence
  source 1..591: mol_type = other DNA
atgggctcagttaactctaggggacataaagcagaggcccaggtggtcatgatggggctggattctgcagggaaaaccactttattatataagctaaagggccaccagctcgtagaaaccctgcccacagtgggctttaatgttgagcctctgaaagctccgggtcacgttagtctgacactctgggatgtgggtggtcaggcaccactccgcgcttcatggaaggattacctggagggcaccgatattttggtgtacgtgctcgatagcacagacgaggcacgtttacccgagtcagcagcagagctgacggaagtcttgaatgacccgaacatggcgggagtcccctttcttgtactggccaacaaacaggaggccccagacgcccttcccctgcttaaaatccgcaaccgcctcagcctcgaaaggtttcaggaccactgctgggaactccgtgggtgctctgctcttactggcgagggcctgcccgaagccctccagagcctgtggtctcttctcaaatcacggagctgcatgtgtctgcaggccagagcccatggcgcagaacggggtgactctaaacggtcttag

SEQ ID NO: 213782 - DNA, 966 bp, synthetic construct
  misc_feature 1..966: note = Description of Artificial Sequence: Synthetic coding sequence
  source 1..966: mol_type = other DNA
atgttttcactcatggctagttgttgtgggtggtttaaacgctggcgggagccagtaaggttggctaataagcaagacaaggaaggggcactgggagaggccgatgttatcgagtgtctgagtctggagaagctagtcaatgaacacaaatgtctgtgccagatcgagccatgttctgccattagtggatacggcaagaagattgacaaaagcatcaagaaggggctttactggctgctccacgtcattgctcgagactttgacgcgctaaatgagaggatccagaaggaaaccacagagcagcgcgcactcgaggagcaggagaagcaagagcgcgctgaacgcgttcgcaagctgagggaagagagaaagcagaacgagcaggagcaagcagaattagacgggacatcggggttagccgaactcgaccctgagccgaccaaccccttccagcctatcgccagcgtgataattgaaaacgagggaaagttagagagagaaaaaaagaatcagaaaatggaaaaagacagtgatggctgtcacctaaaacacaaaatggagcacgagcagatcgaaacgcaggggcaggtgaatcacaacggtcagaagaataacgagtttggccttgtggaaaattacaaggaggccttgacccagcagttgaaaaatgaggacgaaaccgaccgcccaagcctagaatccgccaatgggaagaagaaaaccaagaaactccgcatgaaacggaaccatagagtggagccattaaacattgatgactgtgccccagaatcaccaactccccctcctcctcctccacccgtgggatgggggacccccaaggttacacggttacctaaactcgagccccttggagaaactcaccacaatgacttctaccgcaaacccctcccaccactcgccgttccccagaggcccaactcagacgcacatgacgtaatttcttag

SEQ ID NO: 213783 - DNA, 1287 bp, synthetic construct
  misc_feature 1..1287: note = Description of Artificial Sequence: Synthetic coding sequence
  source 1..1287: mol_type = other DNA
atgttttcactcatggcatcatgctgcggatggttcaagagatggcgggagccagtgcggaaagttacgttgctcatggtgggccttgacaacgcaggaaaaacagcaaccgccaaagggatccagggggagtacccggaagacgtcgcccctaccgttggattcagcaaaataaaccttcgccaaggtaagtttgaggttaccatcttcgacttaggcggtggtatccggatccgcggtatttggaaaaattattacgccgaatcctacggtgttatttttgtggtagactcctctgacgaagagcgcatggaagagactaaggaggccatgagcgagatgctgagacatcctcggatttccggcaagcccatactcgttttggccaataagcaggataaggaaggtgcgctgggagaggcagacgtcatcgaatgcttgtcattggagaaattagtgaacgagcacaaatgtctgtgtcagattgaaccctgctctgccataagcggctatggcaaaaaaatcgacaagtcaattaaaaaagggctgtattggctgttgcacgttatcgctagagacttcgatgcactcaacgagagaattcagaaggagaccaccgaacagcgagcgctggaagaacaggagaagcaggagagggccgaacgcgtgcggaaactgcgggaagagaggaagcaaaacgaacaggaacaggcagagctggatggcacaagcggcctggccgaactagaccccgaacctacaaatccgtttcagcctattgcgtcggtcataattgagaatgagggcaaactggagagggagaaaaaaaaccagaagatggaaaaggacagtgacggttgccacctgaagcacaagatggagcacgaacagattgagacacaggggcaggtcaaccacaacgggcaaaaaaacaatgagttcgggctcgtggagaattataaggaggctctgacccagcagctgaaaaacgaggacgagacagatagaccatccttggagtccgcgaatggcaagaagaagaccaagaaattaagaatgaagcgaaaccatcgagtcgaacccttgaacatcgacgattgtgcccctgaatcgccaaccccgcctcctccacccccacctgtgggatggggcactcccaaagtgacacgcttgcctaaactggaacccctaggcgagacccaccacaacgacttctacagaaaacccctgccacctttagccgtgccgcagaggcccaactccgatgcccacgacgtgatctcttag

SEQ ID NO: 213784 - DNA, 1287 bp, synthetic construct
  misc_feature 1..1287: note = Description of Artificial Sequence: Synthetic coding sequence
  source 1..1287: mol_type = other DNA
atgttcagtctgatggcatcgtgctgcggctggtttaaaaggtggagggagcctgtgagaaaagtgactcttctgatggtcggcctcgataatgcaggtaaaacagccaccgccaaaggtatccagggggagtatcccgaggacgtggcccctaccgtcggcttcagtaagattaacttgcggcagggaaaattcgaggtgaccatcttcgatctcggtgggggaattagaattagaggcatttggaagaattattacgccgaaagctacggggtcatcttcgtagttgactctagcgatgaagaaagaatggaagagaccaaagaagcaatgtcagagatgctaagacatccccgaatttctggcaagccaatactggtgctcgcaaacaagcaggacaaagaaggggcacttggggaggccgacgttattgagtgcctgtcactagaaaagctggtcaacgaacataaatgtctctgtcagattgagccatgctctgcaatctctggctatggcaagaagatcgataaatccattaagaagggcctctattggctcttgcacgtcatcgctcgagatttcgatgccttgaacgagagaattcagaaagaaacgacagaacaaagagcactggaggaacaggaaaaacaggagcgggcagaacgagtgcggaaactccgggaggaacgcaagcagaatgaacaagaacaggccgaactggacggtacgagcgggcttgccgagttggaccccgagcccactaacccctttcagcctattgcttcagtgattattgagaacgaaggcaagctggagcgagaaaaaaagaaccagaagatggaaaaagacagcgacggttgccatctcaaacacaagatggagcacgaacagatcgaaacacagggacaggttaatcataacggacagaagaataatgagttcggcctggtcgagaattataaagaagctctgacacaacaattaaagaacgaggacgagaccgatagaccttcgttggaatctgcaaatggtaaaaaaaaaaccaagaaactcagaatgaaacggaatcatcgagtggagcccctcaacattgacgattgtgccccagagtcgccaacccccccacctcccccaccgcctgtagggtggggcacccccaaggtgacgcgcctcccaaagctggagccgttgggcgagactcatcacaatgatttttaccgcaaacctctgccgccactcgcagtgcctcagcggcctaattccgacgcccatgatgtgatctcatag

SEQ ID NO: 213785 - DNA, 978 bp, synthetic construct
  misc_feature 1..978: note = Description of Artificial Sequence: Synthetic coding sequence
  source 1..978: mol_type = other DNA
atggaagagaccaaggaagccatgtctgaaatgctgaggcatcccaggatctccggcaaaccaattttggtactggccaacaagcaggataaggagggcgctctaggggaggctgacgtgatcgagtgtttatcattagagaagctggttaacgaacacaaatgcctgtgtcagatcgaaccatgcagcgctataagtggttatggcaagaaaattgacaaatccatcaaaaaaggcctgtattggctgctccacgtcatagcacgcgatttcgacgctctgaatgagcggatacagaaggaaacaactgagcaacgtgctttggaagagcaagagaaacaagagagagccgagcgagtgcggaagctccgagaagagcggaagcagaacgaacaggaacaggctgagctcgacggaacaagcgggttagcggaactggatccagaacccaccaatccattccagccaatcgcttctgtgatcatagagaatgaaggcaagctggaacgggagaagaaaaatcagaaaatggaaaaggacagtgacggctgtcacctgaaacacaaaatggagcacgagcagattgagacccaagggcaggtcaaccataatggtcaaaaaaataacgagttcggactcgtggagaattacaaggaggcactgactcagcagctgaagaatgaggatgagaccgatagaccctccctggaatcagctaatggcaagaagaaaaccaaaaaactgcgtatgaagagaaatcaccgcgtggagcccctgaacattgacgactgtgcaccagagagtcccactcctccgccaccaccccctccagtgggctgggggaccccaaaggtgaccaggttgccgaaattggagcctctgggcgagacgcaccataacgatttttacagaaagcctcttccaccactggcagtacctcagagacctaactcagacgcacatgacgtgattagctag

SEQ ID NO: 213786 - DNA, 450 bp, synthetic construct
  misc_feature 1..450: note = Description of Artificial Sequence: Synthetic coding sequence
  source 1..450: mol_type = other DNA
atggaaaaagacagcgatggctgccacttgaagcataagatggaacatgaacaaattgaaacgcagggtcaggtgaaccataacgggcagaagaacaacgaatttggtcttgtagaaaattacaaggaagccctcacccaacagttaaaaaacgaagatgagaccgatcgcccttcattagagtcagctaatggtaagaagaaaacaaagaaattgcgcatgaagcgtaaccatagggtcgaaccattgaacattgacgattgtgccccagagtcacccacccctcctcccccacccccaccagtcgggtgggggactcctaaagtgacccggctccccaaactagaacctctgggcgaaacgcatcacaacgatttctataggaaaccactcccaccccttgcggtacctcagagacctaactcagacgctcatgacgtgatcagctag

SEQ ID NO: 213787 - DNA, 579 bp, synthetic construct
  misc_feature 1..579: note = Description of Artificial Sequence: Synthetic coding sequence
  source 1..579: mol_type = other DNA
atgggctctttaggctccaaaaatccgcaaactaagcaagctcaggtcctgctgctgggcctggactccgccggtaaaagcaccctcttgtacaagctgaaactggctaaggatatcaccactattcccaccatcgggttcaatgtggagatgattgaattagaaaggaacctgagtcttactgtgtgggatgtgggtggccaggagaagatgcgcaccgtatgggggtgttattgtgaaaacaccgatggcctggtttatgtggttgacagtactgacaagcagaggctggaggagtctcagcgccagtttgagcatattcttaagaacgagcacataaagaacgtgccagtggtgctgttggccaacaaacaggatatgcccggtgctctcaccgctgaggacatcacccgaatgtttaaagtgaagaaattatgcagcgacagaaattggtacgtgcaaccttgctgcgctcttactggagagggacttgcccagggctttcggaaactgacaggctttgtcaaaagccacatgaagagcagaggggatacactggcattttttaagcagaattag

SEQ ID NO: 213788 - DNA, 555 bp, synthetic construct
  misc_feature 1..555: note = Description of Artificial Sequence: Synthetic coding sequence
  source 1..555: mol_type = other DNA
atggggcttctcactattctcaaaaagatgaagcagaaggaacgggagcttcgcctgctgatgttgggtctggacaatgccggaaagaccaccatcctaaaaaagttcaatggggaggacattgatacaattagtcctacgctgggcttcaacattaagaccctggaacaccgtggtttcaagctgaacatctgggatgtggggggtcagaagagccttcggtcctattggagaaattatttcgaaagtaccgatggccttatctgggtggtggattctgcagatagacaacgaatgcaggactgccagcgggagttacagagcctgctcgtagaagagcgacttgctggcgctaccctcttgatctttgctaacaaacaggatcttccgggagcattatcttccaacgcaattagggaagtgttggaattagatagtattcgtagccaccattggtgcatccaagggtgctctgccgtcactggggagaacctcctgccaggcattgattggctgcttgacgacattagtagcagaatattcactgctgactag

SEQ ID NO: 213789 - DNA, 555 bp, synthetic construct
  misc_feature 1..555: note = Description of Artificial Sequence: Synthetic coding sequence
  source 1..555: mol_type = other DNA
atgggactgctgacgatccttaagaaaatgaagcagaaggagcgtgaattacgtctactgatgttaggcctggacaatgcgggaaaaaccaccattttgaagaaatttaatggggaggatatcgataccatttcaccaacactcgggttcaatatcaaaactcttgagcatagaggctttaagctgaatatatgggacgtgggaggacagaaatcattgcgtagttactggcgaaactactttgagagtaccgacggccttatatgggtggtggacagtgccgaccgccagagaatgcaagattgccagcgagaactgcagagcctgctggtagaagaacgccttgctggcgctacgcttcttatttttgccaataagcaggacttgcctggagcactttcctccaatgctatccgggaggtactggagttggactccatccggtcccaccactggtgcatccagggctgttccgccgttaccggggagaatctactacccggtatcgattggctgctcgacgatatctcaagcaggatatttacggctgattag

SEQ ID NO: 213790 - DNA, 474 bp, synthetic construct
  misc_feature 1..474: note = Description of Artificial Sequence: Synthetic coding sequence
  source 1..474: mol_type = other DNA
atgggcctgcttactatcctgaagaaaatgaagcaaaaggaacgagagctccgcctgcttatgctgggcctggataacgcaggcaaaacgaccatcctcaagaaatttaatggcgaggacatagataccatatcccctacactcggttttaacattaagactctcgagcaccggggattcaaactgaatatatgggatgtcggcggtcagaagtcattacggagctattggcgaaactacttcgaaagcaccgacgggttgatctgggtagtggattctgccgatcgccagagaatgcaggattgccagagggagctccagtcactgttggtggaagaggtcctagaattggacagcataaggtcccaccactggtgtattcaggggtgtagcgcagtcaccggagaaaacttactgcctggtatcgactggcttttagatgatatttcatcgcggatttttacagccgactag

SEQ ID NO: 213791 - DNA, 549 bp, synthetic construct
  misc_feature 1..549: note = Description of Artificial Sequence: Synthetic coding sequence
  source 1..549: mol_type = other DNA
atggggttgctgagcatccttcgtaaattaaagagcgctcccgatcaggaggtgcggattctcctgctgggcctggacaatgctggaaagactaccctcctgaaacagctcgcgtcagaggacatctcacatatcaccccaacccaaggcttcaatatcaaaagcgtgcaatcacaaggtttcaaactcaacgtctgggacatcggaggacagaggaaaatacgaccgtattggaagaactatttcgagaatacagacatcctgatctacgtaatcgatagcgccgataggaagcgttttgaggagaccgggcaagaattagcagagctcttggaggaagaaaagctttcgtgcgtgccagtactcatatttgcaaataaacaagatttgcttaccgccgctccagctagcgagattgctgagggcctgaacctgcatacgatacgtgacagggtttggcagatacaatcgtgttctgccctcaccggggagggcgttcaagacggaatgaattgggtatgtaagaatgtcaatgccaagaagaagtag

SEQ ID NO: 213792 - DNA, 606 bp, synthetic construct
  misc_feature 1..606: note = Description of Artificial Sequence: Synthetic coding sequence
  source 1..606: mol_type = other DNA
atgggcaatcatctgacagaaatggcaccgactgctagctcttttctgccgcattttcaggctctgcatgtggttgtcattggactggatagcgccggtaagacttcactgttataccgcctgaagttcaaggagtttgtgcagtccgtgccaactaaaggcttcaataccgagaagatccgggtcccactcggcggtagcagaggtattactttccaggtgtgggatgtagggggtcaggagaaactgcggccactctggcgtagctacacacggagaaccgacgggctggtattcgtggtggacgcggctgaggctgagcggctggaggaggccaaagtagagctgcaccggatatctcgcgcttcagacaatcagggagtgcctgtgcttgtgctggctaataagcaggaccagccgggagcactgtccgcagctgaagtcgagaaacgcctggctgtcagagagcttgcggcagccaccctgacgcacgtgcaaggttgcagtgccgtggatggcctgggccttcagcagggactggaacggctctacgaaatgatcctaaaaaggaagaaagcagctcgcggaggtaagaagcgccgatag

SEQ ID NO: 213793 - DNA, 561 bp, synthetic construct
  misc_feature 1..561: note = Description of Artificial Sequence: Synthetic coding sequence
  source 1..561: mol_type = other DNA
atggggctcttagaccgcctctcagtcctcctgggtctgaagaagaaggaggtccatgtcctctgtctcggactggacaactccggcaagaccaccatcattaacaaattgaaaccttccaacgcacagtcccagaatatcttaccaaccataggcttttcaatcgagaagttcaaatcatcttctttgtcatttaccgttttcgacatgagcggacagggacggtaccgtaacctctgggagcactactataaggaaggccaagctataatctttgtcatagacagttctgaccgactgcgcatggtggtggcaaaagaggagttggataccctgttgaaccatccggatattaagcaccgaagaatccctattctgttcttcgcgaataaaatggacctgcgcgacgcggtaacctctgtgaaagtgagccagctactatgtctggagaatatcaaagataaaccctggcacatttgcgcaagcgacgccatcaagggggagggtcttcaggaaggggttgattggcttcaggaccaaattcagactgtgaaaacttag

SEQ ID NO: 213794 - DNA, 561 bp, synthetic construct
  misc_feature 1..561: note = Description of Artificial Sequence: Synthetic coding sequence
  source 1..561: mol_type = other DNA
atgggcctgctggatcgtctgtcagtattgcttgggctgaaaaaaaaagaggtacacgttttatgccttggcttagacaattctggaaagaccacaattatcaacaaacttaagcctagtaacgctcagagccaaaacattctacctacaatcggttttagtatcgagaagtttaaatcatcttctctgagctttactgtgttcgacatgtctggacagggtagatacaggaatctgtgggagcattactataaagagggccaggctattattttcgttattgatagctctgaccgcttgcgtatggtggttgccaaagaggagctggacacgctgcttaaccatcccgacattaaacatcgacgtatcccaattctgttctttgcgaacaaaatggacctgagagatgccgtgacctcagtgaaagtgagtcagctcctgtgtctggagaacattaaagacaagccttggcatatctgtgcctcggatgccataaaaggcgaaggcctccaagaaggcgtcgactggctgcaggatcagattcagacggttaagacttag

SEQ ID NO: 213795 - DNA, 366 bp, synthetic construct
  misc_feature 1..366: note = Description of Artificial Sequence: Synthetic coding sequence
  source 1..366: mol_type = other DNA
atgggcctcctcgatcgactatctgtgttgctgggactcaaaaagaaggaggtgcacgttctgtgcttgggtctggacaactccggcaagactaccatcattaataagttgaaaccaagcaatgcgcagagtcagaacattctgcctaccatcggattctccattgagaagttcaagagcagctctctaagcttcaccgtgttcgacatgagcggtcaaggacgctatcgcaatctgtgggagcattactacaaagaggggcaagccatcatcttcgtgatcgacagttctgaccgcctgcgcatggtggttgccaaagaggagctcgatacactcctgaaccaccctgacatcaagcaccggtag

SEQ ID NO: 213796 - DNA, 561 bp, synthetic construct
  misc_feature 1..561: note = Description of Artificial Sequence: Synthetic coding sequence
  source 1..561: mol_type = other DNA
atgggccttcttgaccggttgagcgtcctgctgggtctgaagaagaaggaagttcacgtgctttgccttggcctggacaatagcggcaagactacgataatcaataagttaaaaccttccaatgcacagagccagaatattttgcccacaattggctttagcatcgagaaatttaagtccagttcactgagctttacagttttcgacatgtcaggccaggggagatacagaaacctgtgggagcattattacaaggagggtcaagccatcatcttcgtgatcgactcatccgatcgactcagaatggttgtagcaaaagaggaactggatactctcctaaaccatccagatatcaaacatcgtagaataccaatcctcttctttgcgaacaagatggatctaagggatgctgtgacatctgtgaaagtctctcagctcctctgcttagaaaatatcaaggacaaaccgtggcacatctgcgcctcagacgccattaaaggagaagggctgcaggaaggagtggattggttacaagaccagattcagacagtgaaaacctag

SEQ ID NO: 213797 - DNA, 561 bp, synthetic construct
  misc_feature 1..561: note = Description of Artificial Sequence: Synthetic coding sequence
  source 1..561: mol_type = other DNA
atgggactgctggataggttgtcagtgctgctgggactcaaaaagaaagaggtgcacgttctatgtctggggttggataacagcggaaagaccacaatcatcaacaagctaaagccctccaatgctcagtcgcaaaacatcttaccaacgatcggcttttctattgaaaaatttaagtcttcctccctgtcctttacagtgttcgatatgagcggtcagggacggtatcgcaacttgtgggagcattactacaaagaaggacaagcaattatttttgtgattgacagcagcgacaggttgcgcatggtcgttgcaaaagaagagcttgacacattgcttaatcacccagacattaaacacaggcggatcccaatcttgttctttgctaacaagatggatctgagagacgctgtgaccagcgtgaaagtcagccaactgctttgcttagaaaatatcaaggacaaaccctggcacatttgcgctagtgatgcgattaaaggcgagggtttgcaggagggcgtggattggttgcaggatcagatacagactgtgaaaacctag

SEQ ID NO: 213798 - DNA, 564 bp, synthetic construct
  misc_feature 1..564: note = Description of Artificial Sequence: Synthetic coding sequence
  source 1..564: mol_type = other DNA
ctgcggccaacatggaaggcccttagccaccctgcctggccggaagaaaagaataaacagattcttgtgctgggtctggatggcgcaggcaagacttcagtactgcatagcctggctagcaacagggtgcaacatagcgtggcgcctacccaagggtttcacgctgtgtgcataaacactgaagattcacaaatggagttcttagagattgggggtagtaaacccttccgtagctattgggagatgtacctcagcaaaggcctgttactcattttcgtggttgactcagctgatcatagcagactgccagaggctaagaaatatctacatcaactgattgccgcaaatcctgttctgcctcttgtggtattcgccaacaagcaagacctggaagccgcatatcacatcaccgacattcacgaggcgctggcactgtcggaggtaggaaatgacagaaaaatgttcctgtttgggacctacctcacgaagaatggctctgagatcccaagcaccatgcaggacgccaaagacttaatcgcccaacttgccgcagatgtgcagtag

SEQ ID NO: 213799 - DNA, 1083 bp, synthetic construct
  misc_feature 1..1083: note = Description of Artificial Sequence: Synthetic coding sequence
  source 1..1083: mol_type = other DNA
atggaaagagccggtcctgcaggcgaagagggaggagccagagaaggacgactgcttccacgcgctcccggagcctgggttctgcgggcttgtgctgaacgagccgcactagaggttggagccgctagcgcagacactggagtgcggggttgtggagctcgcggtccagccccactgctggcctccgccggaggaggccgagctcgggatggcacctggggtgtgaggacaaagggctccggtgccgctttgcctagtcggcctgcctcccgcgctgcacccagaccagaagcatctagccctccgcttcctctcgagaaagccagaggcggattgagcggtccgcagggcggtcgcgcacgtggtgccatggctcatgtcgggagcagaaagcgaagccgtagcagatcacgatcccgcggacgagggagcgagaagcggaaaaaaaagtcccggaaggacactagtcgaaactgctccgcatcaacaagccaaggtcggaaagcgtccaccgctcccggagccgaggccagcccgtccccttgcattacagaacgttcaaagcagaaggccagacgcagaactagaagttcatcttcaagttcttcatcttccagcagttctagctctagttctagctcttcctcctcaagtagctcttctgatggccgaaagaagcgtggaaagtacaaggacaaacggagaaagaagaagaaaaagcggaagaagctaaagaagaagggaaaagaaaaagctgaggcccagcaggtagaggctctgccaggtcccagcctagatcagtggcacaggtcggctggtgaggaggaggacggcccagtcctgaccgacgagcagaagagcagaatccaggcaatgaaaccaatgaccaaggaggaatgggacgccagacagagtatcatccgtaaggtcgtggatccagaaaccggccgtacccgtctcattaagggcgatggagaggtgctggaagagattgtcaccaaagagagacacagggagatcaacaagcaagccacccgcggtgattgcctggctttccaaatgcgggcaggcttgctgccctag

SEQ ID NO: 213800 - DNA, 1017 bp, synthetic construct
  misc_feature 1..1017: note = Description of Artificial Sequence: Synthetic coding sequence
  source 1..1017: mol_type = other DNA
atggaaagggcagggccagccggtgaggagggcggagcccgtgagggcaggcttctcccgagagccccaggggcatgggtcctacgggcatgcgccgagagagccgctctggaggtgggtgccgcatccgccgatacaggagtccgcggatgcggcgctcgcggtcctgccccactgcttgcctcagccggtgggggaagagctcgagatggcacatggggcgtgcgcactaaaggatctggagcagccctccccagcaggccagccagccgagcggctcctaggccggaggcttcctcaccccctctcccacttgagaaggccagggggggactctccggtccacaggggggaagggctcgcggagccatggcacacgtgggctcaagaaagcgatccagatcccgatctcgctcacgcggacgtggcagcgagaaaagaaaaaagaaaagccgcaaagatacctctagaaattgctccgcatctacatcacaggaaagatccaagcagaaagcccgacggaggactcgctcgtcctcgagtagctccagttcttcttccagttctagctcatcttcttcctcgagctcctcgtccagttccagtgatggaagaaagaaaagaggaaaatataaagacaagcgacgcaaaaagaagaagaaaaggaaaaagctgaagaagaagggaaaggagaaagccgaagcccagcaggtggaggcccttcccggaccatctctggaccagtggcatcgttccgccggagaggaagaagacgggccagtcctgactgacgaacagaaatcacggatccaggccatgaagcccatgacaaaagaagagtgggacgccaggcagtccattatcaggaaagtcgtggaccctgaaaccgggcgaactagactgatcaagggcgacggcgaggtgctggaagaaatagttacaaaagagcgtcatcgtgagatcaataaggtgggggtggccccacttcccgctatccgtccacaactgtgtttgtag

SEQ ID NO: 213801 - DNA, 1059 bp, synthetic construct
  misc_feature 1..1059: note = Description of Artificial Sequence: Synthetic coding sequence
  source 1..1059: mol_type = other DNA
atggagagggccggtcccgctggcgaggagggcggtgcacgtgagggtcggctcctgcctagagctccaggggcatgggtactgcgcgcttgcgcggagcgggctgcactagaagttggagccgcttctgcggatacaggagtgagaggctgtggtgccaggggcccagcaccgctgttggccagcgctggtggcggaagggcacgggatggtacttggggggtgagaaccaagggaagcggcgcagctttgcctagtcgcccagctagtagggctgcaccaagacccgaggctagctctcccccactgccattagagaaggcgcgtggcggtctgagtggccctcagggcggacgggcacgaggcgctatggcccacgtcggaagtaggaagaggtcaaggagccggagccggagtaggggtcgcggatcagagaagaggaagaaaaagagtaggaaggacacctcaagaaactgtagtgcatctacttcccagggacgtaaggcatctacagcccctggagccgaggaaaggagcaaacagaaagcacgaaggagaacgagaagttcctcgtcctccagttccagttcatctagcagctcatcttccagctccagctcctcaagttctagctcttcagatggtcgcaagaagagaggaaagtacaaagacaagcgccgtaaaaaaaagaagaaacggaagaagcttaagaagaaggggaaggagaaggctgaagctcagcaggtcgaggcactgcctggaccatccctggatcagtggcatcggagcgctggcgaagaggaagatgggcctgtcctgacggacgagcagaagagccggatccaagcaatgaaaccgatgacaaaggaagaatgggacgctaggcagtcaatcattcgcaaggtcgtggaccctgagactggcaggaccagactgatcaaaggcgatggcgaagttctggaagagatcgtgacgaaagaaagacaccgtgagattaataagcaggctacacggggtgactgtctcgccttccagatgcgcgctggtctgctaccctag

SEQ ID NO: 213802 - DNA, 1026 bp, synthetic construct
  misc_feature 1..1026: note = Description of Artificial Sequence: Synthetic coding sequence
  source 1..1026: mol_type = other DNA
atggaaagggccggtccagctggcgaggagggcggtgcccgtgaaggacgcctgttaccgcgagccccaggcgcttgggttctgagagcctgtgccgaaagggccgctctcgaggtgggcgcagcttcagcagataccggagttagggggtgcggggcacgaggtcccgctcccctgctcgcctcggctggcggtggtcgcgctcgcgatggaacctggggggtgaggacaaagggctccggtgccgctctgccgtctcgaccagcatcaagggccgcacctaggccagaggccagtagtcctcctttacctcttgaaaaggcacgtggaggcctgtctgggcctcaggggggaagggctaggggggctatggcgcatgtgggcagtaggaagcgatcacggagtcgtagtagatctcgtggccgtggtagcgagaagcgaaagaaaaagtcgagaaaggacacgagccgcaactgtagtgcctcaacttctcaggaaagatcaaagcagaaagcccgtcgacgtacccggtcaagctcctcctccagcagctctagctcctcctcatcctcttctagcagcagttctagcagtagctcaagttctgacggaagaaagaagagagggaagtacaaggacaagcgacgcaaaaaaaagaagaagaggaaaaagctgaaaaaaaaaggtaaggagaaggcagaagctcagcaagtggaggccctccccggacctagcctagaccagtggcatagatctgccggagaagaagaggatgggccagtgctcacagacgaacagaagtccaggattcaagcaatgaagccaatgaccaaagaggaatgggatgctcgtcagtccataatcaggaaggtggtggatccagagaccgggagaacccggctcatcaagggcgacggagaggttttggaggaaattgtgaccaaggaacggcatagagaaatcaataagcaggccaccagaggggattgcttggccttccagatgcgggctggtcttctgccctag

SEQ ID NO: 213803 - DNA, 567 bp, synthetic construct
  misc_feature 1..567: note = Description of Artificial Sequence: Synthetic coding sequence
  source 1..567: mol_type = other DNA
atggacgtcaatatagcgccactgagggcttgggatgatttcttccctggctccgacaggtttgcaaggccagacttcagggacatttccaaatggaacaaccgtgttgtgagcaatctgctgtattatcagacgaactaccttgttgttgctgctatgatgatcagcatagtgggattcctcagtcctttcaatatgatccttggaggcatagtagtggtgcttgtcttcacagggttcgtttgggctgcccacaacaaggacgtgctgcgacggatgaagaaaaggtatccaacaacattcgtgatggtggttatgctggctagttacttcctcataagcatgtttgggggagtcatggtttttgtgtttggcatcactttcccattgctgctgatgtttattcatgcttcattacgattaagaaatcttaaaaacaagctcgaaaacaaaatggaaggcattggactgaaacgaacacccatggggattgtgctcgacgcactggaacaacaggaggagggtatcaaccgtctgacagactacataagcaaagtgaaggaatag

SEQ ID NO: 213804 - DNA, 411 bp, synthetic construct
  misc_feature 1..411: note = Description of Artificial Sequence: Synthetic coding sequence
  source 1..411: mol_type = other DNA
atggacgtcaatatcgccccacttcgagcctgggatgattttttccccggatcggatcggttcgcgcgtccggacttcagggacatctcaaagtggaataaccgggtcgtgtccaacctcctctactatcaaactaactacctcgtggttgcagctatgatgatttctattgtgggctttctaagcccgtttaatatgatcctcggcggaattgttgtggtcctggtattcacaggattcgtgtgggccgcacacgatgtgaggtatggcggtcacgtcggcgagttgtttccttacttgcacgtctggagaagtcacgggctctgtgtctggcactatttcagctttgcggtcgatgtgtatccctgtatcgtggaaaccagtgagccacaggaacagacgggagaatag

SEQ ID NO: 213805 - DNA, 819 bp, synthetic construct
  misc_feature 1..819: note = Description of Artificial Sequence: Synthetic coding sequence
  source 1..819: mol_type = other DNA
atggtgcgctgttacgtggaaatcgtggaaaagctgcccgaaagaagaccagacccagccaccattgaagggtgcgctcagctgaaaccgaataattacctgctagcgtggcacaccccattcaacgagaagggctcgggattcggggcagccactaaagccatgtgcatcggcctgcgttattggaagcctgagcgcctggagactttaatagaagtgagtgtggaatgcggaagaatgacgcacaatcacccaactgggttcctgggtagcctctgcaccgcgttgttcgtcagcttcgcagcccagggtaagcccctcgtgcagtggggcagagatatgctccgcgcagtgccactggctgaggaatattgccggaaaaccatcagacacacggcagagtaccaagagcactggttttatttcgaagcgaaatggcaattctatctagaggagcgtaaaatctcaaaagattctgaaaataaggccatcttcccagacaactacgacgcagaagaaagagagaagacctacaggaaatggtctagcgaagggagaggaggccgtcgtggccatgacgctcccatgattgcttacgatgccctactagcagcaggcaattcatggaccgaactctgtcaccgcgcaatgttccacggaggagaaagcgctgccacagggactatcgcgggatgtctcttcggtcttctgtatgggcttgacctggttcccaaaggactctaccaggatctggaagataaagagaagcttgaggatctaggggctgctctgtatagattgtctacagaagaaaaatag

SEQ ID NO: 213806 - DNA, 1065 bp, synthetic construct
  misc_feature 1..1065: note = Description of Artificial Sequence: Synthetic coding sequence
  source 1..1065: mol_type = other DNA
atggaaaaatttaaagcggcaatgctgctcggctctgtcggggacgcccttggatatcggaatgtatgtaaagaaaattcaaccgtgggaatgaaaatccaggaagagctgcaaagaagcgggggactggaccacctggtacttagtccgggtgagtggccggtgtctgataatacaatcatgcatatcgccaccgctgaagccttaacaacggactactggtgtctagacgacctgtatcgagagatggttaggtgttatgtggaaattgtggaaaagctgccggaacggcgacccgatccagccaccatcgagggttgtgcacaactgaagccgaacaactaccttttggcctggcacacaccattcaacgaaaaagggagcggcttcggggcagccaccaaggcaatgtgtatcggcctccgctattggaagcccgaacgtcttgagaccttgatcgaggtgagtgtggagtgtggacgcatgacacacaatcaccccacaggattcctagggtcgctctgtacagcgctgttcgtttcatttgccgcacaagggaagcccctggtgcaatgggggagagacatgcttcgggctgtcccactggccgaagagtactgccgtaaaactattagacacacggccgaataccaagaacactggttctattttgaagcgaagtggcagttctaccttgaagaaagaaaaatttctaaagatagcgagaacaaggcgatttttccagacaactacgacgcagaagaaagggagaaaacatacagaaaatggtcctcagaaggcagagggggacgtaggggccatgatgccccaatgatcgcctacgacgcacttcttgctgcaggcaattcgtggaccgagttatgtcaccgcgctatgttccacgggggagagtccgctgccacgggaactattgcaggatgtctgttcggactgctctacggccttgacctggtgcctaagggcctgtatcaagaccttgaggacaaagagaagttggaggacctgggtgcggctctgtaccgtctgtctactgaggagaagtag

SEQ ID NO: 213807 - DNA, 531 bp, synthetic construct
  misc_feature 1..531: note = Description of Artificial Sequence: Synthetic coding sequence
  source 1..531: mol_type = other DNA
atggtccggtgctatgtcgagatcgtcgaaaaacttcctgagaggcgacctgaccccgctaccatcgaaggatgtgctcagttaaaacctaacaactacctacttgcttggcacactccctttaatgagaagggcagcggcttcggagcagccactaaggctatgtgcatcgggctgcggtactggaaacctgagcgccttgaaaccctgattgaagtgtccgtggagtgtggccgtatgacccacaaccatcctactgggttccttggttcgctgtgtaccgcattgttcgtcagtttcgcggctcaggggaaacctctagtccagtggggtagagatatgctccgcgcagtgcctctggctgaggagtactgtcggaaaaccatccggcacactgctgagtatcaggagcactggttttactttgaggccaagtggcagttttacttggaggagaggaaaatctctaaggattccgaaaacaaagccatcttcccggataactacgacgctgaggagagagaaaaatag

SEQ ID NO: 213808 - DNA, 1092 bp, synthetic construct
  misc_feature 1..1092: note = Description of Artificial Sequence: Synthetic coding sequence
  source 1..1092: mol_type = other DNA
atggcagctgccgctatggccgcagccgctggaggcggagcaggggctgctaggagcctttcgcggtttagagggtgccttgcaggagcacttctgggcgattgcgtgggcagcttctacgaagcacacgataccgtcgaccttacctctgtcctccggcatgtgcagagcctggaacctgacccaggtacccctggatccgaacgcacagaagcgctctattacactgatgatactgcgatggccagagctctcgtgcaaagcttactcgccaaggaggcctttgacgaagttgatatggcccatcgtttcgcccaagagtataagaaagatcctgaccgcggttacggcgctggcgtggtgacagtgttcaagaagttacttaatccgaagtgcagggacgtctttgagcccgcacgcgcacaatttaacggaaaagggagttatggaaatgggggagcaatgagggtcgccggtataagcctcgcctacagctcggtgcaggatgtgcagaagttcgcgaggctgtcagcccagcttacccatgcgagttcactgggctacaacggcgcaattctgcaagctttggctgtccacctcgccctacaaggcgaatccagttccgagcacttcctgaaacagctccttggtcacatggaagacctggagggagacgcacagtctgtgcttgacgctagagaactggggatggaagagcggccttactcctcacgtcttaagaagatcggcgaactgctcgaccaggcttctgtgacccgagaagaggtagtcagtgagctgggaaatggtattgcggctttcgagtctgtcccaacagccatctactgtttcttgaggtgcatggagcccgatcccgagataccatccgcttttaatagcctgcagagaaccctcatttattccatttctctgggaggagacactgacacaattgcgacaatggcaggagcaatagcgggagcctactatgggatggatcaagtgcctgaatcgtggcagcagtcttgcgaggggtacgaagagacagacattttggcgcagagcctccacagagttttccagaagagctag

SEQ ID NO: 213809 - DNA, 852 bp, synthetic construct
  misc_feature 1..852: note = Description of Artificial Sequence: Synthetic coding sequence
  source 1..852: mol_type = other DNA
atggccagggctcttgtccaatctctgctggccaaagaagcttttgatgaagtagacatggctcaccggttcgcccaggagtacaagaaggaccccgatcgcggatacggagctggcgtggtgaccgtgttcaagaaactgctcaaccccaagtgcagagatgtattcgaacccgcacgcgcacagttcaacggcaaaggaagctacggcaacggaggggctatgagagtggccggtatctctctggcctattcctctgttcaagacgtacagaaatttgcgcgtctttccgcccagctgactcatgcttcctctcttggctacaacggggcaatacttcaggctttggccgtgcacctcgccctgcaaggcgagagttcatctgagcactttcttaagcaactgctgggccatatggaagacctcgaaggggatgctcagagcgttctcgacgccagagaactgggaatggaggagcgaccctactcctctaggcttaaaaaaattggcgagctgttagaccaggcgagcgtgacgcgcgaagaggtggttagcgagctgggtaacggtatagcggcattcgaaagtgttcccactgccatttattgtttcctgcgctgcatggaacctgaccccgaaattccaagtgcttttaattctctccagcgcacactgatttacagtatctccctggggggagatactgacaccatagcgactatggctggcgctattgcaggggcttactacgggatggaccaagtgccagagagctggcagcagagctgcgaagggtatgaggagacggacatcctcgcacaatccctgcacagggtgtttcagaaatcctag

SEQ ID NO: 213810 - DNA, 630 bp, synthetic construct
  misc_feature 1..630: note = Description of Artificial Sequence: Synthetic coding sequence
  source 1..630: mol_type = other DNA
atgagggttgccggaatttctcttgcctatagtagcgtccaggacgttcaaaagttcgctcggctatcagcccagctcacccacgccagctcactcggatacaatggagcaatactgcaagctcttgcagttcacctagccctgcagggggagtctagctccgagcatttcttgaagcagcttttgggacacatggaagatttggagggcgacgcacagagtgttttagacgccagagagcttggtatggaggagcggccttactctagccgactaaagaaaataggggaactgttggatcaggccagcgtcaccagagaagaagttgtatccgagcttggaaacggcattgcagccttcgaaagcgtaccaactgccatttattgcttcctgaggtgtatggagcctgaccctgagatcccttcggcgtttaactcccttcagcgcaccctgatctactccattagcctcggcggtgacactgacactatagccaccatggccggtgcaatcgctggcgcatattacggcatggatcaggttccagaaagctggcagcagtcctgcgaaggctacgaggaaacggacatcctggctcagtctttgcacagagtgtttcagaagtcttag

SEQ ID NO: 213811 - DNA, 984 bp, synthetic construct
  misc_feature 1..984: note = Description of Artificial Sequence: Synthetic coding sequence
  source 1..984: mol_type = other DNA
atgcaaatgcctgccatgatgtccctgctcctcgtttccgtcggactcatggaggcgttgcaggctcagtcgcaccctatcacacgtagggatctatttagtcaggagatacagttggatatggccttagcttcctttgatgaccagtacgctggctgtgccgctgcgatgaccgccgcactccccgacctcaatcacactgaatttcaagctaaccaagtgtacgcagatagttggactcttgcttcttctcagtggcaggaacgccaggccaggtggcccgaatggagcctctcacctacccgacccagtccgccacccttgggttttagggatgagcatggcgtcgcactacttgcctataccgcaaattccccactccacaaggaatttaatgcagcagtgcgggaggcaggccgatcccgcgctcattacctgcatcacttctcatttaaaactctgcacttcctcctgacagaagcgctgcagttactcggtagtggacagcgcccacctaggtgtcaccaagtgttccggggagtgcacggcctcagattcaggcccgctggcccaagggctacagtgagactaggagggttcgcctccgcttctttaaagcatgtggcagctcagcagttcggggaagacaccttttttgggatctggacttgccttggtgccccaattaaaggatacagtttctttcctggcgaagaagaggttttgattcccccattcgagacgttccaggtgataaatgcctctcgactggcccagggacctgcaagaatttacctgcgcgcattgggaaaacattctacatataattgtgaatatattaaagacaaaaagtgcaagtccggcccttgccacctagataattccgccatggggcagagtcctctgagtgcggtctggagtttgttactgttgttatggttccttgtggttcgagcatttcccgacggccctgggctgctgtag

SEQ ID NO: 213812 - DNA, 1104 bp, synthetic construct
  misc_feature 1..1104: note = Description of Artificial Sequence: Synthetic coding sequence
  source 1..1104: mol_type = other DNA
atgaagactgggcatttcgagatcgtgaccatgttgctcgctaccatgatcctggtagacatttttcaggtgaaagctgaggttctcgatatggcggacaatgcctttgacgacgaatacttgaagtgcacagatcggatggaaattaagtacgtgccccagctgctcaaagaagaaaaagcatctcaccagcagctggacaccgtctgggaaaacgcgaaggccaaatgggccgcacggaaaacccagatcttcctccccatgaattttaaagacaatcatggcatcgctttgatggcctatataagcgaagcccaagagcagacgcccttctatcacctgttttcagaagccgtgaaaatggccggtcaaagcagagaggattatatctacggattccagttcaaagcatttcacttctacttaacacgggcattacaactgctccggaaaccttgtgaggcatcgagcaagacggtggtttacagaacaagccaaggcacgtcgttcacgtttggcggtctgaaccaggccaggttcggtcactttacattagcctactcggccaaaccgcaagctgcgaatgatcagctgacagtactctccatctacacctgtctcggcgtcgacatcgagaatttcctggacaaggagtctgagcgcataacgctgatccccttgaatgaggtctttcaggtttctcaggaaggcgctggtaataacctaatcctgcagagtattaacaagacatgttcccattatgagtgcgcattcctgggaggactaaagaccgaaaactgcatagagaacctggagtactttcagcccatctatgtctacaatcccggagagaagaatcagaaattagaagatcattccgagaagaattggaaactggaagaccatggtgagaagaatcagaagctagaggatcacggcgttaagatcctggagcctacccagattcccgctccaggcccagtgccggtccccggtccaaagagccatccatctgccagttccgggaagctgctgctaccccagttcgggatggtgatcatattaatctccgttagcgccattaatctttttgttgcattgtag

SEQ ID NO: 213813 - DNA, 1137 bp, synthetic construct
  misc_feature 1..1137: note = Description of Artificial Sequence: Synthetic coding sequence
  source 1..1137: mol_type = other DNA
atgaagaccgggcatttcgaaattgtaacaatgctgttggccactatgatccttgttgacatttttcaggtcaaggccgaggtccttgatatggccgacaacgctttcgacgatgagtatctcaagtgcactgaccggatggaaattaagtatgtgccccagctgctgaaggaggaaaaagcgtcgcaccagcaacttgacacggtgtgggagaatgcaaaggctaaatgggccgctagaaaaactcagatttttcttccaatgaactttaaggataatcacggaatcgccctcatggcttatatatcagaagctcaggagcaaacacctttctatcacctctttagcgaggctgtaaagatggctgggcagagtagggaagactatatctatgggtttcaattcaaagcctttcacttttatttgaccagagctctgcagctcctgcgtaagccttgcgaagccagctccaaaaccgtggtgtaccggacaagccaggggacctcatttaccttcggcggtctgaaccaggcaagatttggccatttcacactggcttattcggccaaaccacaggcagccaatgaccagctgaccgtcctgagcatttacacatgtctgggggtggatatcgagaacttcctggacaaggagagcgagcgtatcaccttgatcccactcaatgaggtttttcaggtctctcaagaaggagctgggaacaatctgatcctgcaaagtatcaataagacgtgttcccattatgagtgtgcatttctcgggggtctgaagaccgagaactgcatcgagaacctcgaatatttccagcccatctatgtatataaccctggagagaaaaaccagaaactcgaagaccattcagagaagaactggaagctggaagatcacggtgaaaagaaccagaaactggaagaccatggagtcaagatcctcgaacctacccagatccccgaagataaatcacagggcaacatcaacaatcccacccctggaccagtgcctgtaccgggacctaagtcacacccatccgcatccagcgggaagctcctgctgccacagtttgggatggtgatcattctcatttcagtaagcgctatcaatctcttcgtggccctgtag

SEQ ID NO: 213814 - DNA, 1170 bp, synthetic construct
  misc_feature 1..1170: note = Description of Artificial Sequence: Synthetic coding sequence
  source 1..1170: mol_type = other DNA
atgaaaacaggacacttcgaaatagtcaccatgctcttggctacaatgattttggtggatatcttccaagtcaaagcagaagtgttagatatggcagacaacgcattcgatgacgaatatctgaagtgcactgataggatggagattaaatacgttcctcagctcctgaaggaagaaaaagcgtctcaccaacaactcgacacggtgtgggagaacgccaaggccaagtgggccgctaggaaaactcagatctttctgcccatgaactttaaggacaaccatggaattgccctgatggcatatatcagcgaggcccaggagcagacccctttttaccacctcttttcagaagctgtcaagatggccggacagagtcgagaagactacatttacggctttcagttcaaggcttttcacttctacctgacgcgagcactgcagcttctgcgaaagccttgcgaggcttcttccaagacagtagtatatagaacgagtcaggggacatcgtttacattcggcggtttaaaccaagctcgcttcggacatttcacgctggcttacagcgctaagcctcaggcagccaatgaccaactcaccgtcttgtccatatacacgtgcctcggtgtggacatcgaaaatttcttggataaggaaagtgaaagaatcaccctcatacctcttaacgaagtgttccaagtctcccaagaaggcgcaggtaataatctgattctgcagtcaattaacaagacatgctcccattacgagtgcgctttcctgggaggcttgaaaactgagaattgtatcgaaaatttggaatactttcagcccatttacgtctacaaccccggtgaaaagaaccaaaagttagaggatcatagcgagaagaattggaagttagaggatcatggggaaaaaaatcagaagctcgaggatcatggagtgaaaattttggaacccacgcagattcccggtatgaagattcctgagcctttccctttacccgaagataaaagccaagggaatatcaacaacccaacccccggaccggtgccagtgccaggcccaaagtctcatccatccgcctcaagtggaaagctcttgttgcctcagttcgggatggtgattatcttgattagcgtgagcgccattaacctgtttgtagcgctgtag

SEQ ID NO: 213815 - DNA, 390 bp, synthetic construct
  misc_feature 1..390: note = Description of Artificial Sequence: Synthetic coding sequence
  source 1..390: mol_type = other DNA
atgaagactgggcacttcgagattgtaacgatgctgctcgctaccatgattttggtagacatttttcaggtgaaggcagaggtcctcgacatggcagataatgcctttgacgatgagtacctgaagtgcaccgatcggatggaaatcaagtacgtcccacaattgctgaaagaggagaaagccagtcatcagcagctagacactgtctgggaaaacgcgaaagccaaatgggctgcacgcaagactcagatattcctaccaatgaatttcaaggataaccacggcatagccctgatggcctatattagcgaggcgcaggaacaaacccctttctatcatctttttagcgaggcggtgaagatggccggacagagccgcgaagactactag

SEQ ID NO: 213816 - DNA, 528 bp, synthetic construct
  misc_feature 1..528: note = Description of Artificial Sequence: Synthetic coding sequence
  source 1..528: mol_type = other DNA
atgaaaactgggcacttcgagattgtcaccatgctcctcgccaccatgattctggtcgacatcttccaggttaaggcagaagtcctcgacatggctgataacgccttcgatgacgaatacctgaaatgtacagacagaatggaaatcaagtacgtgccccagcttctgaaagaggagaaggcctctcaccaacagctggatactgtgtgggaaaatgcaaaagcaaaatgggccgcacggaaaacccagatctttctccccatgaatttcaaagacaaccacgggattgccttgatggcctacataagcgaggcacaggaacagactccgttttaccacttgttctcagaggccgtgaagatggctgggcagtctagagaagattatatttacggattccagttcaaggctttccatttctatcttactagggctctacaactcctacggaagccatgcgaggcaagttctaagaccgtcgtgtatcgaacatctcaaggtacgagcttcactttcggcggtctgtag

SEQ ID NO: 213817 - DNA, 609 bp, synthetic construct
  misc_feature 1..609: note = Description of Artificial Sequence: Synthetic coding sequence
  source 1..609: mol_type = other DNA
atgaagaccgggcatttcgaaatagtgaccatgctgctcgcgacaatgattctggtcgatatattccaggtgaaagccgaggttttggacatggcagataatgcttttgacgacgagtacttaaaatgtacagacagaatggaaatcaaatacgttcctcaactcctgaaggaggagaaggcctcacatcagcagctggatacagtctgggagaacgcaaaggccaagtgggccgctaggaaaacccagatttttctccccatgaacttcaaagacaaccatgggattgctctgatggcttacataagcgaggctcaagagcagacccccttctatcacctcttttccgaggccgtaaaaatggccggtcagtcccgcgaagactacatatatggctttcaatttaaggcctttcatttctatctgactcgcgcactacagctgttgcgcaaaccttgcgaggctagctctaaaacagtggtctatcgcacttcgcaggggacaagcttcacattcgggggactgaaccaagccaggttcggtcatttcactttggcctatagtgctaaacctcaagccgcaaacgaccagttgacggttctcagctag

SEQ ID NO: 213818 - DNA, 324 bp, synthetic construct
  misc_feature 1..324: note = Description of Artificial Sequence: Synthetic coding sequence
  source 1..324: mol_type = other DNA
atgaagacaggccacttcgagattgtcaccatgctgctggccaccatgatcctagtcgatatcttccaggtcaaagccgaggtcctcgacatggccgataatgcctttgatgatgagtacctgaagtgcactgaccggatggagatcaagtacgtgccacagctgcttaaggaagagaaagcatcacatcaacagctcgataccgtttgggaaaatgcgaaggccaagtgggccgctcgcaagactcaaattttcctgcctatgaatttcaaggacaaccatggtattgctctcatggcttacattagcgaggcccaggagtag

SEQ ID NO: 213819 - DNA, 456 bp, synthetic construct
  misc_feature 1..456: note = Description of Artificial Sequence: Synthetic coding sequence
  source 1..456: mol_type = other DNA
atgagtggacggggaaagcagggtggcaaagttagagctaaagccaagagccgctcaagccgcgctggactgcaattccccgttggcagggtccatcgacttttacgtaagggaaattacgccgaaagggtcggcgcaggcgctcccgtctatctggcggctgtgttggagtatctgaccgcagagattttggaactggctgggaacgccgctcgggacaacaaaaaaactcgcatcatacctcggcatcttcaacttgctatccggaatgacgaggagctcaacaagctgctcggaaaggtcactattgcccagggaggggtcctcccaaacatacaggcagttcttttaccaatatgtgagcactcggggccaagttctgggaagatccccagcgatcgcgctgagctgggggctggctctgtgtgtgggcatatatttcaaaaggtggagtag

SEQ ID NO: 213820 - DNA, 177 bp, synthetic construct
  misc_feature 1..177: note = Description of Artificial Sequence: Synthetic coding sequence
  source 1..177: mol_type = other DNA
atggggccattaattaatcgctgcaagaagatcctgcttcctacaacggtgcctccagcaaccatgcgtatctggctattgggtgggctgctgccctttctgctgcttctgagtggcctccagaggcctacagagggtagcgaactgccagctaggaacgcctccctgattctgtag

SEQ ID NO: 213821 - DNA, 876 bp, synthetic construct
  misc_feature 1..876: note = Description of Artificial Sequence: Synthetic coding sequence
  source 1..876: mol_type = other DNA
atggctttggccgctctgatgattgcgctgggatcacttggcttacatacctggcaggctcaggctgtgcctatcctgccacttggacttgctcccgacacttttgatgacacatacgttgggtgtgctgaagagatggaggaaaaagctgccccattgctgaaggaagagatggcccaccatgctctcctgcgtgagagctgggaggccgctcaggagacctgggaagacaaacggaggggcttaaccctgccgccagggtttaaggcccagaatggcatcgccatcatggtctacacaaacagctcaaatacactgtattgggagctgaaccaggccgtcaggaccgggggtgggagcagggaactgtatatgcgccactttccgtttaaggccctccatttttacttaatcagggccctccaactattacgaggctcagggggttgctctagagggccaggagaagtagtctttagaggtgtcggaagcttaaggtttgagcctaaaaggttaggtgacagcgtgcgccttggccagtttgcctcgtctagtctagataaggctgtcgcacataggtttgggaacgctacacttttcagtctgaccacttgttttggcgctcctattcaggccttctcagtcttcccaaaagagcgcgaggtactgatccctcctcatgaggtctttttagtgacccgttttagccaggacggcgcacagtcactagtgacactgtggtcttacaatcagacctgcagtcatttcaattgtgcttacttgggaggagaaaaaagacggggatgtgtgagtgcccctggtgccctgggaaccggagatttgcacatgacgaagagacacctgcagcagccgtag

SEQ ID NO: 213822 - DNA, 720 bp, synthetic construct
  misc_feature 1..720: note = Description of Artificial Sequence: Synthetic coding sequence
  source 1..720: mol_type = other DNA
atggcattagctgcactgatgatcgctttaggtagtttaggcctgcacacatggcaagcacaggctgtgccaatcctgccactcggcctggcaccggacacctttgatgacacctatgttggctgcgcagaggagatggaggagaaagccgctccactgctgaaggaggagatggcccaccatgcgctcctgagggagtcctgggaggccgctcaggaaacctgggaagacaagagacgaggtctaaccctccctcccggttttaaggcacagaatgggattgcaatcatggtgtacacgaactcctctaacacattatactgggagctaaaccaggccgtgcggacaggagggggatccagagagctgtatatgaggcatttcccctttaaggctctccacttctacctgattagagcactgcaattgctgcggggatcgggcggatgtagtcggggacctggagaggtcgtttttagaggcgtcggtagcctgagattcgaacccaagcgcttgggggattctgtccggctgggacaattcgcgagctccagtctggataaagcggtggcccatcgtttcggggagaagcggaggggctgcgtctcagccccaggggttcaactagggtctcagtctgagggggcttctagtctcccaccctggaagacgctactcctcgcccctggagaatttcagctgtccggcgtcggaccctag

SEQ ID NO: 213823 - DNA, 876 bp, synthetic construct
  misc_feature 1..876: note = Description of Artificial Sequence: Synthetic coding sequence
  source 1..876: mol_type = other DNA
atggcgctggccgctctcatgattgcactaggctctctgggcctccatacatggcaagcacaagccgtccccatcctgcctcttggcctggcaccagacacatttgacgatacttacgtaggatgcgcagaggaaatggaggagaaagccgctcccttgctgaaggaggaaatggctcatcacgctcttctccgggagagctgggaagccgctcaagagacctgggaggacaagagacggggattaacactcccgcctggcttcaaagctcagaatggaatcgcaattatggtgtacacgaactcatcaaatacactgtactgggaacttaaccaagcagtgagaacaggaggtggaagccgggagctgtatatgcgccactttccctttaaagcgctgcacttttatttgatacgtgccttgcagttgctacgcggatccggtggctgtagtaggggtccaggtgaggtagtgttccgtggcgtcggttctctaagatttgagccaaagcgcttgggagattccgtgagactcggtcagttcgccagctcatccctcgataaggccgtggcacatcgtttcggcaatgcaaccctgttctccttgactacatgctttggggcacccatccaagcatttagtgtgttccccaaggagcgcgaggtgctgatcccaccacacgaggtgttcctcgtaacacggttctcccaggatggagcacagagcctggtgacactctggtcctacaatcagacctgtagtcacttcaactgtgcctatctcggcggagagaaaaggagaggttgcgtgtccgcccctggagccctgggaacaggcgatctgcacatgactaagagacatctgcagcagccgtag

SEQ ID NO: 213824 - DNA, 1401 bp, synthetic construct
  misc_feature 1..1401: note = Description of Artificial Sequence: Synthetic coding sequence
  source 1..1401: mol_type = other DNA
atggtgtttctctctggtaacgcgtctgattccagcaattgcacccagccgccagcacccgtcaacatatcaaaggctatcctcttgggagtcattttagggggtcttattctttttggagtcctgggtaacatcctggtgatcctgagcgttgcatgccataggcacttgcactctgtaacccactattacattgttaatctagcagtagctgacttgctgctgacaagcacggttctaccattttctgctattttcgaagtgttgggctactgggcattcgggagagtcttctgcaatatatgggccgctgtggacgtattgtgctgtaccgctagtattatgggtctgtgcattattagtatcgatcgatatatcggggtgagctaccccctcagatacccgactatcgtgacccagcggcgtgggttgatggcacttctgtgcgtgtgggccttatctctggttatcagcatcggacctctgtttggttggagacagcctgcccctgaggatgagactatctgtcaaataaatgaggaacccggatatgttctgtttagcgccttgggctccttttaccttccactggccattatcttggtgatgtattgccgtgtgtacgtggtggccaagcgagaatctcgtggcctcaaatccggcttgaagacagataagtccgattccgagcaggtgaccttaaggattcaccgcaaaaatgctccagcaggaggctctggaatggccagcgccaagaccaagacacatttctcagtgagacttttgaagtttagcagagagaaaaaggccgctaaaacgttgggaatagtagtaggttgcttcgtgctctgctggctgcccttcttccttgtgatgcccatcggcagtttctttcctgactttaaaccttctgaaactgtgtttaagatcgttttctggcttgggtacctgaactcttgcatcaaccctataatttatccatgttccagccaagaatttaaaaaggcctttcagaatgtgttaaggatacagtgtctgtgccgcaagcagagctccaagcacgccctcggatacacattacacccaccaagccaggcagtcgaagggcagcacaaagatatggtccggatccctgtgggaagtcgggagacattttaccggatcagcaagaccgacggggtttgcgagtggaagttcttctctagcatgccaagggggagtgcacgtattactgtgtccaaagaccaatcttcgtgcactacggcgagggttaggagcaagtcctttttgcaagtgtgttgttgcgtagggccaagcacgcctagcctcgataagaaccatcaggtgcccacaatcaaggtgcacacaatctcgctttcggaaaatggtgaagaggtctag

SEQ ID NO: 213825 - DNA, 1368 bp, synthetic construct
  misc_feature 1..1368: note = Description of Artificial Sequence: Synthetic coding sequence
  source 1..1368: mol_type = other DNA
atggtgtttctatcaggtaatgcctccgacagctctaattgtacccaaccgccagccccagtgaacatcagcaaggccatcctcttaggcgtcatcctgggcggattgatcctgtttggggttcttggtaacatcctagtgattctgtctgtcgcctgtcacaggcatctgcactctgttacccactactacatcgttaacttagctgtggccgatcttctgttaacatcaactgtcctgcctttttctgcaatctttgaagttttgggctactgggcattcggaagggtgttctgtaacatttgggccgcagttgatgtgttgtgttgcacagcatcaatcatgggtttgtgtatcatcagtatcgatcgatacattggggtctcatacccactccgctatcctactatcgttactcaacgcagagggttgatggcactgttgtgcgtctgggcgctcagcctcgttataagcatcggcccactgttcgggtggcgccagcccgctcccgaagatgaaaccatctgccagattaacgaagaacctggctacgttctgttctcagcactaggatcgttctatctccccctcgcaatcattctagtgatgtattgcagggtgtatgtcgtggccaaaagggaaagcagggggttgaaaagtggcctcaagactgacaaaagcgacagtgaacaggtaacacttcgcattcatcgcaagaacgcccctgctggcggatctggcatggcaagcgcgaaaacaaagacccacttctcagtgaggcttctgaaatttagtagagagaaaaaggcagcgaagaccttgggtattgttgtcgggtgtttcgtactttgttggctgcctttttttctagtgatgcctattggcagcttctttcccgactttaaaccctccgagacagtgtttaaaattgtcttctggttggggtacttgaactcctgcatcaatcccatcatctatccgtgcagttctcaagaattcaaaaaggcctttcagaatgtgcttcgtattcaatgcttatgccgtaagcaatcctccaaacatgcactggggtacacgcttcaccctccatcgcaggccgttgagggccaacataaagatatggtgcgtatccctgtgggcagccgggaaaccttttacagaattagcaaaacagatggagtttgtgaatggaagttcttctccagtatgcctcgcggtagtgcacgtatcacagtgtcaaaagaccagtccagttgtaccacagcccgtcggggtatggactgtagatattttaccaagaactgccgagagcatatcaaacacgtcaactttatgatgcctccatggagaaaaggaagcgagtgttag

SEQ ID NO: 213826 - DNA, 975 bp, synthetic construct
  misc_feature 1..975: note = Description of Artificial Sequence: Synthetic coding sequence
  source 1..975: mol_type = other DNA
atggtctttctgtctggcaatgcttccgatagcagcaattgcacacagccgcctgctcctgtcaacattagcaaagccatattgttaggagtcatcctcggcggtctcattttattcggcgtgctgggtaacattttggtgattttgtctgtggcatgccacagacaccttcactccgtcacacattactatatcgtcaacctcgcagtggcagacttgctgctaacctccacggtcctacctttctcagcaattttcgaagtgcttgggtactgggccttcggccgagtcttctgcaacatatgggccgctgtcgacgtcctgtgctgtacagcaagcattatggggctctgtattatctccattgaccgatacattggagtgagctaccccctgcgctacccaaccatagtgacacaacgtagaggcctcatggccttactctgtgtctgggctctgtcattggtcattagcatcgggcctctgtttggctggaggcaaccagcccctgaagatgaaaccatctgccagatcaatgaggagcccggttacgtgctgtttagcgcgctcggctccttctaccttccgctcgcaatcattctggttatgtactgtcgggtgtatgtggtggcaaagagagagtctcgcggattgaagtccggtttaaaaacagataaatcagactcagaacaggtaaccctgcgcatccatcggaagaacgccccagccggaggctccgggatggcctctgcaaaaactaaaacccatttctcagttcggctgctgaagtttagcagagaaaaaaaggcagcaaagactcttggaattgttgtagggtgctttgtcctttgttggctgcctttctttctggtgatgcccatcgggacatatatcttgaaatacgacgtgttgttctggcgcaaggggctgagcgtctgcacccgtctgcgggaacggaaagaaatcaagaattag

SEQ ID NO: 213827 - DNA, 1029 bp, synthetic construct
  misc_feature 1..1029: note = Description of Artificial Sequence: Synthetic coding sequence
  source 1..1029: mol_type = other DNA
atggttttccttagtgggaacgcctctgactcatcaaattgtacacagccgccagcgcctgttaatatcagcaaagccatcctcctaggggtgatccttggcggactgatcctgtttggcgtcttaggaaatatcctcgttatcttaagcgtagcatgccatcgacatctgcatagcgtgacccactattatatcgtgaatctggccgtggctgatctccttctgacctctacggtgcttcctttttcagcaatcttcgaggtgcttggatattgggcctttggcagggtcttttgcaacatttgggccgctgtcgatgtgctctgttgcactgccagtataatggggctttgtatcatcagcatagaccgctacattggtgtgtcatacccattgcgttatcccacgattgtgacccagaggaggggattaatggcacttctgtgtgtatgggccttgtctctggtgattagtatcggaccgctcttcggttggcgccaacccgcacctgaagacgaaacgatatgtcagattaatgaagagccagggtacgtgttgttttctgctttggggtctttttatcttcctctggctataatacttgtgatgtattgccgcgtgtacgtggtcgcaaaaagagagagtcgaggccttaaatctggtctgaagaccgataagtcggatagtgagcaggtgactctccgaattcaccgcaagaatgcaccagccggaggtagtggaatggcttccgccaaaacaaaaacacacttttccgtcagattgcttaaattcagccgtgagaagaaggcagcgaagactcttgggattgtggtaggctgtttcgtgctgtgttggctgccattttttctggttatgcccatcgatgaagagaccgaagcgcaggaaggtaaaaatgacagtcccagtttcaaacagccagtccatcacgcggcagttcttggcctggaggtaatggagaaggaaaatttggaaggcgtcagccgaaaagatacgtgcggggtctggtag

SEQ ID NO: 213828 - DNA, 1401 bp, synthetic construct
  misc_feature 1..1401: note = Description of Artificial Sequence: Synthetic coding sequence
  source 1..1401: mol_type = other DNA
atggtcttcttgagtggcaacgcctcagattcaagcaactgtacccaacctcccgctccggtcaatatctccaaggcaatactgctcggagtcattctgggaggattgatcttatttggggttctgggcaacatcttggtgattctgtccgtggcttgccaccgccatctacacagcgtgactcattactacattgtgaatctggctgtggcagacctacttcttacatccactgtccttcctttctctgctatctttgaggtgcttgggtattgggctttcggcagagtcttttgcaacatttgggccgctgtcgacgtgctgtgttgcacagcttctatcatggggctgtgtattatcagtatagaccgctacattggcgtctcgtatccgcttcgctaccccactatcgtgacacagcgcagggggttaatggctctcctctgtgtatgggcactttcactcgtcatcagcataggtcccttgttcggctggagacagccagcacccgaggacgaaacaatttgccagattaacgaggagccgggatatgttctattcagcgcattgggcagcttttatctacccctcgccattatcctggtgatgtattgtagggtctacgtggttgcgaaacgggagtcaaggggtctcaaaagcggtctgaagactgacaaatccgattctgaacaagtgaccctgaggatacatagaaaaaacgctccagccggtggaagcggcatggcctcggccaagacaaaaacgcactttagcgttagactgctaaagttttcccgagaaaaaaaggctgccaaaaccctgggcattgtcgttggttgtttcgtcttgtgttggctccctttcttcttagtgatgcctatcggtagtttctttcccgacttcaagccctccgagacggtgttcaaaattgtcttttggctcggctacttaaactcctgcattaatcctatcatctacccatgttcctctcaggagttcaagaaagcctttcagaacgtgcttagaatccagtgtctttgtagaaagcagagctctaaacacgcactggggtacactttacatcccccaagtcaggcagtggagggccagcacaaggatatggtgcgcatccctgtaggctcaagagagacattctatcggatctcgaagaccgacggtgtgtgtgagtggaagttcttctcctcaatgccacggggatctgcgagaataaccgtgtccaaggaccaatctagctgtacaaccgctcgtgtcagatctaagagttttctccaggtgtgctgctgtgttggaccatcgaccccttctctggataaaaaccaccaggtgcctaccatcaaggtgcacaccatctcactcagcgaaaatggagaggaagtgtag

SEQ ID NO: 213829 - DNA, 1119 bp, synthetic construct
  misc_feature 1..1119: note = Description of Artificial Sequence: Synthetic coding sequence
  source 1..1119: mol_type = other DNA
atggtctttctgtcaggcaatgctagcgattccagcaattgcacacagccaccggcacccgtaaacatatccaaggcaatcctattgggggtgattcttggaggcttaattctgttcggtgttctgggcaacatacttgtgatcctgtctgtcgcttgccatcgtcacctgcacagcgtgacacactactacatcgttaacttggcagttgccgatctcttgttgacatcaaccgtgctgccctttagtgctatatttgaagtactggggtactgggcattcggacgcgttttctgcaacatctgggccgctgtcgatgtcttatgctgcacagccagcatcatggggctgtgtatcatctcgatagacagatacatcggtgtgtcctaccctctccgatatcctacaattgtgactcagcgtcgcggtctgatggctctgctttgtgtttgggccctatccctcgtcatctccattggaccactttttgggtggcgacaacccgctccagaggacgagacaatctgtcagattaacgaagaaccgggttacgtgctgtttagtgcacttggatccttctacttacccttggccatcattctggtgatgtactgcagggtatacgtggttgccaaaagggagagtagggggctcaaatcaggcttaaagaccgataagagtgattctgaacaggtaacattgcgtattcacagaaaaaacgctccagccggtggaagcgggatggcctctgcgaagacgaagacccatttttccgttcgcctcctcaaattctctcgtgaaaaaaaagccgcaaaaaccttaggaatagtggtggggtgtttcgtgttgtgttggcttccattctttctggtaatgcccatcgggacccatacccacgatatgaagccggcaagcaggccaaggctgctgagccttttacccaaggagggggaacatgaaacccaccattggtcatgtgaccccctgtccctggagagtacccccggagcccaggaaccctgcctcacattgggcttcacttccctcagcagcatccatctcaccaaagcccagattcagcatgtgaccgtcacagacacggggaagacagtgacatag

SEQ ID NO: 213830 - DNA, 1290 bp, synthetic construct
  misc_feature 1..1290: note = Description of Artificial Sequence: Synthetic coding sequence
  source 1..1290: mol_type = other DNA
atggtgttcctgtccgggaacgctagtgacagcagtaactgcacccagccacccgctccagtcaatatctctaaggccatcctattgggtgtgattctaggcggtttgattctttttggtgtgctcggtaatatcctcgtgatattgtccgttgcctgccataggcacttgcactctgtaacccactactatattgtgaatctggccgtcgccgatctcctgctgaccagcactgttctgccctttagcgctatctttgaggtgctgggatattgggctttcggacgtgttttttgtaatatctgggcggctgtggacgtcctttgttgtacagcctccataatgggactatgcattatttctatagatagatatatcggagtatcgtatcctctgagataccctacaatcgtgacacagagacgcggactgatggcactactgtgtgtgtgggctctgtcactcgttatttccattggcccactgttcggatggcgccagcctgctcctgaggacgagactatatgtcagattaatgaggagccaggctatgttctctttagtgcattggggagtttttatctgccgctcgccataattctggttatgtactgccgagtttatgtggttgcaaaaagagaatccagaggcttgaaatcaggtctaaagacagataagagcgacagcgaacaggtcacactgagaatccataggaagaatgctccagcaggaggtagtggaatggcgagtgctaagactaagacccactttagcgtgcgtctcctcaagttctcaagagagaaaaaggccgcaaaaacactgggcattgtagtaggatgcttcgtcctgtgctggctaccctttttcctagtgatgcctataggcagctttttccctgacttcaagccttctgagacagtatttaaaatcgtgttctggttgggatatctgaattcatgtatcaaccccatcatatatccatgcagcagccaagaattcaagaaagccttccagaacgtcctgcgcattcagtgtctatgccgtaagcaatccagcaaacacgccctcggctacacattacatccaccgagtcaggcggtggagggtcagcataaagacatggttagaatacctgtgggcagtcgggaaaccttttataggatctctaagacggacggcgtctgcgagtggaagtttttttcctccatgccaagagggtcagccagaatcaccgtgtccaaggaccagtccagctgtacaaccgcaaggggtcacacacccatgacttag

SEQ ID NO: 213831 - DNA, 1428 bp, synthetic construct
  misc_feature 1..1428: note = Description of Artificial Sequence: Synthetic coding sequence
  source 1..1428: mol_type = other DNA
atggtttttctctccggcaatgcctctgatagctccaattgcacacagccacccgctcctgtcaatattagcaaagctatactgttaggcgtcatcctgggaggcttgattttatttggggtccttgggaacatcctggtgattctgagtgtcgcatgccaccgccatctgcactctgtgacccactactacatcgtcaatctggctgtagctgatttattgctaacttcgaccgtactcccattttcagccattttcgaggtgctgggctattgggcgttcggcagggtcttctgcaatatctgggccgctgttgacgtgctctgctgcacggcgagcatcatgggcctgtgcatcattagtattgatcggtatatcggggtgtcatacccactgcgctatcctactatagttactcagcggaggggcctcatggcgctgctctgtgtgtgggcactgagcctggttattagcattggacctttattcggctggagacaaccggcaccggaagatgagacgatctgccaaatcaatgaggagccaggctacgtcctcttttccgctctggggtctttctatctgcctctggccattattctcgtgatgtactgccgtgtttacgttgtggctaagagagagagccgcggtttgaaatccggccttaaaaccgataaaagtgactctgagcaggtcacccttcgcatccatcgcaagaatgcaccagcaggaggtagcggcatggcctctgccaagaccaaaactcacttctctgtacggctgctgaaattcagtagggaaaagaaggctgcaaaaaccttaggaatagtcgtgggctgctttgtgttgtgttggctccccttttttctggtgatgccaatcggttcattctttcctgatttcaaaccctcagaaaccgtgttcaaaatcgtgttctggctgggatatctgaattcctgcatcaacccaattatctatccgtgttcttctcaagagtttaagaaggccttccagaacgttctacggattcagtgtttatgcagaaagcagagttcaaagcatgcactcgggtataccctccacccaccaagccaagcagtggaagggcagcataaggatatggtgaggattccagtgggttctagagagaccttctatagaatatccaagacagacggagtttgcgagtggaagttttttagtagcatgcccagagggagcgccaggatcacagtgtccaaggatcagagttcttgcaccactgccaggacaaaatcacgttccgttactcgattagagtgctcaggcatgattttggctcattgcaacctgcgattaccaggttcacgggattctccggctagtgcatctcaggctgctggaacaacagggatgtgtcaccaggctgatgcgacccgaccatcatag

SEQ ID NO: 213832 - DNA, 1113 bp, synthetic construct
  misc_feature 1..1113: note = Description of Artificial Sequence: Synthetic coding sequence
  source 1..1113: mol_type = other DNA
atggtcttcctgagcggcaacgcaagtgatagttccaattgcacccagcctcctgcacccgtcaacatttctaaggctatcttgctaggggttatcctgggtggcttaatcctctttggcgtgttgggaaacattcttgtgattctgtccgtggcctgtcatagacacctgcattccgtgacacactactatatcgtgaacctggctgtcgcggacctgcttctgacatcaaccgtgctacctttctcagctattttcgaggttctgggatactgggccttcggcagagtgttctgtaacatctgggccgctgtggacgttctttgctgcaccgcctccattatgggcctttgtatcatctctatagacaggtatataggcgtctcatatcctctgaggtacccaactattgtgactcagcgcaggggtcttatggccctgctgtgtgtgtgggccctctctcttgtcataagcattgggccattattcggctggcgccagcctgcacctgaggatgaaacgatctgtcagatcaatgaagagccaggctatgtactgttctctgcgctaggaagcttctatctgcccctagcaatcattcttgtaatgtactgccgggtttacgtcgtggcaaagcgcgagtctagaggacttaagtcgggacttaagactgacaaaagcgactcagagcaagtgaccctccgaattcaccgtaagaacgcgccagcaggcggttctgggatggcatccgcaaaaacaaaaacacacttttctgtgcgcctgctgaagttcagcagggagaagaaggccgctaaaaccctagggatagtcgtgggctgttttgtactatgctggttaccttttttcttagtgatgcccatagatgaggtaagcctgtgtcaccaggctggggttcagtggcacgaccttggcagcctgcagccccctcctcccggatttaaaaggttctcatgcctgagcttgccttcttcatgggactacagggacgtgcctcccggaagacgtcatcaggctcagctgattttcgtgttcttggtagaaacaggctttcaccacgttggtcaagacgatctcgatttactgacctcgtag

SEQ ID NO: 213833 - DNA, 1284 bp, synthetic construct
  misc_feature 1..1284: note = Description of Artificial Sequence: Synthetic coding sequence
  source 1..1284: mol_type = other DNA
atggtatttttgtcaggaaacgcatcagatagttctaattgtacccagccacctgctcctgtgaacatctctaaggccatcctcctcggtgtgatactgggcggtttgatacttttcggcgtcctggggaatatcctagtgattctgtccgtggcctgtcatagacacttacattcagtaacgcattactacatcgtaaacctggctgtggctgacctcctgctgacgtccaccgtccttccatttagtgcgattttcgaggtgttagggtattgggcttttggtagagttttttgcaatatttgggcggctgtggacgtcctgtgctgtaccgcatcaatcatgggtctctgcataatcagcattgatcgctatatcggagtgagttaccccctccgctaccccacgatcgttacacagagaaggggactgatggcgctgctctgtgtgtgggctctttctcttgtaatttcaatcgggccattattcggatggcggcagcccgcacccgaagacgaaaccatctgtcaaatcaacgaagaaccaggctacgtactttttagtgccttgggaagcttttacttacctcttgcgatcatactcgtgatgtactgtcgggtgtatgttgtagccaagcgcgagtcgcgaggattgaaatcaggattgaaaacagacaagagcgattcggagcaggttaccctgagaatccatagaaagaacgcccctgccggaggatccggcatggcctcagccaaaacgaagacacatttctccgttaggctcttgaaattctcaagagagaagaaggcagcaaagacactgggaattgtggtaggctgtttcgtgttgtgttggctgcctttctttctggtgatgcctattggaagcttctttcccgactttaaacccagcgaaaccgtcttcaagatcgttttttggctagggtatctgaatagctgcattaatcccattatttatccatgctcgtcccaggagtttaagaaggcctttcagaatgtgttgcgcatccagtgcctgtgcagaaaacagtcctcgaagcacgctctgggttataccctccatcctccatctcaggctgtcgaaggacaacacaaagatatggtacgaatccctgtgggttctagagaaacattctaccgaatctcaaagactgacggggtatgtgagtggaagtttttctcttcaatgccgcgagggagcgctaggatcaccgtttctaaggaccagagcagctgcacaaccgccagatcctcaggattctag

SEQ ID NO: 213834 - DNA, 1563 bp, synthetic construct
  misc_feature 1..1563: note = Description of Artificial Sequence: Synthetic coding sequence
  source 1..1563: mol_type = other DNA
atgaacccagacctggataccggacacaacacgagcgcaccagcacattggggtgagctcaaaaatgccaatttcaccgggcctaatcaaacaagtagtaacagcacccttccccagctggacatcacccgggcaatcagtgtagggttagtactgggagcatttatcctgtttgctatcgtgggtaatatactagtaatcctgagtgttgcatgcaaccgccacctacgcaccccaaccaactattttattgtaaatttggccatggcagacctgctgttatcttttaccgtgctgccctttagcgccgctctggaagtgctcggatactgggtattgggacggatcttttgcgacatttgggctgccgtggatgtactgtgctgtaccgcatcaatcttaagtctctgtgccatctctatcgatagatatattggtgttcgctacagtctccagtatccaaccctcgttacgaggagaaaagcaatcctcgcactcctgagtgtgtgggtgctgtccactgtaataagtatcggcccactgctaggatggaaagagccagctccaaatgatgataaagaatgtggggtcaccgaagagccattttacgcattgttctcttcattaggttccttttacatccctttggcagtgatcttggtcatgtactgcagagtgtatatcgtggcgaagaggactactaaaaatttagaggcaggagtaatgaaagaaatgtctaattctaaagagcttactctcaggattcacagcaagaacttccatgaggatactctgtcttccacaaaggccaaaggccacaatccgcgttctagcatcgccgtgaagctctttaagttttctagggaaaagaaagcagctaagacgctcggcattgtagtcgggatgtttatactgtgctggctgccgtttttcattgcattacccctgggctctttgtttagtaccctgaagccccctgacgccgtgttcaaagtcgtgttctggctcggctacttcaattcttgcctgaatcccataatatacccctgcagctcgaaggagttcaaacgagctttcgtgcgcattttgggctgccagtgtaggggcagaggccgaaggaggagacggagaaggagacggctgggtggctgtgcttatacttatcgcccatggacccgagggggaagcctggagcgatcccaatcccgcaaagactccctggatgacagtggatcctgcctctccggaagccaacgcaccttgccttccgcatcaccctctcctggctatctggggcgaggggcaccccctcctgtggagctatgtgccttccccgagtggaaggcccctggagctcttctgagcctccctgctcctgagccccctggaagacggggacgacatgatagcggcccactcttcacattcaagcttttgacagaaccggaatctccaggaaccgatggaggcgcaagcaatggcggttgtgaagccgcagctgatgtcgctaatggtcagcctggcttcaagagcaatatgcccctggctcccggtcagttctag

SEQ ID NO: 213835 - DNA, 1719 bp, synthetic construct
  misc_feature 1..1719: note = Description of Artificial Sequence: Synthetic coding sequence
  source 1..1719: mol_type = other DNA
atgacgttcagggatcttctctcagtttcatttgagggcccacgtccagactctagcgcaggaggcagtagcgcagggggtgggggagggtccgcgggtggagcagccccaagcgaggggccagcggtcgggggtgtccccggtggtgcagggggtggcggtggcgtggtgggagcaggaagcggggaagacaatcgatcctctgccggagagcccggaagcgccggtgccggaggtgacgttaatgggaccgccgcagttggcggactcgttgtgagtgcccagggcgttggcgtgggcgtgttcctcgccgcatttatactgatggccgtcgcaggtaatcttctggtcatcctttcagtggcctgcaacaggcatctgcagacggtcaccaactattttatagtgaatctcgccgtggcagatctgttgttgtcagctactgtactgccattttccgccactatggaggtactgggcttttgggccttcggccgtgcattctgtgacgtgtgggccgctgtggatgtactgtgctgcactgcatcgattctctctctttgcaccatttctgtcgacaggtacgtcggcgtccggcacagtctcaagtaccctgctataatgacggaacgcaaagctgcagccatcctcgcccttctgtgggtagtcgcattggtggtatctgtgggcccactgctggggtggaaagagcccgtgccacctgacgagcgattttgtggaatcacagaggaggctgggtatgcggtcttttccagcgtttgtagtttttatctgcccatggccgtgatagtggtgatgtattgccgcgtgtatgttgtggcacggtctaccacaaggtccctcgaagcaggagtgaaacgggagcggggaaaagctagcgaagtggtgctcagaatccactgtcggggagccgctaccggagcagatggcgcacacgggatgagaagcgcaaaagggcataccttcaggtcgtctttgtcagtacggctgctcaaattttccagggaaaaaaaggctgcgaaaactttggccatagtggtcggcgtgtttgtgctgtgttggtttcctttcttttttgtgctgcctctcggatcactgttcccccagcttaaaccttccgaaggcgtttttaaagtgattttctggcttggctactttaattcctgtgtaaacccgctcatctacccttgctcaagcagagaattcaagagggcatttttacgactcctgcggtgtcagtgccggcgtaggaggaggcgcagaccattgtggcgggtttatggacaccactggcgcgcatctacatccggccttaggcaggactgcgctccttcgtctggcgatgcccctcctggcgctccattagcgttgacagccctcccagacccagatccagaaccacctggcacacctgaaatgcaggccccagtggctagcaggagaaagcctccgtccgcatttcgggagtggaggctgcttggtccttttcgtcggccaacgactcagttacgggctaaagtcagcagtctgtctcataagatacgcgcaggcggtgcccagcgcgctgaggccgcttgtgctcagcgatcagaagttgaagccgtttctctgggagtcccacacgaggtcgctgagggcgctacctgccaggcttatgaactggcagattattccaatctgcgtgaaacggatatttag

SEQ ID NO: 213836 - DNA, 1344 bp, synthetic construct
  misc_feature 1..1344: note = Description of Artificial Sequence: Synthetic coding sequence
  source 1..1344: mol_type = other DNA
atggatcaccaagacccttacagcgtgcaggccacagcagccatagccgctgctatcacgtttttgatcctgttcaccattttcggaaatgcactggtaatcctagccgtgctgacgtcccggtctctaagagcgccacagaatctgttcctggtgagcctagccgctgcagatatcctggtggccacattgatcatccctttttccttagccaacgagctcttgggttactggtattttcgtaggacctggtgcgaggtgtacttggcgttggatgttctgttctgcacatcatccattgtccacctatgcgctatcagcctcgatcgctattgggcagtgtcaagggcgttggagtataattctaaaaggaccccgcgtagaattaagtgcattatcctgactgtttggttgattgcagcggtgatatctcttccacctctaatctacaagggagaccaagggcctcagccccgtggcagacctcaatgcaagttgaaccaggaggcctggtatattctcgccagctcgattggttccttttttgccccttgcctcattatgatcctggtgtatttacgcatttacctcattgcaaaacggtccaaccgtcgcggtccaagagccaaaggtgggccaggacagggtgaatcaaaacagccccgacccgatcacggtggagccctcgccagtgccaaactacccgcactggcttcagtggcctccgcacgtgaggtgaatggccactccaagtccactggcgagaaggaggaaggggaaactccagaggataccggaactagagccctccctccctcatgggccgctttacctaactccggccaaggtcaaaaggaaggggtgtgcggagcctcgccggaggatgaggccgaggaagaggaggaagaagaggaagagtgcgagccccaagccgtgcctgtgtccccagctagtgcatgtagcccccctcttcagcagccccagggcagtcgcgtgctggctaccttgagaggccaagtgctgctgggcagaggcgttggcgctatcgggggtcagtggtggcgcaggcgggcacagcttacacgagagaagaggtttacctttgtgcttgcagtggtgattggcgtatttgtgctctgttggttccctttctttttctcttattccctgggagcaatttgccccaaacattgcaaagtaccacatggactgtttcagtttttcttctggataggctactgtaattcatcgcttaaccccgtaatctatacaatattcaatcaggacttccgtcgcgctttccgacgaatcttgtgtcggccttggacacagactgcatggtag

SEQ ID NO: 213837 - DNA, 1389 bp, synthetic construct
  misc_feature 1..1389: note = Description of Artificial Sequence: Synthetic coding sequence
  source 1..1389: mol_type = other DNA
atggcatccccagctctagctgctgcactggcagtggccgcagccgctggccctaatgcctctggcgcaggtgagagaggatccgggggtgtggctaacgcatcaggggcaagctggggcccaccgagagggcagtactcagctggggctgtagccggacttgccgcagtggttgggtttcttatcgttttcaccgtagtgggcaatgtgttggtcgtgatcgccgttctgacctctagagctttgcgagcacctcagaacctgttcctggtgtctctggctagtgcagacatcctcgttgccactctggtgatgccattctccctcgccaatgaattaatggcatactggtacttcgggcaggtctggtgcggcgtttacctcgcgcttgatgtcttattctgcacaagctctatagtgcatctgtgtgcgatatctctcgataggtactggtctgtgacacaggctgtggaatacaatttaaagagaactcccaggcgcgttaaggccactattgtcgcagtgtggcttatctccgcggtaatctctttccctcctcttgtttctctgtacaggcagcctgacggagccgcttacccacagtgcggactcaacgacgagacatggtatatcttgtctagttgtattggctcattcttcgccccttgtctgatcatggggttggtatatgctcggatttatagagtggccaagcttcgtaccagaaccctgtcggaaaagcgggcacctgttggcccagacggagcctcacctactaccgagaacggattgggggctgctgccggagccggtgaaaatggacattgcgcaccacctcctgccgacgttgaacctgatgagagttctgccgcagccgaacgacgcagaagacgcggtgctttgcggcgagggggaaggcgacgcgctggggcagagggaggtgcgggaggggctgatgggcaaggtgccggacccggagccgctgaaagcggggcactgactgcatcgaggagtcctggtccagggggacgcctttccagagccagctctcgcagtgttgaattttttttgagcagacggaggcgagcgaggagtagcgtgtgtcgccgtaaggtggctcaagccagggaaaagcgttttacttttgtgctggctgtcgtgatgggagtctttgtgctgtgctggtttccattctttttcagctactcgctttatggtatttgtagggaggcctgtcaggttccaggccctctgttcaaattcttcttttggatcggctattgcaactcttctctaaacccggttatctacaccgtatttaatcaggattttcggaggtccttcaagcatatccttttccgccgacgcaggagagggttcagacagtag

SEQ ID NO: 213838 - DNA, 2070 bp, synthetic construct
  misc_feature 1..2070: note = Description of Artificial Sequence: Synthetic coding sequence
  source 1..2070: mol_type = other DNA
atggcggatcttgaggctgtactggcggacgtcagctatcttatggctatggagaaaagcaaggcgacacctgccgctagagccagcaaaaaaattcttctgcctgaacccagcataagaagcgtaatgcagaagtacttggaggacagaggagaggtgacttttgagaagatcttctctcagaagttgggctacctgctctttagagatttttgtctgaatcacctggaagaagcacgcccactggtcgagttttatgaggagatcaagaagtacgaaaaactggagacagaagaagagagggtggcgaggagcagggagatctttgactcttacattatgaaggagctgctggcatgctcacatcccttctcgaaatcagccacagaacacgtgcaaggacatcttggcaaaaagcaggtccctccagatctgtttcagccttacatagaagagatctgtcagaacttgcgcggagacgtgttccaaaaatttatagaaagcgacaaattcacacggttctgccagtggaaaaatgttgagctaaacattcaccttacaatgaacgatttctccgtgcaccgtattattggcagaggcggttttggagaggtatatggctgtcggaaagccgatacaggcaagatgtacgccatgaaatgcctcgacaaaaaaagaatcaaaatgaaacagggcgaaaccctcgcactgaatgagcgcatcatgctgtcgttggtctcaacaggtgattgtcccttcatagtctgcatgtcctatgccttccatacacccgataagctgtcatttatcctagatctgatgaatgggggagatctccattatcacctatctcagcacggtgtgttttcagaagcagacatgaggttctatgcggctgaaatcattctggggctggaacacatgcacaaccggtttgtcgtgtatagagacctcaagcctgctaacatcctcttggatgagcacggtcatgtgcgtatctctgacctggggctggcgtgtgacttctcaaaaaaaaagccacacgcgtctgttggcacacatggatacatggccccagaggtcctgcagaaaggcgtggcctacgactcaagcgctgattggttttctttaggctgcatgctattcaagttgctgaggggccattcccccttccggcagcacaaaactaaagacaagcatgagatagaccgaatgacccttacaatggccgtagagctgcccgacagcttttcccccgagctgcgctccttgctggagggcctcttgcagcgcgacgtcaacagaaggctgggatgcctgggacgcggtgcgcaggaggtgaaagaaagccccttttttcgaagcctggactggcagatggtgttcttgcagaagtacccaccgccattgataccccctagaggagaggtaaacgcagccgatgcctttgatattggatcctttgacgaggaggacacaaagggcataaagttgctcgattctgaccaggagctgtaccggaattttcctctgactatcagcgaacggtggcaacaggaggtggccgaaaccgttttcgatactattaatgctgagactgaccgactcgaagcaaggaagaaggctaaaaacaagcagctgggtcatgaggaggactacgcactaggcaaagattgtatcatgcatgggtacatgtcaaagatggggaatcccttcctcactcagtggcagagacgatatttctacctatttcctaaccgccttgagtggcgcggtgagggcgaggccccacagagcctgctcactatggaagagatccaatccgtggaggagacacagattaaggaacgcaagtgcttgctcctgaagatccgcggaggtaaacaatttatcttacagtgtgattcagaccccgaacttgtccagtggaaaaaggagcttagggatgcctatcgtgaagcacagcaactggtccagcgggtgcctaagatgaaaaacaagccgcgttcccccgtcgtggagctgagtaaggtccctcttgtccagcggggttcagcaaacggcctatag

SEQ ID NO: 213839 - DNA, 2067 bp, synthetic construct
  misc_feature 1..2067: note = Description of Artificial Sequence: Synthetic coding sequence
  source 1..2067: mol_type = other DNA
atggctgaccttgaagcagtgcttgcggatgtcagctaccttatggcgatggagaaaagtaaggcaaccccagcagcaagagcttcaaagcggatcgttctgccagaacctagtattcgcagcgtcatgcaaaagtatttagctgaaagaaacgaaattacctttgacaagatcttcaaccaaaaaatcggatttctgctctttaaggacttctgcctgaatgagattaacgaggcagttccacaggtgaagttctatgaagaaatcaaagaatacgagaagctggataacgaagaagaccgtctatgccgatcacgccagatctatgacgcatatatcatgaaagagctgctgagttgtagccacccctttagtaaacaggcagtggaacacgttcagagtcatctgtcaaaaaaacaagtcacatcaactttgttccagccctacatcgaggagatatgcgaaagcctccgaggagatatcttccaaaaattcatggaatcggataagttcacgcggttctgccagtggaagaacgtggagctgaacattcacctcacgatgaatgagtttagtgtccatcggatcataggacgcggagggttcggcgaggtttacgggtgtcgcaaagcagatacgggcaagatgtacgcgatgaaatgtctcgacaagaagcggatcaagatgaaacagggcgaaacccttgcactcaatgaaagaattatgctgtcactggtgagcaccggtgattgtcctttcatcgtgtgcatgacatacgcattccacacacctgacaagctctgctttattctcgacctgatgaacggtggagacctgcactaccaccttagccagcatggagtgtttagcgagaaggaaatgcgattctatgctacagagatcattctgggcctggaacatatgcacaatagattcgtggtctacagagatctgaaacccgctaacatcctgctggacgagcatgggcatgcccgtatttcagatttgggactggcctgtgatttctcgaagaagaagccacacgccagtgtgggtacgcacggctatatggctccggaggtgctgcaaaaagggacagcctacgactcctctgcagattggttttccctggggtgtatgctttttaagctcttaaggggtcactcccctttcagacagcacaagaccaaagacaagcacgaaatagataggatgacactgactgtgaacgtggaactgccggacaccttctcaccagaactcaagagcctgctcgagggtctgctgcagcgcgatgtctctaaaagacttggatgtcacggcggtggcagccaggaggttaaagagcactccttttttaagggcgtggattggcagcacgtatacctgcaaaagtatcctccacctctgataccccctaggggtgaagtgaacgccgcagacgcctttgatatcgggagcttcgacgaggaggatacaaaaggcataaaactgctggactgtgaccaggagctctataaaaactttcctctcgtcatttctgagagatggcagcaggaagtgacagaaacagtgtacgaggctgtgaatgctgacactgacaagatcgaggcacggaagagggccaagaataaacaactggggcacgaagaagattatgcgttggggaaggactgcatcatgcacggctacatgctgaaactaggcaatccctttttgacccagtggcagagacgatacttttatttattccctaaccgattggaatggcgcggagagggcgaaagtaggcagaatctcctgacaatggaacagatcctttctgtggaagagacacaaatcaaggataagaagtgcattctgttccgcatcaagggtggaaaacagttcgtcctgcagtgcgagagcgatccagagttcgtgcagtggaagaaggaactcaacgaaacttttaaggaggctcagaggctcctgagacgtgcaccaaaattcctcaacaagcccaggagcgggaccgtggagttgcctaaaccttccctgtgtcataggaattcgaatggcctttag

SEQ ID NO: 213840 - DNA, 1164 bp, synthetic construct
  misc_feature 1..1164: note = Description of Artificial Sequence: Synthetic coding sequence
  source 1..1164: mol_type = other DNA
atggccgacttggaagcagtactggcggacgtcagctatcttatggccatggaaaagtccaaagccacccccgcagccagggccagtaaaagaatcgtgctgccggaacccagcatccggtccgtgatgcagaagtaccttgctgagagaaatgaaattaccttcgacaagattttcaaccagaagatcggctttctcctgttcaaagatttttgtttgaatgagatcaacgaagccgtcccacaggtgaaattttatgaggaaatcaaagaatatgagaagctggacaacgaagaggaccggctgtgtaggtcacgtcagatctacgatgcctacataatgaaagaacttctgagctgttcacatccattttccaaacaggcagtcgagcacgtgcagtctcacctgtccaaaaagcaggtcacgtcaaccctgttccaaccctatatcgaagagatttgtgagtctctacgaggcgatatcttccagaagtttatggaatccgacaagtttactagattctgccaatggaagaatgtagagctcaacattcacctaacaatgaatgagttctcagtgcaccgcattatcggtaggggtgggttcggagaggtgtacggatgccgcaaagctgataccggcaaaatgtacgccatgaaatgcctggacaagaaaagaatcaagatgaagcagggtgaaactttggccttgaacgagcgcattatgctatccctagttagcaccggcgactgtccgttcatcgtgtgtatgacatacgccttccacactcctgacaaactgtgttttattctggatcttatgaatgggggagacctccactatcatctttctcagcacggagtgtttagcgaaaaagagatgcgcttttacgcaacagaaatcatcctgggccttgagcacatgcataatagattcgtggtatatcgcgacttgaagccagcaaatatcctattagacgagcatgggcacgcaagaatttcagacttgggtttggcttgcgacttttctaagaaaaagccgcatgcctcggtgggcacgcatggctacatggccccagaagtgcttcagaaaggtacggcctacgattcctccgccgactggttctctctggggtgcatgctgttcaaacttttacgagggtag

SEQ ID NO: 213841 - DNA, 1434 bp, synthetic construct
  misc_feature 1..1434: note = Description of Artificial Sequence: Synthetic coding sequence
  source 1..1434: mol_type = other DNA
atgggcgcaggtgtgctggtgttaggggcaagcgagccgggaaacctttccagcgctgcccctcttcccgacggagccgcaacagccgctcgactgttagtcccagcgtccccccctgcttccctgctccctcccgctagcgagtctcctgagcctttgagccaacagtggacagcgggtatgggcttgctaatggctctcatcgtgctgttgatcgtggccggtaatgtactggtcatcgttgccatcgccaaaaccccgaggttacagacactgaccaatcttttcatcatgagtttggcgtccgcggacctggtgatgggtctgttggtggtgccgtttggcgcaacgatcgttgtttggggaaggtgggaatatgggtcatttttctgtgagctgtggacatccgtggacgtactatgtgtaacagcctcaatagagacgctttgcgttattgccctggacagatatttggcaatcacatccccctttaggtatcagtccctccttactagggccagggccaggggattagtttgcaccgtatgggctattagcgccctggtgtcctttcttccaatccttatgcattggtggcgcgcagaaagcgatgaggccaggagatgttacaacgatcccaaatgctgtgacttcgttaccaacagggcctatgctatcgccagcagtgtcgtctccttctacgtgcctctgtgtatcatggctttcgtgtatctgagggtgttcagggaagctcagaagcaagtcaaaaaaatcgactcatgcgaaaggcggtttctaggaggtcccgcaagacccccttccccctctccaagcccggtacccgctcctgcaccacctcccggtccccctcgcccagctgcagccgctgccaccgccccactggcgaacggacgggcaggtaagagacggccatctaggctggtggcattgagggagcagaaagccctgaagacgctaggtatcataatgggggtgtttacactgtgctggttaccgtttttcttggccaacgtggtgaaggcttttcaccgcgaacttgtacccgatcgactgttcgtgtttttcaattggctcggttatgcaaactctgcgttcaatcctatcatctactgcagatccccagattttcgaaaggcttttcagggcctactctgctgtgcaaggcgggctgcacgccgtcgacatgccactcacggcgacagaccacgcgcatcggggtgtctggccagaccagggccaccaccctctcctggcgcagcttcagatgacgatgacgacgatgtcgttggggcaaccccgccagccagattactcgagccttgggccggatgcaatggcggagcagcagccgacagtgactcatcgctggatgaaccctgtcggccaggcttcgccagcgagtctaaggtgtag

SEQ ID NO: 213842 - DNA, 1242 bp, synthetic construct
  misc_feature 1..1242: note = Description of Artificial Sequence: Synthetic coding sequence
  source 1..1242: mol_type = other DNA
atgggccagcctggaaatggcagtgcgttcctgctggcacccaatgggagccatgcaccagaccacgatgttacacaggagcgcgacgaagtctgggtagtcggcatgggaatcgttatgtctctgattgtcctggctattgtgttcggcaacgtcctcgtaattactgccatcgccaaatttgagagactccaaaccgtcactaactactttattacctcactggcgtgcgcagatctggtgatggggttagcagtggtaccttttggcgctgcgcacattttaatgaagatgtggacatttggtaatttttggtgtgaattttggacgtctatcgatgtgctgtgcgtgactgcctcgattgaaactttatgcgtaattgcagttgacaggtattttgcaattacatctcctttcaagtatcaatccttattaaccaagaataaggctcgagtgatcattctgatggtctggatcgtaagtgggctgaccagctttttaccgattcagatgcactggtacagagccacccaccaggaggccatcaattgttatgccaacgaaacttgctgcgactttttcacaaatcaggcgtatgccattgcttcatctatcgttagcttctatgttccactggtcataatggtgtttgtctacagtcgggttttccaggaggcgaagagacagctgcaaaaaatcgacaagagcgaaggcagattccatgtgcaaaatctgtctcaagtcgaacaagatggcagaacaggacatggtctgcggagaagcagtaaattctgcctcaaagaacataaagcacttaagacactgggtataatcatggggacctttactctttgctggctcccattcttcattgttaatatcgtgcacgtcatccaggataatctgattcggaaagaggtttatattctgctcaattggatcggatacgtgaacagtggattcaaccccctcatttattgtcgttcccccgactttcgaatcgcctttcaggaattgctgtgcctgagaagaagctccctcaaagcttacgggaacggctacagctctaacgggaatactggagagcagagcggatatcacgtggagcaagaaaaggagaataagcttctttgcgaagatcttcctgggacagaagattttgtgggccaccagggtacagtgccaagcgataacatcgacagccaaggacgaaactgttcgactaacgacagcctactgtag

SEQ ID NO: 213843 - DNA, 1227 bp, synthetic construct
  misc_feature 1..1227: note = Description of Artificial Sequence: Synthetic coding sequence
  source 1..1227: mol_type = other DNA
atggccccatggccacatgaaaattcttcactcgcgccatggcctgacctccctacgctagcccctaataccgccaacacgtctggtcttccaggcgtcccttgggaagcagctcttgccggtgccttgctggcactggcagtgctagccactgtgggaggcaatctgctggtcattgtggccattgcctggacacccaggttgcagacaatgacaaacgtgttcgtgaccagtctggctgcggcagacctggttatgggcttgctggtagtgccccctgctgccacgctagcgctgactgggcattggcccttaggagctaccggctgcgagttgtggacatctgtggatgtgctatgcgtgactgcatctatcgagactctttgcgctctcgccgtcgaccgttatctggccgtcaccaacccactgagatatggtgccctagtgacaaaaaggtgcgcaagaactgccgtggtgcttgtatgggtggtaagcgcggctgtttcttttgccccaataatgagtcagtggtggcgggtgggagctgatgccgaagcacagagatgtcattcaaatcccaggtgctgcgcgttcgcatcaaacatgccttacgtgctactcagcagcagcgtttctttttatctgcctttgcttgtgatgttgtttgtttacgctcgggttttcgtggtcgctacaaggcagctgcggctgttgcgtggagaattgggtcggttccctcccgaggaaagtcccccagcgccttcacgcagtctggcccctgcccctgtgggaacttgtgctccgccagagggtgtgcctgcctgtggccgtagaccagccagattgctgccactaagagaacatcgggcactgtgcaccctgggactgattatgggcacctttactctgtgctggctgcctttcttcctggccaatgtgcttagagctctaggcggaccctcattggtccctggtccagccttcctcgcattgaactggctcggctacgccaactctgccttcaatcctctgatttactgtcggagtcctgacttccgatcagcttttcggcgtctcctgtgccgctgcggtagaaggctgccccctgagccatgtgccgctgccaggcctgccttgtttccttcaggagtgccagctgcccgttcctcacccgctcagcctaggctttgccagcggttggatggtgcttcatggggcgtgtcctag

SEQ ID NO: 213844 - DNA, 1044 bp, synthetic construct
  misc_feature 1..1044: note = Description of Artificial Sequence: Synthetic coding sequence
  source 1..1044: mol_type = other DNA
atggctgcagggacagctgtaggcgcttgggttttggtgcttagcctgtggggagctgtggtcggtgcgcagaatatcaccgccaggattggtgagccactggttctgaagtgcaaaggtgctcctaagaagccgcctcagcgccttgaatggaagctaaatacgggtaggacggaggcctggaaagtgttgagtccgcagggcggtgggccttgggatagcgtggctagagtgttgccaaatgggtccctgtttctgccagccgtcgggattcaagacgagggaattttcaggtgccaggctatgaataggaacggaaaagaaaccaaatccaactatagagtaagagtctaccagatcccaggcaagccagagattgtcgactccgccagcgaactcacagccggagtgccaaataaagtcggaacatgtgtaagcgaaggatcataccccgcaggaactctgtcgtggcacttagatggcaagccacttgtcccgaacgagaagggggtgagtgtgaaagagcagacccggagacacccagaaactggactcttcactctgcagtctgaattgatggtcacaccggctcgcggaggggaccctagacccacgtttagttgtagcttttctccgggacttccgagacatcgcgcactgaggaccgctcctatccagccacgtgtttgggaacccgtcccactggaggaggtgcagttggtcgtggaaccagaaggtggcgctgtcgctccagggggtaccgttacactaacctgcgaagtccctgcccagcccagccctcagattcattggatgaaggatggggtccccctgcctcttcccccatcgcctgttctgatcttgccagagatcggcccacaggatcagggcacctattcatgtgtcgccacccactcctctcacgggcctcaggaatcgagagccgttagcatttcaatcatcgaaccgggtgaagaaggtccaaccgccggtgaggggtttgataaagtgagggaagccgaggacagtcctcagcacatgtag

SEQ ID NO: 213845 - DNA, 702 bp, synthetic construct
  misc_feature 1..702: note = Description of Artificial Sequence: Synthetic coding sequence
  source 1..702: mol_type = other DNA
atggctgctggcactgctgtaggcgcttgggttctcgtgcttagtctctggggtgccgttgtaggggcacagaacattacagcaagaatcggcgaaccccttgtcttaaaatgcaagggtgcccctaaaaaaccacctcagaggctggagtggaaactgaataccgggaggaccgaagcctggaaggtgctgagccctcaagggggtgggccttgggattctgtcgctagagtccttcctaacggctcgttgttcctgcccgctgtcggaattcaggatgaaggcatctttcggtgccaggcaatgaatcgcaatgggaaagagaccaagtccaattatcgtgttagagtgtaccaaatcccaggtaagccggagattgtggacagtgcatcagagctcacagccggtgtgcccaataaggtggtcgaggagagccgcaggtctcggaagagaccttgcgaacaggaggtaggcacctgtgtcagcgagggctcgtaccccgcaggcactctgagctggcatcttgatggaaagccattggtcccaaacgaaaaaggcgtttctgtgaaggagcagacaagacggcatccagaaacagggctcttcacactccagtcggagctcatggtgacccccgcacgcggaggtgaccctaggcccacattctcttgtagttttagccccggactcccgcgtcactag

SEQ ID NO: 213846 - DNA, 402 bp, synthetic construct
  misc_feature 1..402: note = Description of Artificial Sequence: Synthetic coding sequence
  source 1..402: mol_type = other DNA
atgaaggacggagtgccactgccgctccctccatcaccagtgctgatacttccagaaatcggaccccaggaccagggaacgtacagctgtgtggcgacacacagtagccacggaccacaggaaagcagagctgtgagcatcagcattatagagccaggggaagaggggccaactgctgggtcggtgggagggtccggactcgggaccctagcactggcgcttgggattctgggcggtctgggcactgcagcccttttgatcggagtgatcttgtggcagcggaggcagagaaggggagaggagcgaaaagccccagaaaatcaggaggaagaggaagaacgcgcagaacttaatcagtccgaggagcccgaagcaggggagagtagtactgggggaccttag

SEQ ID NO: 213847 - DNA, 366 bp, synthetic construct
  misc_feature 1..366: note = Description of Artificial Sequence: Synthetic coding sequence
  source 1..366: mol_type = other DNA
atggcagcaggtacagccgtgggggcttgggtgctcgttctatccctttggggcgcagtagtgggcgctcagaatatcaccgcccgaattggtgaaccactcgttctcaagtgcaagggagcccctaagaaacctccgcagcgcctcgaatggaaactgaacacagggaggaccgaggcctggaaagttctgtccccacagggcggagggccatgggactcagtcgccagagtgctgccaaatggtagtttgttcctccccgcagtaggaatccaggacgaggggatctttagatgccaggctatgaatcgcaatggcaaggagaccaaatccaactggtggtggagccagaaagttgagcagtag

SEQ ID NO: 213848 - DNA, 1029 bp, synthetic construct
  misc_feature 1..1029: note = Description of Artificial Sequence: Synthetic coding sequence
  source 1..1029: mol_type = other DNA
atggcagccggaacagctgtcggcgcatgggtcctggtactgagtctgtggggagccgtagtcggcgctcagaacattacagccagaatcggggaaccgcttgtgcttaagtgcaagggtgctcccaaaaagcctcctcagaggctagagtggaaacttggcggaggaccatgggatagcgtggctcgtgttctccccaatggatctctctttcttcccgcagtgggaatccaggacgaaggcatcttccggtgccaggcaatgaacagaaacggcaaagaaaccaaaagcaattatagggtgagggtataccagattcccggtaagccggagattgtagatagcgcatcagaacttaccgcaggtgtgccaaacaaagtggggacatgcgtgtcagaaggtagctatcctgctggaaccctgagctggcacctcgacgggaagccactggtgccgaatgaaaagggcgtatctgtgaaagagcagacccgcagacacccggagaccgggctattcacactccaatctgaattgatggtgactccagctcgagggggtgacccacggccaacgttcagctgttctttcagcccaggactgcctaggcacagggcactgcgcacggccccaatccagcccagggtttgggaaccagttcctctggaagaggttcagttggtggtggagccagaaggaggagcagtagccccagggggtacagttaccttaacctgtgaagtgcctgctcagccctcacctcagatccattggatgaaggatgttagcgacctggagagaggagccggtcgtacccgcaggggaggcgcaaattgcaggctgtgtgggcgtatcagagccggaaatagtagccccggtccaggagacccaggccgacctggagattcacgccctgctcattggggccatctcgttgcaaaggccgctacgccacgccgtggagaggaggggcctaggaaaccagggggacggggaggagcctgtcggacagagtccgtggggggaacctag

SEQ ID NO: 213849 - DNA, 885 bp, synthetic construct
  misc_feature 1..885: note = Description of Artificial Sequence: Synthetic coding sequence
  source 1..885: mol_type = other DNA
atgaacagaaatggaaaagagacaaagagcaattaccgcgtaagggtgtatcagattcccggtaagcccgagattgtggatagcgcatctgaactcacggccggtgttcccaataaggtgggaacctgcgtgtccgaaggttcctaccccgcaggaaccctgtcgtggcatttggatggcaagcccttagtccctaacgaaaagggggtcagtgtgaaggagcaaacccggagacatcccgaaactgggctattcaccctccagagtgaactaatggttacacccgcacgcggaggagaccctcgacctacattttcatgctcgtttagtcctggtcttcctcgtcatagagcgctgaggacagcacccatccagccgagagtttgggaaccagtgcccctggaagaggttcaactcgtggtggagcccgagggcggtgccgtagccccaggtggcacggtgactctgacatgcgaagtaccagctcagccttccccgcagatacattggatgaaggatggagttccgctcccactccccccatcccctgtgcttatcctgcctgaaatcggccctcaggatcagggcacatatagctgcgttgcaacacactctagccatggcccacaagagagccgcgcagtgtccatttctattattggcagcgtggggggatctggtctaggtactcttgcgctcgcactgggaatcctggggggtttgggtaccgccgctctgctgattggggtgatcttatggcaacggcgtcaaaggagaggagaagaacgaaaggctcccgaaaaccaagaggaggaagaggaacgcgcagaattaaaccaatccgaggagccggaggccggagagtcaagtaccgggggaccatag

SEQ ID NO: 213850 - DNA, 1308 bp, synthetic construct
  misc_feature 1..1308: note = Description of Artificial Sequence: Synthetic coding sequence
  source 1..1308: mol_type = other DNA
atgggcgctggggaacgggtgcaggctcccccaagggctgaggcgacagcaggtcgtggcgctgatcgggctagaactttggagggatcccgcatggccgctggaaccgccgtgggagcttgggtgctggtactgtccctttggggggcagtcgtgggagcccagaacatcacggccagaatcggcgaaccgttggtgctgaaatgtaagggagcccctaagaaaccgcctcagcggttggaatggaaactaaataccgggagaacagaggcttggaaggtcctgagtccccaaggcggtggaccttgggactccgtggctagagtgctccctaacggatccctttttcttcccgctgtagggattcaagacgaaggaatcttcaggtgccaggcaatgaaccggaatgggaaggaaacaaaatcaaattaccgagtgagggtttatcagatacctggcaaacctgaaatcgtggactctgcctcggaacttaccgctggcgtgccaaacaaggtcggtacttgcgtctctgaaggtagctatcctgcgggtaccctgtcatggcacttagatggaaagccccttgtgcctaatgagaagggcgtgagcgtcaaagagcaaacgcgtcgtcaccccgagaccggtctgtttacgttacagagtgagctgatggtcaccccagctcgcggtggcgacccgcgtccgacgttctcgtgttcgttctcacccggtctccctaggcaccgcgcactgaggacggcacccatccaacccagagtgtgggagcccgtgcccctcgaggaagtgcagctggtggtggaacctgagggcggagctgttgcccctggcggtacagtgactctgacatgtgaggtgcccgcacagcctagccctcaaattcactggatgaaggacggcgtgccgctgccattgcccccttcccctgtgttgatcctcccagagattggccctcaggaccaggggacgtattcgtgtgtcgccacccattcatctcatggaccccaggaatctcgcgctgtttccatttccattattgaaccaggcgaggagggtccgacagcaggcagcgttggcggttcaggactgggaactttggccctcgccctcggaattttggggggtctaggtaccgcagcacttctcattggagtgatcttatggcagcgacgccagaggcggggtgaggagaggaaagctccagaaaatcaggaggaggaagaagaacgggcagaactcaaccagtccgaggagcccgaagccggagagagctctacaggtgggccttag

SEQ ID NO: 213851 - DNA, 1215 bp, synthetic construct
  misc_feature 1..1215: note = Description of Artificial Sequence: Synthetic coding sequence
  source 1..1215: mol_type = other DNA
atggctgccggaaccgcggtgggcgcatgggtcctggtccttagtttgtggggggctgtcgttggagcccagaatatcaccgctaggattggcgagcctctcgtcctgaaatgtaaaggagctcccaaaaagccccctcagcgattagagtggaagctcaacactgggaggacggaggcctggaaggtcttgtcacctcaaggaggtggcccatgggactctgtcgccagggtgttgccgaatggatctctcttcttgcccgcagtgggtattcaggacgaaggtatcttccggtgtcaggctatgaataggaatggaaaggaaaccaagtcgaactaccgtgtgcgggtgtaccagatccccggaaaacccgagatagtggattctgcttctgagctcactgctggagtaccaaataaagtcggaacgtgtgttagcgagggtagctacccagcgggaaccctgagctggcaccttgatggcaagcccctagttcccaatgagaagggagtgagtgtgaaagaacagacccgtcgacacccagaaacaggcctgttcacgcttcagtcagagctgatggtgactcccgcacgtgggggtgacccccgaccgaccttctcatgttccttctctccaggtcttcccagacatcgcgcactgcgcacagcacccatccagcctagggtatgggaacctgtgcccttggaggaggtccaactggttgtggagcccgaggggggagccgtggcccctggaggaacggtgaccctcacatgtgaggtccctgcccagcccagtccacagatccattggatgaaggacggtgtgcctttgccgctccctcccagtccagtcctgatcttgcccgaaatcggtccccaggatcagggtacatactcatgtgtggcaacacactccagccacggaccccaagagagccgggctgtgagcattagtattatcgaacccggagaggaagggcctactgccggaagtgtcggcggaagcggcttagggaccttggcactggctttggggatcctgggagggctgggcaccgcggctttgctgatcggcgtgatcctttggcagaggcggcaaagacgcggagaggagcgtaaggctccagagaaccaggaggaagaggaggagcgggcagagctgaatcagtctgaggaacctgaagccggtgagagtagcacaggcggaccatag

SEQ ID NO: 213852 - DNA, 1044 bp, synthetic construct
  misc_feature 1..1044: note = Description of Artificial Sequence: Synthetic coding sequence
  source 1..1044: mol_type = other DNA
atggcagcaggtacggccgtgggagcttgggttctggtgttgagcctctggggggcagttgttggcgctcagaacattacagcaagaatcggggaacctttagtcctgaagtgtaagggtgcaccaaagaaacctccacagaggctggaatggaaactcaacacaggcaggaccgaggcctggaaggtgctgtccccccaagggggtggaccatgggactctgtggctcgcgtcctcccaaacggcagcctgttcctaccagccgtaggaatacaggacgaggggatctttaggtgccaggctatgaatcgtaacggtaaggaaactaagagcaactaccgggtgcgagtctaccagattcctggtaagcctgaaatagttgattcagcaagcgaactaacagctggagttccaaacaaagttggaacttgcgtttccgaagggtcttacccagctggaactttgtcctggcatctggacggcaaaccactcgttcctaacgaaaaaggcgtttctgtcaaggaacagactagaagacatcccgaaaccggcctttttactttacaatccgaacttatggtaacccctgcaagagggggtgatcccagacccactttctcatgcagttttagtcccggactgcccaggcaccgcgctctgcgaacggctcctattcagcctcgggtttgggaaccagtgccgctagaagaagttcaactcgtcgtcgaaccagagggaggagcagttgccccaggaggcaccgtgactctgacatgcgaagtccccgctcaaccctccccacagatccactggatgaaagacggagtgccgctgccactcccacctagtcctgttttgatcctgcccgaaattgggcctcaggatcaggggacttacagctgcgtggcaacccactcttctcacggcccacaagagagccgagccgtttccatcagtatcatagaaccaggagaggaaggcccaactgccggagaagggtttgataaagtccgggaagcggaggatagcccccaacacatgtag

SEQ ID NO: 213853 - DNA, 1029 bp, synthetic construct
  misc_feature 1..1029: note = Description of Artificial Sequence: Synthetic coding sequence
  source 1..1029: mol_type = other DNA
atggcagccggaacagcagtgggggcatgggtgctggtactgtctttatggggggcagtcgtgggggctcagaacatcaccgcacgcatcggagaacctctggtactgaaatgcaaaggtgctcctaagaaacccccacagcgactcgaatggaagcttggtggcggaccgtgggattccgtggccagagtgctaccaaatggcagcctgttcctgcccgcagtgggcatccaggacgaggggatcttcaggtgtcaagcgatgaatcggaacggcaaagaaaccaaaagtaattatagagtgcgtgtttaccagatccccggaaagcctgagattgtcgatagcgcaagcgagctgactgctggcgtcccaaacaaagtgggtacctgcgtctcagaaggttcttaccctgcaggcaccctcagctggcacctcgacgggaagccgctcgtgccgaacgaaaaaggcgtgagcgttaaagaacagaccaggcgccaccctgagactggcctatttactctgcagtctgagctcatggtcacgcccgctcggggaggagatcccaggccaacattcagttgcagtttttcccccggacttccgaggcatcgggctctccgaacggcacccatccagccacgagtatgggagccggtgcctctggaagaagtgcaactggtagtggagcctgaggggggagcagtcgccccaggtggaacagtgactctgacttgcgaggtaccagcccagccatctccacagatccattggatgaaggacgtgtccgacctggaaagaggagctggccgaactcggaggggcggagccaattgccgcctgtgtgggcgtatcagagcgggaaactccagcccaggccctggcgatcctggcagaccaggagactcacgaccagctcattgggggcacctggtggctaaggctgcaacaccacgacgaggcgaggaggggcctagaaaacccggaggaagaggaggcgcttgcagaactgagtctgttgggggaacatag

SEQ ID NO: 213854 - DNA, 1029 bp, synthetic construct
  misc_feature 1..1029: note = Description of Artificial Sequence: Synthetic coding sequence
  source 1..1029: mol_type = other DNA
atggccgcagggacggccgttggggcttgggtgttagtactcagcctgtggggagctgtcgtgggcgcacagaatataacagcccgaatcggcgaaccacttgtgctgaagtgtaagggtgcacccaagaagccccctcaacgactcgagtggaaactgggcggaggaccctgggattccgtagcgagagtgctgccaaacggatccttgtttttgccagccgtgggaattcaggacgaaggaattttcaggtgccaggccatgaaccggaatgggaaagaaacaaagtcaaactacagggtgagagtataccagatccctggcaaacctgagatcgtcgactccgctagcgaactgaccgcaggagtccctaataaagtgggaacgtgtgtaagcgaaggatcctacccagccggtacactgtcttggcatttggacggtaaaccgctcgtgcccaacgaaaaaggagtgtccgttaaagagcagactaggaggcaccctgagaccggactgttcacgctgcagtctgagttgatggtcaccccggcacggggaggcgatccgcgacctaccttcagctgcagcttttcacctggcctgccaagacatagagccctccgtaccgcccctattcagcctcgggtctgggaaccagttccgctggaagaagtgcaattggtagttgaacctgaggggggagccgtggcgcctggcggaactgtcacactgacttgcgaagttccagcacagccctctccccagatccactggatgaaggacgtaagcgacctggagcgaggcgcaggtcgaactagacgaggaggcgctaactgccggctctgcggacgcatccgggcagggaatagttccccaggccctggagatccaggacgtccgggagatagcaggcctgcacactgggggcacttggtggcaaaagcagcaacaccaagacggggtgaagaagggcctcggaagcctggaggtaggggaggcgcatgtagaaccgaaagtgtgggagggacatag

SEQ ID NO: 213855 - DNA, 702 bp, synthetic construct
  misc_feature 1..702: note = Description of Artificial Sequence: Synthetic coding sequence
  source 1..702: mol_type = other DNA
atggcggcaggaacggccgttggcgcatgggtcctcgtgctgtcgctctggggggcagttgtcggggcacagaacatcaccgctagaataggcgaaccacttgtgctcaaatgtaagggggcaccgaaaaaaccacctcagcgattggagtggaaactgaacacaggtcgtacagaagcttggaaggtcctcagtccgcaagggggagggccttgggacagcgttgcgcgagtgctgcctaatagttcactcttccttccagcggtgggaatacaggatgaaggcatcttcagatgtcaggcaatgaacagaaacggcaaagagacaaaatcaaactatagggtgcgcgtttatcagatccctgggaagcccgagatagtcgactcagcaagcgagctcactgcgggtgtccccaataaggttgtcgaggagagccggcgaagcagaaaaaggccttgtgagcaagaggtgggcacttgtgtgtctgaggggagctacccggcaggcacgctctcatggcacctcgacggtaagccactcgtgccaaacgaaaagggtgtgagcgtgaaggaacagactagacggcaccccgaaaccgggttgtttactctgcagtccgagttgatggtcaccccggctagggggggagatccacgccctacattttcatgcagttttagtcctggcttacccaggcattag

SEQ ID NO: 213856 - DNA, 705 bp, synthetic construct
  misc_feature 1..705: note = Description of Artificial Sequence: Synthetic coding sequence
  source 1..705: mol_type = other DNA
atggccgctgggactgcagtgggggcttgggtgctcgtcctctccctgtggggcgctgttgttggcgctcaaaatatcactgctcggattggtgaaccactcgtactcaagtgcaaaggagcccctaagaagcccccacagaggttggagtggaagctgaatacaggacgcacggaagcctggaaggtattgtctccacagggtggtggaccatgggactccgtcgcaagggtgttgccgaacggcagcctgtttctgcctgcagttggtatccaggacgaagggatatttagatgccaggccatgaataggaatgggaaagagaccaagtctaactatcggagcctgagaactttcactattaccgcctccgactggatttttccgcctagtgaaattccagggaagcccgagattgttgatagcgcttccgaattgacagcaggtgtgcccaacaaggtgggaacttgcgtctcagagggcagttatccggcaggcacactgagctggcacctggacggcaaaccccttgttcctaatgaaaagggagtcagcgtgaaggaacaaaccaggagacatccagaaaccggattgttcacactgcagtccgagctaatggttacccctgccaggggtggcgaccctcgtcccacattcagttgttctttttctccaggcctgcccaggcacagggccctgcggtag

SEQ ID NO: 213857 - DNA, 705 bp, synthetic construct
  misc_feature 1..705: note = Description of Artificial Sequence: Synthetic coding sequence
  source 1..705: mol_type = other DNA
atggctgccggaactgctgtaggtgcctgggtgctcgtgctctcgctgtggggagctgtggtaggagctcagaatattaccgccaggataggtgagcctctcgtgctgaaatgcaagggggctcctaagaagccgcctcaaagattggagtggaagcttaataccgggaggacggaagcttggaaagtgttatcgccccagggcggaggcccttgggacagcgtcgcgagagttctcccaaacggcagtctgttcctgccagccgtggggattcaggacgagggcattttccggtgccaggcaatgaaccgcaacggcaaggaaaccaagtctaactaccgctctctgaggacattcaccatcactgccagcgattggatcttccccccatctgagatccctggcaaaccggagattgtggacagtgcctcagagttgaccgcaggggtaccaaacaaagtgggaacctgtgtgtccgaaggttcatatcccgcagggacactatcatggcacctggatggaaagcctttagttcctaatgagaaaggcgtgtctgtgaaggaacagacacgcaggcatcccgagacagggctctttacactccagtcagaactgatggttacacccgcacgagggggtgacccccgacccacatttagttgcagctttagcccagggcttcctagacaccgtgccctgaggtag

SEQ ID NO: 213858 - DNA, 702 bp, synthetic construct
  misc_feature 1..702: note = Description of Artificial Sequence: Synthetic coding sequence
  source 1..702: mol_type = other DNA
atggccgctggtactgccgttggtgcttgggtgctggtcctatcattgtggggcgctgtggtgggagcacaaaatattacagcgaggatcggggagccccttgtcctcaagtgcaaaggtgccccaaaaaagccacctcaaagattagaatggaaactgaatacaggcaggacagaagcttggaaggttttaagcccccagggaggaggcccttgggatagtgtggcccgagtgctccctaacgggagcctctttctgccagccgtggggatccaggatgaaggaatctttagatgtcaagctatgaaccgcaacggtaaggaaaccaaatccaattatagagtccgtgtataccagattccgggaaaaccagaaatcgtagattcagcctcggaactgacagcaggcgtcccgaacaaggtggtcgaggaaagcagaagaagccgcaagcggccttgtgaacaggaggtcgggacctgcgtgtctgaaggctcttatcccgctgggacactgtcatggcatcttgatggcaaaccactggtacccaacgagaagggagtctcagtgaaagagcaaaccagacggcatcctgagaccggcctttttaccttacagtccgagctaatggtcactccagcgcgaggaggcgatccaaggcccacattcagctgttcctttagccctggcctacccaggcactag

SEQ ID NO: 213859 - DNA, 1215 bp, synthetic construct
  misc_feature 1..1215: note = Description of Artificial Sequence: Synthetic coding sequence
  source 1..1215: mol_type = other DNA
atggcagcaggcacggccgttggcgcttgggtgcttgtgctttctctctggggtgccgttgtcggtgcccagaatattactgcacggataggggagcctttggtactcaagtgtaagggggcacccaaaaaacctcctcaacggctggagtggaagctcaacacaggcaggactgaggcatggaaagttctgtcaccccagggaggtggcccttgggactccgtggctcgggtgctgcctaactcttctctgttcctccccgcagtaggtatccaggatgagggtatctttaggtgccaggctatgaatcgtaacggcaaagagaccaagagcaattatagagtgcgtgtgtatcaaatccctggtaaacccgaaatagttgactctgcaagcgagctaactgcaggtgtccccaacaaggtcggcacctgtgtgtccgaagggtcttatcccgctgggactctgtcctggcacctagatggaaaacccttggtccctaatgaaaagggtgtttcagtgaaagagcagactcgccgtcaccccgaaactggcctttttaccttacagtccgagctgatggtgacacccgctcgcggaggcgatcctcgacccaccttctcttgctcatttagccctggcctcccacgtcatagggcactccgtaccgctcccatccaacctagggtttgggagcctgtaccgctggaggaggtgcagctagttgttgaaccggaaggtggagctgtcgcacctggagggacagtgactctcacctgtgaggttccagcccagccctctcctcagatacattggatgaaggacggcgtccctctaccgttgcccccttctccggtattgatcctccctgagatcggaccacaggatcagggcacctattcctgtgtggccacgcatagctctcacggcccacaggagagtagagccgtgagtatctctatcattgagcccggagaggagggaccgaccgcgggatctgtcggtggttctggccttggaaccctggctttggctctggggatcctaggcggattaggtacagccgcactgttgatcggagtgatcctgtggcaacggaggcaacggaggggtgaggagcggaaggctcccgagaatcaggaagaggaggaggagcgggcagaactgaaccaatcggaagaaccagaggcaggcgaaagtagcacagggggaccgtag

SEQ ID NO: 213860 - DNA, 1044 bp, synthetic construct
  misc_feature 1..1044: note = Description of Artificial Sequence: Synthetic coding sequence
  source 1..1044: mol_type = other DNA
atggctgccggaacagcagtcggagcttgggtcctggtcctgtctttatggggagcggtggttggagctcagaacataaccgccagaatcggagagccgctagttctaaaatgtaaaggagctcccaaaaagccaccccagcgcctggaatggaaactgaatacaggtcgcaccgaagcctggaaagttctgtctccccagggaggcggtccctgggacagcgtggccagagtcttaccaaacgggagcttgtttctccccgcagtgggcatccaggatgagggtatcttccggtgccaggccatgaaccggaatggtaaagagaccaagtctaactacagggtaagggtctatcagattcctggtaagcccgagatcgtggattccgcttccgagcttacggccggagtgcctaacaaagtaggaacctgtgtgagcgagggaagttaccctgctggtactctttcttggcatttagacggcaaaccgcttgtgcccaacgagaaaggtgtgagtgtgaaagagcagacccgccgtcatcctgagaccggactctttaccctccagtctgagctaatggtcacaccagccaggggaggcgaccctcgtccgactttctcttgctccttctcgcccggactgcccaggcacagggccctgaggacggctcccatccagcctagagtatgggagccagtcccattagaagaagtgcagcttgtcgtcgaacctgagggcggtgctgtcgcgccaggcggtacggtcaccctgacctgcgaggttccagctcagccttccccccaaatccactggatgaaggatggcgtgccgctcccactgccaccttccccagtgctaattctcccagagattgggcctcaggatcagggaacttactcttgcgtggccacgcactcctctcacggccctcaagagtcccgcgcagtcagtatcagtattatcgagcccggagaggagggaccaaccgcaggtgaagggtttgataaggtgcgcgaggctgaagactcaccacaacacatgtag

SEQ ID NO: 213861 - DNA, 702 bp, synthetic construct
  misc_feature 1..702: note = Description of Artificial Sequence: Synthetic coding sequence
  source 1..702: mol_type = other DNA
atggcagcaggcactgccgttggagcgtgggttctcgtgctgagcctttggggagcggtcgtcggggcacagaatattactgcaaggattggggagccactggtcctcaagtgcaaaggcgcaccaaagaaacctccccagcgtctcgaatggaagctaaacactggtcgcaccgaagcctggaaagttctgagcccacagggcggtggcccttgggacagcgtggcacgtgtgctgcctaatggttccctgttcctccccgctgtggggattcaggatgaaggaatattcagatgtcaagctatgaatcgcaatggtaaggaaacaaaaagtaattatcgcgtgagagtttaccaaatcccgggaaaacccgaaatcgtcgactccgcctcagaattaacagcaggggttcccaacaaagtagttgaagaaagtaggcgtagcagaaaacgaccctgcgagcaggaagtgggcacatgcgtttccgaggggtcgtaccctgctggaaccttgagctggcacttagacggtaaaccattggtccccaatgaaaaaggtgtttcagtgaaagaacaaacaaggcggcaccctgaaactggattatttacactgcagtctgagctaatggtaaccccagccaggggcggtgatcccagacctacttttagttgctccttctccccaggcctcccccgacattag

SEQ ID NO: 213862 - DNA, 1215 bp, synthetic construct
  misc_feature 1..1215: note = Description of Artificial Sequence: Synthetic coding sequence
  source 1..1215: mol_type = other DNA
atggctgctggcaccgccgttggcgcatgggtgctcgtcctgtctctttggggggctgtcgtcggagcacagaacattaccgcgagaataggagagccattggtgctgaaatgcaagggcgcaccaaagaaacccccacaaaggttagagtggaaattaaatacgggcaggaccgaagcttggaaggtcctgtcaccccagggaggaggtccttgggacagcgttgctcgagttcttccaaacggcagtctcttcctccccgcagtggggattcaggacgaggggatctttcggtgccaggcgatgaaccgaaatggtaaggaaacgaagtcgaactatagggttcgagtctatcaaattcccggtaagccagagatcgtggactccgctagtgaacttacagccggtgttccaaataaagtcggtacatgcgtgagcgagggctcttaccctgctggaaccctctcatggcaccttgacgggaagccactcgtgcccaacgaaaagggagtgagcgtgaaagaacaaacgaggcgccaccccgagaccgggttgtttaccctccagagcgaacttatggtgactcctgcacgcggtggcgaccctcgacccacttttagctgctcctttagccctggactgcccaggcaccgggctttgaggacggcacccatccagcccagggtctgggagcccgttcctctcgaagaggtgcaactggtggtcgaaccagaagggggtgccgtggcccctgggggtactgtaactcttacctgtgaagtcccagcgcagcctagcccccagattcattggatgaaggatggagtcccacttccactccctccctccccggtgctgattctccccgagatcggccctcaggatcagggcacctactcttgcgtggccacacacagcagccatggccctcaggaatctagagccgtgagtataagcattattgagcccggagaggaaggcccaaccgccggatccgtggggggatccggccttgggaccctggccctggccttaggcatcctgggtggcttggggaccgctgcgctgttaataggtgtgattctatggcagcggcgacagcgcagaggtgaagagagaaaggcacctgagaatcaggaagaagaggaggaaagggctgagttgaaccagtcagaagaacctgaggcaggtgaaagttccaccgggggtccctag

SEQ ID NO: 213863 - DNA, 705 bp, synthetic construct
  misc_feature 1..705: note = Description of Artificial Sequence: Synthetic coding sequence
  source 1..705: mol_type = other DNA
atggccgctggaacagccgtaggagcatgggttcttgtcctgtcactctggggggcagtggtgggtgcgcagaatattaccgctcgcatcggagaacccctggtccttaaatgtaagggcgctcccaagaaaccacctcagcgactggaatggaagttaaatactgggaggactgaagcttggaaagtcctgagtccacagggaggtggcccttgggatagcgttgctcgagtcttgcctaatagcagcctattcctgcctgccgtgggtatccaggatgagggaatcttccgatgccaggctatgaatagaaacggcaaagaaaccaagagcaactaccggagtttaagaacgttcaccatcaccgctagcgactggatcttccctccgtccgaaatccccggtaagccagagatcgtagattcagcttcggaactgacagcaggagttcctaataaagttgggacctgcgtatctgaaggctcatacccggcaggcaccctgtcttggcatctggacgggaaacctctggtcccaaatgaaaaaggcgtcagcgtgaaagaacaaacaaggcgtcaccctgaaacaggactgtttaccctccagagcgagttgatggtaactcccgctagaggtggggacccgaggcccacattctcctgttcattcagcccagggctaccacggcaccgggctctccggtag

SEQ ID NO: 213864 - DNA, 1092 bp, synthetic construct
  misc_feature 1..1092: note = Description of Artificial Sequence: Synthetic coding sequence
  source 1..1092: mol_type = other DNA
atggcagccggaaccgccgtgggggcatgggtcctggtgctgagcctctggggagcggttgtgggtgcacaaaatattactgcaaggatcggggagccattggtcctgaaatgtaagggagctccgaagaagccaccccaaagactagaatggaaattaaacaccggccgtaccgaagcttggaaggtgttgtcacctcagggcggtggaccctgggatagcgtggctagggtactgcccaatggctcattgtttctgccagcggtcggtattcaggatgagggcattttccgttgtcaggccatgaatcgaaacggaaaggaaaccaagtcaaactatcgcgtgagagtgtaccaaatccccggaaagccggagatcgtggacagcgcatcagagctcactgctggagttcccaataaggttgtcgaggagagcaggcgttctcgcaaaagaccttgcgagcaggaggtggggacttgcgtgtccgagggaagctatcctgccggaactctttcatggcatcttgacgggaagccactggtcccaaacgaaaagggagtaagcgtgaaagagcagactaggcggcatccagaaaccggcctgtttactttgcaaagcgagttaatggtaacaccagccaggggaggtgatcccagacccacattcagttgctctttcagccctgggctgccgagacatcgggctctaaggaccgccccaatacaacccagagtgtgggagcccgtgcctctggaagaagtgcaactagtggtcgagccagaggggggagcggttgcaccagggggtacggtgactctgacctgcgaggtgccagcccagccatctcctcagatccactggatgaaggacggggttcccttgcctctgcctccgtctcccgttttgatcctgcccgagatagggccacaggaccaaggcacctattcttgcgtcgccacacacagctcccatggccctcaggaatcacgagctgttagcatttctatcatcgaacccggagaagaaggacccaccgcgggagagggctttgacaaggtgagggaagcagaggactcgccgcagcatatgtag

SEQ ID NO: 213865 - DNA, 1029 bp, synthetic construct
  misc_feature 1..1029: note = Description of Artificial Sequence: Synthetic coding sequence
  source 1..1029: mol_type = other DNA
atggctgctggcaccgccgtgggcgcatgggtcctggtcctgtccctgtggggcgctgtggtcggcgctcagaatatcactgcccgaataggggaaccattggtgcttaagtgcaaaggggctccgaagaagccccctcagaggctagaatggaagttgggaggcggaccttgggattcagttgcccgagtgctgccgaatggatctttgtttctgcccgcagtgggaattcaggacgagggcatctttcgctgtcaggcgatgaatcgaaacggcaaggagactaaaagtaattaccgcgtgagagtctaccagattcctggcaaaccggagatcgtggactccgcatcggagcttactgcaggcgtgccaaataaagttggcacttgtgtctccgagggatcctacccagcaggcactttgtcctggcacctggacggaaaacccttagtgcccaatgaaaagggggtttcggttaaggaacagacgcggcgacaccctgaaaccggactgttcactctccagagcgagcttatggttacacccgctagaggcggagatcccagaccgacttttagctgttcttttagccccggactgcctcggcatcgggctctacgaacagcaccgattcaacccagggtgtgggagcccgtacctctcgaagaagtgcaactcgtcgtggaaccggaggggggtgccgttgccccaggtgggacggtcaccctcacctgcgaggtccccgctcaaccctcaccacagatccactggatgaaggatgtttctgatttggagaggggtgcagggagaacaaggagaggcggtgccaactgcagattgtgcgggaggatacgggctggaaattcgtctccaggaccaggtgatcctggaaggccaggcgactccaggcccgcacactggggccatttggtcgccaaggcagcgaccccacggagaggcgaggaagggccacggaaaccaggcggacgcggaggtgcatgccgcaccgagtccgtcggagggacatag

SEQ ID NO: 213866 - DNA, 702 bp, synthetic construct
  misc_feature 1..702: note = Description of Artificial Sequence: Synthetic coding sequence
  source 1..702: mol_type = other DNA
atggcagccggaaccgccgtgggagcatgggtgctggtgctttccctgtggggcgcagtggtgggagctcagaatataaccgcgaggattggggagcctctggtgctgaagtgcaagggggctcccaagaaaccaccgcagagactggagtggaagctgaacactgggaggaccgaggcctggaaggttctgagccctcagggcggaggcccttgggactcggtggctcgggtgttaccaaatggaagtctgttcctccctgctgtaggaatacaggacgaaggaatatttcggtgccaggccatgaacagaaatggtaaagagaccaaatctaattaccgggttcgggtgtatcagattccgggaaagcctgagatcgtcgattcagcttcagaactgaccgccggtgttcctaacaaagtggtcgaagaatcaagacgaagccgaaaacggccttgtgagcaggaggtgggcacctgcgtaagcgagggaagctatccggctggaacgctgtcttggcatctagatggaaagcccctggttcctaacgaaaagggagtgtccgtgaaagagcagacccggaggcaccccgagacagggctgttcactctccagagcgagctgatggtgactccggcaagagggggagatcctcggcctaccttttcttgcagtttcagccccggactgccacggcattag

SEQ ID NO: 213867 - DNA, 1029 bp, synthetic construct
  misc_feature 1..1029: note = Description of Artificial Sequence: Synthetic coding sequence
  source 1..1029: mol_type = other DNA
atggctgcgggaacagccgtgggcgcatgggtactcgtgctcagcctgtggggcgcagttgtgggcgcacagaatatcaccgcgaggatcggcgaaccacttgtcctcaagtgcaagggcgctccaaaaaagccccctcagcgtctcgaatggaaactgggaggaggcccttgggacagtgttgctcgagtactgcccaacggaagtttatttttgccagccgtcgggattcaggatgagggtatcttccggtgccaagcgatgaaccggaacggcaaggaaactaaatcaaactatagggtgagagtgtatcagatccctggcaagccagaaattgtggactctgcttccgaattaacagctggtgtgccaaacaaagtggggacgtgtgtttcagagggctcataccccgctggtacattgagttggcatttggacggcaagccgctggtgccgaacgagaaaggcgtaagcgtcaaggaacaaaccagacggcatccggaaacagggcttttcaccttgcaatcagagcttatggtcaccccagccaggggtggagaccccagacctacctttagttgctcattctcccctggattgcccaggcatcgagccctgaggaccgccccaattcagccaagggtgtgggagccagtgcctctggaggaagtgcagcttgtcgttgagccagaaggaggcgctgtggccccaggcggtacagtgaccctcacatgcgaagtcccagcccagccttccccccagattcattggatgaaggacgtctctgaccttgaacgcggagccggaagaacacggagaggcggtgctaactgcagactttgcggaaggattcgagcaggcaacagctcacctggtccaggagatcccggtcgcccaggtgactcccgtcccgcacactggggccacctcgttgcaaaggctgctacccctcggaggggcgaggagggcccacgaaagccagggggacgcggaggggcatgtcggaccgaaagtgtgggaggcacttag

SEQ ID NO: 213868 - DNA, 705 bp, synthetic construct
  misc_feature 1..705: note = Description of Artificial Sequence: Synthetic coding sequence
  source 1..705: mol_type = other DNA
atggctgcgggaactgcagtgggtgcttgggtgctggtcctgagtttgtggggcgctgtagttggcgcacagaatatcacagcaaggattggagagcctctcgttttgaagtgtaaaggcgctccaaaaaaaccgccacaacgattagaatggaaactcaatacaggccgaacagaggcctggaaagttttatcaccccaggggggaggaccttgggacagcgtggcgcgtgtcttacctaacggcagccttttcctgcctgcagtaggaattcaggacgaaggtatcttccggtgtcaggccatgaacaggaatgggaaagagactaaatcaaactacagatctctgcggacgtttacaatcaccgcgtctgattggatttttcccccatccgaaattccaggaaaacccgagatcgtcgattctgcttctgagctgacagcaggagtacccaacaaggtgggaacttgtgtttcagagggctcctatccagcagggactctgagttggcatctggacggcaaaccacttgtcccaaacgaaaagggcgtctcggttaaagagcagacacggaggcaccctgagactgggctgttcactttgcagtcagagcttatggtgactccagctagaggaggagaccctcgccctaccttttcgtgtagcttctctcctggactgccaaggcaccgggcactgaggtag

SEQ ID NO: 213869 - DNA, 1215 bp, synthetic construct
  misc_feature 1..1215: note = Description of Artificial Sequence: Synthetic coding sequence
  source 1..1215: mol_type = other DNA
atggccgcaggcacagctgtgggcgcatgggtgctagttctctccctgtggggtgctgttgtcggcgcacagaacatcaccgcacggatcggggaaccgttggtcctcaaatgcaaaggtgccccaaaaaaacctcctcagaggctggagtggaagctgaacactgggagaaccgaggcgtggaaggtgctgtccccccagggcggaggcccttgggactctgtagctcgcgtgctgcccaatggtagtctcttcctgccggctgtgggtatccaggatgagggcatatttcggtgtcaggccatgaaccgcaatgggaaggaaacaaaatcaaactacagagtgagggtctaccagatccctggcaaacccgaaatagtggactctgcgtcagaactaaccgcaggcgtcccaaataaggtggggacgtgtgtgtctgaaggctcatatcccgctgggacactgagttggcacttggatggcaaacccctggtgcctaacgagaagggagtgagcgtgaaagagcagacacggagacatcccgagactggcctgttcaccctccaatccgaactcatggtcacacctgctcggggaggcgatcctcggccaactttcagttgttcattcagtcctgggctgccacggcacagagctttgcgcaccgctcctattcagcccagggtgtgggagccagtcccgctcgaggaagtgcagctcgtggtggagcccgagggaggagctgttgctcctggcggaacagtgacccttacctgtgaggtgcccgcacagcccagtccacagatccactggatgaaagatggcgtgccactgccacttccccctagccccgtgctcatcctccccgaaatcggtccccaggaccagggaacctactcatgcgtcgcaacacattcctcccacggaccacaagagtcgcgtgccgtgtcaattagtattatagagcccggtgaggagggcccaaccgccggatccgtaggcggttctggcctcggtacactggccctggccctcggcatccttggagggctgggcaccgccgctttgctaatcggagttatattatggcaacgcaggcaaagacgtggggaagagagaaaggcccctgaaaatcaagaggaagaggaagaacgggcagagctgaatcagtctgaggagccggaggctggcgagagcagtacgggcggaccttag

SEQ ID NO: 213870 - DNA, 1029 bp, synthetic construct
  misc_feature 1..1029: note = Description of Artificial Sequence: Synthetic coding sequence
  source 1..1029: mol_type = other DNA
atggcggctgggacagcagtcggggcatgggtgttagtactgtcactatggggggctgttgtgggcgctcagaacataacggcacgcattggggaacccttggtgttgaagtgtaagggtgcgcctaaaaaacctccccagagactcgaatggaagctcggaggcggtccgtgggattctgtcgcccgagtgttgcccaacagctcacttttcctgcccgcagtgggaatccaagacgaaggcatattcagatgccaggccatgaatcgtaacggaaaagagaccaaaagtaactatcgggttcgggtgtatcagattcccggtaagcccgagatagtcgatagcgcttctgagctgacagcgggtgtaccaaataaagtggggacttgtgtgtctgaaggttcatacccagccggaactctgagctggcaccttgacggaaaacccctcgtgccaaatgaaaagggggtaagcgtaaaagaacagactaggagacatcctgagaccggtctttttactctacagtccgagcttatggtcaccccagccagggggggagacccacggccaaccttctcctgctcctttagtcccggactacctagacacagggctcttcggacagcacccatccagccacgagtttgggagcccgtccctctggaggaagttcagcttgtggtagagcccgaggggggagcagtagctcccggaggcaccgtgacactgacttgcgaagtccccgctcagccgtcaccccaaatacactggatgaaagatgtctccgacctggaacgtggcgctgggagaacccgcaggggcggagccaattgccgtctgtgcgggcgtattcgagccggaaattctagcccagggcctggggatccaggaaggccaggcgactcccgccctgcccactgggggcacctagtagccaaagctgctacaccaaggcgaggtgaagaggggcctcggaagcctgggggacgcggtggcgcttgccggaccgaatcagtgggaggcacatag

SEQ ID NO: 213871 - DNA, 1044 bp, synthetic construct
  misc_feature 1..1044: note = Description of Artificial Sequence: Synthetic coding sequence
  source 1..1044: mol_type = other DNA
atggcagctggcaccgctgtgggggcttgggtgctagtgcttagtctgtggggcgctgtagtgggcgctcagaatatcactgcgcgaataggtgagcctctggtgctcaaatgtaagggggcacctaagaaaccccctcaacgcctggagtggaaactgaacaccggaagaacggaagcttggaaagtgctttctcctcagggtggcggtccttgggattctgttgccagagttctccctaatggtagtctattcctgcctgcagttgggatacaggacgagggcatttttagatgtcaagcgatgaatcggaatggcaaggagacaaaaagcaattatcgggtacgggtttatcaaatccccggaaagccagagatcgttgatagcgcttccgagttgacagccggtgtgccaaacaaagtaggcacttgcgtctccgaaggttcttatcccgcaggcaccctctcctggcatctggacgggaagccactagtccccaacgaaaaaggcgtcagcgtgaaggaacagacccgacgccaccccgagacagggcttttcacacttcaatcagagctcatggtaactccagccagaggcggtgatcccaggccgactttttcttgcagcttctctccaggcttgccgcgacatcgagctctccggacggccccaattcaacccagagtgtgggaaccggtgccactagaggaagtccagttagttgtggagcctgaaggcggtgccgttgcccctggtggtaccgtaacattgacatgcgaggttcctgctcagccttctccacagatccattggatgaaggacggcgtgccacttccattgcctccctctcccgtcctgatccttccagaaataggaccgcaagatcagggcacctatagctgcgtagctacacactctagccacggaccgcaggaatcaagagcagtgtcgatctctatcatagagccaggagaggaaggacctacagccggagagggtttcgacaaggtccgagaggccgaagatagcccgcagcacatgtag

SEQ ID NO: 213872 - DNA, 705 bp, synthetic construct
  misc_feature 1..705: note = Description of Artificial Sequence: Synthetic coding sequence
  source 1..705: mol_type = other DNA
atggctgccggtactgccgtcggagcatgggtgctggtactatctctatggggcgcagtagtgggggcacagaatatcacagcacgaattggagaacctcttgtgctgaagtgcaagggggcacctaaaaagcctccacagcgcctggagtggaagctgaacaccggcaggacagaggcgtggaaagtcctttctccgcaaggtggaggcccttgggattccgtagccagggtcctgcccaatgggagcctctttttgcccgcagtcgggatccaggatgaaggcatttttcgctgtcaggcaatgaacaggaatgggaaagagactaagagcaactataggagcctgcgcacctttactattacggcgtcagactggattttcccaccaagcgagattccaggaaaaccggagatcgtggactccgcttccgagttaaccgccggagttcctaacaaggtgggtacttgcgtttcagagggctcgtaccccgctgggaccttgtcctggcaccttgacggcaagccattggttccgaatgagaaaggtgtaagtgtgaaagaacaaaccaggaggcatcccgaaacgggcctgttcacattacagagcgagctgatggtgaccccagcccgaggaggagaccctagacccaccttctcttgttcattcagcccaggtctgccaaggcaccgagccctgcggtag

SEQ ID NO: 213873 - DNA, 1215 bp, synthetic construct
  misc_feature 1..1215: note = Description of Artificial Sequence: Synthetic coding sequence
  source 1..1215: mol_type = other DNA
atggctgctggcacagctgtgggcgcttgggtgctggttctctcactttggggcgctgtggtaggagctcagaatatcactgcacgtattggtgagcctcttgttcttaagtgtaaaggcgcaccaaagaaaccaccacagcggttagagtggaagctgaatacggggagaacagaagcctggaaggtcctctccccacaaggaggaggtccttgggattcagtcgcccgagtgctgcccaatggctcactcttcttgccggcagtcggtatccaggatgagggtatatttcggtgccaggcaatgaacaggaacggaaaagaaactaaaagtaattatagggtcagagtctatcagatccccggaaaacctgagattgtcgacagtgcaagcgagctaacagctggtgttcccaacaaggtcggaacctgtgtgagcgagggaagctatccagcaggcacactttcctggcatctggacggcaaacccctagtccctaatgagaagggagtatcagttaaggaacaaacccggcgtcatcccgagaccggtctgttcacactccaaagcgaactcatggtaaccccagcacgcggaggtgaccctcgccctaccttttcttgtagcttttcacccggactacctcgacaccgcgctcttcgaacagcgcctatccagccgagagtgtgggaaccagtcccactggaggaggtgcagctggtagtagagccggagggcggtgcggtggcaccgggagggactgtcacattaacttgcgaagttcccgctcaaccatctccgcagatacattggatgaaagatggcgtccctctaccccttccaccatcacctgtgctcatcctacccgagatcggaccccaagaccagggaacctatagctgcgtcgccacccacagtagccatgggccacaggagtcccgcgcagttagcatctctatcatcgaacccggagaggagggccctaccgcaggctcagtcggcggatccggcctcggtaccctggcactggccctcggcatcctcggaggactagggactgcggcactgttgattggcgtgatcctctggcagcggagacagagaaggggggaggaaagaaaggccccagagaatcaggaggaggaagaagagagagctgaactgaaccagagcgaagaacctgaggcgggagagtcctccaccggtgggccatag

SEQ ID NO: 213874 - DNA, 1044 bp, synthetic construct
  misc_feature 1..1044: note = Description of Artificial Sequence: Synthetic coding sequence
  source 1..1044: mol_type = other DNA
atggcagcaggaactgccgtgggtgcgtgggtgttagtgctgtctttgtggggtgccgtggtgggggctcagaacataaccgctagaattggggaaccactggtacttaagtgtaagggcgcacctaagaagcccccacagcgcttggaatggaagcttaatacaggcaggactgaggcctggaaagttttgagtccacaggggggtggcccttgggactccgtcgcgagggttctgccaaacagttctctgttcttgcctgcggtcgggattcaggacgaaggcatttttaggtgccaggctatgaatcgtaatgggaaggagaccaaatcgaactaccgcgtgagagtttatcagattccaggcaaacctgaaattgtagactctgcgtcagagcttaccgcaggagtgcctaacaaggtgggaacttgtgtatccgagggatcctatccagccggaaccttgtcctggcacctcgatgggaagccactggttcccaatgaaaagggagtttctgtcaaagagcagacacgtagacatcctgaaactggtctctttacattacagtccgagctgatggttaccccagctagaggcggagacccgcgaccaactttttcctgcagtttctcacccggactgccacgacaccgtgctctcagaactgctcctatacagccaagagtttgggagcctgttccgctcgaggaagtgcaactggttgtggaaccagaggggggagcagtggcccctggcggtactgttacgctgacttgcgaggtccccgcacagccctccccccagatccattggatgaaggacggagtacctctgcctcttccgccatccccagtattaattctgccggagattgggcctcaggatcagggcacctactcttgcgtcgcaacccattccagccatggacctcaggaatctcgcgcagtgagcatctccatcatcgagcccggtgaagaaggtcccaccgctggagagggatttgataaagtgagggaggctgaagactctccacagcatatgtag

SEQ ID NO: 213875 - DNA, 702 bp, synthetic construct
  misc_feature 1..702: note = Description of Artificial Sequence: Synthetic coding sequence
  source 1..702: mol_type = other DNA
atggcagcaggcacagccgtgggcgcttgggtgctcgtgctttccctgtggggggctgtggtaggggctcagaacatcacagctaggataggtgaacccctggtcctaaagtgtaaaggcgcaccaaagaaacctccgcagaggctggagtggaagcttaatacgggcagaaccgaggcatggaaggtgttaagcccccagggcggaggtccttgggacagcgtggccagggtcttacccaacggctcactgttcctgccagcagtgggcattcaggatgaggggattttccggtgccaggctatgaacaggaatgggaaggagacaaaaagcaactacagagtgcgcgtttatcagatacctgggaagcccgagatcgtggattccgccagcgaactcaccgccggtgtgcccaataaggtggtggaggagtccagacgctctagaaaaaggccatgcgaacaggaagttggcacctgtgtgtccgagggcagctacccggctggcaccctgtcctggcatttggatgggaagccactggtaccaaacgagaagggggtgtctgttaaggagcagacacggaggcatcctgaaacgggattatttaccctgcagagtgagttgatggtgacccctgcacgcggaggtgaccctcggcctacgtttagctgtagtttcagccctggactccccagacactag

SEQ ID NO: 213876 - DNA, 1044 bp, synthetic construct
  misc_feature 1..1044: note = Description of Artificial Sequence: Synthetic coding sequence
  source 1..1044: mol_type = other DNA
atggctgcgggaacagctgtaggcgcatgggtcttggtgctgtcactgtggggtgctgtggtgggtgctcaaaatatcactgcacggattggcgagcccctcgtgctcaaatgcaaaggcgcaccaaaaaaaccgcctcagcgcctcgaatggaaactgaataccgggagaacagaggcttggaaggtgctgtctccgcaaggcggaggtccatgggattcagtggccagagttttgcccaacggttctttgttccttcctgccgtgggaattcaagacgaaggtatcttcagatgtcaggctatgaacagaaatggtaaagagacaaagtccaactatagagtcagggtttatcagatacccggaaagcctgaaatcgtagattctgcaagcgagctaaccgccggagtgcctaacaaggtgggcacatgtgtcagcgaaggatcctaccctgcaggaaccctgtcctggcacttagatggcaaacccttggtgcctaatgaaaagggagtttcagtgaaagagcagacgaggcggcatccagagaccggtctattcactcttcagtctgagctgatggtgacaccagccagaggaggggatccaaggcctacgtttagctgctcattttcccctggactaccccgacaccgtgccctgcggaccgctccaattcagcctagagtctgggaacccgttcctctagaagaagttcagctggttgtggagcccgaggggggtgccgttgccccaggaggaaccgtaacgctgacttgtgaagtacccgcacagccctcaccccagatccactggatgaaggacggtgtccctctccctttaccgccatcacccgtcctcatactccctgaaatcggcccacaggaccagggcacttactcttgcgtagcgacacactcaagccatgggccacaagaatcccgcgctgtgtcaataagcatcatcgagcctggcgaggagggaccgacagcaggcgagggtttcgacaaggtccgagaagcagaggattcccctcagcatatgtag

SEQ ID NO: 213877 - DNA, 705 bp, synthetic construct
  misc_feature 1..705: note = Description of Artificial Sequence: Synthetic coding sequence
  source 1..705: mol_type = other DNA
atggcggctggaacggcggtgggagcctgggtgcttgtgttgtctctttggggcgcagtggttggagcccagaatatcacagcacgcatcggagagccactggtcctgaagtgtaaaggtgctccaaaaaaaccaccccagcgactcgagtggaagctgaacactggcaggaccgaggcatggaaggtgctctctccacaaggaggcggaccctgggactccgtagcaagagtgctgcctaacggctcactctttctgcccgctgtggggattcaagacgagggtatctttaggtgccaagcaatgaacaggaacgggaaagaaacaaagtccaattacaggtcactcagaacctttacgataactgccagcgactggatcttcccccctagtgagattccagggaagccagagatcgtggacagcgcgtcagaactgaccgcaggagtgcccaacaaagtaggcacctgtgtcagcgaaggttcctatccggcagggaccctcagctggcatctggatgggaagcccctggtccccaatgaaaaaggcgtatcggtcaaggaacaaactcgacgacaccctgaaaccggccttttcacattacaaagcgaactcatggtcactccagccagaggtggtgatcctcgtcctaccttcagctgtagctttagccccggattaccacgccatcgtgctttgcgttag

SEQ ID NO: 213878 - DNA, 1215 bp, synthetic construct
  misc_feature 1..1215: note = Description of Artificial Sequence: Synthetic coding sequence
  source 1..1215: mol_type = other DNA
atggccgcaggtaccgctgtgggagcctgggtgctcgttctgtctctatggggggcagttgtcggagcacagaatattaccgcaagaataggcgaaccgttggtcttgaaatgcaaaggtgcaccaaaaaaacctcctcagaggttagaatggaaattaaatactggacgcaccgaggcctggaaggtgctctcccctcagggcggtggcccatgggactccgtagctcgcgtgctgcccaacggttccttgtttttgcccgcagtaggtatacaggacgagggcattttcagatgtcaggcaatgaaccgaaacggcaaagaaactaaatctaactatagggtgcgagtgtaccagatccctggaaagccggagatcgtcgactccgctagcgagcttactgccggagtgccgaataaggtcgggacttgcgtgtccgagggcagttatcctgcaggcacgctttcttggcatctcgatggaaagccactggttcccaacgagaagggcgtgtctgttaaagagcagacccgtagacaccctgaaactgggttgtttacgctccagtctgaacttatggtcacccccgcaagaggaggcgaccccagacctactttttcatgtagtttctcccccggtctgcccaggcaccgtgcactccgcactgcccctatacagcccagagtgtgggagcccgtgcctctggaggaagtccagctcgtagtcgagcccgaaggtggcgcagtggcccctggcggtaccgtgactctgacttgcgaggtccctgcccagccctcgccacagatccattggatgaaggacggagtgccattgccgttacctcctagccccgtccttatcctaccggagatcggcccacaggaccagggcacctattcctgcgtagcaacacactcaagtcacggcccacaggaatcgagggcggtctcgatttcgattatagaacctggggaggagggaccaacggccggatctgtcggcggatctggcctgggcaccctagccttggcactcgggatcctcggaggcttgggaacggcagcccttctcatcggggtgattctgtggcagaggcgccagcgccgaggggaagagcgcaaagcaccagagaaccaggaagaagaggaggaaagagctgagctaaatcagtccgaggaacctgaggcaggagaaagcagcactggcggaccatag

SEQ ID NO: 213879 - DNA, 387 bp, synthetic construct
  misc_feature 1..387: note = Description of Artificial Sequence: Synthetic coding sequence
  source 1..387: mol_type = other DNA
atggccgcagggacagctgtgggcgcttgggttctggtcttgagcctctggggagctgttgtgggggctcagaatattacggcgaggataggcgagcctttagttttgaaatgtaagggagcacctaagaaaccgccacaacgcctcgagtggaaattgaacacgggaagaactgaggcttggaaagttctaagtccacaaggcggaggaccctgggattccgttgccagggtcctgccaaatggctcactgttcctgccagctgtgggcatccaagatgaaggaatttttcggtgccaggcgatgaacagaaatggtaaggagacaaaaagcaattatcgagttcgagtgtaccagtttgaaaacctgcataactacagcctctag

SEQ ID NO: 213880 - DNA, 462 bp, synthetic construct
  misc_feature 1..462: note = Description of Artificial Sequence: Synthetic coding sequence
  source 1..462: mol_type = other DNA
atggccgctggcactgctgttggggcttgggttcttgttctgagcctgtggggcgcagtggtgggcgcacagaatattaccgcccgaatcggggaacctctggtgttgaagtgtaagggtgctcctaagaagccgccacaaaggctcgaatggaagctcaataccggaagaaccgaggcatggaaagtcttaagccctcagggaggcggaccctgggattctgtcgctcgagtcctgcccaacggtagcctcttcctcccggcagtgggcattcaggatgaaggaatactaggcggactgggaaccgcagcgttactcataggagtgatattgtggcagcgccgacagagaaggggggaggagagaaaagccccagagaaccaggaggaggaggaagaacgcgctgagctcaatcagtctgaagagccagaggctggagagtcatccacgggcggaccctag

SEQ ID NO: 213881 - DNA, 885 bp, synthetic construct
  misc_feature 1..885: note = Description of Artificial Sequence: Synthetic coding sequence
  source 1..885: mol_type = other DNA
atgaaccgcaacggaaaggaaacaaagagcaattaccgcgtgagagtttaccagatcccaggtaaacccgagattgtcgactctgcatctgaactgactgccggtgtgcctaataaagtgggcacgtgcgtgtctgagggtagttacccagcaggcactctgagctggcacttggacggaaagcctctggtccccaacgagaagggtgtgagcgtaaaagaacaaacccgacggcatcctgagaccggcctctttaccctccagtctgagctcatggttactcccgctcggggtggagatcctagacccaccttcagctgctctttcagcccaggcctgcccagacatagggcactgaggactgcccctatacagcccagggtttgggagcctgtgccattagaagaggtgcagctggtggtcgagcccgaggggggtgccgtcgcaccgggtggcaccgtcaccctcacttgtgaggtacccgctcagccgagccctcagattcattggatgaaggatggcgttcctctgcccctgcctccatctcctgtgcttattctgcctgaaatcggtcctcaggaccagggcacctattcctgtgtggcaacacactctagccacggcccacaggaaagcagagctgtaagtatcagcattattggcagcgtcggcggttcaggcctcggcaccctagcactggcgctaggaattctcggtggactgggaactgctgcccttctgattggcgttatattgtggcagcggagacagagacgcggagaagaaagaaaagcccctgagaaccaggaggaggaggaggagcgagctgaactgaaccagtccgaggagccggaagccggtgagagctcgaccgggggtccttag

SEQ ID NO: 213882 - DNA, 885 bp, synthetic construct
  misc_feature 1..885: note = Description of Artificial Sequence: Synthetic coding sequence
  source 1..885: mol_type = other DNA
atgaacagaaatggcaaggaaactaagtcaaactaccgtgtacgcgtctaccagatccccggaaagcccgagattgtcgatagtgcctcagaactcaccgccggagtccccaataaggtcggcacctgcgtgtccgaggggtcttatccagccggaaccctgagctggcacctggacggaaagcctcttgttccaaatgagaagggcgtgtcagtgaaggagcagacacgcaggcatcccgaaacagggctcttcacactgcagtccgagctgatggtcacgcccgctcgcggaggcgatcccagacctaccttcagctgttcattcagtcccggtttaccccgacatagggctcttcggaccgctcctattcagcctcgggtgtgggagcctgttccactggaagaagtacaactcgtagtggaacccgaagggggagcagtagcacccggtggcaccgtcacactgacttgtgaggtccctgcccagccttcaccacagatccactggatgaaggacggagttcctctgcctctccctccttcaccagttctcattctgccagagatcggacctcaggatcagggcacctactcttgtgtagcaactcactccagtcatggtcctcaggaaagtagggccgtgtccatttcaatcatcggctctgtgggcggttctggtctaggaacgctggcactggcactgggcatcctcggcggattaggaaccgcagctcttcttatcggagtgattctctggcagcgcaggcaaagaagaggggaagagcggaaagcgcctgagaaccaggaggaagaggaggagagggcagagctcaaccaaagcgaggagcctgaggccggtgaatcatccactggcggtccatag

SEQ ID NO: 213883 - DNA, 366 bp, synthetic construct
  misc_feature 1..366: note = Description of Artificial Sequence: Synthetic coding sequence
  source 1..366: mol_type = other DNA
atggccgcaggaaccgcagtgggcgcttgggtcctagttcttagcctctggggcgcagttgtcggtgctcagaatatcactgctcgaatcggcgagcctctggtgttgaaatgcaagggagcccctaagaagccccctcagagactggaatggaaactcaacacaggcaggaccgaggcatggaaggtgttaagtcctcaaggcggaggcccttgggacagcgtcgctcgagtactccctaacggctccttattcttgccagctgtgggcatccaagacgagggcatattcaggtgtcaggccatgaatcgcaacggaaaagagactaaatccaattggtggtggtcccagaaagtggagcagtag

SEQ ID NO: 213884 - DNA, 1308 bp, synthetic construct
  misc_feature 1..1308: note = Description of Artificial Sequence: Synthetic coding sequence
  source 1..1308: mol_type = other DNA
atgggcgctggcgaacgggtacaagcaccaccacgagccgaagccaccgctggccgaggcgcagatcgcgctcgaacccttgaggggagccgcatggccgcaggcacagccgtcggtgcgtgggtcctggtgttgtccctttggggcgctgtcgtcggcgctcagaatattacggctaggataggcgagcccctcgttttaaagtgtaagggggcaccaaagaaaccaccccagcgcctggagtggaagctcaacaccggacgcacagaggcatggaaagtgctatcccctcaggggggagggccatgggatagtgtggcgcgagtcctgcctaatggctcgctgtttcttccagcagtcggcatccaggatgaaggcatcttcaggtgtcaagccatgaacaggaacgggaaagaaaccaagagtaattacagggtcagggtgtaccagatccctggcaagcccgaaattgttgactctgcaagcgagctcacagcaggagtgccaaataaggtgggcacatgcgtgtccgaaggcagttatcctgcaggaacactcagttggcacttagacgggaagcctttagtgccgaacgaaaagggcgttagcgttaaggagcagacgaggcgtcatcccgagaccggactgtttacactgcagtccgagctgatggtgactcccgcacgcggtggagaccccaggcctacgttcagctgcagcttcagtcccggtctcccacgccatagggcgcttaggacagcccctatccagccaagagtgtgggaaccagtgccgttagaagaggtgcagctggtggtagagcccgaaggaggtgctgtggcacctggcggaacagttacactaacctgcgaggtgccggctcagccatcccctcagattcactggatgaaagacggggtgcccctccctcttccaccttcacctgtgttaatcctcccagagatcggaccacaggaccagggcacctatagctgcgtggctacccattccagccatgggcctcaggagtccagggccgtttctatatcaattattgagcctggagaggagggcccaacggccggtagcgtgggcggatcggggctcgggacgttagccctcgctcttggcattctgggaggactgggtactgcggcacttctcattggagtgattttatggcaacggaggcagagaaggggcgaggagagaaaagcccctgaaaatcaagaggaagaagaggaaagggcagaattgaatcagagcgaggaacccgaagcaggcgagtctagcaccggaggcccatag

SEQ ID NO: 213885 - DNA, 1092 bp, synthetic construct
  misc_feature 1..1092: note = Description of Artificial Sequence: Synthetic coding sequence
  source 1..1092: mol_type = other DNA
atggcggctggcacagcggtgggcgcttgggtgctggtgttgagtttgtggggcgcagtcgtgggagctcagaacatcactgctcgcataggagagcctttggttttgaaatgcaaaggtgccccaaaaaaaccaccccagagactggagtggaagctgaatacaggacggactgaggcttggaaggtgctaagcccacagggtggcggtccgtgggactccgtggcacgagtgttgccaaatggaagcctgtttcttccggctgtgggcattcaagacgaagggatctttaggtgtcaggccatgaatcgaaacgggaaggagacaaagagtaactatcgcgtgcgcgtgtatcaaatccccggaaaacccgaaatagttgacagcgcctctgaactgaccgccggagtcccaaataaggtggtggaggagagtcgcagatccaggaaaagaccttgcgagcaggaagtgggaacatgtgtttccgagggttcgtatcccgctggaaccctgagttggcacctggacggtaaacccctggtgccgaatgagaaaggggtgtcagtgaaggaacaaacccggcgtcacccggagaccggtctttttacactgcagagcgagttgatggtcactccggctcgcggaggggaccctaggccaaccttctcctgcagcttcagtcctggattacctcgtcaccgcgctttacgcaccgcccctattcagccaagggtgtgggagcccgtgcccctggaagaagtccagctggtggtggagccagagggcggagctgtggcccctgggggaacagtgactttaacatgtgaggtgcctgcccagccatcacctcaaatccactggatgaaggatggcgtcccactgccactgccgccaagccccgtgttaatcctacctgaaattggaccccaggatcaaggtacttatagctgcgtggcgacacatagctcccatggccctcaggagagcagagcagtgagtatttcgatcatcgagccaggagaggagggccctactgcaggtgaggggtttgacaaggttcgtgaggccgaggattctccccaacatatgtag

SEQ ID NO: 213886 - DNA, 402 bp, synthetic construct
  misc_feature 1..402: note = Description of Artificial Sequence: Synthetic coding sequence
  source 1..402: mol_type = other DNA
atgaaagatggggtgcctctgccattgccaccatcccctgtcctgatcctgcccgaaatcggacctcaagatcaaggaacttattcctgcgtcgccacgcattctagccatgggcctcaagagtccagagctgtaagtattagcatcattgaaccaggcgaggagggacctaccgctggtagcgttggagggtcaggcctggggactttagctctcgcactaggcatattgggcggactcggtaccgcagcactgttgataggggtcatcctgtggcagagaagacagaggcgcggagaagaacgcaaggccccagaaaaccaggaggaagaagaggagcgggcagagctgaaccagagtgaggaaccggaggccggagaatcaagtactgggggaccctag

SEQ ID NO: 213887 - DNA, 387 bp, synthetic construct
  misc_feature 1..387: note = Description of Artificial Sequence: Synthetic coding sequence
  source 1..387: mol_type = other DNA
atggcagccggaaccgccgttggggcttgggtgcttgttctcagcttatggggcgctgtggtgggagcgcagaacatcactgcccgtatcggggagccattagtgttaaaatgcaagggggcacccaagaagcccccacaacgtctggagtggaaactcaacacaggacgaacggaagcctggaaggtcctttctcctcagggtggaggaccctgggactcagtggctcgggtactgcctaatagcagccttttcctaccagccgtaggaatccaggatgagggcatcttccggtgtcaggctatgaatcggaacggtaaggagacaaaatccaactacagggtcagggtgtatcaatttgaaaatttgcacaactacagtctttag

SEQ ID NO: 213888 - DNA, 462 bp, synthetic construct
  misc_feature 1..462: note = Description of Artificial Sequence: Synthetic coding sequence
  source 1..462: mol_type = other DNA
atggccgctgggacagccgtgggggcttgggtgcttgtgctatcactgtggggtgctgtagtgggggcacagaacatcacggctcggataggagaacctctcgtgctgaaatgcaagggcgcacccaaaaaacctccccaaaggctggaatggaagctgaacaccggcagaactgaggcctggaaagtgctgtccccccagggcggtgggccatgggatagcgtagcccgtgttttgcccaatggaagtctgttcctgccagcggtcggcatccaagatgaaggcattctgggtggattaggcacggctgctttactaatcggtgtgatcctatggcagcgtcgccaaagacggggtgaggaaaggaaagccccagagaatcaggaagaagaggaggagcgggcagaactgaaccaatcagaggagccagaagcaggcgagtcgagcacaggtggaccatag

SEQ ID NO: 213889 - DNA, 1308 bp, synthetic construct
  misc_feature 1..1308: note = Description of Artificial Sequence: Synthetic coding sequence
  source 1..1308: mol_type = other DNA
atgggtgccggagaaagggtacaagctccacctcgcgcagaagctaccgctgggcgtggcgctgatcgcgcacgtaccctggagggttcacggatggctgctggcactgccgtgggcgcatgggtgttagtcctttcgctgtggggagctgtcgtcggagcccagaatattaccgccagaatcggagagcccctcgttctcaaatgtaagggggcacccaagaagcctccacagcgactggaatggaaactgaatactggtcgaacagaggcctggaaagtgttgtccccccagggtgggggaccttgggacagcgtggcgcgtgtactgcccaacggatccctgttcctgccagcagtcggtattcaggacgaaggtatcttcaggtgccaggccatgaatagaaacggcaaagaaacaaaatcaaattacagggtccgggtgtaccagatacccggtaaacccgagatcgtagattctgcttctgagttgacagcgggagtgcctaataaagtaggcacctgcgtgagtgagggcagttaccctgccggtacactaagttggcatctggacggtaaacccttggtgccgaatgagaaaggcgtttctgtgaaagagcagacacgccgacatcccgaaactggtttgttcaccctgcagagtgagttgatggtaacaccggcaagggggggtgatcccaggccaacattcagttgctcgttcagcccgggactgccaaggcacagggcccttcggactgcaccgattcaacctagagtgtgggagcccgtgccgcttgaagaagtgcaactggtcgtggaacctgaagggggagcggtcgctccaggtgggaccgtgacattgacctgcgaggttcctgctcaaccttctcctcagatccactggatgaaagacggggtgcctttacccctccccccatcgccagtcctgattctgcccgagatcgggccacaggatcaaggcacatacagttgcgtcgctactcactcatcacacggacctcaggaatcacgggctgtgagcatttccattatcgagcctggggaagaaggcccaacagctggcagcgtcggcggaagtggactgggaaccctcgctctggccctcggcatcctgggaggactgggcacagccgctctgctgattggggtgatcctgtggcagagacgacagaggaggggtgaagagagaaaggctccggaaaaccaggaagaggaggaagagcgcgcagaactgaaccaatccgaggaacccgaggcgggagagagctcaactggcggaccatag

SEQ ID NO: 213890 - DNA, 366 bp, synthetic construct
  misc_feature 1..366: note = Description of Artificial Sequence: Synthetic coding sequence
  source 1..366: mol_type = other DNA
atggccgcaggaacggcagtgggggcttgggtactggtgctcagcctgtggggcgcagtcgtcggtgcacagaatatcaccgccaggattggtgaacctctggtactcaagtgtaagggggctcccaaaaaaccaccccagcgccttgaatggaagctgaataccggaaggactgaggcatggaaagtcctgtcaccacagggaggaggcccttgggacagtgtcgcaagggtgcttcccaatggttccctgttcctccctgccgtaggaatccaggacgagggtatcttcaggtgtcaagccatgaacagaaatggtaaagaaacaaagagtaattggtggtggtcacaaaaagtggagcagtag

SEQ ID NO: 213891 - DNA, 387 bp, synthetic construct
  misc_feature 1..387: note = Description of Artificial Sequence: Synthetic coding sequence
  source 1..387: mol_type = other DNA
atggccgctggcactgccgtcggtgcatgggtgctagtgctgagtctgtggggggcagtagtgggagcacaaaacataactgcccgtataggagaacctctcgttctcaaatgcaaaggagccccaaaaaagcctccacaaagattggagtggaagctaaacacaggcaggacagaggcttggaaagtgctttctccccaggggggaggcccttgggactccgttgcccgagttctgcccaacggatccctcttcttaccggcagtggggatacaggacgaggggattttcaggtgtcaggctatgaatcgcaacggcaaggagacgaagtccaattacagggttcgggtgtatcagtttgagaatcttcacaattactcactttag

SEQ ID NO: 213892 - DNA, 885 bp, synthetic construct
  misc_feature 1..885: note = Description of Artificial Sequence: Synthetic coding sequence
  source 1..885: mol_type = other DNA
atgaacagaaacggaaaagaaactaaaagcaattacagggttcgcgtttaccagatacccggaaagcccgagatcgttgactctgcctctgaattaacggccggagtgcccaacaaggttggtacctgtgtcagcgagggatcttaccccgcaggcacgctgagctggcacctggacggcaaaccactcgtgcctaacgaaaagggtgtcagcgtcaaagaacagaccaggaggcacccggaaactggtctgttcacactgcagtctgagctgatggtcactccggcaagaggaggggacccccgacctactttttcctgctctttctctcctggtctccctaggcaccgcgctctccgaacggcacctatccaacctcgtgtatgggaacctgtccctctggaggaggttcagctcgtggttgaacccgaaggtggtgccgtggctcccggtggtaccgttaccctgacctgcgaagtccccgctcaaccctcacctcaaattcattggatgaaggatggggtaccattgccccttccaccttccccagtccttatcctgccagaaatcggccctcaagatcagggcacatacagttgcgtggccacccactcctcacatggtcctcaagagagcagggccgtaagtatctcgataatcggtagcgtgggtggcagcggactgggaactttagcgctggccctggggattctcgggggactgggtaccgccgcattgctaattggcgtgatcctttggcagcgcaggcagcgacggggagaggaacgaaaggctccggaaaatcaggaggaagaggaggagagggcggagctaaatcagtcagaggagcctgaggccggagagagttccacaggcggaccctag

SEQ ID NO: 213893 - DNA, 366 bp, synthetic construct
  misc_feature 1..366: note = Description of Artificial Sequence: Synthetic coding sequence
  source 1..366: mol_type = other DNA
atggccgcagggacagctgtgggtgcctgggtgctcgtcctgagcctgtggggtgctgttgttggtgcacagaatatcacggcacgaatcggtgagcctttggtgctgaagtgcaaaggggcacccaagaagcctccacagcggttagagtggaagctgaacaccggccgtaccgaagcctggaaggtgctgtccccacaaggcggaggaccttgggatagcgtcgccagagttctgcccaattcctcactgtttctgcctgccgtgggtatccaggatgagggcatattccggtgccaggccatgaaccgaaacggaaaagaaaccaagtcaaactggtggtggagtcagaaggttgaacagtag

SEQ ID NO: 213894 - DNA, 462 bp, synthetic construct
  misc_feature 1..462: note = Description of Artificial Sequence: Synthetic coding sequence
  source 1..462: mol_type = other DNA
atggcagcagggacggctgttggagcgtgggtgctagtcctgtctttatggggcgcagtcgtgggtgcccagaacatcacagcaagaattggagaaccattagtactcaaatgtaaaggagcacccaagaaacccccacagcgtctggagtggaagctaaatacaggcaggaccgaggcctggaaggtgctgagtcctcagggagggggtccctgggatagtgtagctcgtgtgcttcctaatggctcactgtttctgcctgcagtagggatccaggatgaggggatcttgggaggtctcgggaccgccgcacttctgatcggcgtaatcctgtggcaacgcagacagcgcaggggggaagagaggaaggcacccgagaaccaggaggaagaggaggagcgggctgaattgaaccagtccgaagagcctgaagctggcgagtcctcgacaggaggtccctag

SEQ ID NO: 213895 - DNA, 1308 bp, synthetic construct
  misc_feature 1..1308: note = Description of Artificial Sequence: Synthetic coding sequence
  source 1..1308: mol_type = other DNA
atgggtgcaggagagagggtgcaggcgccacctagggccgaagctactgccggacggggtgcggacagagcgagaaccctcgaagggtccagaatggccgcaggcaccgccgtgggcgcttgggttctagtgctgtctctctggggcgcagtggtgggagcacagaatatcactgcgaggatcggtgagcccctagtgctgaagtgcaagggtgctcctaaaaagcccccacaacgcctcgagtggaaactgaataccgggagaactgaggcatggaaggtgctaagcccacaaggcggaggcccatgggacagcgtcgccagagtcctgcctaacggatccctgtttctgcctgctgtcggaattcaggacgagggcatcttcaggtgccaggctatgaatcgaaacggcaaggagactaaatccaactatagggttcgagtataccagattcctgggaaacccgagatcgtggactcggcttccgagcttaccgctggtgttccgaataaagtgggtacatgcgtttccgagggcagctaccctgcagggactttatcatggcatctggacggaaaaccattagtaccaaatgagaaaggagtgtcagtcaaggaacagacacgtagacacccggagacaggtctgtttacattacaatctgaactgatggtaacacctgcccgaggcggagatccacgtccaaccttctcttgcagcttctcgccaggtctgcccagacaccgagctcttagaaccgcccctatccagcctagagtttgggagcctgtcccgctggaggaggtgcagctagtggtggaaccagaaggaggggctgtagctcctgggggaactgtgacactgacttgcgaggtacctgcacagccatcaccccaaattcattggatgaaggacggagtgccactgcccctgcctccttctcctgtcttaatactgccagagattgggcctcaagaccaaggcacttacagttgcgtcgctacccattcatcacatggcccacaagagagtagagccgtgagcatcagcatcatcgagcccggagaggagggaccaaccgcgggaagcgtgggtggaagcggcctgggtacactagcccttgccctgggtattttaggcggacttggcaccgctgcgcttcttataggggttatcttatggcaacggagacaaaggagaggtgaagagcgcaaggcacccgaaaatcaggaagaagaagaggaacgcgcagagctcaatcagagtgaagagcctgaggcgggagagagctctaccggaggaccctag

SEQ ID NO: 213896 - DNA, 366 bp, synthetic construct
  misc_feature 1..366: note = Description of Artificial Sequence: Synthetic coding sequence
  source 1..366: mol_type = other DNA
atggccgctggcaccgcagtaggggcttgggtcctcgtgctttccctgtggggcgcagtggtgggagcacagaatatcactgctagaatcggcgaaccattagtgcttaagtgcaaaggggctccaaaaaaacccccacaaagactggaatggaagttgaacaccggcaggaccgaggcctggaaagtactgtcaccccagggagggggtccctgggacagcgttgccagggtgctcccaaacgggtcattattcttaccagccgtgggtatccaggacgaaggcatcttccgttgtcaggccatgaatcgcaatgggaaagagaccaaatccaactggtggtggtcgcaaaaggtggagcagtag

SEQ ID NO: 213897 - DNA, 402 bp, synthetic construct
  misc_feature 1..402: note = Description of Artificial Sequence: Synthetic coding sequence
  source 1..402: mol_type = other DNA
atgaaagacggggtacctctccctttgccaccatcaccggtgctgatcctgcctgaaattggacctcaggaccaaggaacctatagttgcgtcgctacacatagcagccatgggcctcaggagtcacgcgctgtgtccatcagcataatcgagcccggagaagaagggcctacggctggatccgtggggggaagcgggttaggtactcttgccctggctctgggaatactcggtggcctgggcactgcggctttattgataggggtgatcttatggcagagacggcagaggagaggcgaagagaggaaggcgcctgaaaatcaagaggaggaggaagagcgggcagaacttaaccagtcggaagagcccgaggcaggagagtcctccactggcggaccttag

SEQ ID NO: 213898 - DNA, 885 bp, synthetic construct
  misc_feature 1..885: note = Description of Artificial Sequence: Synthetic coding sequence
  source 1..885: mol_type = other DNA
atgaaccgcaacgggaaggaaactaaaagcaactatagagtgagggtctaccagattccaggcaagccagagatcgtggattccgcttccgagctgacggctggcgtccccaacaaagtcggaacttgtgtgagtgagggaagttatcctgccggtacactgtcctggcatctggatggcaagcccctagtgcctaatgagaaaggcgttagcgtcaaagaacagacgcgcagacaccctgagacagggctgtttacactgcagtctgaactgatggtaacaccagccagaggtggcgaccccagaccgactttctcatgctcttttagcccaggcctgcctcgacacagagcgctccgtaccgcacccattcagcccagggtttgggagcccgtccccttggaagaagtgcagttagtagttgagcctgaaggcggagctgtggccccaggcggaaccgtaaccctgacgtgtgaggtgcctgcccagccttctccacaaattcattggatgaaagatggggttcctctccccttgccccctagtcccgttttgattctgcctgaaatcggacctcaggatcagggaacctactcctgtgtcgccactcactcaagtcacggccctcaggaaagccgtgcagtgtccattagcatcattggaagcgtcgggggatcaggcctgggaactttggctctcgcattaggcatcttgggaggtctaggtaccgccgcattgctgattggcgtaattctgtggcagcgcagacagaggagaggcgaggagcggaaggctcccgaaaaccaagaagaggaagaggagcgcgcagagttaaaccaaagcgaggagcctgaagctggcgagtcaagcaccggtggcccttag

SEQ ID NO: 213899 - DNA, 402 bp, synthetic construct
  misc_feature 1..402: note = Description of Artificial Sequence: Synthetic coding sequence
  source 1..402: mol_type = other DNA
atgaaggacggcgtgcctctccctctccctccaagccctgtcctgattctaccagagatcggaccccaggatcagggcacctattcctgtgttgccactcactccagccacggtcctcaggaaagtcgcgctgtctcaatttctatcatcgagccaggcgaggaaggcccaaccgccggatcagtgggcggaagtggcctcggcactctggcgctggccctgggaattctggggggtctcgggaccgctgcactgttaattggcgtgatcctgtggcagcgcagacagcggaggggggaggagcgcaaagcccctgaaaaccaggaggaggaagaagagagggccgaattaaatcaatctgaggagccagaggcaggtgaaagctctaccggtgggccatag

SEQ ID NO: 213900 - DNA, 1092 bp, synthetic construct
  misc_feature 1..1092: note = Description of Artificial Sequence: Synthetic coding sequence
  source 1..1092: mol_type = other DNA
atggccgcaggtaccgccgttggcgcatgggtgctcgtgttgtccctttggggagccgttgtgggcgcacagaacattacagccaggattggggagcccttagtcctgaagtgtaagggtgcccctaaaaagcccccacaaaggctggaatggaaactcaacacaggtcgcactgaggcctggaaagttctgtccccgcaagggggaggtccttgggattcagtggccagggtgctgccaaatggttctctttttctacctgctgtggggattcaagacgaagggatttttcgatgccaagccatgaaccggaatggaaaggaaacaaagtcaaattacagggttagagtgtatcagattcccggaaagcccgaaatcgtggattccgcgtcagaacttaccgccggagttccaaacaaggtcgtggaagaaagcagaagatccaggaaaaggccctgtgaacaagaggtgggcacgtgtgtgtcggaaggcagttatccagctggaacactttcatggcaccttgacgggaagccactggttcctaacgaaaagggcgtctctgttaaggaacagacacgtagacaccccgaaactggcctcttcaccctgcaatcagaattgatggttactcctgccagggggggagatcccagaccaactttctcctgcagcttttctccgggattgcctcgacaccgggctttgcgaactgctcctattcaaccacgggtgtgggagcctgtcccacttgaggaagtccaactggtggtggagccagagggcggagctgtggctccaggaggcacagtcacattaacctgcgaagtgcccgcacagccaagtcctcagattcattggatgaaagatggggtgcctctgcccctgcctcctagtcctgtcctcatactcccagaaatagggccacaggatcagggtacctactcctgcgttgccacacactcatcgcatggaccccaagaatcccgagctgtatccattagcatcatcgaacctggcgaggagggcccaacagctggggaggggtttgataaggtacgtgaagctgaggacagtccgcaacacatgtag

SEQ ID NO: 213901 - DNA, 1308 bp, synthetic construct
  misc_feature 1..1308: note = Description of Artificial Sequence: Synthetic coding sequence
  source 1..1308: mol_type = other DNA
atgggagcaggcgagagggtccaggcaccccctcgggctgaagcgacagccggtaggggagccgacagggccaggactctggagggctcacgcatggctgccggaaccgcggtaggggcatgggttctggtcttgtctttgtggggcgcagtggttggcgctcaaaacataaccgcccgaataggcgagcccctggtattaaaatgcaagggtgcccctaagaagccgcctcaaaggttggaatggaaactcaacaccgggaggaccgaagcatggaaagttctgtcccctcagggaggcggaccctgggactccgttgccagagtgctgcccaactccagcttgttcttacctgctgtgggcatccaggacgaggggatctttcgctgccaagctatgaaccgcaatggcaaggagaccaagtctaactatagagtgagagtataccagatcccaggtaagcccgaaatcgtggatagtgcgtcagagttgacagcaggagttcctaacaaagtcggcacttgtgtgtccgagggttcctatccagcgggaactctgtcctggcatctagacggaaaacctctggtgcctaatgaaaaaggagtttcagtgaaagagcagacaaggaggcaccctgagacggggttgttcactctgcagtccgaactcatggttacgccagctaggggaggggatccgaggccaacgttctcgtgttctttcagtcccggtctccctcgccaccgggctttacgtactgctcccatccaacctcgtgtatgggaaccagtccccttagaagaggtgcagctggttgtggagcctgaagggggagccgtcgcccctggcggaactgttaccctgacatgcgaggttccagctcaacccagcccacagatccactggatgaaggacggtgtgccactacccctgcctcctagcccagtgctgatccttcccgaaatcggaccacaggaccagggaacgtacagctgcgtggctacgcacagttcacacggaccacaggaatccagggcagtgtccatttctattattgaacctggtgaagaaggacctacagctggttccgttgggggatctgggctgggtacgttggccttggctctgggcattttggggggattgggtaccgcagccctgctgattggcgtcatcctttggcaaagacgtcaacggagaggcgaggaacgcaaggcacccgaaaaccaggaggaagaagaggagcgggcagaactgaaccagtccgaagaacccgaggcaggggaaagtagcaccgggggaccctag

SEQ ID NO: 213902 - DNA, 387 bp, synthetic construct
  misc_feature 1..387: note = Description of Artificial Sequence: Synthetic coding sequence
  source 1..387: mol_type = other DNA
atggctgctggaactgccgttggcgcttgggtactagtgctctctctctggggagcggtggttggagcacagaatattactgcccgtattggcgaaccccttgtactcaaatgtaagggcgctccaaaaaaacctccccagagattagagtggaagctgaatacaggtcggacagaggcctggaaggtgctgagtccccaaggcggaggcccatgggacagtgtggctagggtgctacctaatggctctttgttccttcccgcagtggggatccaggacgagggcatcttcaggtgccaggccatgaacagaaacgggaaagagaccaagtcgaattaccgggtcagagtttaccagttcgagaatctacacaattactctttgtag

SEQ ID NO: 213903 - DNA, 462 bp, synthetic construct
  misc_feature 1..462: note = Description of Artificial Sequence: Synthetic coding sequence
  source 1..462: mol_type = other DNA
atggcagccggtaccgctgtgggggcatgggtactggtactgagcctttggggcgcagtagttggggctcagaacattacagccaggatcggagaacccctcgtcctgaagtgcaagggcgctccgaagaagccgccacagcggttggagtggaagctcaacacgggtcgtacggaagcctggaaagttctctccccacagggcggaggaccctgggactccgtggccagggttctgcctaacggctctctgtttttgcccgctgtcggcatccaagatgagggcatcctgggcggtctgggcaccgctgctctcttgattggcgttatcttatggcaacgcagacagaggcggggtgaggaacgcaaagcccctgagaaccaggaggaagaggaggaaagagccgagctcaatcagagcgaggaacccgaagcaggggaatcttctacagggggtccttag

SEQ ID NO: 213904 - DNA, 1092 bp, synthetic construct
  misc_feature 1..1092: note = Description of Artificial Sequence: Synthetic coding sequence
  source 1..1092: mol_type = other DNA
atggcggctgggactgcggtgggcgcttgggtgctggtcctgtccttgtggggggcagtcgtaggagcccagaatatcactgccagaattggcgagcccctcgtcctcaaatgtaaaggagctccaaagaaaccccctcaacgactggaatggaaactcaacactggccgtactgaggcttggaaggtgttgtctccccagggaggcggaccttgggacagtgtggctcgtgtgttaccaaacggtagtctgtttctgcctgccgttgggatacaagatgaaggcattttcaggtgtcaggccatgaacagaaatggaaaagagacaaaatcgaattatcgcgtgagagtctaccaaatccctggcaaaccagagatcgtagacagtgcctctgagcttacagccggagtgcctaataaggtcgtggaagagtctcgcagaagccgaaaaagaccttgcgagcaggaagttggcacatgtgtgagtgagggttcttaccccgcaggcaccttgagttggcatcttgacggcaaacccctagtccctaacgagaagggcgtgtccgtgaaggaacaaactcggaggcaccccgaaactggccttttcactctgcagtccgaattaatggtgactccggctcgtggcggtgacccacgccctaccttctcatgctcattttccccaggtctgcccagacaccgcgcactgcgtacagctcccatccagcctcgcgtttgggaacccgtgccattggaggaggtacagttggtcgtcgagccagaaggaggggcagtggcgcctgggggaactgtgacacttacttgcgaagtgcctgcccagccttcaccccagattcactggatgaaggacggagtaccactccccctacctccaagccctgtcctcattttgcccgagattggacctcaagatcaagggacgtacagctgcgtcgctacccatagctctcatggcccacaagaatcgcgggctgtgtccatttccatcatagaacctggcgaggaggggccaaccgcaggcgaggggttcgataaggtcagagaggctgaggactctccacaacacatgtag

SEQ ID NO: 213905 - DNA, 366 bp, synthetic construct
  misc_feature 1..366: note = Description of Artificial Sequence: Synthetic coding sequence
  source 1..366: mol_type = other DNA
atggctgcaggcaccgctgtgggggcttgggtgctcgtactcagtctttggggtgcggtcgtgggagctcaaaatatcaccgcgagaatcggggagcctctggtgttaaagtgcaagggcgcacctaaaaagccaccacagcgtcttgagtggaagttaaacacgggacgtactgaagcctggaaagtgctgtctcctcaggggggagggccttgggattccgtcgccagggttctgccaaacgggagtcttttcctgcccgcagtgggtattcaggacgagggtatattcaggtgccaggccatgaataggaatggaaaggaaacgaagtcgaactggtggtggagccagaaagtagaacagtag

SEQ ID NO: 213906 - DNA, 402 bp, synthetic construct
  misc_feature 1..402: note = Description of Artificial Sequence: Synthetic coding sequence
  source 1..402: mol_type = other DNA
atgaaggacggcgtccctttaccgctgcccccatctcctgtgctgatcttgcctgaaatagggccacaggaccagggtacctacagttgcgtggccacccattcttctcatgggcctcaggagagtagggccgtgagtatctcaataattgagccaggtgaggaagggcctacggcaggttccgttgggggaagcggcctcggcaccctggctttggcgctggggattcttggaggactcgggaccgctgcattgcttatcggagtgatcctgtggcagagacggcaacggaggggtgaggagcgtaaggctcccgaaaaccaggaggaagaggaagaacgggcagaactgaaccagtcagaggaacccgaggccggagaatcatccacagggggtccttag

SEQ ID NO: 213907 - DNA, 387 bp, synthetic construct
  misc_feature 1..387: note = Description of Artificial Sequence: Synthetic coding sequence
  source 1..387: mol_type = other DNA
atggccgctggaaccgcagtcggggcatgggtcctagttcttagcctgtggggggcagtcgtgggggctcaaaatatcacagctcgtattggagagcccctggttctcaagtgtaaaggagcgcctaagaagcctccccagagactggaatggaagctgaatacaggcagaaccgaggcttggaaagtgctgtccccgcagggaggcggaccttgggatagcgtggctagggtgctgccaaacggttctctcttcctgccagcagttggcatccaggacgaagggatctttcgctgtcaggccatgaatcgcaatgggaaggagactaagtccaattacagagtgcgggtttaccagttcgagaacctccataattacagcttgtag

SEQ ID NO: 213908 - DNA, 1092 bp, synthetic construct
  misc_feature 1..1092: note = Description of Artificial Sequence: Synthetic coding sequence
  source 1..1092: mol_type = other DNA
atggctgcgggtactgctgtgggggcttgggtcctggtgctgtctttgtggggcgctgttgtcggcgcacagaacatcacagccagaatcggagaacccctggtgctgaaatgcaaaggcgctcccaaaaagccaccacagcgtctcgagtggaaactgaacaccggtagaactgaagcatggaaagtcctgagccctcagggcggaggcccatgggattccgtggcacgcgttttgcccaatgggagcctttttctgcccgctgttggaatccaagatgaaggcattttccgttgtcaggctatgaatcgcaatggaaaagaaaccaaatcaaactaccgggtgagggtgtatcagatcccgggaaagcctgagatcgttgactctgcctcggagctaaccgctggcgtccctaataaagttgttgaggagagtcggaggagccgtaaacggccatgtgagcaggaggttgggacgtgtgtaagtgaaggttcctacccagctgggaccctctcatggcacctcgatggtaaacccctcgttcctaatgagaaaggagtgtccgtaaaagagcagactcgacggcacccggagaccggactgtttacattgcagtctgaacttatggtaaccccagcccgtggcggtgatccgagacctacctttagctgctcatttagccccggtcttcctcggcaccgagccctacggaccgcacctatacagccaagagtctgggagccagtgcccctggaagaggtccagctggtggtcgagcctgagggaggtgccgttgcccctggcggaaccgtaaccttgacatgcgaggtgcccgcacagccctcacctcaaatacactggatgaaggacggagtcccccttccacttcccccatctccggtcctcattttacccgaaatcgggccacaggaccaaggaacatactcgtgtgtcgcaactcattcctcacatggaccccaggaatcgagggcagtctctatctctatcattgaacctggcgaagaagggccaacggccggtgagggatttgataaggtacgtgaggcagaggattcaccccagcacatgtag

SEQ ID NO: 213909 - DNA, 1308 bp, synthetic construct
  misc_feature 1..1308: note = Description of Artificial Sequence: Synthetic coding sequence
  source 1..1308: mol_type = other DNA
atgggtgccggtgaaagggtgcaggccccaccacgggctgaggccactgctggaaggggcgctgatcgggcaagaactctcgagggctcgagaatggccgctggcaccgcagtgggagcttgggtcttagtgttgagtctttggggcgctgttgtcggtgcccagaacatcacagctaggatcggggagcccttggtgctcaaatgcaaaggagcgcctaaaaaacccccacaacgcctagaatggaaactgaatacgggtcggaccgaggcttggaaggttctgtcaccacaaggagggggaccgtgggactccgtggccagggtactgccaaatggttcccttttcctgccggcagttggcatacaagatgaggggatcttccggtgccaagcaatgaatcgaaacggcaaagagacgaaatctaactatagggtccgcgtgtatcagatacctgggaagccggaaatcgtagactctgccagcgaattgaccgccggagtgcccaacaaggtgggcacatgcgtaagcgagggcagctatccagcgggaacgttatcatggcatcttgatggaaaaccgttggttcccaatgaaaagggagtctctgtaaaggaacagacacggcgtcatcctgagacaggcctttttaccctgcagagtgaactgatggtaacacctgccaggggtggcgacccacgaccgactttcagctgctcattttcccccggactgcctcggcaccgagctctgcggaccgctccaatacagcccagggtgtgggaaccggtccctttggaggaagtgcagctggtcgtcgaacctgaagggggagcggtagctccaggcggtaccgtgacactcacatgtgaagtccctgcccaaccttctccccagattcattggatgaaagacggagtgcccctccccctgccaccctccccagtcctcatcctgcccgaaattggtccacaggaccagggtacatactcttgcgtagcaacacactcttcccacggacctcaggagagccgcgcagtcagtatcagtattatcgagccaggagaagagggtcccactgcaggatctgtcggaggctcagggctcggaacactggccctagcactggggatcctagggggtctagggacagctgcactgctgattggtgtgattctgtggcagcgcaggcagagacgaggggaagaaagaaaggcgccagagaaccaggaggaagaggaggagcgggctgagctcaatcagagtgaagaaccagaggcaggcgagtcctcgaccggcggaccatag

SEQ ID NO: 213910 - DNA, 462 bp, synthetic construct
  misc_feature 1..462: note = Description of Artificial Sequence: Synthetic coding sequence
  source 1..462: mol_type = other DNA
atggccgcaggcaccgccgtgggtgcttgggtcctggtgctctcgctgtggggtgctgtggtcggagcacagaacatcaccgcacgcataggcgagcccttagtgctaaaatgcaagggcgctccaaagaaaccacctcagagactcgagtggaaattgaacacaggcaggaccgaggcatggaaggtactgagccctcagggcggtggtccatgggactccgttgcccgtgttctcccaaactcgtccctcttccttccggcagttgggatccaggacgaaggaatcctcggcggactggggacggccgcactcctgatcggagttatattgtggcaacggagacagcggagaggagaggaacgcaaggctccagagaatcaggaagaggaagaggagagagctgagctcaatcagagcgaggagcccgaggcaggcgaatccagtactggagggccatag

SEQ ID NO: 213911 - DNA, 402 bp, synthetic construct
  misc_feature 1..402: note = Description of Artificial Sequence: Synthetic coding sequence
  source 1..402: mol_type = other DNA
atgaaagacggcgtgccactgcctttgcccccttcccccgtcctgatccttccagagatcgggccacaggatcaggggacgtattcgtgcgtcgccacccactcctcgcatggcccacaggagtctcgggcagtaagtattagtatcatcgaaccaggcgaggagggacctactgcaggcagcgtcggaggctcaggactgggaaccctcgccctggctctggggatcctgggcggtctgggaaccgccgctctgctgataggggtgatcctgtggcagcggaggcagagaaggggtgaggagaggaaggcccctgaaaaccaagaggaggaggaagaaagagctgaattaaatcagagtgaggagcccgaagctggggaatccagcacgggagggccatag

SEQ ID NO: 213912 - DNA, 885 bp, synthetic construct
  misc_feature 1..885: note = Description of Artificial Sequence: Synthetic coding sequence
  source 1..885: mol_type = other DNA
atgaaccgaaatggcaaggagactaagtctaactatcgcgtgcgcgtctaccagattcctggaaagccggaaatcgttgattctgcttctgaactgaccgccggagtaccaaataaagttggaacctgtgtgagtgaaggtagttatcctgcgggaaccctgagctggcatctggatggcaagccacttgtacccaacgaaaagggggtttcagtgaaggaacaaactaggcgacatccggaaaccggcctgttcactctccaaagcgagcttatggtcactcccgctcgcggtggagaccccagacccacattctcgtgctccttttcgcctggtctccctcgccaccgggcactgcgtaccgccccaattcagcctagagtgtgggagccagtgcctttggaggaggtccagttggttgttgagcctgaaggcggagccgtggcgcctgggggaactgtgaccctgacctgcgaagtaccggctcaaccaagtccccaaatccattggatgaaggatggggtcccattacctctgcctccatcccctgtgcttattctccctgagataggaccccaagatcaggggacctattcttgcgttgcaacccattcgtcccacgggcctcaggagagccgtgctgtgtccattagcatcataggtagtgtcgggggatctggactggggacattggccctagccctgggaatattggggggtctcgggaccgccgcattgctgatcggggttattctgtggcaacggcgtcaacgtcgtggggaagaacgaaaggcccctgagaaccaggaagaagaagaagagagagccgagctcaatcagtcggaggagccagaggccggagagtcctccacaggcggaccctag

SEQ ID NO: 213913 - DNA, 1092 bp, synthetic construct
  misc_feature 1..1092: note = Description of Artificial Sequence: Synthetic coding sequence
  source 1..1092: mol_type = other DNA
atggctgcagggaccgctgtgggcgcttgggtgttagtcttgtccctgtggggcgctgtggttggggctcagaatattacagcacgcatcggagaacctctggtactgaagtgcaaaggcgctccaaaaaaaccgccacagcggctagagtggaaattaaatacaggaaggacagaggcttggaaagtgttaagtccacaggggggtgggccatgggattcagtcgctcgggtgttgcctaatagctcgctgttcctgcctgccgttgggattcaggacgaaggcattttccgctgccaagcgatgaaccggaacgggaaggaaacgaagagcaattaccgggtcagggtgtaccagattcccggtaagcctgaaatcgtagattcagcttctgaactgacggctggcgtcccaaataaagttgtcgaggaatcccggcgatcccgcaaaaggccttgcgaacaggaagtaggaacctgcgtttcagagggcagttacccagccggtacgttgtcatggcacctcgacggtaagccgttagtcccaaacgaaaagggggtaagcgtcaaagaacagactagacgtcacccagaaactgggctctttactctgcagagcgaactcatggtcacgccagctcgaggcggtgacccaagaccaactttcagttgctcattcagtccaggacttccccgacaccgcgcactgcgtaccgcccctatccagcccagagtgtgggaaccagtgcctctggaggaagtacagcttgttgttgaaccagagggcggagctgtagccccaggtggtacagtcaccctcacctgcgaagtgcctgctcagccttcaccgcagatacattggatgaaggacggagtacccctccccctccccccaagccccgtcctgatccttcctgagattgggccacaggaccagggcacctactcctgtgtcgcaactcattcatcgcacggaccccaggagtctagggctgtgagcatctcgataatcgaaccaggagaggagggtccaacagccggtgaggggttcgacaaggtgcgggaggcagaggattcgcctcagcatatgtag

SEQ ID NO: 213914 - DNA, 462 bp, synthetic construct
  misc_feature 1..462: note = Description of Artificial Sequence: Synthetic coding sequence
  source 1..462: mol_type = other DNA
atggctgctggtacggcagttggcgcttgggtcctcgtgctgtcactttggggcgcagtggtcggcgcacagaatattacagccagaatcggggaacccctggtgctgaaatgtaagggggctcctaagaagcccccacaaagattggagtggaagctgaacaccggcaggaccgaggcctggaaggtgctgagcccacaggggggaggaccttgggacagcgttgcaagggtgcttccaaatggcagcctttttctacctgccgtgggaatccaggatgaaggtattctgggcggactcggcacagctgcgctgctcatcggtgttattctgtggcagagacgtcagcggagaggcgaagagcgtaaggctcccgagaaccaggaggaagaggaggaacgcgctgagctcaaccagagcgaggaacccgaagccggagagtcttctaccggcggtccatag

SEQ ID NO: 213915 - DNA, 387 bp, synthetic construct
  misc_feature 1..387: note = Description of Artificial Sequence: Synthetic coding sequence
  source 1..387: mol_type = other DNA
atggctgcaggcaccgccgtcggagcctgggtgcttgtcttatccctctggggcgctgttgttggagctcagaatattaccgccagaatcggagagccgctcgttctgaaatgtaagggagctccaaagaagccgcctcagaggttggagtggaaactgaacacagggagaaccgaagcatggaaagtgctgtcaccacaaggcggtggcccttgggactccgtcgctagagtactgcccaatggttctctctttctacccgctgtgggaattcaagatgagggaatcttccggtgtcaggccatgaaccgcaatggaaaggagacaaagtctaattatagggtgagggtgtatcagtttgagaatttgcataactatagtttgtag

SEQ ID NO: 213916 - DNA, 2460 bp, synthetic construct
  misc_feature 1..2460: note = Description of Artificial Sequence: Synthetic coding sequence
  source 1..2460: mol_type = other DNA
atgcccctgacctctgcctttagagcggtggacaacgatcccggaatcattgtgtggagaatcgagaaaatggagctagcacttgttccagtctctgcacatggcaacttctatgagggtgattgctacgtgatcttgtctacaagaagagtggcctcccttctgtcccaggatatccatttctggattggaaaggatagcagtcaggacgaacagagctgcgccgcaatctataccacccaattagacgattacctaggcggttcacctgttcagcaccgagaagtccagtatcatgagtctgacacattccggggatattttaaacaaggaataatctataaacagggtggggttgcctccggtatgaagcacgtggaaactaacacttatgatgtcaaaagactgctacatgtgaagggcaagcgtaatattcgtgccacagaggtggagatgtcttgggattcctttaatcgaggagatgtgttcttgctcgacttgggaaaggtgattatccaatggaacggtccagagtccaacagcggtgaacgactgaaggcaatgttacttgctaaggacattagggatcgcgaacgaggaggaagagccaaaattggtgtgatcgagggtgacaaggaagccgcttcaccagagctaatgaaggtccttcaggacactctgggacggcgtagcatcatcaagcctacagtgcctgatgaaattatagaccagaagcagaagtccaccattatgctataccatatctccgattctgcaggccagctggccgtgacagaagtggctactcggcctctggtccaggacctgctgaatcacgacgactgttacattttagatcagtctgggaccaagatctacgtctggaagggcaaaggggctactaaggctgagaaacaagcagccatgtcgaaagcactcggattcatcaaaatgaaatcttacccttccagcactaacgtggaaaccgttaacgacggtgctgagtcagcaatgtttaagcagcttttccagaaatggtcagtgaaagaccagactatggggttggggaaaacattctcaatcggaaagattgctaaggtattccaggataagtttgacgtgaccctgttgcatacaaaacccgaagttgcagcccaggagagaatggttgacgacgggaatggcaaggtagaagtgtggcggattgagaatttggaacttgtgcccgtggagtatcaatggtatggcttcttctacggtggcgattgctacctcgtcctctacacctacgaagtgaatgggaagccccaccacattttgtatatatggcaggggaggcacgccagccaggacgagttggccgctagtgcctatcaggccgtggaagtggaccgccagttcgatggtgccgctgtgcaggttcgcgtccgtatgggcaccgaacctcgccactttatggcgatttttaaggggaagcttgtcatctttgaaggaggcacaagtcgaaagggaaatgccgaacctgatccacccgtgcggctgtttcagattcatggcaacgataagagcaacaccaaggcagtggaggtccctgcgtttgcctcctcgctcaactcaaatgatgtattcctactgaggactcaggccgaacactacctgtggtacgggaagggctcgagtggggacgagcgcgctatggcaaaagagttggcttctttgctgtgcgatggatccgaaaacacagtggctgaaggtcaagagccagctgaattctgggatttacttggcggtaagacgccatatgccaacgacaagcggcttcagcaagagatactagacgtgcagtctagactgtttgaatgcagcaacaagacaggccagtttgtcgtgacagagattaccgacttcactcaggacgacctaaaccccacagatgttatgctgcttgacacttgggaccaggtgttcttgtggattggagccgaagctaatgccaccgaaaaagaaagtgccctcgcaaccgcacagcagtaccttcacacacacccatccgggagagacccagatacacccatcctaattatcaaacaaggcttcgaaccacccatattcacagggtggttcctggcatgggacccaaatatttggtccgccggtaagacttatgaacagctgaaggaagaactgggggacgccgctgcgatcatgcgcatcacagccgacatgaaaaacgccactctctccttaaatagtaacgattcagagcctaaatattatccaatcgcagtcttactgaagaatcagaaccaggagctacctgaagatgtcaacccagcaaagaaggagaactacctttctgagcaggatttcgtctccgtgttcggaataacacgtggacagtttgcagctctcccagggtggaaacagttgcaaatgaaaaaggaaaaggggctcttttag

SEQ ID NO: 213917 - DNA, 2439 bp, synthetic construct
  misc_feature 1..2439: note = Description of Artificial Sequence: Synthetic coding sequence
  source 1..2439: mol_type = other DNA
atgagcagcaccggccatccgggatcttacaaaatctggggggagaaaatggagctagccctggtgcccgtgtcagctcatggtaatttttacgagggtgactgttacgtgattctgtctacaaggcgggtggcttcactgctaagccaagacatccatttttggattgggaaggatagcagccaggatgagcaatcttgtgcagcaatttatactacacagcttgatgactatctcgggggttcgcctgtccagcaccgtgaggtacaatatcatgaaagcgatacgttccgaggatatttcaagcaaggcattatatacaaacagggcggagtcgcatccggaatgaaacacgtggaaaccaacacatatgacgtgaagcgccttctccacgtgaagggcaagagaaacatccgggcaaccgaggtagaaatgtcttgggattcatttaatcggggagatgtctttctcttagacctgggaaaggtcatcatccagtggaatgggcctgaatctaacagcggcgagcggctgaaagcaatgcttcttgccaaagatatccgggaccgcgaaaggggtggtagagctaagattggggtgattgagggggataaagaggcagcctcccccgagttgatgaaagtgctgcaagatacgctgggacggcgaagtattattaaaccaacagtgccggatgaaatcatcgaccaaaagcaaaagtccacaattatgttgtaccatatcagtgacagcgccggacagctcgccgttaccgaagtggctacaaggccactagtgcaggaccttctgaatcatgacgattgctacatcctcgatcagtccggcaccaagatttacgtgtggaagggtaaaggggctaccaaagcggagaagcaagcagctatgagcaaggcactcggattcattaagatgaagtcctacccctcttcaaccaacgtggagactgtgaacgatggcgctgagtcagcaatgtttaaacagctttttcaaaagtggtccgtcaaggaccagactatgggcttgggcaagaccttcagtatcggaaaaattgctaaggtatttcaggacaagtttgatgtcactttgttacataccaagccagaggtggcagcccaggagagaatggtagacgacggcaatggaaaagtggaagtctggcggattgaaaacctggagctagtgccagtggaatatcagtggtatggtttcttctatggaggcgattgctacctggtgctgtatacgtacgaggtgaacggtaagcctcaccatatcctctacatatggcagggacggcacgctagtcaggacgaactagcggctagcgcataccaggccgtggaagtggatcggcaattcgatggagctgctgtgcaagtgagagtgcgtatggggactgagcctaggcattttatggccattttcaagggaaagttagtcatcttcgaggggggtacctcccgcaagggcaacgctgaaccagatccccctgtcaggcttttccagattcatgggaatgacaagagtaacacgaaagccgtggaagtcccagcctttgcctcctccttaaattctaatgacgtgtttttactgaggacccaggcggagcactacctgtggtatggcaagggctcgtctggagatgagcgggctatggctaaagagctcgcctcactgctctgcgatggttcagagaataccgtggccgagggccaggaaccggctgaattttgggatttactggggggaaagacaccttatgccaatgacaagcgcttgcaacaggagattctcgacgtccagtcaaggttgtttgagtgctccaataaaaccggccagttcgtggtcaccgaaattaccgattttacccaagacgatctgaacccgacagatgtgatgttgctggatacctgggaccaggtgttcctgtggatcggagctgaagccaatgcgacggagaaagagagcgccctggctacagcgcaacaatatctccacactcacccttcaggtagggatcccgatacgcccatcctgatcatcaagcagggcttcgagccccctatctttaccggctggtttctcgcctgggaccccaatatttggtctgctggaaaaacatacgaacagctgaaggaggagttaggggacgccgctgccatcatgagaatcacagccgacatgaagaacgctactctcagcctaaatagtaatgactccgagcctaagtattaccctattgccgtgcttctgaagaatcaaaatcaagagctgccggaagatgtcaatccagccaagaaagaaaactacctttccgagcaggattttgtttcagtctttggtattacaagaggccagttcgccgcactgcctggttggaagcaacttcagatgaagaaagaaaaagggctattttag

SEQ ID NO: 213918 - DNA, 474 bp, synthetic construct
  misc_feature 1..474: note = Description of Artificial Sequence: Synthetic coding sequence
  source 1..474: mol_type = other DNA
atgcctcttacaagcgcatttcgcgcagttgataatgacccaggtataatcgtctggagaattgaaaaaatggaattggccctggtccccgtgtcagcccacggtaacttttacgaaggagactgctacgtgatcttaagcacaagaagggtggcatctctcctgagccaggatatacacttttggattggcaaagactcctcacaagatgaacagagttgcgccgctatttatactacacagttagacgactaccttggtggcagcccggtgcagcatcgggaagtgcaatatcacgagagtgatactttccgaggttactttaagcaaggcatcatctacaaacagggtggcgtcgcttccggcatgaaacatgtggaaaccaacacttatgacgtgaagcgtctgttgcacgttaaggggaagcgcaatattagggcgacagaagtggagatgagttgggattccttctag

SEQ ID NO: 213919 - DNA, 2859 bp, synthetic construct
  misc_feature 1..2859: note = Description of Artificial Sequence: Synthetic coding sequence
  source 1..2859: mol_type = other DNA
atgaaattcaagcgcagacatcaggccttcccttcttttttcaagatgaaagtctctcttccaagtgatccaagctgtgtagaggagattctgcgagagagccagcatctgacgccaggcttcacactgcagaagtggaacgatccaacaacgcgggctagcacaaagtccgtgagcttcaagagtatgctggaagacgatctcaagctgagctcagacgaggacgatttagagccggtcaagaccttgaccactcagtgtacagccaccgagttataccaggccgtggagaaggctaaaccgaggaacaaccctgtcaacccccctctggcgactcctcagccaccgcctgctgtgcaagcctctggcggaagcggaagttcatctgagtcagagtctagcagtgaaagcgacagcgacacagaaagctcaacaacggattccgaaagtaacgaggcacctcgggtcgctacgcccgagccagaaccaccatccacaaacaagtggcagctcgataaatggctcaataaggtgaccagtcagaacaaaagcttcatttgtggccagaatgaaacgccaatggagacaatatcgcttcccccaccgattatccaaccaatggaagtccagatgaaggtcaaaacgaatgcctcacaagtccccgctgagcccaaagaaaggcctttgttgtcgctcatcagagagaaggcaaggccgcgaccaactcagaagattccagaaactaaggccctgaaacataagctgtccactacctctgaaaccgtgtcccaacgcactatcggaaagaagcagcctaagaaggtggagaagaacacctcgacagacgagttcacttggcccaagccgaacatcacgtcttctactcctaaagaaaaagagagcgtcgagctgcacgacccccctaggggtagaaataaggccacagctcataaacctgctccacgcaaggaacccaggcctaatataccactggccccagaaaagaagaaataccgcggaccgggaaagattgtaccaaaatctagggaattcattgagaccgactcttcaaccagcgactcaaatacggaccaggaggagacccttcaaatcaaggtattacccccttgtataatctctggcggaaacacagcaaagagtaaagagatctgtggggctagtcttacactcagtacactcatgagttcctctgggagcaataacaacctctcaatatctaacgaggaacctaccttttcccccatacccgttatgcaaacagagatcctctcacccttgcgcgatcatgagaacctgaaaaacctctgggtgaaaatcgatttggatctgttgagtcgggtgcccggacactcaagcctccacgctgcacctgctaagccagatcacaaggagacagcaaccaaaccaaaaagacagacggccgtcacggcagttgagaaacctgccccaaagggaaaacgcaagcataaacccatcgaggtggctgagaaaattcctgagaagaaacagaggctggaagaagctacaacaatatgcctacttccaccttgcatatcccccgctccccctcataagcctccaaacaccagggaaaacaactcgtcaagaagggctaataggcgtaaggaggagaaactgttccccccaccactatcaccactgccagaagatcccccacgccgacggaacgtgtctgggaataacgggcctttcggacaggacaagaacattgccatgaccggacagatcacatccaccaaacctaagcggaccgagggcaagttttgcgcaacatttaaagggatatccgtgaatgagggtgacactccgaagaaggccagtagcgccacaattactgttaccaacacagctatcgcaacagccaccgtaaccgctactgctatcgtgaccacaaccgttaccgcgacagccactgccacagcgacaactacaactactacaacaaccatcagcacaattacaagcaccattacaactggtctaatggattcctcccacctggagatgactagctgggcggctctgcccctcctgagctctagttcaaccaacgtgaggcgacccaagctgactttcgatgattctgtgcacaatgcagactactacatgcaagaggccaaaaagttgaagcataaggccgacgctttattcgaaaagtttgggaaagctgttaattatgccgacgctgcactaagttttactgaatgcggaaatgccatggaaagggatcccttggaagcgaagagcccctacaccatgtactctgagacagtcgaactgctgaggtatgctatgcggctgaagaattttgcttcccccctcgccagtgacggggacaagaagttagcagttctgtgttatcgctgcctgagcctcctttaccttaggatgttcaagctaaaaaaggatcacgccatgaagtactcccggtcactgatggaatactttaaacaaaatgcttctaaggtggcccagattccctccccctgggtatccaacgggaagaataccccttcgcctgtatctctgaataacgtgagtcccattaatgcgatgggcaactgtaacaacggacctgtgacaattccacaacggatccaccacatggcagcctcacatgtcaatatcacgtccaatgtgttgcgaggttacgagcactgggacatggccgacaagctaaccagggagaacaaagagtttttcggcgatctggataccttgatgggccctctgactcagcactcatctatgacaaacttggtgcggtacgttagacaaggcctttgttggttacgtattgacgcccacctactgtag

SEQ ID NO: 213920 - DNA, 3837 bp, synthetic construct
  misc_feature 1..3837: note = Description of Artificial Sequence: Synthetic coding sequence
  source 1..3837: mol_type = other DNA
atggatctgtttgattttttccgggactgggacctggagcaacagtgtcattacgagcaggatagatcggcgctcaagaagagggaatgggaaaggagaaatcaggaagtgcagcaggaggatgaccttttttcatccggcttcgacctttttggggaaccatacaagactaataaaggcgatgcattggccaatagagttcagaacacgcttggaaattacgacgagatgaagaacctcttgaccaatcactctaaccaaaaccacctggtggggataccaaaaaactccgtgcctcagaatccaaataacaagaatgagccaagctttttcccagaacagaaaaacagaataataccaccacatcaggataacactcatccgagtgctcctatgccacccccttcagtcgtgatactcaatagtacactgatccacagtaacaggaagtcaaagccagagtggtcccgagactcccataatccctccactgtattggcgagccaagcctcaggtcaacccaacaaaatgcagacactgacacaggatcaatcccaggccaagctggaggatttttttgtgtaccctgccgaacaacctcagatcggtgaggttgaagagtctaaccccagcgccaaggaggatagcaacccaaatagcagcggggaggatgctttcaaggagatttttcagtctaattcgcccgaagaatccgaatttgctgtccaagccccagggtcaccactggtggcctcgagtctgctagcaccaagctccgggttgtctgtgcagaattttcctcctggtctgtattgtaagacatccatgggccagcaaaagcccactgcatatgtcaggcccatggacggccaggaccaggcgcctgatatctcccccactttaaagccctcaatcgagttcgaaaactcctttgggaacctcagcttcggcactctcctggatggtaagccgtccgcagcctcttctaagaccaagctaccaaagttcacgattttgcagacttctgaggtctccctgcccagtgatccctcttgtgtagaagaaatcctgagggaatcacagcatttaacaccaggcttcaccctacagaagtggaacgaccccacaacgcgggctagcacaaagtcggtgtcgtttaaaagcatgctggaggacgacttaaaactatcgagcgacgaagacgatttggaaccagtaaaaactctgacgacccaatgtaccgccactgaattatatcaggccgtggaaaaggcaaaaccgaggaacaatcccgtaaaccccccactagcaacccctcagccccctccagccgtgcaggcgtccggaggttccggttcttcctccgagtccgagtcttcatctgagagcgatagcgatacagagtcttctactacagactccgaatcaaacgaagcacccagggtcgccacacctgaaccagaaccaccctcaactaacaagtggcagctggacaagtggctcaataaggtgacgagtcagaacaagtcctttatttgcgggcagaacgaaaccccaatggagaccatttcgctgcctccgccaatcatccagcccatggaggtccagatgaaggtgaagacaaatgcttcccaggttccggctgagcccaaggagagacccctgctcagcctgattcgagaaaaagccaggcccagacccacgcaaaagatacccgagactaaagccctgaagcacaagttgtcgactacatcagagactgtgagccagcgcactatcggaaaaaaacagcccaagaaggtcgaaaaaaacacgagtactgacgaatttacatggcccaagcctaacatcactagcagtacccccaaggaaaaggagtcagttgagctgcacgatccccctcggggaagaaataaagcaactgcgcacaagcccgctcctagaaaggaaccgagacctaatattcctctggcccctgagaagaaaaaatatcggggaccaggtaaaatagttcccaaaagcagggaattcatcgagaccgattcaagcaccagcgactctaacacggatcaggaggaaaccctccagatcaaggtgttaccgccatgcataatctcaggcggaaacacagcaaagagtaaggaaatttgcggcgcttctctcaccttatccacccttatgagtagtagtggaagcaataacaacttatccattagcaacgaagagcctactttcagccccatccccgttatgcaaaccgaaattctcagcccattacgcgatcatgagaacctgaaaaacctgtgggttaaaatcgatcttgatctactctcaagagttcctggccactcttccctgcatgcagcccctgctaagccggaccataaagagaccgccaccaaaccgaagagacagacagccgtcaccgccgtagaaaaacctgcaccgaaggggaagaggaaacacaaacctattgaagttgcagaaaaaatccccgaaaagaagcagcgcctggaggaggctaccaccatttgccttcttcccccatgtatctcccctgcaccaccacacaagccccctaatactagggagaataactccagccgacgcgcaaaccgacggaaggaagaaaagctctttccaccgccattatcaccgctgccggaggatccacccaggcggcgaaacgtaagtggcaataatgggcctttcgggcaggacaagaatatcgccatgacagggcagatcacaagcaccaaacccaagcggaccgaggggaagttttgtgctaccttcaaaggaatttccgtcaatgagggggacacccccaagaaagccagcagtgcgacaataacagtcaccaacactgcgatcgcaaccgcgactgtgaccgctaccgcgattgtcaccacaaccgttaccgctacggcaacagctaccgctactactacaacaacaacaaccaccatctccacgataacttccactatcaccaccgggttgatggatagcagccacctggagatgacttcatgggcagcactccctctgttaagttcaagttccactaatgtgcgcaggccgaaactgacattcgacgacagcgtccacaatgccgattattatatgcaggaggcgaaaaagctgaagcataaggcagatgcactcttcgaaaaattcggtaaggcagttaattacgccgatgccgctctgtcctttacagagtgtggcaatgctatggaacgcgatcctctggaggccaaatccccttataccatgtacagtgagaccgtggaactattaagatacgccatgcgcctcaaaaactttgcctcaccactggccagcgacggagataagaagctggcagtgctatgctatcgctgtttgtctctgctttatttacgaatgtttaagctcaagaaggaccatgccatgaaatacagccggagcttgatggaatatttcaagcagaacgcgtccaaggtcgcccagatcccctcaccctgggtttcaaatggaaagaatacgccttctcctgtgtccctgaacaacgtgtctcctattaatgccatgggcaactgtaacaatggtcctgtcacaatcccgcaaaggattcatcatatggcggcttcgcatgtgaatatcaccagcaacgtactgcggggttatgagcactgggacatggctgataagctgaccagggaaaataaagagttcttcggcgatttggatactcttatgggtcctcttactcagcacagttctatgactaatctggtgcgatatgtacggcaaggtctttgttggttacgaattgatgctcacctactttag

SEQ ID NO: 213921 - DNA, 3830 bp, synthetic construct
  misc_feature 1..3830: note = Description of Artificial Sequence: Synthetic coding sequence
  source 1..3830: mol_type = other DNA
atggatctctttgatttctttcgcgactgggacctggagcagcagtgtcattacgagcaagacagatctgctctgaagaagagggagtgggagcggaggaaccaagaggtccagcaggaggatgatctattttctagcggctttgacctttttggagagccctataagactaataagggagacgctctggcgaacagggtccagaatacactcggaaattacgacgagatgaagaatctactgacaaaccatagcaatcaaaatcacctggtcggaattccaaaaaattcagtgccgcagaaccctaacaataaaaacgaaccgtctttctttccagagcaaaaaaaccgtatcatccccccacaccaagacaatacccacccaagtgctcctatgccaccaccatctgttgttattctgaacagcaccttgatccatagcaaccgtaaaagtaagcccgaatggtctagagacagtcacaatcccagcacggtcctggcctctcaagcttctgggcagcctaacaagatgcagacactgacacaggaccagtcgcaagccaagctggaagactttttcgtctaccccgctgagcagcctcagatcggcgaagtggaggagagcaacccgagtgcaaaggaggacagtaaccccaactcctccggcgaggacgcctttaaggaaatcttccagtcgaactcgccagaggaaagcgagtttgcggtgcaggcaccgggatcccctctggtggcttcaagtcttttagcaccttcctcaggcttatccgttcaaaactttccacccggattgtactgcaagacgagcatgggccagcaaaaacctacagcctacgtgcgccctatggacgggcaggatcaggctcctgatatttcgcccaccttgaaaccaagcattgagttcgagaattctttcggcaatctgagcttcggcacactgctggacgggaaaccatccgccgcatccagtaaaacaaagttacccaagttcaccattttacaaacctccgaagttagcttgcctagcgatcctagctgcgtggaggaaatccttcgcgaatcccagcacctcacacctggattcacactccagaagtggaacgacccgaccacgagagctagtacaaagagtgtaagcttcaaaagcatgctcgaggacgacctgaagctgagtagtgacgaggatgaccttgaacctgtgaagacgttgactactcaatgtaccgccactgaactgtatcaggccgttgaaaaggccaagcctaggaacaaccctgtgaatcccccattagcaacccctcaacccccacccgctgtccaggcatccggcggaagcggatctagttccgaaagtgaatcctcttccgagtctgatagtgacaccgagtcaagcacgactgatagtgagtcgaacgaagcacctcgggttgccaccccagaacccgaaccgccttctaccaataagtggcagttagacaaatggcttaacaaagttacatcccagaacaaaagcttcatctgcgggcagaacgagacaccaatggagactataagcctgccaccacccatcattcagccgatggaagtgcagatgaaagtgaagactaatgcctctcaggttccagccgaacctaaggagaggccgctcctgtcgctgatacgcgaaaaagccaggccaaggccgacccagaagatcccggaaacaaaggcactcaaacacaagctgtccacaacttctgagaccgtgagccaaaggaccattggcaaaaagcaaccaaaaaaggtcgaaaaaaacacctcgaccgacgagtttacatggcccaagccgaatattacatcttctacaccaaaagaaaaggagtccgtggagctgcatgatcccccaaggggaaggaataaggcgaccgctcacaagcccgcacccaggaaggaaccgaggccaaacatcccactagctccggaaaagaagaagtaccgtgggcctgggaaaatcgtcccaaaatctcgcgagtttatcgagacagacagctcaacaagtgactcgaacaccgaccaggaggagacccttcagattaaggttttgccaccatgcataatttctggcggaaataccgccaaatcaaaggaaatttgtggcgcttctttgactttgtcaaccctcatgagctccagcggatccaataataacctgtctatatcaaacgaagagccaacattcagtcctattcccgtgatgcagactgaaattctgagccccctccgtgatcacgagaaccttaagaacctatgggtgaagattgacctggacctgttgtcaagagtgccaggccatagcagtcttcacgcggctcctgccaaacctgatcacaaagaaaccgccaccaagcccaaacggcagaccgctgtgacagccgtggagaaacccgctcccaagggaaaacgaaaacacaagcccatagaagtagccgaaaaaattccagaaaagaaacaacgtctggaagaagccacaacgatctgtttactgcccccatgtattagcccagctccccctcacaagccaccaaacacccgcgagaacaattcaagtcgcagagccaataggcgtaaggaggaaaagttatttccaccacccctgagtcctcttccagaggatcctccacggcgaagaaatgtatcagggaataacgggccattcgggcaggataagaacattgctatgactgggcagatcacatccacaaaacccaagcgtactgaagggaagttttgtgcaactttcaaaggcatcagtgagggcgataccccaaaaaaggcttcttctgcaactatcacagtgactaatactgcaatagcaactgccaccgtgaccgccaccgctattgtaaccaccaccgtgactgcaactgctaccgcaacagccaccacgaccactaccaccactactatctctaccataacatcaacaatcacaactggattgatggattcctctcacctggagatgacgtcatgggccgcattgccactactcagttctagttccactaacgtgcgtcgacccaagcttacctttgatgattctgtacacaatgctgattattatatgcaagaggccaagaaactgaaacataaggccgacgccttgttcgagaagtttggaaaggcagtgaactatgccgatgcagcactgtctttcactgaatgcggaaatgccatggaaagggatccgcttgaggccaagagtccgtatactatgtacagcgaaaccgtggagctgttgagatacgcaatgaggctgaagaacttcgcctctccgctggcatcagatggcgacaaaaaactggccgtactttgctacagatgcctatctttactatatcttaggatgttcaagttaaagaaagaccatgcaatgaagtacagtaggtcattgatggagtattttaagcagaacgcctctaaagtagcccaaattccgagcccgtgggtgagtaacggaaaaaacactccatctccagtgagtttaaacaatgtctcaccgatcaatgcaatggggaactgcaacaatggaccagtgaccatcccacaacggatccatcacatggcagcctcccatgtaaacatcactagcaacgtgctgcgcggttacgaacactgggacatggcggataagttaacaagggaaaataaagagttttttggggatctggatacacttatgggacctctgacacagcattcctcgatgaccaacctggtacggtatgtgcgccagggcctgtgttggctgagaatcgatgctcaccttcttta

SEQ ID NO: 213922 - DNA, 1284 bp, synthetic construct
  misc_feature 1..1284: note = Description of Artificial Sequence: Synthetic coding sequence
  source 1..1284: mol_type = other DNA
atggacttgttcgattttttcagagactgggacttggaacagcagtgccactacgagcaggacagaagtgcattaaagaagcgggaatgggaacgccgaaaccaagaagtgcagcaggaagatgatctgttcagttcagggttcgacctgtttggcgagccttacaaaacgaataaaggtgatgcacttgcgaatcgcgtgcaaaacactttgggaaattacgatgagatgaaaaacctacttacgaaccattccaaccagaatcatctggtgggaatccccaaaaacagcgtgcctcaaaaccccaacaataagaatgaacccagtttttttccagaacagaaaaacaggattattcccccacaccaggacaacacccatcccagcgcccctatgccccctccatctgtggtcattctgaattctaccctaatccatagcaaccgcaagagcaagcccgagtggtctcgggatagtcataatcccagcacagtcctggcatcacaggcttcgggccagcccaataagatgcagactctgacccaggaccaatcccaagccaagcttgaggatttctttgtgtatccagccgaacaacctcaaattggtgaagtggaggaaagcaacccctctgcgaaggaagatagcaatcctaactcatccggagaggacgcttttaaggaaatttttcagagtaacagtcccgaggaaagcgagtttgctgtgcaggccccagggagccccctcgttgcttcaagcctgctggcaccctcctctgggctatccgttcaaaatttccctccaggtctgtactgtaagacctctatggggcagcagaaacccactgcgtatgtacgcccaatggatggtcaggatcaggccccagacattagtccaaccctcaaacctagcatcgagttcgaaaattcttttggaaatctgtcgtttggaacactgctggacggaaaaccatccgcggcaagcagcaagaccaagttgcccaagtttacaatcctccaaacaagtgaggtgagtctgcctagtgatccctcttgcgtggaggaaatactgagagaatcacagcatctgactcccggatttacactccagaagtggaacgatccgacaactcgcgcatccaccaagatgctggaggatgatctcaagctgagttccgatgaggatgacctagagccagtgaagacgctgaccacgcagtgcaccgcaaccgagctttaccaggccgtcgaaaaggccaaaccaaggaataacccggtcaagtag

SEQ ID NO: 213923 - DNA, 3935 bp, synthetic construct
  misc_feature 1..3935: note = Description of Artificial Sequence: Synthetic coding sequence
  source 1..3935: mol_type = other DNA
atggacttgtttgacttctttagggactgggatctggaacagcaatgtcattacgagcaggaccgctcagccctcaaaaagagagaatgggaacggcgtaaccaggaggtgcagcaggaggatgacctgttctcaagcggtttcgatctgtttggcgagccttataaagtcgccgagtatactaacaagggtgacgcgctggccaacagggtgcagaatactctgggcaattatgatgaaatgaagaacctcctcacaaatcattccaaccaaaatcaccttgtcgggattcccaaaaattctgtgccgcagaatccgaacaataagaatgaacccagcttcttcccggagcagaaaaacaggataatcccaccacaccaggacaacacccaccctagtgcccctatgcccccaccctccgttgttattctgaacagcacactgattcacagcaatagaaagtctaaacctgagtggagccgggattctcacaacccctcaacagttctcgcttctcaggcttctggccagcccaacaagatgcagaccctgacccaggaccagtcccaggcgaagctagaagacttttttgtgtaccctgctgagcagccacagatcggcgaagtcgaagagtcgaatcccagcgctaaggaggactccaaccctaattcttccggcgaagacgcctttaaggaaatatttcagtccaacagccccgaagagtcggaattcgctgtgcaggcccctgggagccctctggtggcaagttccctgctggccccttcttctggactcagtgttcagaactttccaccaggactctactgtaaaacatctatgggacagcaaaagcccaccgcctatgtcaggcctatggacggccaggatcaggctcccgatatctcccctacactcaaaccctcaattgagttcgagaattcttttggcaacctaagcttcggcactctcctggacggtaaaccatctgcagccagctcaaagaccaaactccccaagtttactattttacagacaagtgaagtctcgctgccttctgatccaagttgtgtcgaggaaattctgcgcgaaatgactcactcgtggcccactcctctgacctccatgcacaccgccggacacagtgaacagtccaccttctcaataccaggtcaagaatcacagcacctgacacccggatttaccctgcaaaaatggaatgatcccactacacgcgcttccactaaatcagtgagtttcaaatccatgcttgaggacgatttgaaattatcgtcagatgaagacgacctagagccagtcaagacattgactacccagtgcacagccaccgaactgtaccaagctgtcgagaaggccaaaccacgtaacaatcctgtgaacccccctctagccacaccacagccaccaccagctgtgcaggcttctggagggagcggaagctcaagcgaaagcgagagtagcagcgagagtgactctgacacagaaagttctactacagatagcgaatctaatgaggctcccagagtggcaacccccgagccggagcctccgtctaccaacaaatggcagctcgataaatggctcaataaggtgacgagtcaaaacaagagtttcatatgcggtcagaacgagacccctatggagaccatcagcttacccccaccgatcatccagcctatggaggttcagatgaaagtgaagacgaacgcatctcaggtacctgctgaacctaaagaacgccctctcctgagtctgattcgcgagaaggcgagaccacggcctacccagaaaattcctgagacgaaggcgctgaagcataagctgtccacgacttcagagacagtgtcacagcgaactattggaaaaaaacaacctaagaaggtggaaaagaacacgtccactgatgaattcacctggcctaagcctaatataacaagctccaccccaaaggagaaagagagtgtagagcttcacgatcctccgcgagggcgtaacaaagcaactgcccataaacctgccccacgaaaagaacccagacccaatatcccgctggcacccgagaaaaaaaagtatcggggtccgggaaaaatcgtgcctaagtctagggagttcatagagactgacagcagcaccagcgacagtaatactgaccaagaagaaacattgcagattaaggttctgcctccctgcataatcagcggaggaaacacagctaagagcaaggagatatgtggcgcaagccttacactttcaacgttaatgtctagctctgggagcaacaataatctgtcaatctcaaatgaggagccaactttttctcccatccccgtgatgcagacagaaattcttagcccccttagagaccatgagaatctgaagaatctctgggtgaagatcgacctcgacctccttagtagagtgcctggtcactcctccctacatgccgctcctgcaaagccagatcacaaagagacagccactaagcctaagcgccagacagccgtcaccgcagtcgagaaaccggcaccaaaaggcaagaggaagcataagcccattgaagtggccgaaaagattcccgagaagaaacagcggctggaagaggccacaacaatctgcctgctcccaccctgcataagccccgctccgcctcataagcctcctaatacaagggagaacaatagcagtaggcgagccaatcggaggaaggaggaaaagctgtttcccccacccctgtctcctcttcccgaagaccccccaaggcgcaggaatgtgtctggaaacaatgggcctttcggccaggacaagaacatcgctatgaccggccaaattacatccacaaagcccaagagaacagagggtaaattctgtgccacatttaaaggcatttcagtgaacgaaggcgatacacccaagaaagcctcctccgccaccatcacagttacaaatactgccatcgccaccgcaactgtgacagcgactgccatagttaccaccactgtgacagctacagcgaccgccactgctaccactaccactaccaccactaccataagtacaatcacctcgactattacaaccgggctgatggactctagccatcttgagatgacatcctgggccgctctgcccctgctgagttcttcttcaacaaacgtgaggcgacccaaactaacatttgatgattcagtgcacaacgctgactattacatgcaggaggcaaagaaactgaaacataaagctgatgccctgtttgagaaatttggcaaggccgttaactatgccgacgccgctttatccttcacagagtgcgggaatgccatggaacgcgatcctctggaggctaaatctccgtacaccatgtattcagaaaccgtggagctgctgcggtacgcgatgcgtctcaaaaattttgcctccccgttggccagtgacggggataaaaagttggccgtgttgtgttatcgttgtctgtctctgctatatctgcgtatgtttaagctgaaaaaggatcatgctatgaagtattcacgaagcctgatggaatacttcaagcaaaacgcaagcaaggtggcgcagataccttctccatgggtgtccaacggaaaaaatactccctctcctgtctctttaaacaacgtctcccctataaatgcgatgggcaattgcaacaacgggcctgtgactataccccagagaatacaccatatggccgcatctcatgtcaacattactagtaatgttttgcgtggatatgaacactgggacatggccgacaaattaacgcgggaaaacaaagaattctttggagatctagatactctgatgggcccactgacccagcacagttctatgactaatcttgtccggtacgtgcggcaggggctctgctggctgaggatagacgctcatttactgta

SEQ ID NO: 213924 - DNA, 1410 bp, synthetic construct
  misc_feature 1..1410: note = Description of Artificial Sequence: Synthetic coding sequence
  source 1..1410: mol_type = other DNA
atgtctgcactgacaccaccaacggacatgccaactcccacaaccgacaagataacacaggcagctatggagacaatatacctttgcaaattccgcgtctcaatggacggcgaatggttgtgcctgagagaattggatgacatatctctgacccctgaccctgaacctacacatgaggatcctaattacctaatggcaaacgagcgaatgaatttaatgaatatggctaaactgagcattaagggcttgatcgaatccgccctgaatcttgggaggacactagacagcgattatgcacccctgcaacagttttttgtcgtcatggaacattgcttgaagcacggtctgaaggccaaaaagacctttctgggacaaaataaaagtttttggggacctctagagctagtggagaaactggtccctgaagctgctgaaatcactgcatcagtgaaagatctccccggtctaaaaacacctgtcggcagaggacgggcatggctgaggctggccctgatgcaaaaaaagctgagcgaatatatgaaagcgctgattaataaaaaagagttgctgtccgaattttacgaacctaatgccctcatgatggaagaggaaggggcaatcattgccggattgctggtcggcctgaatgtgattgatgcaaatttttgcatgaaaggtgaagacctcgattctcaggtcggtgtgattgacttctccatgtatctcaaagatggtaactcatccaagggaaccgaaggcgacggccagattactgccattcttgaccaaaaaaactatgtggaggaattgaaccgacatctgaatgctaccgtcaacaatctgcaagccaaagttgacgcattggaaaagtccaacactaaattgaccgaagaactggccgtcgccaacaacagaatcataacactgcaggaggagatggagcgggtcaaggaggagtccagctacatcctggaaagtaaccgcaaggggccaaagcaagacagaaccgcagaggggcaggcattatctgaggctaggaagcacctcaaagaggagacccagctgaggctggatgtcgaaaaagagctggaaatgcagatctctatgaggcaggagatggaactggcaatgaagatgctcgagaaggacgtttgcgagaagcaggatgcacttgtttccctgcgacagcaactggacgacctaagggcactgaagcacgaactcgccttcaagcttcagtcttcagacttgggcgtgaagcaaaaaagcgagctcaactctcgattagaggagaaaactaatcaaatggccgctaccatcaagcagttggaacaatctgagaaagacctggtcaaacaggccaagaccctgaattctgccgcaaataagctgatccccaaacaccattag

SEQ ID NO: 213925 - DNA, 2394 bp, synthetic construct
  misc_feature 1..2394: note = Description of Artificial Sequence: Synthetic coding sequence
  source 1..2394: mol_type = other DNA
atggcacatcggtgtctgaggctgtgggggaggggcggatgctggcccaggggactccagcaactcctagtccctgggggagtgggtcccggagaacagccttgcttgcgcacgctgtacagattcgtgactacacaggcccgagcatcgcggaattcactgctaacggacatcattgccgcttaccagcgcttctgctctcggccacccaagggcttcgagaaatacttccctaatggtaagaacggcaaaaaagcgagcgagcctaaggaggtgatgggcgagaaaaaggagagtaagcccgctgccaccacgcggagtagcggcggtggcggaggcggaggcggaaaaagagggggaaagaaggacgactcccactggtggtccagattccaaaagggggacataccatgggacgacaaggacttcaggatgttctttctgtggaccgctctgttctggggaggggtgatgttttacctgcttctaaagaggtccggcagggagatcacatggaaagacttcgtgaacaactatctgtcgaaaggagtcgtcgacagactggaggtagtgaataagcgcttcgtgcgggtcacgttcaccccaggcaagacacccgtggatgggcagtacgtgtggtttaatattggcagcgtggacacgtttgagcgcaaccttgaaacccttcagcaggagctgggcatcgagggcgagaaccgggtgcctgttgtgtatatagcagagtctgatgggtcctttttattaagcatgctgcccacagtattaataattgcattcctcttatacacaatccgccgtgggcctgccggaatcggaagaaccggaaggggaatggggggtcttttttcagtcggagagactacagcaaaggttcttaaggatgaaatcgatgtgaagtttaaagatgtggccggttgcgaggaggccaagctggaaatcatggagtttgtcaatttcttgaaaaaccctaaacaataccaggatctgggtgctaagatccccaagggagccattctgacaggaccgccaggtaccggaaagaccctgctggctaaagctaccgcaggagaggctaacgtccctttcatcacagtctccggatcggaattcctggaaatgttcgtgggtgtgggaccagctagagtgcgcgacctttttgctctagccaggaaaaacgccccttgcatcctgtttatagatgaaatagacgctgtcggcagaaagcggggaaggggaaatttcggcggtcaatctgagcaagaaaatacgctgaaccaactgctcgttgagatggatggttttaatactacaacaaacgtggtgatccttgctggaacaaatcgaccagatatcctggaccccgctttgttgcgcccagggcgtttcgaccgtcagatcttcatcggacccccagatattaaaggaagagcgtcgatcttcaaagtacatctacgaccactcaaactggactctaccttagaaaaagacaagctcgcccgtaagttggcttcattgactccaggtttctccggagccgacgtcgctaatgtgtgcaatgaagcagccttgatcgcggcacggcacctgtctgacagcatcaaccagaagcatttcgaacaggcaatcgagcgggtaatcggagggctggaaaaaaagacacaggtgctgcagccggaagagaaaaaaactgtggcataccatgaagctggacatgctgtagccggatggtatctagaacatgcagatccccttctgaaggtgtccatcatcccgcgtggcaagggactgggctacgcccagtaccttccgaaggaacagtacctctacactaaggagcagctccttgatcggatgtgcatgaccttaggagggagggtcagcgaggaaattttttttgggagaatcacaactggagctcaggacgacctccgcaaagtgacacagtccgcctatgcacagattgttcagttcgggatgaacgaaaaagtcggtcagataagttttgatctcccgaggcagggagacatggtgttggaaaagccttatagcgaggccaccgcacggctcatcgacgacgaggtgcgcatcctgatcaacgatgcctacaagcgaacagtggcattactaacagaaaaaaaagcagatgttgagaaggtggccctacttttgcttgaaaaagaagtgctcgacaaaaatgatatggtggaattgctcggccctagaccattcgctgagaaatcaacctatgaggagttcgtagaaggtacggggtcgctcgatgaagacacctccctgccagaggggctgaaggactggaacaaggaaagagaaaaggagaaggaagagccgcctggagaaaaagtggccaattag

SEQ ID NO: 213926 - DNA, 2439 bp, synthetic construct
  misc_feature 1..2439: note = Description of Artificial Sequence: Synthetic coding sequence
  source 1..2439: mol_type = other DNA
ggggctggtggccgacggagaagggtcgaatcactggggtcctcagtctccaggcgccgagcttccctcccgggaggcttatctcctagtcgcgctcgtttcccacgcccacccgtagttgcttgtccaaggcttcgcgagcagccatgtctacggaccctgtaccggtttgtaaccacacaggctcgcgctagccgcaactcactcctgacagatatcatcgccgcttaccaaaggttctgtagccgtcctccaaaagggttcgagaaatattttcccaatggcaagaacggcaaaaaggcctctgagcccaaggaggtcatgggcgagaagaaggaatctaaaccggctgccaccactagatcatctggagggggtggaggaggaggtgggaagagaggtgggaagaaagacgatagccactggtggtcgaggttccagaagggcgatattccgtgggacgataaagacttccgaatgttcttcctctggacagccctgttttggggtggagttatgttctatctccttttgaagagaagtgggcgagagatcacttggaaagatttcgtgaacaattacctgagcaagggcgttgtggataggctggaggtagtgaacaaaagattcgtcagagtcacctttacaccaggcaaaactcccgtggatggccaatatgtgtggttcaacattggtagtgtggataccttcgagaggaacctcgagacgttgcaacaggagctggggattgagggcgaaaatcgggtacctgttgtgtatatcgccgagtccgatggatcgttcctcctcagcatgctaccaaccgttttaatcatcgcttttctgctgtataccatccgcaggggccctgctggtattgggagaaccggcagaggtatgggtggtctcttctctgtgggcgaaacaactgccaaagttctcaaggatgagattgatgtcaaatttaaagatgtggccggatgcgaagaagctaaattagaaatcatggagtttgttaattttttaaaaaatcctaagcaataccaggatctgggcgctaagatccccaagggcgcaatcctgaccggccctccgggaactggaaagactcttctggcaaaagccactgccggtgaggcgaacgtaccatttattactgtgagcggctcagaatttttggaaatgtttgttggtgtgggacccgctagggtgcgtgatcttttcgcactcgctcgcaagaacgcgccatgcattctgttcatcgacgagatcgatgcagtcggacgtaaaaggggtcgcggaaacttcggcggacagagcgagcaggagaacacacttaatcagctactggttgaaatggacgggtttaataccacaaccaatgtcgtcatcttggctggaacaaacagacccgacatcttggacccagctctgctaaggccaggaaggttcgacaggcagatcttcataggacctccagacatcaagggtagagcgagcatctttaaagtccatctgcgcccactgaaacttgactccacccttgagaaagataagctggctagaaaactggccagtctaacccctggcttctctggggcagatgtcgctaacgtctgcaacgaagctgccctgattgcggctcgtcacctgtccgactcaatcaatcagaaacacttcgaacaagctatcgaaagggtgatcgggggactggagaagaaaacacaggtgcttcagccggaggaaaagaagacagtggcctaccacgaggccggtcacgctgttgcgggatggtacttggagcatgcagatccgctcctgaaggttagcataattccacgcggtaaaggcctggggtacgctcaatatcttcctaaggagcagtacctttatacaaaagagcagcttctggaccgaatgtgcatgaccctgggaggccgagtcagtgaggagattttttttggacgaattacaacaggggctcaggacgatctccgcaaggttacccagtcagcttacgcccagatcgtccaattcgggatgaatgagaaagtcgggcagatatctttcgacctccccagacagggagacatggtgctcgagaagccttatagtgaggccacggctcggctgatcgacgatgaggttaggatcttaatcaatgatgcgtataaacgtaccgtggcccttttaacagagaagaaggcagacgttgaaaaagtggccctcttactgcttgagaaagaagttctcgataaaaacgatatggttgagctgctggggccacggccattcgctgaaaaaagcacctacgaagagtttgttgaagggacaggctcattagacgaggatacctccctgcccgaaggactcaaagactggaataaggagagagagaaggagaaggaggagccgccaggtgagaaggtcgccaactag

SEQ ID NO: 213927 - DNA, 7250 bp, synthetic construct
  misc_feature 1..7250: note = Description of Artificial Sequence: Synthetic coding sequence
  source 1..7250: mol_type = other DNA
atgaccacactgctttgggtctttgtcacccttagagtgattacagcagcagtcacagttgaaacatccgatcatgataatagtctctctgtgtctattcctcagccctcccccctgcgcgtcctgctgggtacatctctgacaattccctgctacttcatcgatccgatgcaccccgtcacaacagctccatccacagctcccctggcgccacggatcaagtggagtcgggtgagcaaggagaaagaagttgtgctgttggtcgctactgagggcagggtcagggtgaactcagcttatcaggacaaggtgtcccttcccaactaccctgcaatcccctctgacgccaccctagaagttcagtctctgcggagcaatgatagtggggtatatcgatgcgaggtcatgcatggtattgaggactcagaagccacccttgaagtggtggttaaagggatcgtctttcactaccgggctataagcactcggtataccttggacttcgacagggcccagcgcgcttgtctgcagaattccgccatcatcgcaaccccagagcaattacaggcagcatacgaagacggcttccatcaatgcgatgccggttggttggctgatcagaccgtgcgctacccgattcatactcctagagaggggtgctacggagataaggatgagttccccggagtcagaacttatgggattcgagataccaatgagacctacgatgtgtactgcttcgctgaggaaatggaaggggaggtcttttacgctacatccccagaaaaatttacattccaggaggcagccaatgaatgccgtcgactgggggcacgtctggcaactaccggacagctttacctggcgtggcaggccggaatggacatgtgctccgccggatggttagcagaccgtagtgttaggtacccgatttctaaagcacgccctaactgtggcggtaacctgctcggcgtgcgcacggtctacgtacatgcgaaccagaccggctatccagatccctcatccaggtatgatgccatttgttacaccggtgaggatttcgtcgatatcccagagaatttctttggggttgggggagaagaagatatcaccgttcagacagtgacgtggcctgatatggaactgcccctgccacgcaacatcaccgaaggtgaagctcgcggttccgtcatcctgacggttaagcccatttttgaggtgtctccttcaccactggaacccgaagagccatttacctttgccccagaaatcggagccacagccttcgccgaggtcgagaatgagactggagaggccacccgcccatgggggttcccaacacccggtctcggacccgcaactgcatttacctcagaggaccttgtggtacaggtgactgcagtgccgggacagccccatctacctggcggagtggttttccactacagacctggaccgaccagatacagcctgacgtttgaggaggctcaacaagcctgcctccgcaccggagcagtgatagcgtctcctgaacagttgcaggccgcatatgaggctggatatgagcaatgcgacgcaggctggctcagggaccagaccgtgcgctatcctatcgtttccccccgaacaccgtgcgtcggagacaaggatagttcacctggcgtgaggacgtacggcgttaggccttctaccgaaacctacgatgtatactgctttgttgataggttggagggagaggtattttttgctacccgtttggagcaatttacatttcaagaggcactagagttctgtgagtctcacaacgctacattagcaacgactgggcagctctatgctgcctggtcaagagggttggacaagtgttatgctgggtggctggcagatggctccctgcggtatccgattgtgacacccagacccgcttgtggaggtgataaaccaggcgtcaggaccgtttatttatatcctaaccaaaccggtctgcccgatccactgagtcgacaccacgccttttgtttccgcggtatctccgctgtcccatcccccggagaagaggaggggggtacccccacttctccatccggcgtggaagagtggatcgttacccaggtcgtaccaggggtcgccgctgtgcccgtggaagaggagacgactgcagtgccgagcggtgagactaccgcaatccttgagttcaccacggaaccagagaaccaaacagagtgggagcccgcatatacccctgtgggtacatctcctctccctggcatactgccaacttggccacccactggtgctgccactgaggaaagcacagaggggccttctgccaccgaagtgccttcagccagtgaagagcctagcccaagcgaagtcccatttccgagtgaagaaccttccccctccgaggaaccttttccatctgtccgtccctttccgtccgtggagctgtttcccagcgaagaaccctttccttcaaaagaaccttcaccctctgaagaaccatcagcgtcagaggagccttacacaccttctcctccagtaccatcttggacagagctgccctcgtcaggagaagagagtggagctcctgacgttagcggtgactttacaggatccggggatgtctccgggcatctggacttttctgggcagctgtcaggagacagggcttccgggttgcccagtggtgacttggattcctcaggcttgaccagcacagtgggttccgggctgcccgtcgagtcagggttgccttcaggcgacgaggaacgaatcgagtggcctagcacccccacagttggggagcttccaagcggcgctgagattctggagggcagtgccagcggcgtaggcgatctgtctgggctcccttctggcgaggtcctcgaaacctctgcttcaggtgtgggagatctaagtggcctaccaagtggagaagtgttggaaactactgctccaggagtggaagatatctctggcttgccgtcgggcgaagtgctggagaccacagcacctggggtggaggacatatccggactgccgagcggggaggttctggagactactgcacccggtgtggaagatatcagtggactgccttccggggaagtactggagacaaccgctccaggggtggaggatattagcggccttcctagcggtgaggtgctggagacaactgcgcctggcgtggaagatatcagcggtctgccctccggagaagtacttgagactgccgctcccggtgtcgaggacatttcagggcttccttcaggggaggtgctggagacagcagcaccaggagtcgaagatattagtgggctgccatctggggaggttttagaaacagccgcaccaggcgttgaggatatttcgggtctgcccagcggagaggtgctggaaactgctgcacctggagtagaggatatttccggcctgccctccggagaggtccttgaaactgccgcacctggcgtcgaagatatttctggtctccctagtggggaagtcctggagacagccgctcccggagtggaagacatttccggtctcccttctggcgaagttttggagactgccgcacccggagtcgaggacatttccggtctgcccagtggcgaggtccttgaaaccgctgccccaggcgtggaagatatctctgggctgccttctggagaggtgctggagactgccgctcccggagtagaagatatctccgggttgcccagcggcgaagtcctggagacggccgctcctggcgtcgaggatatttccggcctgccaagtggtgaggtgctcgagacagcagctcccggagtggaggatatcagtggccttccctcaggggaagtcctagagacgactgctccgggtgtggaggaaatatcgggcttaccctccggtgaggtattggaaactaccgccccaggcgtggacgagatttcaggactgcccagtggcgaggtgctggagactaccgcccctggtgttgaagaaatttctgggctccccagtggcgaggtgctcgagacatcaaccagtgcagtgggggacttgtcagggctcccgagcggtggagaagtgctcgagatatcagtctcgggcgtggaagatatcagcgggctccccagtggcgaggtggtcgagacctcagcgagtggcattgaagacgtgtctgaactgccaagtggggaaggcctggagacgtcagcgtccggcgtcgaagacctatcaagattgccttcaggggaagaagtgctagaaattagtgctagcggctttggagacttgtctggattgccttccggcggtgagggcctggagacctccgccagcgaggttggcaccgacctcagcggcctcccctcagggagagaggggctggaaacctcggcttcgggtgccgaggacctgagcggattgccgtccggcaaagaagatctcgtagggagcgctagcggcgacctggatttgggtaagctgccctctggaacccttgggtccggccaagcaccagagacctctggactgccctccggattctcaggcgagtactcaggcgttgatcttggctcaggacctcccagtggtctccccgacttttcaggcctgccgagtgggtttcctaccgtcagtttggtcgattcgacactggtggaggtggtcacagcatccacagcgagcgagttggaagggcgaggcaccatcggaatttctggcgctggagagatctctgggttgccgtccagtgagttggatatctcgggcagggcttccgggctcccatccggcactgagctgtctgggcaggcctccggctctccagatgtgagcggtgaaatcccagggttgttcggagtgtcaggtcagcctagcggtttcccagatacctctggtgaaacttcaggcgtgacagagctgtctgggctctccagcggccaacccggaattagcggagaagcttcaggcgtcctttatgggacttcccagccattcggaattacggatctgtcgggagaaacatcaggggtgccagacctgtccggccaaccttccgggctgccaggcttcagcggggctacgagtggggtgcctgatctggtatcaggcacaacctctggctccggggagagtagtgggattacctttgttgatacttccttagtggaagtagctcctaccaccttcaaagaggaggaggggctcggctctgtagagctgtccggcttacccagtggcgaagcagatcttagcggcaaatctggaatggtcgacgtaagtggtcagttctctgggactgtcgactcttctgggtttaccagccagactcctgaattctcgggcctcccttctggcatagccgaagtgtcaggggagtctagccgcgcagagatcggatcgtcccttccttccggcgcttattacggcagtggcaccccctcttcattccctacagtatccttagtggacagaacccttgtggagagcgtaactcaagcaccaaccgcccaggaggccggtgagggcccatccggcatcctggaattgagcggtgcacatagtggtgccccagatatgtccggggagcactccgggttcctagaccttagtgggctgcagtctggcctcatcgaaccaagcggtgaacctcctggtaccccctatttctccggggacttcgcctcaactactaacgtttccggcgaatctagtgtggccatgggtacctctggcgaagcatctggactccctgaagtgacacttatcaccagtgaatttgtggagggcgtgactgagcccacgatttctcaggaactgggccagagaccacctgtgacgcacacacctcagctcttcgagagcagcggaaaagtgtccaccgccggtgacatctctggcgctactccagtgttgcccggtagtggagtggaagtgagttctgttcctgagtcctcatccgagacttccgcctacccggaggccggattcggggcttcagctgccccagaagcttctcgggaggatagcggatcccccgacttaagcgagactacctcagctttccatgaagcaaacctggagcgctcttccggactgggtgtcagcggctctaccctcacctttcaggagggggaagcctcagccgctcctgaagtcagcggcgaatctacaaccacctccgatgtcggcaccgaagcaccaggcctcccaagtgcaacgcctaccgcctcaggtgacagaacagagatctctggggacctgtcaggccacactagccagctcggcgtggtgattagtacctctattcctgagagtgagtggacccagcaaacgcagcggccagctgagacccacctagaaatcgagtcctcaagccttctctattcaggggaagaaacccatacagttgagacggctaccagcccgacagatgccagcatcccggcttcgccggaatggaaaagggaatccgagagtacagcagcagctcccgcaagatcctgcgcagaagagccctgtggcgctgggacgtgtaaggaaaccgaagggcacgtgatttgtctctgtccgccaggttataccggtgagcactgcaacatcgatcaggaggtgtgcgaggagggctggaataaataccagggccattgttatagacacttcccggatcgcgagacatgggtagacgcggaacgcagatgtcgggagcagcagagtcacttgagctcaattgtgacgcccgaggagcaggagttcgtgaataataatgcccaggactaccaatggatcggactaaatgacaggacaattgaaggagattttagatggagcgacggacaccccatgcagttcgagaattggcggccaaaccaaccagataactttttcgccgcaggcgaagactgcgtggtgatgatctggcatgagaagggtgagtggaatgatgtgccatgtaactaccacctcccatttacatgcaagaaaggtactgttgcctgtggcgagcccccagtggtggagcacgctagaacttttggacagaaaaaggatcgctacgaaattaatagtttggtgaggtaccaatgcacagagggattcgttcaacggcacatgcccacgatccgatgtcagcccagtggccactgggaggaacctcagattacctgcacagatcccactacatacaaaaggcgactccagaagcggtccagcagacatccgaggcgttccaggccgagcaccgcccatta

SEQ ID NO: 213928 - DNA, 7296 bp, synthetic construct
  misc_feature 1..7296: note = Description of Artificial Sequence: Synthetic coding sequence
  source 1..7296: mol_type = other DNA
atgacaacactcttgtgggtattcgtcacgctgagagtgattactgccgcagtgacggtcgagacctccgatcacgataactctttgtctgtatcaattccgcagccatcccccctaagggtgctgctcggtacttcattgacgataccctgttacttcattgatcctatgcaccccgtgactacagcgccatccaccgctccactggcgccaaggattaaatggtcccgcgtgtccaaagagaaggaggttgtactgttggtcgccacagagggtagggtgagggtgaacagcgcctatcaggacaaggtcagcttgccaaattaccccgctattccttcagatgcaacacttgaggtgcagtccctgagaagtaacgacagcggagtgtatcgatgcgaggtaatgcatgggattgaagacagcgaggccactcttgaggttgtggtcaagggcattgttttccactaccgcgctattagcacccgttataccctagatttcgaccgtgcccagcgggcatgccttcaaaacagcgcaattatcgccacccctgaacagctccaggcagcctatgaggacgggtttcaccagtgtgacgccggatggctcgcagaccaaaccgtgcgctatcctatccacactcccagagagggatgctacggggataaagacgagtttcccggagtgagaacttatggtatccgcgataccaacgagacctatgacgtgtactgcttcgctgaggagatggagggcgaggttttttatgcaacatctccagagaagttcactttccaggaggctgccaatgaatgtaggcggcttggggcacggctggctactaccggccaactgtacctcgcctggcaggctggcatggacatgtgttcagcaggatggctggctgaccggtcggtacggtaccctattagcaaagctcggcctaattgcggaggcaatctgctaggcgttaggaccgtctacgtgcacgctaatcagacgggatacccagatccctcatcacgatacgacgccatctgctatactggagaggacttcgtagacataccagagaattttttcggggtggggggagaggaggatattactgtacagacagtgacatggccagatatggagttgccgcttccccgtaacattaccgagggggaggcccgaggatctgtgattctgacagtaaaacccattttcgaagtgagccctagtccactggagcctgaggaaccatttacttttgccccagagattggagcaacggccttcgccgaagtggaaaatgaaacaggtgaagcaaccaggccatggggcttcccaactcccggtctgggtcctgccaccgcattcacgagcgaggacttggtggtccaggtgacagccgtcccgggacagccacacttaccaggaggcgtagtctttcactatcggcctggcccaactcgctacagcctgacgttcgaggaggctcagcaggcttgccttcgcactggcgctgtaatcgccagccctgaacagcttcaagcagcatatgaggctggctacgagcagtgtgacgctggctggttaagggatcagacagtgcgctaccctattgtaagcccacgcacaccatgcgtgggagataaagacagtagcccgggtgtaagaacctacggtgtgcgcccatccactgaaacgtatgatgtttattgttttgtcgatagattagaaggcgaggtgtttttcgccactcgtttggagcagttcactttccaagaggctctggagttttgcgaaagtcataatgcaaccctggcaactaccggccagctgtatgctgcatggtcaagggggctagataaatgttacgccggatggctggccgatggttcactgcgctatccgattgtcacacccaggccagcctgcggtggcgacaagcctggtgtccgtacagtatacctctacccaaaccaaactggtcttcctgaccctttgagtcggcaccacgctttctgcttccgcggtatcagtgcagtcccttcccctggcgaggaggagggcggtacacctacatctccttccggtgtggaagagtggatcgtgacccaggtcgtgccgggtgtggcagcggtgccagttgaggaagagactacggcagtgcccagcggtgaaacaaccgcgattctggagttcaccaccgaacccgaaaaccagaccgagtgggaacctgcatacacgccagtgggcacatctcccctacccggtattcttcccacatggccccctaccggcgctgctacggaggaaagtactgaagggcctagcgctactgaggttcctagtgccagtgaggagccatcccctagtgaagtgcctttcccgtcggaggaaccatccccttctgaggagcccttcccaagtgttcgcccattcccctccgtggagcttttcccaagcgaggaacctttcccctccaaagaaccctcaccatctgaggagccctcagctagcgaggagccgtacacaccctcgccccctgtgccatcctggacggaactcccaagttccggggaggagtctggtgctcccgatgtatcaggcgactttacagggtctggcgatgtttccgggcatctggacttttccgggcagttgtccggggaccgtgcctcgggtctcccgtcaggtgatctggactcctctggtctgacaagcacggtgggctcgggtcttcctgtggagtctggactgcccagtggcgacgaggagcgaatcgaatggccgagcaccccgactgtcggggaactgccatcaggagccgaaattctcgaaggatcggccagtggcgtgggagatctttccggtcttccatcaggagaggtgctggaaaccagtgcctccggggtgggcgacttgtccggcctgccgtcgggcgaagttctggagacgaccgcccctggagtagaggatatttcaggattgccgtccggggaggtgctggagactactgctccaggtgttgaagacatcagcggacttccaagtggagaggtgctggaaaccacagcacctggtgtggaggacatctccggcctgcccagtggcgaggtgctggagaccactgcccctggcgttgaagacatttccggcctcccctcaggcgaagtgttggaaaccaccgccccaggcgtggaggatattagtggattgcctagcggggaggtcctagagactaccgcccctggcgtagaggatatcagtggactgccctccggggaggtgctggaaaccgcagctcccggtgtagaggacatcagcggactgcccagtggagaagtgctagagacggccgctcctggcgtagaggatatttcaggactgccttcaggggaggtgctggagacagctgccccaggggtggaggatattagtggccttccgagtggtgaggtgctggaaacagccgcacctggagtcgaggacatctcaggtcttccctccggtgaggtgctcgagaccgctgccccaggagttgaagacatcagcggacttccgagtggtgaggttcttgagacagctgctcctggcgttgaggacatcagcggcctgccctcaggcgaggtactggagacagcggcacccggagtggaagatatctccgggctcccgagcggggaagtgctggaaacagccgcaccaggagttgaggacatctccgggctccctagcggagaggtcttggaaaccgctgctccaggtgtggaagacatcagcggcttaccaagcggcgaggtgctggaaacagccgctcctggggtggaagacattagtggactgccgtctggagaagttctcgagacagctgcccctggcgtcgaggatatctctggcctgccatcaggagaagtattagagaccgctgcaccgggtgtcgaagacattagtggcctgccttccggagaagtgttggagactgccgctcccggagtcgaggatatttctgggctgccaagtggcgaggtcctggagacggctgcaccaggggtggaagatatctccgggctcccatccggggaggtgctcgaaacggccgcacctggcgtagaagatattagcggtcttccaagcggtgaggtcctggagactgcagctccaggggttgaggacatctccggactcccgtccggcgaagtgcttgaaacgaccgcacctggagtggaagaaattagtggactgccttccggcgaggtgctggaaactacagcacctggcgtagatgagatctctggcctgcccagtggggaggtgcttgaaacaaccgctccaggtgtcgaggaaatatccggcctacctagcggggaagtcttggagacatctacttcagctgttggggaccttagtggtctgcccagcggcggagaggttcttgaaatttcggtgtcaggagtggaggatatcagtggtctgccatctggagaagtcgtggaaaccagtgctagcggtatagaggatgtctcggagttgccgagcggagagggcctggagacttccgcgtccggcgtagaggacctgtctcgactaccctcaggcgaggaggttctcgagattagtgccagtggttttggggatctcagcggcctgccctccggcggtgagggattagagacatcagcttcagaagtggggactgacttgtcgggcctgccctccggcagagaagggctcgagacttccgccagcggcgcagaggacctgtcaggcctgccatcaggtaaagaggatctagtgggtagcgcctccggagacttagacctgggcaagcttccctcagggactctaggttcggggcaggcgcctgagaccagcggattgcctagcggcttcagtggtgagtactctggagtggaccttggctctggccctccctcaggactcccagacttttctggattgccaagtggcttcccaaccgttagcctagtggattcaaccctggtggaggttgtgacggcttccacggccagcgaactcgaaggccgaggtacaatcggaatctctggtgctggcgagatttcaggactgcctagttccgaactcgacatctcaggacgggcaagcggtcttcctagtgggactgagctgtccggccaggcaagcggtagcccagatgtatccggcgaaatcccaggcctcttcggggtcagcggacagccatccggattccccgacacctcaggagaaaccagcggcgtgaccgaactgagtggcctctcttctgggcagccaggcatctctggggaagcttctggtgtgctgtatggaacctcacagccgtttggtattactgacctgtccggcgagacatctggcgtgcccgatctgagcggacagccaagtggactaccaggatttagcggggctacctccggcgtgcctgatctggtatcaggaaccaccagcgggtcgggagaatccagcggcatcaccttcgtggacacttccctagtcgaggtagcacctaccacatttaaggaggaggagggattaggctcggttgagctgtctggcctgccatctggcgaggccgatctctcgggcaagagcggcatggttgatgtttccggacaattcagcggaactgtggattcttctggcttcacatcccaaacacctgagttctcagggttgccatctggaatcgccgaggttagcggggaatcttcgcgggctgagataggctcctcgctgcccagcggggcatactacggctcagggacaccctcctcttttccgaccgtaagccttgtagatcggaccctcgttgaatctgtgacgcaggcaccaacagcccaggaggccggtgaagggccttcgggcatcttagaattgagcggggcacactcaggggctcctgacatgagcggagagcattcgggatttctggacctcagcgggctacagtcaggattgatcgaacctagcggcgaaccacctgggacaccctacttctccggggattttgccagtaccaccaacgtatctggtgaatcttccgttgccatggggacgtctggcgaggcctcaggacttcctgaggttactctgattacatccgaattcgtagagggcgtcacagaacccaccattagtcaggaattaggacagcggcctcccgttactcacactccccagctgttcgagagtagcggcaaggtgagtactgccggtgacatctccggcgcaaccccagttttgccgggaagcggggtggaggttagtagtgtgcccgaatcctcgagtgaaaccagtgcctatccggaggccggatttggggcatccgccgcacccgaggcatcgagagaggacagcggctctcccgacctgtctgaaactacttctgcctttcacgaggctaatctggagcgctcctccggcctcggagtctcaggttctacactgacattccaggagggcgaggcaagcgccgcaccagaagtgagcggagagtctaccacaacctctgacgtggggaccgaggctcccggtctccctagcgccaccccgaccgcatctggtgatcggactgagatttctggggacctctctggacacacctcccagcttggcgttgttatctctacctccatccctgagagtgagtggacgcaacaaactcagcgacccgctgaaacgcatcttgagatagagtcttcctcgctgctgtattcaggcgaggaaacccatactgtggagacagctaccagccctaccgatgcatctatcccggcatcccccgagtggaaacgtgaaagcgagagtacagcggcagaccaggaagtctgtgaggagggatggaacaagtaccaggggcattgttatcgacacttccccgaccgcgaaacctgggtggatgctgagcggcgttgcagagaacaacaatctcatctatcctctattgtgacccctgaagagcaggaattcgtaaacaataacgcccaggactatcaatggatcgggttaaatgacagaaccattgaaggggacttcaggtggtcggatggccacccaatgcaattcgaaaattggagacccaatcagccagataactttttcgccgcaggagaggactgcgtcgtgatgatctggcatgagaaaggcgaatggaatgacgtgccttgcaattatcacctccctttcacatgcaagaaggggaccgcgacgacctacaaacggcgtctacagaagcgctcttcacgccaccctagaaggtctaggccaagtaccgctcactaa

SEQ ID NO: 213929 - DNA, 7593 bp, synthetic construct
  misc_feature 1..7593: note = Description of Artificial Sequence: Synthetic coding sequence
  source 1..7593: mol_type = other DNA
atgaccaccttgctttgggtgttcgtaactcttcgggtgattaccgcggcagttacagtggagacttcggaccatgataactccctctctgtatcgataccccaaccaagcccgctgcgggtgctacttggtacctctcttacaataccctgctacttcattgacccaatgcaccccgtgacgacggcaccttcaacggctcctctggccccaagaatcaagtggagtagggtctccaaggagaaagaagttgtgctgctggtcgctacagaaggacgcgtgcgcgtgaactctgcataccaggacaaggtgagtttgcccaactaccctgccatcccttctgacgcaactctagaggtgcagtcgctgcggagtaacgactcaggcgtgtaccgatgcgaagtgatgcacggaatagaggactctgaggctaccctggaggtggtcgtcaaaggcatagtgttccactacagggccatcagtactagatacacacttgattttgacagagcacagagagcttgtttacagaattccgctattatcgccacgcctgaacagctccaagccgcttacgaggacggttttcatcaatgtgacgccggatggctcgccgatcaaaccgtgcggtatccaattcatactccccgtgagggatgctacggggacaaggatgaatttcccggagtacgcacttatggaatcagagataccaatgagacttatgatgtgtactgctttgctgaagagatggagggagaggtgttctacgcaacttctccagagaaatttacatttcaggaagccgctaatgaatgcaggcggctgggggctaggctagccactacgggccagctgtatttagcctggcaggcaggaatggacatgtgttcggctggatggttagccgatcggagtgtgaggtaccctatttccaaggccaggcctaattgcggcggtaatctactaggggttcgaaccgtctatgtgcacgccaaccagactgggtatcccgatccttccagccggtacgacgccatctgctacaccggagaagattttgtcgacatcccagagaatttcttcggggtggggggagaagaggatatcactgtacagaccgtcacgtggcctgatatggagttgcctctgccacggaatatcaccgagggggaggccagaggttctgttatcctgactgtgaaaccaatctttgaggtgtctcccagccctttggagcccgaggaaccgtttactttcgcgcctgagataggcgcaaccgcttttgccgaggtggaaaatgaaaccggcgaagctactcggccatgggggttccccaccccgggtctgggtcccgctacggcatttacaagtgaagaccttgttgttcaagtgaccgccgtaccaggacagccacatctgcccggaggagtggtgtttcactacagaccaggacccacaagatacagtttaactttcgaagaagctcagcaggcctgcctgcgcaccggggcagtgatcgcaagtcccgaacagctgcaggctgcctacgaggctgggtatgagcagtgtgatgccggttggctacgcgatcagaccgtgcggtatcccatcgtatcccctcggacgccgtgcgtgggcgataaagattcatctccaggcgtgcgtacctatggagtcagaccctctactgagacttacgacgtctactgcttcgtcgatcgcctggagggagaggtgtttttcgcgactcgcctggagcaatttacattccaagaggctctagaattttgtgaaagccacaatgcaactctggcaaccactggccagctgtatgcagcctggagcaggggactcgataagtgttacgccggatggcttgcagacggatccttgcggtaccccatcgtgactcctcgcccagcctgtgggggagataagcctggcgtgagaacagtgtatctttaccccaatcagaccggcctacctgaccccctgtctaggcatcatgcgttctgcttccgaggcatttccgcagtgccttcacccggagaggaggagggtggtacacccacctccccaagtggtgtggaggaatggatcgtcacacaggttgtccctggagtggcagctgtgcccgtcgaagaggaaacgacagccgtgccttccggtgaaaccaccgcgatacttgaattcacaactgaacccgaaaaccagacagaatgggaaccagcatatacccctgtgggtacgtcacccctgccagggatcctgcctacctggccccctaccggagcggcaactgaggagagcactgaggggccatcagctactgaggtaccctcagcaagcgaggagcccagcccatctgaggtacccttcccatcagaagagcccagcccttcagaggagccctttccttctgtgagaccatttccctccgttgagctgtttccttccgaagaaccattcccgagcaaggagccatcgccatccgaagagcctagtgcttcagaggagccctacaccccctctccgcctgtgccatcttggactgaactgcctagctccggcgaggagtccggagcccctgacgtttcaggggactttacaggcagtggagatgtgtctggccatctcgatttttctggacaactatctggagaccgtgcaagcggtttgccatctggcgatctggattcaagcggtctgacctctaccgtgggcagtggacttcccgtcgaatctggattgcccagcggcgacgaagagcgcatcgagtggccctccacacctactgtcggcgaactaccttcgggcgctgagattctggaaggaagcgcctcaggtgtcggcgacttgagtgggctcccgtcaggtgaggttctggagacgtccgcttcgggcgtgggtgacctgtcaggccttccgagcggagaagtcctcgagaccaccgccccaggcgtcgaggacatttctgggctgccgtctggtgaagtgctcgagacaaccgccccaggcgtggaagatattagtggtttgcccagcggagaagtcctggagaccactgccccaggcgtagaggatatatcaggcctcccaagcggtgaggtgctggagacaacagcccctggagtcgaggacatctctggcctcccctctggcgaagttctggaaactacagctcccggtgtcgaggacatttccgggttgcccagtggcgaggtcctcgaaacaaccgcacctggagtggaagatatctctgggcttccaagcggtgaggtattggagacggctgctccaggggttgaagacatctccggactcccgagcggagaagttctcgaaacggccgcaccaggcgtggaggacatctctggcctgcctagcggagaagtgctggaaacagcagctcctggggtggaagacatcagtggtctgccgtcaggagaggtgctggagactgccgctcctggtgtggaggacattagcggattaccttccggagaagtactagagaccgccgcaccaggggtggaagacattagcggactgcccagtggggaagtgctggagaccgcggctcccggagtggaagacatctcaggccttccgtccggcgaagtgttggagacggctgcccctggcgtggaagacatttcaggcctcccctccggagaggtcctcgaaaccgctgctcctggggttgaagatattagtggcttgccatcaggtgaggtactggagactgccgctcctggggtcgaggatatctccgggcttccttctggtgaggtacttgagacagctgcacccggtgtcgaggacatctccgggcttccatcaggcgaagttctggagaccgcagctcccggtgtggaggatatcagtgggttgccttcgggtgaagttctggaaaccgccgctcccggagtggaggatatctctggcttgccgtctggggaagtcctggaaacagcagcaccaggggtggaagatatctccgggctcccctcaggcgaagttctggagacagctgcccctggcgtggaagatatctcaggtctgcctagcggagaggtcttggaaaccgccgcaccaggggttgaggacatttctggactgccatccggggaagtcctggagacagcggctccgggagttgaagatatcagtggtctgccttccggggaggtattggagacgaccgcaccgggtgtagaggaaatctcaggactgcccagcggggaagtgctcgaaaccaccgctcccggtgtcgacgaaataagcgggctgccgtctggcgaagtcctcgaaactaccgctccaggcgttgaagaaatctcagggctgccttcaggagaggtgttagaaacatcaacaagcgcagttggggacctgtccggcctccctagtgggggtgaggtgcttgagataagcgtgtctggagtggaagatatcagtggcctccctagcggcgaggtggtggagacttctgcatctgggatagaggatgtaagtgaattgccatctggcgaagggctggaaacgagcgcatcaggagtggaggacctgagccggctaccctctggagaggaagttttggagatttcggcatctggatttggcgacttaagcggcctgccaagcgggggagagggactggaaacatccgccagcgaggtcggaacagatctctctggcctgccctccggcagggaaggtctggagaccagcgcttccggcgctgaggatctgagtggattgccgagcggcaaggaagatcttgttggatctgctagcggggacctggaccttgggaagctgcccagcggtacactcggctctggccaggcccctgagacttctggcctgccgagtgggtttagtggcgagtactctggtgttgatctgggttctggccctccctctggcctgcccgacttttccgggctcccctcaggcttccccacagtgtcactcgtcgactcaaccttagtcgaggtggtcacagcgagtacggcatcagaactggagggacggggtacgattggtatcagcggcgcaggagaaatatccggattgccatcctccgaactcgatatcagtggacgggctagtggacttcctagtggcactgagttatccggccaggcttccggctctcccgatgtgagcggagagattcctggcctctttggagtatcgggccaaccatctggcttccctgacacgtccggagagacatccggtgtaacggagctctcgggactttcatcgggtcagccgggaatttccggcgaggcaagcggcgtattgtacggaacatcccagcctttcggaatcacagacctgagcggcgaaacaagtggtgtcccagacttaagtggacaaccaagcggattgccaggcttttcgggtgctactagcggagtgccagatctggtaagtggcaccactagcggcagtggagagagttctggaattacctttgtggatacatcgttggtggaggtggctcccacaacattcaaagaggaagaaggcctgggctcagtggagttgtcgggccttccgagcggcgaggccgacctttccggaaagtcaggaatggtggacgtgtcaggccaatttagtggcactgtcgacagctcgggcttcacatcgcagacccccgagttcagtgggttgccctccgggatcgcagaagtgtctggcgagtctagccgcgctgagatcggctcatccttgccttccggagcctattacggctccggcacacccagcagtttccccacggtttctctcgtggacaggacattggttgaaagcgttacacaagctcccactgcacaagaagctggcgaggggccatccggaattcttgagctgagcggcgctcacagcggcgcaccagacatgagcggcgaacattcaggcttcctggacttgtccgggttacagtctgggcttatagaaccctccggggagccaccgggaacaccgtatttctccggagattttgcttctacaacaaacgtcagcggagagtcctccgtcgctatggggacctcaggcgaggcctctggcctacctgaagttacacttatcacctctgagtttgtggagggcgtgactgaaccgaccatctcgcaggaactcggacagcggcctccagtgacccacactccgcagctgttcgagtccagcggtaaggtatctaccgccggagacatcagcggagcaactcctgtactcccgggatcaggtgtggaggtgtcatcagtgcccgagagctcaagcgaaacaagtgcttacccagaggcaggcttcggagccagcgcggcacccgaagcgagccgcgaagactctggttcgccagacctctctgaaacaacctccgccttccatgaggcgaacttggaacggtcctctgggttgggcgtgtcgggaagcaccctgacttttcaggaaggggaggcatctgctgctcccgaagtgagtggggagtccacaacgacctccgatgtcggcacagaagccccaggactgccctcagctacacccactgcatcgggcgaccggacagagatttcgggcgacctaagtggtcacacctcacagttgggagttgttatctctacctcaattcctgaatctgagtggacccagcagactcagcgaccagcagaaacgcatctggaaattgagtccagtagccttttgtactcaggagaggagacccataccgttgaaacagccactagcccaacggatgcatctatccccgcaagcccggaatggaagagagaaagtgagtctacggcagcagcacctgcccgtagctgcgccgaagaaccttgcggggcagggacctgcaaagagacagagggccacgtgatttgtttatgccccccaggctacactggcgaacactgcaacattgaccaagaagtgtgcgaggaaggatggaacaagtatcaagggcattgttaccggcattttccagacagggagacatgggtcgatgcagagaggcgatgccgtgaacaacagagccatttgtcatcgatcgtcaccccagaagagcaggagttcgttaacaataatgcccaggactaccaatggatcggcttgaatgaccgtacaatagaaggagatttcaggtggtctgatggtcaccccatgcagttcgagaactggcgacctaaccaacccgacaatttctttgccgctggagaagactgcgttgttatgatctggcacgaaaaaggggagtggaacgacgttccttgcaattaccacctgcccttcacctgtaagaaaggcaccgtggcatgtggtgagccgcctgtcgttgaacatgcaaggaccttcggccaaaaaaaggatcgctatgaaattaattccctggttcggtatcagtgcacggagggcttcgtccagcgtcatatgccaacaataagatgccaaccatccggtcactgggaggagccacagattacctgtaccgaccctactacttataaacgtcggctgcagaaacggtcttcacggcacccgagacgcagcagaccctcgacagcccactag

SEQ ID NO: 213930 - DNA, 7479 bp, synthetic construct
  misc_feature 1..7479: note = Description of Artificial Sequence: Synthetic coding sequence
  source 1..7479: mol_type = other DNA
atgaccacgctgctttgggtgtttgtgacgctgagagtgatcacagccgctgtgactgtagaaacttccgatcacgacaacagcctgagcgtgagtatcccacagccatcccccttaagagtgctccttggcacttcactgactattccatgctactttattgatcctatgcatcccgtgaccactgcaccttccacagctccgctcgcacccaggattaaatggagccgcgtctccaaagagaaggaggtagtcctgttggttgccacagaaggccgtgtaagagtaaactctgcttaccaggataaggtttcactgcctaattatcctgctattccttcagatgcaacactcgaggttcagtctcttcgtagcaatgatagcggtgtgtatcgctgcgaagtcatgcatgggatagaagattcagaggcgaccctcgaggtggtggtgaaaggaatcgtcttccattaccgtgctatctctacgcgatacacacttgattttgaccgcgcacagagggcctgtctacagaactcagctattattgcgacccccgagcagctgcaggcagcgtatgaagacgggttccaccagtgtgatgcgggttggctagccgatcaaacggtcaggtacccaatccataccccaagggaaggctgttacggtgataaagatgagttcccaggcgtgcgcacctatggtatcagagacacaaatgaaacatacgacgtttactgctttgctgaggaaatggagggagaagtgttttacgcgacgtcgcctgaaaagttcactttccaagaagcggcaaacgaatgtagaaggctcggcgcacggctggcgacaactggccagctttatctggcttggcaggccggaatggatatgtgctctgcagggtggctggcggaccgctccgtccggtaccctatctccaaggcaagacccaactgtggcggaaatttgcttggcgtccgcacggtgtatgtgcacgccaatcagaccggttatccagaccccagctctagatacgacgccatttgttataccggggaagattttgtcgatattcccgagaatttctttggtgtcggcggagaggaggatatcactgtccagaccgtgacctggcccgacatggaattgcctctgccgagaaacatcacagagggtgaggcaaggggctcagtgatactgaccgtgaagcccatattcgaggtgagccccagcccactggaacccgaggagccatttacctttgcgcctgagattggagccaccgccttcgctgaagtcgaaaatgagactggtgaggctaccagaccgtggggcttcccaactcctggcctaggtcccgcaaccgctttcacctctgaggatctcgtagtgcaggtaacggcagtgcccggacagccacatctacctggcggagttgtcttccactataggcccggaccgacgcggtacagtcttaccttcgaggaagcccagcaggcctgcctgcggaccggcgctgtcatcgcctccccggaacaactgcaggctgcatacgaggccggttatgagcaatgcgacgcagggtggctgcgcgaccaaacggtaagatacccgatcgtctccccacgaactccctgtgtgggtgataaagattcaagtcccggagtgcggacttatggtgtgagaccctctactgaaacctatgatgtatactgcttcgttgatcgcctggagggcgaggtctttttcgccaccagattagagcagtttaccttccaggaagctctagaattttgcgagtcgcacaacgcgactctcgccaccacaggtcagctctatgccgcttggagtcgcggacttgacaagtgctacgccggttggctcgccgacggctccttacgctatcctatagttaccccacggcctgcttgtggtggggataaaccaggtgtgcggacagtctatctctatcctaaccaaactggtctccccgatcccctcagcaggcaccatgctttctgcttccgtggtatcagcgcggtgccgtctcccggagaagaggaaggcggaactccgaccagtcctagcggtgttgaggagtggattgtaactcaggtagtgccaggagtcgccgctgtccccgtcgaggaagagactaccgctgtgccaagtggcgaaactactgctattttggaattcaccaccgaaccagaaaatcagacagaatgggaacctgcctatacaccagtgggtacatctcccttgccgggtatcctcccaacttggcctcccacaggcgcagccactgaagagtcaactgagggcccatctgcaactgaggttccctctgccagcgaggagccatccccctctgaagtgcctttcccctcggaggaaccatcaccctcggaggagccgttcccatcagtacgtccattcccctcagtggagctcttccctagcgaagaaccttttccaagcaaggagccctcccctagcgaagagccttccgcatccgaagagccttacaccccctccccccctgtgccctcttggactgagctgccttcttcaggagaagaaagtggtgcacccgatgtatccggcgactttaccggcagcggcgacgtctcaggccacttggactttagtggtcagttgagcggcgaccgagcctccggcctgccaagcggcgatttggacagcagcggtctgacttcaactgtaggctccgggttgccggtggaaagtggactgccttcaggcgatgaagagcgcatcgagtggcctagcacccccacagtgggtgaattgccctccggggctgaaatccttgaaggttccgcatcaggtgttggtgatctgtctggcttgccctccggagaggtgttagaaacaagtgccagtggcgttggcgatttgtcggggctcccctctggtgaggtgctcgagacaacagcaccaggcgtggaggatatttccggcttgcccagcggagaagttctggaaactacagcccctggagtcgaagacatctccggcctacccagtggcgaagtgctggaaaccacggccccaggggtggaggacattagcggtctgcccagtggagaggttctggaaaccaccgcaccaggcgtagaggatatcagtggtcttcctagcggcgaggtgctcgaaactaccgcaccgggtgttgaggacatttcagggctcccttctggggaagtactggaaacgacagcccctggagtggaggacatttccggcctgccatctggggaggttctggagacagctgcccctggcgtggaggacatatcaggccttccgagcggtgaggtcctagagaccgcggcacccggagtagaagacatctcaggactacccagtggtgaagtgctggaaactgctgcaccaggagtggaggatatatcaggcttgcccagcggtgaggtgctggaaaccgccgcacccggtgtcgaggacatctcagggttgccctccggtgaggtgctcgagacagctgctcccggtgtggaagacatcagcgggctcccctctggggaggtactcgaaacagctgccccaggagtggaggacatcagtgggctgcctagcggagaagtgctggaaaccgctgctcctggcgtggaggacatatcaggcctaccctctggggaagtgttagagaccgccgcaccgggagtggaagatatctctggcctgcctagcggtgaggtgctcgagaccgctgccccaggtgtcgaggacatctcggggcttcccagtggggaggtgctcgaaacggctgcgccaggggttgaagacataagtgggttgccgtctggcgaggtcctggagactgccgctccaggcgtggaggacataagcggcctcccctccggggaggtgctggagacggcagcacccggtgtagaggacatcagcggcctgccgagcggagaggtgctcgaaaccgccgctcccggtgtggaagacatttccggactacctagcggggaagtcttagaaaccgcagctcccggagtggaagacatatctggattgccctctggcgaggtcctggaaacggcagcaccgggagttgaggacatttccggcctgccttccggagaagttctggagacggcagctccaggagtggaagacatcagtggtctgccttccggggaagttctggaaacaactgctcctggagttgaagaaatcagtggactacccagtggagaagtgctggagaccacagcgccaggagtggatgaaatatcaggcctgccaagtggcgaggtgctggagactaccgctcccggtgtagaggagattagtggactgccctccggagaagtgctggaaacatctacatctgccgtgggggatctgtccggtctcccgtccggaggagaggttctggagattagcgtcagtggggtggaagacatcagcggcctgccaagcggggaagttgtcgaaacatccgcaagtgggattgaggacgtctctgagctgccttcaggtgagggcctcgagacgtcggcatcaggggtggaagacctttcccggttgcctagtggagaggaggtgctggagatatccgcatccggctttggtgacctcagtggactgccttctgggggagaggggctggagacctcagcctctgaagtcggaactgacctatccggactgccatccggcagagaagggctggaaacgagcgcgtctggtgccgaggatttgtccggactaccatccggtaaagaagacctggtgggcagcgcgagcggggacttagatctcggcaagctgccatccggtacgcttgggtctgggcaggccccagaaacctcagggctgccatccggcttctcaggagaatactccggcgttgatttaggttctgggcctccttcaggtttaccagatttcagcggacttcccagcggattccccaccgtatcattggtggattcaaccctagtggaagtggtcacagcaagtaccgcttcagagctggaaggcaggggaaccattggcatctccggtgcgggtgaaatttccgggctaccctcaagcgaacttgatatttcggggcgagccagcggactgccgagcggcacagagctcagtgggcaagcgagcggctccccggatgtgtcaggggagatcccgggtctcttcggcgtcagcggtcaacctagcggttttccggacacttccggggagactagtggggtcactgaactctctggactttcctcagggcagcccggaatcagcggggaggcgtcaggcgtgctatacggcaccagccagccattcggaattaccgatctctcaggtgagacgagtggggtaccagatttatccgggcagccctcaggactaccgggtttttcaggggcaacaagtggagtgcctgatttggtctctgggaccactagcggatccggcgagtcaagcggaattacatttgttgacacatcccttgtggaggtggcccctacgacgtttaaggaagaagaagggctgggttcggtagaacttagcggcctcccttctggagaggctgatttatcagggaaatcaggcatggtggacgtttccgggcagttctcgggcactgtggattcctccgggttcaccagccagaccccagaattcagcggattaccttccggtatcgcggaagtgagcggtgaaagctctcgagccgagattggctctagcttaccaagtggggcttactacggctctgggacaccatcatccttccccactgtaagcctcgtggaccgcaccctggtcgaatctgtgacacaggctccaaccgcccaagaggcaggtgaaggaccttctggcattctagagctcagcggcgcacactccggcgcacccgacatgtcaggtgaacactccggctttctcgacctgagcggtctacaaagtggattaatcgagccatctggggaaccacccggtactccatatttttcaggcgacttcgcttccacaaccaacgtgtctggtgagtctagcgtggcaatggggacctcgggagaagcgagtggcctcccagaagtcaccttgataacctcagagttcgtggagggagtcaccgaacctacaatctcgcaagaacttggccagcgacccccagttacacatacgcctcagcttttcgagagctcaggcaaggtgtctaccgccggtgatattagtggggcaactcccgtgctgccaggctcgggtgtcgaagtgtctagcgtgcccgaatcttctagtgaaacatccgcctatccagaagccggattcggtgcttcagctgcaccagaggctagtagagaagacagcggttcccctgacctgagcgagacaacctccgccttccatgaagctaaccttgaacgcagttctggtctcggggtgagtgggtctaccttaacctttcaggaaggagaagcgtccgccgctccggaagtgtcaggcgagagcactactacctctgatgtgggcactgaggcccctggactccccagcgctactccaacggctagcggagaccggactgaaatcagcggcgacctctctggccacaccagtcagctgggcgtggtgattagtacatcaatccccgagtccgaatggactcagcagacccagcgcccagccgagacccacttggaaatagagagctcttcactgctctattccggggaggagactcatacagttgagaccgcaacatctcccaccgatgcttccatccccgcttcccccgaatggaagagagaaagcgaatctaccgcggcagatcaggaggtctgcgaagagggctggaataaataccagggccattgttataggcatttccccgaccgggaaacatgggtggatgcagaaaggcggtgtcgagaacaacagagccacctctcttccattgttacgcctgaggagcaggagtttgttaacaacaacgctcaggattaccagtggattggactgaatgatagaacaattgagggcgatttcagatggagcgatgggcatccaatgcagttcgaaaattggaggcccaaccagcccgacaattttttcgctgctggtgaggactgcgtcgttatgatatggcatgagaaaggggaatggaacgatgtcccttgcaattaccaccttcctttcacatgcaagaagggcaccgtcgcctgcggtgaacctcctgtcgtggaacacgccaggacctttggtcagaaaaaagataggtatgaaatcaattccctggttcggtatcaatgcactgaagggtttgtgcaaagacatatgcccactatccgatgccagccttccggccactgggaagagccccaaatcacttgcacagatccgaccacctataaaaggcgcctgcaaaaacgcagctcaaggcaccctcgccgttcaagaccctcaacagctcattag

SEQ ID NO: 213931 - DNA, 7593 bp, synthetic construct
  misc_feature 1..7593: note = Description of Artificial Sequence: Synthetic coding sequence
  source 1..7593: mol_type = other DNA
atgaccaccttgctatgggtgtttgtgacactcagagttattacagccgcagtgaccgttgagactagtgaccacgataacagcctctctgtctcgattcctcaacctagtcccctacgtgtactgctgggtaccagccttacaattccctgttattttatagacccaatgcatcccgtgacaaccgcaccctctacagcccctctggcacctagaataaaatggagccgcgtttctaaggagaaggaagttgtacttctggtggccactgaggggagagttcgcgtgaattccgcctatcaggataaggtaagcctccccaattaccccgctatcccatcagacgcgaccctggaagtgcagagtctaaggagcaacgacagcggcgtgtacaggtgtgaggtgatgcatggcattgaagactcagaagcaaccctggaggtagtcgtgaaggggatagtgtttcattatagagcaatcagcacacggtacacactcgacttcgaccgggcacaacgcgcatgtcttcagaattccgccatcatcgctaccccagagcagttgcaggctgcctacgaagatggcttccatcagtgcgacgcgggttggctcgccgatcagaccgtgcggtatccaattcacacacctcgggagggttgttacggagacaaggacgaattcccaggggtcaggacgtacggaattagagacacgaatgagacgtacgacgtgtattgctttgccgaagagatggagggggaggtgttctacgccacatcacctgagaagttcacttttcaagaagccgctaacgagtgccggagactgggtgccagactggcaactaccgggcaactgtacctagcatggcaggctggcatggatatgtgttccgcaggttggttggctgacagaagtgtccgctaccccatcagcaaggccagacctaactgcggcggtaatcttctgggggtgcgcactgtgtatgtgcacgcaaaccagacaggatatccggatccatcttcacgatacgacgctatctgttacactggtgaagattttgtggatattccggaaaatttctttggagtcgggggtgaggaggacataacagtacagacagtgacatggcctgacatggagctgcctctgccacgaaatattacggaaggagaagcgcgtggcagcgtcatactgacggtgaagccaatcttcgaggtttctccgtccccgctggagcctgaggagcccttcacctttgcgcctgagatcggcgcaacggcctttgccgaggtggagaacgagacaggtgaggctactcgaccatggggatttccgacccctgggcttggtcctgccaccgcttttacctccgaggatcttgtcgtccaggtgaccgctgtgccaggtcagcctcatctgccaggcggtgtcgtgttccattaccgcccaggcccaactaggtacagcctcacatttgaggaagcgcaacaggcttgccttcgcacaggggcagtgatcgctagccctgaacagctccaggcagcctatgaagccggatatgaacagtgcgacgcaggctggctcagggatcagaccgtacgttatccaatagtgagccccagaacgccttgcgtcggcgacaaggattcttcaccaggggtgcgaacctacggagtccgccctagcacggagacgtatgacgtgtattgttttgtggaccgacttgaaggtgaggtttttttcgctaccaggcttgagcagtttacattccaggaagctctagagttttgtgaaagtcacaacgcgaccctagctacaactggccagctgtacgcggcttggagcaggggattggacaaatgctatgcgggatggctcgccgatggctctctgcggtaccccatcgtcaccccacgccctgcgtgtggaggtgacaagcctggggtgcggaccgtttatctctatcctaaccagacaggtttaccagaccctcttagcagacatcacgcattctgcttccgaggcatctctgctgtgccatcacccggtgaagaggagggcggtacccctacctccccctcaggtgtagaggagtggatcgtgactcaggtggtcccaggcgtcgccgcagtccctgtggaagaggagactaccgctgtgccatccggggagactacagcgattctcgaattcaccacagagccagaaaaccaaacagaatgggaacctgcatacacccctgttggcacgagccccttacccggtatccttccaacatggccacccacaggggctgctactgaggagtccacagagggccctagtgcaaccgaagtgccttccgccagcgaagagccatccccctcagaggtgccgttccccagcgaggagcccagcccaagcgaagagcctttcccaagcgtgcggcctttcccttccgttgaactcttcccgtctgaagagcctttcccctcaaaagagccttccccttcggaagaaccttccgcttctgaggagccctatactccttctcctcccgttccaagttggacagaattgccctctagcggggaggaatctggtgcaccagacgtcagcggcgactttactgggtccggagacgtcagtggccatctagacttctccgggcagctttcaggtgacagggctagtggactcccctcgggagaccttgacagttccggccttaccagtaccgtggggtcagggctgccggtggagtctgggctccccagcggtgatgaggaaaggattgagtggcctagcactcccacagttggagagctgccatctggagcggagattctggaagggagtgcgtctggcgtgggtgatctttccgggcttccatctggagaggttctagagacctccgcctccggggttggtgatctgtcaggattgccttcaggcgaggtattggaaactaccgcacccggagttgaggacatctcaggcctgccatcgggagaggtcctggagacaaccgcccctggagtggaggatatttccgggctcccctctggcgaggtactggaaacaaccgcaccaggcgttgaggacattagtggactgccctcgggcgaagtgctggagactacagctcctggagtagaggatatcagcggactgccgagcggagaggtgctagagaccacagctccaggcgtagaggatattagcgggcttccaagcggcgaggtcctggagacaactgcccctggagtagaggatatcagtggtctcccatctggggaagtgttagaaacagccgctcctggcgtggaagacatttctggccttcccagcggggaagtattggagacggctgctcccggtgtggaggacatctccgggcttccatctggtgaggttctagaaaccgccgctcctggggtggaggacataagcggccttccgagcggcgaagtgttggaaaccgctgcccctggggttgaggatatcagcggccttcccagtggagaagttctagagaccgcggctcccggagtggaggacatcagcggtctgcctagtggagaggtgctcgagaccgcagcgccaggcgtggaggacattagtggcttgccaagcggagaagtgctggaaaccgccgctccaggggtggaggacatctccggcctgcccagtggggaggtattagagacagcagcccctggggtggaagatatctctgggttgccttcgggagaggttctggagactgccgctccaggggttgaggatatcagcggacttcccagcggagaagtcctggagactgcagctcctggagtggaagatatctcgggactgcccagcggagaggtgttggagaccgcagccccaggtgtcgaagacattagcggtttgccctccggtgaggtgctggagacggctgctccaggtgtcgaggatatctccggtctgccgagcggggaggtactggagacagccgctcctggagtggaagacatttctggactcccatccggggaagtattagaaacggcagctccaggggtggaagacattagcggacttccaagtggggaagtacttgagacggcagcgcctggcgttgaagacatttcaggcctcccttccggtgaagtgctcgaaaccgctgcccctggtgttgaggacatctctggccttcctagcggggaggtgctcgaaactaccgcacccggtgtggaagagatatcagggctccccagtggagaggtgctggagactaccgcgcctggagtggacgaaattagcggtctgcctagtggggaggtcctggagaccacagctcccggtgtcgaggagatatccggtctgcctagtggggaggtgctggaaacctctacctcagccgtaggcgacttaagcgggcttcctagcggtggggaagtgctggagattagcgtgtccggtgtcgaggatatttccgggttaccgtccggcgaggtggtagagaccagtgcctcagggatagaggacgtgagtgaactgccctcaggcgagggcctggagacttcagcatccggcgtggaggatttgtcacggcttcccagtggagaggaggtgctggaaatctcagcctctggctttggggatctctccggcctaccctcaggcggagaaggcttggagacgagcgcctcggaagtgggaacagacttatcaggcctgccgtccggtcgggaaggtctcgagacctccgcctcaggggctgaagacctcagtggcctgccatcaggcaaagaagatctggttggcagcgcctccggagatcttgatctgggaaagttaccatcggggactctggggagtggccaggccccagaaaccagcggcctcccatcaggcttctctggcgagtattctggcgtagatctcgggagcgggcctccctcagggttgccagattttagtggcttgcccagtgggtttcccacagtcagcctggtcgacagtacactcgtcgaggtcgtgactgcctctacagcctccgagttggaggggaggggtacgattggtatttctggagcaggagaaatctctgggctgccatcctcagagctcgacatttccggacgtgcgtccggtctcccctccgggacagagctgagtggccaagcaagcggcagtcctgacgttagtggagagatccccggactgttcggcgtcagtggccagccgtccggctttccggacacgagcggagagacctccggcgttactgaactctccggcctgagcagtgggcaaccgggtattagcggcgaagcatctggggtgctttacggcacaagccaaccatttggtatcaccgatttgagcggagagactagcggtgtccctgatctgtcagggcagcccagtggtttacctgggttttctggagccacaagcggcgtccccgatctggtgagtggtacaactagtgggagtggtgaatcaagtggtattacttttgtggacacctctttagtggaagtggcccctactacatttaaggaagaagaaggcctgggaagtgtggagctcagtggactgcccagcggagaggctgacctttccgggaagtcaggcatggtggatgtttcaggccagttctctggcaccgtggactcctctggatttaccagtcagactccagagttttcaggtttaccctctggcatagctgaggtttctggagagtcctctcgagccgagattgggagttcattaccttccggagcctattacggaagtggtaccccttcatcctttcctactgtgagcctggtagataggaccctggtggagtctgtgacccaggcccctacggcacaggaagccggtgagggaccctcgggcattctggaactctcgggcgctcacagtggggcaccagacatgtcaggcgaacattctggatttctggacttgagcggccttcagtccggtttaattgagccctccggggagccacctggtaccccctattttagtggggatttcgcgagcacgacgaatgtctccggcgagtcttcagtagctatggggaccagtggtgaggccagcggcctcccggaggtaaccctgattacatctgaatttgtggagggggtgacagaaccaacaatcagccaggaactgggccagcgccctccagtcacccacacgccacagcttttcgaatcatctggcaaggtctccaccgccggagacatttctggtgctactccagttctgcctggcagcggcgttgaggtgtcttccgtgcccgagtcctctagcgaaaccagcgcatacccagaagctggtttcggcgcttcagcagccccagaggcaagccgggaagacagcggcagcccagatctgtcagagacgactagcgcttttcacgaggccaacctagagcggagctccggactgggagtgtctggttcaacccttacttttcaggaaggcgaagctagtgccgcacctgaagtatctggggagagcacaactacttccgatgtggggacggaggctccgggactgcccagcgctactccgactgcctccggggacagaactgaaatctccggcgaccttagcggccatacaagccaactcggcgtcgtcatctcaacgagcattcctgagtcggagtggacgcagcagactcaacgtcctgcagaaactcatctcgagatcgagagcagctcattgctttactcaggcgaagagacccacacagtcgagaccgccacgtcaccaaccgatgcgtccattcctgcttcacccgaatggaaacgggaatcagagtcaaccgccgcagcccctgcacgctcgtgcgcggaagagccatgcggggctggaacttgtaaagaaacggagggacatgtgatttgcctgtgcccccctggatatacaggagaacactgtaacatcgatcaggaggtctgtgaagagggctggaacaagtaccaggggcactgttacaggcattttccagatcgcgagacctgggtagacgcagagaggcgctgcagagagcagcaaagccatctgtcctctattgtgactcctgaagaacaggagttcgtgaataacaatgcacaggattaccagtggatcggcctgaacgacagaactatcgaaggggactttcgttggagtgacggccatccgatgcagttcgagaattggaggccaaatcagcccgataacttttttgcggcaggagaggattgcgtggtgatgatttggcacgaaaaaggagaatggaacgatgttccatgtaactaccatttacccttcacctgtaagaaagggactgttgcctgtggcgagccacctgtcgttgagcatgcgcgaacctttggtcagaaaaaagatagatatgagataaactccctcgtgcgataccaatgcactgaagggtttgtacaaaggcatatgcccaccatacgatgtcagccaagtgggcactgggaggagcctcaaatcacatgcacagaccctacaacctataaaagaagattgcagaaaagatcatctagacaccccaggcgctctagacctagcaccgcccactat

SEQ ID NO: 213932 - DNA, 399 bp, synthetic construct
  misc_feature 1..399: note = Description of Artificial Sequence: Synthetic coding sequence
  source 1..399: mol_type = other DNA
atgctgaccgccgctgtactcagttgcgcgttgctgttggccctgcctgccacccgtggcgcacaaatggggctggcccctatggaaggaattagaaggcccgaccaagctctgctgcctgaacttccgggactaggtctgcgggctcctctgaagaagactacagctgagcaggccgaagaggacctgctgcaggaagcccaggccttagcagaggtccttgacctgcaggaccgggagcccaggtcttccagaagatgcgtgcgcctgcatgagagctgcctgggacaacaggtcccctgctgcgatccctgcgcaacctgctattgtagattctttaatgccttctgctattgtcggaaactggggacagctatgaatccctgtagccgaacatag

SEQ ID NO: 213933 - DNA, 399 bp, synthetic construct
  misc_feature 1..399: note = Description of Artificial Sequence: Synthetic coding sequence
  source 1..399: mol_type = other DNA
atggatgttactcgcctgctgctggctactctgttggtcttcctgtgcttcttcacagcaaactcccacctaccacccgaggaaaagttaagggacgatcgcagcctccgttcaaatagttccgtgaaccttctcgatgtgcctagcgtttctatcgtggctcttaacaaaaagtctaagcagattggcaggaaggccgctgagaaaaagcggtcctccaagaaagaggcgagcatgaaaaaggtggtgcggccaagaacgcccttgtctgccccttgtgtggcgactcgaaatagttgcaagccaccagccccagcctgttgcgatccatgcgctagttgccagtgtcgattctttagatctgcatgcagctgtcgagtactgtcccttaattgttag

SEQ ID NO: 213934 - DNA, 936 bp, synthetic construct
  misc_feature 1..936: note = Description of Artificial Sequence: Synthetic coding sequence
  source 1..936: mol_type = other DNA
atggcactggaagtggtgtttctggccagaggaccaagtggtctgttgctgtataatgggcagaagaccgacggcaaaggcgactttgtgtcgctggccctccgcgatcgcaggcttgagttccgatacgaccttgggaaaggcgctgccgtcatcagaagtcgcgaaccggtaaccctgggtgcgtggacccgggtcagcctcgaaaggaatggacgaaagggtgctctgagagtgggagacggcccacgagttctcggcgaatccccgaagtcaagaaaagtgccccacaccgtgctgaacctcaaggagccactgtatgttgggggagcccctgacttttcaaaactggccagggccgctgccgtgtcttcaggatttgatggagccatccaactagtatcactcggaggccgacagctgctgacgcctgagcatgtgctgaggcaggtggacgttacctctttcgccggacatccttgcactcgggcatcggggcacccatgcctcaacggcgcttcctgtgtgccccgagaagccgcatacgtctgcctctgtcccggtggcttctcgggtccgcattgcgaaaagggacttgtcgagaagtctgctggcgacgtggacacgctcgccttcgacggtcgtaccttcgttgagtatcttaacgcagtcacagaaagcgagttggctaacgagatccccgtgccggagacccttgatagtggtgcattacactccgagaaggccctgcagagcaatcactttgagctgtcactgcgcaccgaggccactcagggcttagtgctctggtcagggaaagccaccgagagggccgattacgtggcactcgcgatagtcgatggacatctgcagctttcatataacctgggatcccagcccgtagtactccggtcaactgtgcccgttaatacctag

SEQ ID NO: 213935 - DNA, 6137 bp, synthetic construct
  misc_feature 1..6137: note = Description of Artificial Sequence: Synthetic coding sequence
  source 1..6137: mol_type = other DNA
atggcaggaaggagtcatccgggtcctcttcgaccactcttacccctgctggttgtggctgcctgtgtcctccctggagcaggagggacctgccccgaacgggctctcgagcggagagaagaggaggccaatgtagtgctgaccggcaccgtggaagagatacttaatgttgatcctgttcagcatacctactcatgtaaagtgcgtgtctggaggtacctgaaaggcaaggacctcgtagccagggaatcattgctggacggcggaaataaggtcgtgataagtggatttggcgatcctttgatttgcgacaatcaagtgtcaactggggacacgcggattttctttgtaaacccagctccgccatatctctggcccgctcacaagaacgagctgatgttgaacagctccctgatgcgcatcacactgagaaacctggaggaggtcgagttttgcgtggaagacaagccgggaactcacttcacaccagtccccccaacgcccccagatgcctgtcgcggtatgctgtgcggattcggcgctgtctgtgagccaaatgctgaaggccctggacgggcttcctgcgtgtgcaagaagagtccctgtccttcggtagtggctcctgtctgcgggagtgacgcctctacttattcgaatgaatgcgaattgcagcgggcacagtgtagccagcagaggaggattaggctactgtctaggggtccctgcgggagtcgggatccatgttccaatgtaacttgttcatttggctcaacctgcgcgaggtcagcggacggtttaacagccagctgcctgtgcccagcgacctgtaggggagcccctgaaggaaccgtctgcgggtcagacggagcggattaccctggcgagtgccagctccttagacgcgcttgtgcacgtcaagagaatgtgtttaaaaaattcgatggtccttgcgacccctgccagggtgctctgcccgatccctctagaagttgccgagtcaatcccaggacacggagaccagagatgctgctgcgaccagaaagctgccctgccaggcaggccccagtgtgtggggatgatggtgtgacctacgagaacgattgtgtgatgggacgctccggcgcagcgcgaggactccttttgcaaaaggttcggtctggacaatgtcaagggagagatcagtgcccagagccgtgcaggtttaacgccgtctgcctgagccggagagggaggcctcggtgctcttgcgatcgcgtgacctgcgacggcgcataccgccctgtgtgtgcacaggacggcaggacctatgattccgactgttggcggcagcaagctgaatgtcggcagcagagagctattccctcaaagcaccagggtccttgtgaccaggcccctagtccttgtctgggagtgcagtgtgccttcggtgctacctgtgcagtaaagaacggccaggccgcatgtgaatgtctgcaggcttgctctagtctgtacgatccagtctgcggctctgacggagtaacctacgggtccgcttgcgagcttgaggcaaccgcctgtaccttgggccgtgaaattcaggtcgccaggaaagggccttgtgatcgctgtgggcagtgtcgctttggggctctgtgcgaagcggaaacgggcaggtgtgtttgtccttcagaatgtgtggctctcgcccaacccgtatgtggtagcgacggccatacctatccatctgagtgcatgctgcatgtgcacgcctgcacacaccagatcagtctgcatgttgcctctgctggtccttgcgagacctgtggcgacgcggtttgcgcctttggggcagtgtgctcggcaggtcagtgcgtgtgccccagatgcgaacaccctccaccgggtcctgtttgtgggagcgatggcgtaacatatgggtccgcctgcgaactgcgggaagccgcttgtctccagcagacccagatagaagaagcccgtgcgggaccctgcgaacaggctgagtgtggcagtggcggaagtggttcgggtgaggacggggactgtgagcaggaattatgtcgccagaggggcggaatctgggacgaagattctgaggacggaccttgtgtctgtgatttttcttgtcaaagcgtgcccggatcgcccgtatgcggcagcgatggagtcacctacagcaccgaatgcgagctaaaaaaggctcgctgtgagagccagcgcggactgtatgtcgcagctcagggggcttgcaggggtcccacctttgcaccattacctccagtggctccccttcactgtgcacagactccttatggctgttgccaagacaatatcaccgcagccaggggtgtggggctggcagggtgcccctcagcttgccaatgcaatccccatggctcctacgggggtacttgtgatccggctacaggtcagtgctcatgccgccctggcgtgggcggactgaggtgcgacaggtgtgagcctggtttctggaatttccggggaatcgtcactgatggcagaagcggttgcaccccttgctcctgcgatccacagggcgcagtgcgggacgactgcgaacagatgacaggactgtgctcctgtaagcctggcgtggccggaccgaagtgcggacagtgccctgacggcagagctctgggacctgccggatgcgaggcggacgccagcgcacctgctacttgcgccgagatgagatgcgagtttggcgcacggtgcgttgaagagtctggcagtgcccactgtgtgtgccccatgctcacctgccccgaagcaaacgcgacgaaggtgtgtgggagcgatggcgtgacttacggcaatgagtgtcaattgaaaacgatcgcatgtcgtcaggggctgcagattagcattcagagcctgggcccttgccaggaggcagtggcaccatcaactcacccaaccagcgctagtgttaccgtgaccacgcctggtcttctgctgagtcaggctctccctgcccctccgggtgcactcccactggcacccagttctactgctcattctcaaactacccctccaccaagctccagacctcggacaactgcaagcgttccaagaaccaccgtgtggccggttctgaccgttcccccaaccgctcccagcccagcaccgtctcttgttgccagtgcctttggcgaatctggatcaacagacggatccagtgacgaagaattgtctggcgaccaagaggctagtggaggcggttcaggaggcctggagcctctggaaggatctagtgtagccaccccaggccctccggtcgagagagcatcctgctataactctgccttgggctgctgttcagatgggaaaacccctagccttgacgcagaggggtctaattgtcctgcaacgaaggtctttcagggggttttggagctggagggagtcgaaggccaggagctgttttacactccagaaatggcagatcctaaatctgaattatttggagaaacggctcgttcaatcgaatccactttggatgatctgttccgaaatagcgatgtcaaaaaggattttcgatctgtgaggctccgggacctcggacccggaaaatccgttcgtgcaatcgtcgacgtgcattttgatccaacaaccgcgttcagggcccctgacgtcgctagagcgctgttgaggcagatacaagtgtcgcggaggcgctcgctgggggtgaggcgcccactccaggaacatgtccgttttatggatttcgattggtttccggcttttatcacaggagcaacaagcggcgctattgcagccggtgccacagcgagagccaccactgcctccaggttacctagtagcgcagtcactcctagagccccacatccatctcatactagtcagcccgttgctaagacaaccgcggctccaaccaccagaaggccacctacaaccgccccatcaagggtgcctgggcgtcgccctccggcaccccagcagccacccaagccttgtgatagtcaaccctgctttcacggcggaacctgccaggattgggctctgggcggaggctttacttgctcatgcccagctggcagaggtggcgctgtctgcgagaaagttcttggtgccccagtgccagccttcgaaggtcgaagtttccttgccttcccaacactacgggcttaccacacactgaggctggctttggagttcagagctctggagccgcaggggctgctactgtacaacggcaatgcaagaggtaaagacttcctcgcattggcacttttggacggcagggttcagctccggtttgacaccggctccggccctgctgtgcttacctcagccgtgcctgtagagccaggtcagtggcatcgcctcgaactatcacgccactggaggagagggacactctctgtcgacggggaaacccctgtgctaggcgagagtccatcgggtaccgacggactcaacctggacacagacctgttcgtggggggtgtacctgaggaccaggcagccgtggctttagagaggacatttgttggagctggcctcaggggctgcatccgcctgctcgacgtcaacaatcaacggttggagctgggaatcggcccaggcgctgccactcgcggtagtggcgtgggcgagtgcggggaccacccctgcctgccaaatccttgtcacggcggtgcaccatgccagaatctggaggcagggagatttcattgccaatgccctccagggagagtgggccctacgtgtgccgacgaaaagagcccatgccaaccaaatccttgtcacggggcagccccatgccgagtcttacctgaagggggtgcccagtgcgagtgccccttggggagagaaggcaccttctgtcagaccgcctctgggcaagacgggtctggcccatttttagcggattttaatggcttttcacacctggagttaaggggactgcataccttcgcacgggatctgggagagaaaatggccctggaagtggtattcctggccaggggaccaagtggccttcttctatacaatggccaaaaaaccgacggcaagggggactttgtatcactcgcactgagggacaggcggttggaattccgctatgacctgggaaaaggtgccgctgtgattcggtccagagagcccgtgaccctaggggcatggacgagagttagtttggaacgaaacgggagaaagggcgcacttcgggtgggagacggacccagggtgctgggtgagtcacccgtcccacacaccgtgctgaacctaaaggagccactttacgtcggcggtgcacctgatttctcaaaattagccagggccgcagccgtttccagtggatttgatggcgcaatccagcttgtgtctttgggaggcagacagttactgacacccgagcacgtactccgccaagtcgatgttactagctttgccggtcacccatgcacccgcgcatccggccatccatgtctgaacggcgcatcctgtgtgccacgggaagcagcctacgtgtgtctatgcccaggcggatttagcggaccacactgcgaaaaagggctcgtcgaaaagtcagcgggtgacgttgacacattggccttcgatggcaggacatttgtagaatatctaaatgcggtcactgagtcagagaaagcgctgcagtcaaaccacttcgagctgtcattgcgcactgaagcaacacagggcctggtgctctggtcaggcaaggccaccgaacgcgcagactatgtcgctttggctatcgttgacgggcatttgcaactgagctataatttggggtcacagcccgtggtcctaagatccactgtcccagtcaatacgaaccggtggctgcgggttgtggctcacagagaacagagagagggatccctacaggtaggcaacgaagcccctgttacaggctcatcaccactcggagccacccaactcgacactgatggagcactatggctcgggggtcttcccgagctgccggtgggccctgctctgcctaaggcatacggcacaggattcgtcggttgccttagagacgtcgtcgtgggaaggcaccctctgcacctcctcgaagatgctgtaaccaaaccagagcttcgcccttgtcctacccctta

SEQ ID NO: 213936 - DNA, 816 bp, synthetic construct
  misc_feature 1..816: note = Description of Artificial Sequence: Synthetic coding sequence
  source 1..816: mol_type = other DNA
tagcggtacgatctcggtaagggagctgccgtgattcgctcgagggaacccgtgacgttgggggcatggactcgtgtgtccctggaacgaaatggcaggaagggagcactgcgggtgggcgacggccctcgtgtcctcggggagtcccccaagagccgcaaagtaccacacaccgtcttaaacctgaaagagcccttgtatgtggggggtgctcctgatttttcaaagctggcacgtgccgcagcagttagttctggcttcgacggggctattcagctggtgagccttgggggaaggcagttgttgacaccagaacatgtgttgagacaagtcgatgtaacttcttttgcaggacacccgtgcacaagagcgtcaggccatccttgtcttaacggcgcaagttgtgtgccccgtgaggcagcttatgtatgtctttgtccagggggtttcagtggacctcattgcgagaaggggcttgttgagaaaagtgccggagatgtagacacgctcgcttttgatgggagaactttcgtagagtacctcaatgctgtaaccgaatccgagttggctaacgaaattcctgtgcccgagacactggattcaggggcactgcactccgagaaggccttacagagcaaccacttcgagctatctctgcgaaccgaggcaactcaggggctggttctctggagcggaaaggccaccgaacgcgcagactatgttgcacttgccatcgttgacgggcatctgcagttgtcatataatttggggtcacaacctgtagtgcttcggtcaaccgtgcccgtgaatacctag

SEQ ID NO: 213937 - DNA, 462 bp, synthetic construct
  misc_feature 1..462: note = Description of Artificial Sequence: Synthetic coding sequence
  source 1..462: mol_type = other DNA
atggcattggtttttgtgtacggaaccctgaaaagggggcagccaaatcatcgggtccttcgggatggggcacacggttcggcagcattcagagctcgcggtcgtactttggagccctaccccctggttatagccggagagcacaacatcccctggctgctgcacctgcctggatccggtagactggttgaaggcgaggtgtacgccgtcgacgaacggatgctccgttttctggacgattttgaatcttgccccgctctttatcaacggaccgtgcttcgggtgcagctcctcgaagacagggcccctggagcagaggagcccccagctcccacagctgtccagtgctttgtctactccagagccacttttccccctgaatgggcccagctgccccatcacgattcctacgactctgaaggcccacatgggctgcggtacaatccaagagaaaaccggtag

SEQ ID NO: 213938 - DNA, 462 bp, synthetic construct
  misc_feature 1..462: note = Description of Artificial Sequence: Synthetic coding sequence
  source 1..462: mol_type = other DNA
atggcgctggtcttcgtctacggcacactgaagcggggacagccaaaccatcgcgtcctccgagacggtgcacatgggtcggcggcatttcgggctagaggtagaaccctcgaaccttatccacttgtgatcgctggcgaacacaacattccctggctcctgcatctgcctggaagtggcagacttgtcgagggggaagtgtacgctgtcgatgaacggatgcttcgctttctcgatgactttgagtcttgtccggcactctaccagaggacagtcctacgcgtgcagctgcttgaggatagggccccaggtgctgaagaaccccctgctccgactgccgtccagtgtttcgtgtattcccgagctaccttcccgcctgaatgggctcagctgcctcaccacgattcttacgacagtgaaggaccacatggtctgaggtacaacccacgggagaacagatag

SEQ ID NO: 213939 - DNA, 879 bp, synthetic construct
  misc_feature 1..879: note = Description of Artificial Sequence: Synthetic coding sequence
  source 1..879: mol_type = other DNA
atgaatccattttggtctatgtctacaagctccgtacggaagaggtccgaaggcgaggaaaagaccttgactggagacgtgaaaacctcgcctccgaggacagcgcctaagaagcagctgcccagtataccaaagaacgccctccccattactaagccaacatcacccgctccagccgcacaatccactaacgggacccatgcgtcctatgggccattttatctggaatactctctgctggccgaattcaccctggtcgtgaagcaaaaactgcccggagtctatgttcagccgagttatcggtccgcactgatgtggtttggagtgatctttattaggcatgggctttatcaggacggggtgtttaaattcacagtgtacatacccgataattacccagatggagactgcccaagactggttttcgacatccctgtgttccacccattggtggacccgacctccggtgagctggatgtcaaaagggccttcgctaaatggaggcgcaaccataaccacatttggcaggtcctgatgtatgcccgtagagtgttctacaaaatcgacaccgcctcaccattgaaccctgaggcggcagttctgtacgagaaagacattcagctcttcaagagcaaggtggttgattccgtgaaggtgtgcacagcacggctgtttgaccaaccaaagattgaggacccctacgctatttcattcagtccgtggaaccctagtgtgcacgacgaggctcgggagaagatgcttacccagaagaagcctgaagagcagcacaacaagtccgtccacgttgccggactctcgtgggtcaagccaggatcagtgcaaccattctctaaagaggagaagaccgtggctacttag

SEQ ID NO: 213940 - DNA, 879 bp, synthetic construct
  misc_feature 1..879: note = Description of Artificial Sequence: Synthetic coding sequence
  source 1..879: mol_type = other DNA
atgaacccgttctggtctatgtccacctcttccgtgaggaaaaggtcagagggagaggaaaaaactcttacgggcgatgttaagacctcacccccaagaacagccccaaaaaaacaattgccaagtattcctaagaacgcactcccgatcactaaaccaaccagtcccgctcccgctgctcagtccacgaatggcacccacgcttcatacggccctttctacctcgaatactccctgttggccgaatttactctcgttgtaaagcagaaattacccggagtgtatgtgcaaccctcttacaggagtgccctgatgtggtttggagtgatttttatcaggcacgggctctatcaagacggggtctttaagtttactgtgtatattcccgataactaccccgatggcgactgtcccaggctggtttttgatatcccagtttttcacccactggtcgaccctacaagtggggagttagatgtcaagagggcattcgctaaatggcgacgcaaccacaaccatatttggcaggttctcatgtacgcgcgtagggtgttctacaaaatcgacaccgccagcccactaaatcccgaggccgctgttttatacgaaaaagacatccaattgttcaaatctaaggtcgtggattccgtgaaagtatgtaccgccaggctttttgatcaaccaaagatcgaggacccgtacgccattagcttctccccctggaatccttcggtacacgacgaggcaagagaaaaaatgctgacgcagaagaaacctgaggaacagcacaataagtctgtacatgttgcagggctctcgtgggtaaagcccggtagtgtgcaaccctttagcaaggaagagaagacagttgctacctag

SEQ ID NO: 213941 - DNA, 1179 bp, synthetic construct
  misc_feature 1..1179: note = Description of Artificial Sequence: Synthetic coding sequence
  source 1..1179: mol_type = other DNA
atggcctcccataagctgctggttaccccccctaaggccctcttgaaacctttaagcattccaaatcaattactgctcgggccaggtcctagtaatctgccccctcgaataatggccgctggtggtctgcaaatgatcgggagtatgtccaaggatatgtaccagatcatggatgagatcaaagaaggaatacagtacgtcttccagacgagaaatccgctcactctggtaatcagcggctctgggcattgtgcactggaggcagcactggtgaatgtgctggagccgggtgacagctttttagtgggtgctaatggcatctggggccagagagccgtggacatcggggaaagaatcggcgctcgcgtgcatccaatgacgaaagacccagggggacattataccctccaggaggtagaagagggccttgctcaacacaaacccgtgctcctgtttttgactcacggagaatcctccacgggagtgcttcagcctcttgacggatttggcgagctttgccatcgctacaaatgcttgttgctggtggattcagtggcatctcttggtggcacacccctgtatatggatcgccagggcatcgacatcctctattcaggcagtcagaaggctctgaacgcaccgccaggaaccagtctcatcagttttagcgacaaggcaaagaaaaagatgtattcccgtaagacgaaacctttttctttttaccttgatatcaagtggcttgctaatttttggggatgcgacgaccagccaaggatgtaccatcatactatacccgtgatttccttgtattcattgagggagtctctggctctcatcgccgaacaaggtcttgagaactcatggcgacagcacagggaagcagcagcctacctccacggcaggctccaagccttgggcctgcagctgttcgtgaaggaccctgccctgcggctaccgaccgtgacaacagtggctgtgccagccggatacgactggcgggatattgtctcctacgttatcgatcatttcgacattgaaatcatgggcggtctgggccctagcactgggaaggtgcttcgtattggattgcttggatgcaacgctaccagagagaatgttgacagagtgaccgaggctcttagagccgcacttcagcattgccctaagaaaaagttatag

SEQ ID NO: 213942 - DNA, 3078 bp, synthetic construct
  misc_feature 1..3078: note = Description of Artificial Sequence: Synthetic coding sequence
  source 1..3078: mol_type = other DNA
atggagccgttcaccaacgataggttacagctgccaagaaatatgatcgagaacagtatgtttgaagaggagcctgatgtggtcgatctggcaaaggagccatgtcttcatcccctcgaacctgacgaagttgagtatgaacctagaggctcccgattgctggtacgtgggctcggcgagcacgagatggaagaagacgaggaagattatgaatcttcagccaagctcctaggtatgtcctttatgaataggagttctggactccgcaatagcgcgacaggctatcggcaatctccggatggagcatgtagcgtgccttcagccagaaccatggtagtttgtgcctttgtcatagtggtggcagtaagtgttatcatggtgatctacctgctgcctaggtgcaccttcacaaaagaggggtgccacaaaaaaaaccaatcgatcggactcattcagccatttgccacaaacggcaaattgttcccctgggcccaaattcggctgcccactgcggtggttcctttgaggtacgagctcagccttcacccgaatctaacttccatgaccttcagagggagcgtaaccatttccgttcaggccctgcaggtgacctggaacatcattctccactctactgggcataatatatctcgggtcacctttatgtccgctgtatcctcacaagagaaacaggcggagatcctggagtatgcctaccacggccagatcgctatcgtggcacctgaggccctcctggctggccacaattacaccctgaagatcgagtattcagccaacatatcatcctcttattacggtttttacggatttagttataccgacgagagcaacgagaaaaaatactttgcagccacccagtttgaaccccttgccgcacgttcagccttcccgtgctttgatgagcccgctttcaaggctacttttattattaaaatcatccgtgacgaacagtacacggctctatccaatatgcctaaaaaatcgtccgtggtgctcgacgacggactggtccaggatgaattttcagaatctgtgaagatgtcaacgtatctcgtggcctttattgtgggtgaaatgaaaaacttgtcacaggatgtgaacggcacactggtctcaatttatgctgtgccggaaaagatcggacaggtgcactacgctctggaaaccaccgtgaagctgctggagttcttccagaactattttgaaatacagtatcctctcaaaaaactagacctggtagccatacctgacttcgaggccggtgcgatggagaactggggactacttacatttagagaggagaccctgttatacgacagcaacactagtagcatggccgatagaaaactcgttacgaagattattgcccatgagctcgcacaccagtggttcgggaacctggtgactatgaaatggtggaatgacctgtggcttaatgagggttttgccacatttatggagtattttagcctggagaagatcttcaaggagctgtcctcatacgaggatttcctagatgccaggttcaaaacgatgaagaaggactcactgaatagcagccaccctatttctagtagcgttcagtccagcgagcaaatcgaggagatgttcgacagcctcagttattttaagggctccagtctgcttctgatgctgaagacgtacctaagcgaagacgtcttccagcacgccgtggtcctgtacttgcacaaccacagctacgcttccattcagtccgatgacctatgggactcctttaatgaagtgactaatcaaaccctagacgtgaaaaggatgatgaaaacatggactcttcaaaaggggtttccactggtgacagtgcagaagaagggcaaggagctgttcatccagcaagaaagattttttctgaacatgaaacccgagatccagccatccgatactagttacttgtggcatattcccttatcttatgtgacagagggtaggaactactcaaagtatcagtctgtgtcactgttagataagaagtcaggcgtcatcaatcttaccgaggaagtgctgtgggtcaaggtgaacatcaatatgaatggctactacatcgtgcattatgctgacgatgactgggaggccttaattcatcagctgaaaattaatccctacgtgctgtccgataaagatcgggctaatctcatcaataacatattcgaactcgccggactcggcaaagtgcctctgaaaagagctttcgacctgatcaactatctcggtaacgaaaatcacactgcccctattaccgaggcacttttccaaacagacttgatatacaatctgctggagaaactagggtatatggacctagcctctcggctcgtgacgagagtatttaagctactgcagaatcagattcagcaacaaacgtggaccgacgagggtactccgtccatgcgcgagctgcggtctgcgctgctcgagttcgcatgcacccataacctaggcaattgttctacaaccgcaatgaagctttttgatgattggatggcatctaatggtactcagagcctgcccacagacgtgatgacaacggtcttcaaagtaggggcaaaaactgataaggggtggagcttcctgttgggtaaatatatatccataggtagcgaagcggaaaaaaataaaatccttgaggctctcgcctcttccgaggacgttaggaagctctactggctcatgaagagcagcctgaatggggataacttccgcacccagaaactgtctttcattatcagaaccgttggaagacattttccaggccacttacttgcgtgggactttgtgaaggagaactggaacaaactggtccagaagttccctctcgggtcttataccatacagaatatcgtcgctggcagtacctatcttttcagtacaaagacacacctgtccgaagtgcaggcctttttcgagaaccagagcgaggccactttccggctaagatgcgtgcaagaggctctggaagtgatccaactcaacattcagtggatggaaaaaaacctgaagtctctgacctggtggctatag

SEQ ID NO: 213943 - DNA, 2907 bp, synthetic construct
  misc_feature 1..2907: note = Description of Artificial Sequence: Synthetic coding sequence
  source 1..2907: mol_type = other DNA
atggacagcacacttaccgcgtcagagatacgccaacgctttatagacttctttaagaggaacgaacatacttatgttcactcctcagccactattcctctggacgatcctaccctgctgtttgccaatgccggaatgaatcagttcaagcccatttttctcaataccatcgacccgtcccatcccatggccaaattatcacgagccgcaaacacccagaagtgcataagggccggtggaaaacacaatgacctagacgatgtaggaaaagacgtataccaccatactttctttgagatgcttgggtcttggtcctttggggactattttaaggagctcgcatgcaaaatggccctggagctgcttacacaagagttcggtattcccattgagagattgtacgtcacttattttggcggagacgaggccgcaggtctggaggcagacctggagtgcaaacagatttggcagaatctcgggctggacgatacaaaaattcttcctggcaacatgaaagataacttttgggaaatgggcgacacaggaccctgtggcccttgcagcgaaatccattacgatagaatcgggggtagggacgctgctcacttagtgaatcaggatgatccgaacgttcttgaaatatggaatttagtcttcattcaatacaatagggaagctgatggcatcctaaagccactgccaaagaagtcaatcgatacgggaatgggactggagcggctcgtgagtgtgttgcagaacaaaatgtccaactacgatactgatctttttgtaccttacttcgaggccattcagaagggtactggggctcggccttatacaggtaaggtgggagccgaggacgctgatgggattgacatggcctaccgagtgctggcggatcatgctaggaccattaccgtggctttagcagacggtggcagacctgataacactggacgagggtatgtcttgcggaggattctgcgaagagcagtgcggtacgcacacgagaaactcaatgcctcacgaggcttcttcgccacattggtcgacgtggttgtgcaatcactaggtgacgccttccccgaactgaaaaaagacccggacatggtgaaggatatcattaatgaggaggaggtccagttcctgaagaccctcagccgcggacggaggatcctggataggaaaattcagtcactcggtgactctaagactatcccaggcgatacagcctggcttttgtatgacacttacgggtttccagtagacttgactggcttaatcgctgaggagaagggcctggttgtggatatggatggatttgaagaagaaagaaaactggcccagctcaagtctcagggcaagggtgccggaggcgaggatctgatcatgctggatatctacgcaatagaggaactgcgggcaagggggctggaggtgactgacgatagcccgaagtacaattaccatctggactccagcggatcctacgtgttcgagaataccgtcgccactgtcatggccttgaggagggagaaaatgtttgtcgaagaggtctccacaggccaggaatgcggtgtcgttttggataagacctgtttctatgctgaacagggagggcagatatacgacgaaggatatctggttaaggtggatgattcaagtgaggataagaccgaatttacagtgaagaatgcccaggtacgaggaggttatgtgctgcatataggcactatctacggagaccttaaagtcggtgaccaggtgtggctgtttatagacgagccacgccgacgccctatcatgtctaaccacaccgccacgcatattctaaatttcgcactgcggtctgtgcttggcgaagcagatcagaaggggtctctcgtcgcgcctgacagactgaggttcgattttaccgcaaaaggcgcaatgagtacgcagcagattaaaaaagcagaggagattgcaaacgaaatgattgaggcagccaaggctgtctacacccaggattgtcctcttgcagctgccaaagcaattcaagggctgagagccgtgtttgacgagacctaccctgatcctgttcgggttgtcagcataggtgttccagtgtccgagctgctcgacgacccctccggacccgcaggaagtctgacaagcgtggaattttgcggtggtactcaccttaggaattcttcccacgcaggcgcattcgtgattgtgaccgaggaagctattgcaaaaggaatcaggcgcatcgtggccgttactggggcagaggctcagaaggcccttcggaaagcggaatcgctaaagaaatgtctttccgtgatggaagctaaggtgaaggcacagactgcgccaaataaggacgtgcagcgggagattgcagatctgggagaggcccttgctaccgccgtgattccacagtggcagaaggacgaactgcgggaaaccctgaaatcacttaaaaaagtgatggacgatctggaccgcgcaagtaaagctgacgtgcagaaaagggtcctggagaagacaaaacagttcatagattccaatccaaaccagccactggtgatactcgagatggagagcggcgcatccgctaaggccctcaatgaagcgttaaagctcttcaaaatgcattccccgcagacaagcgccatgctatttaccgtagacaacgaggcaggcaaaataacctgtttgtgccaagttcctcagaatgccgctaaccggggattaaaagcgtccgagtgggtgcagcaggtttctggcctcatggatggcaaaggtggaggaaaggacgtgagtgcgcaggccaccgggaagaatgttggctgcctgcaggaggccctacagttagcgacctccttcgcacaactcagactaggagacgttaagaattag

SEQ ID NO: 213944 - DNA, 2958 bp, synthetic construct
  misc_feature 1..2958: note = Description of Artificial Sequence: Synthetic coding sequence
  source 1..2958: mol_type = other DNA
atggccgcttccgtggcagcggctgctcgacggctgagacgggcaatccgacgttctccagcttggcgtggcttgtcccatagaccattgtcgtcagagcccccagcggctaaagcgtccgccgtgcgcgctgcgtttctgaattttttccgagaccgccacggccaccgcctcgtcccttctgcttcggtcaggcctcggggtgatccctctctcctctttgtgaatgcaggcatgaatcagtttaagccaatcttcctgggcacagtggatcctagatctgagatggctgggttccgcagagtggccaattcacagaaatgtgtacgcgcaggagggcatcataatgacctggaagatgtgggcagggacctctcccaccacacatttttcgagatgctgggcaattgggcctttggaggcgaatacttcaaggaggaggcttgcaatatggcttgggagttactgacccaggtttacggcatacccgaggagcgcctctggatttcttactttgacggtgatccaaaggccggactcgatcctgacttggagacacgcgacatttggctgtctctcggggtgcccgcatcaagagttctgagttttggaccacaggaaaacttttgggagatgggagacactggtccatgtgggccatgcacagagatacattacgatctggctggaggtgtaggcgcaccccagttggtcgagctgtggaacctcgtgtttatgcagcacaaccgggaggctgatggcagcctccagccactgccacagcgtcatgtggacaccggcatgggtcttgaaaggttggtggccgttctccaggggaagcattccacatacgatacagatctgttcagtcctctcctaaacgccattcagcaaggctgtcgcgcacccccatatctaggccgtgtaggcgtggccgatgaaggcaggactgacacagcctacagggtagtggctgatcatatccgaacccttagtgtctgcatttcagacggaatcttccccggaatgtcaggtcccccactggttctcaggaggatactccgtcgcgcagtgaggtttagtatggagattctcaaagcgccacccggtttcctggggtctctggtgccagtggtcgtggagactttgggtgacgcctacccggaacttcaacggaactctgcccagattgctaacctggtgagcgaggacgaagcggcatttttggcctctctggaacggggacggaggatcatagacagaaccctacgcactctgggcccttccgacatgtttcctgctgaggtggcatggtctctgagcttatgtggcgacctggggctcccgcttgatatggttgagcttatgctggaggaaaagggcgtacagctggactccgccggtctggagcggcttgcccaagaagaggcccagcacagagcacgccaggccgagcccgtgcagaaacagggactatggctggatgtccacgctctcggggaattacagcggcagggagtcccgcctacggatgattcccccaagtacaattacagcctgcggccatcggggagttacgagttcggaacttgtgaagcccaggttctccagctgtacacggaagacggcacagccgtggctagcgtcggcaagggacaaaggtgtggcttactgctggataggactaatttctacgcagaacagggaggccaggccagtgaccgagggtacttagtccgcgcagggcaggaggacgttctgtttcccgtcgctcgggcacaggtttgcggaggcttcatcctgcacgaagccgtggcccctgaatgtcttcgattaggcgaccaagtacagttgcacgtcgacgaggcctggcgcttagggtgcatggcgaaacacaccgcaacacacctcctcaactgggcactcagacaaactttaggaccgggaactgagcagcagggttctcatctaaatcctgagcaactacggctggacgtcaccacgcagacacctttaactcccgaacagcttcgggcagtagaaaataccgttcaggaagccgtaggacaggacgaggccgtctacatggaggaggttcctctggcattgactgcccaggtgccaggactgagaagtcttgacgaagtctacccagaccctgtgcgggtggtatcagtgggcgtgcctgtggcacatgcactcgacccagcaagccaggccgctctgcagacatctgtagagctgtgttgcgggacccacctgctccgtactggcgctgtaggcgacctggttattatcggcgaccgacagctcagcaaaggcaccacgaggctacttgcagttactggagaacaggcacagcaagcaagggaactgggtcagagtcttgctcaagaggtcaaggctgcaactgagcggctctcgctgggatcccgggacgtggcggaggccctgcgtttatccaaggacatcggacggcttatcgaggcagtcgagacggccgttatgccgcagtggcagcggcgagaactgcttgctaccgtgaagatgctccagcggagagctaataccgcgatcagaaagctgcagatgggccaggctgcaaagaagacacaggaactgctggagcggcactctaagggacctctcatcgtggatactgtgtcggcagaatctttgagcgttctggtgaaggtggtaagacaactttgcgaacaagccccttcaacatcagttctgttgctctctccgcagccaatgggcaaagtgctttgtgcgtgtcaggtggcacagggcgcaatgcctacctttaccgctgaggcttgggctctggcagtctgctcccacatgggcggaaaagcgtggggcagcagagtcgttgcgcaggggaccggcagtactacagacctggaggcagctttgtctattgcacaaacctatgcactttcacagctgtag

SEQ ID NO: 213945 - DNA, 1578 bp, synthetic construct
  misc_feature 1..1578: note = Description of Artificial Sequence: Synthetic coding sequence
  source 1..1578: mol_type = other DNA
atggagttctgcgtggaggattccaccgatgtgcacgtactcatagaggatcacagaattgtgttctcctgcaagaacgccgacggcgtggaactttataatgagattgaattctatgccaaagtgaactctaaggactcccaggataaaagatccagcagaagcattacgtgctttgtgaggaagtggaaggagaaggtagcctggcctcgattgacaaaagaggacattaagcctgtgtggctgtcggtggactttgacaattggcgagattgggagggggacgaggaaatggaactagcccacgtggaacactacgcagagcttctgaaaaaagtgtccactaagcgccctccaccagcgatggacgatttagacttcactaccaccgtcgtgtcttgctgcccagccgagctgcagacagagggatctaacggaaagaaagaggtgctaagcggctttcaagtggtgctcgaggacaccgtgctcttccccgagggaggaggccagccagacgaccggggaaccatcaacgatatatcggtgctgagagtaactcgacgaggcgagcaggccgaccatttcacccagactcctcttgaccctggatcccaagtgctcgtgcgcgtggattgggagcgccgttttgatcacatgcagcaacattcaggccagcatttaataaccgctgtggccgaccacctgtttaagcttaaaaccacaagctgggaactgggacgcttcaggagcgcgattgaactggacactcccagtatgaccgcagagcaggtagctgccatagaacaatctgtaaatgaaaagattagagataggcttcccgtaaacgtcagggagctaagcttagatgaccccgaagtggagcaagtctccggccgtgggctgcccgacgatcatgccggtccaattcgagtggtgaacattgagggggtcgattcaaatatgtgttgcggaacccacgtctccaatcttagcgaccttcaggtgatcaagatcttgggaactgaaaaagggaagaaaaatcggacaaatctaatatttttgagcggcaacagggtgttaaagtggatggagcgcagccacggtaccgagaaggctcttaccgcactcctgaagtgcggcgcagaggatcacgtagaagcagttaagaagctacagaattcgactaaaattcttcagaagaacaacctcaacttactccgggaccttgcggtgcacatagctcactccttgaggaactctccagattggggaggtgtcgtcattttacaccgtaaggaaggagactcagaatttatgaatattatcgctaatgaaattgggagcgaggaaaccctgttgttcttaactgtcggcgatgagaaaggcggagggttgtttttgcttgccggacctcctgcatcggtggaaactctaggcccacgtgtcgctgaggtgttagaagggaagggggcaggcaagaaagggagatttcaggggaaagcaaccaagatgtctaggcggatggaagctcaggccctgctgcaagactacatctccacacaatccgcaaaagaatag

SEQ ID NO: 213946 - DNA, 1761 bp, synthetic construct
  misc_feature 1..1761: note = Description of Artificial Sequence: Synthetic coding sequence
  source 1..1761: mol_type = other DNA
atgttcagcctgcccttaaattgtagcccagaccacattaggcgtggcagctgttggggacgccctcaggatcttaagatcgctgccccagcatggaacagcaagtgccaccccggagctggcgcagcgatggctcgtcaacacgctaggacactgtggtacgatagacctagatatgtgttcatggagttttgcgttgaagatagtacagatgtgcatgtactaatcgaggatcatagaatcgtcttcagctgcaagaatgccgacggggtagaactctacaatgagatcgagttttatgccaaagtgaattctaaggattcccaggacaagcggagcagccgctcaatcacctgctttgtcaggaagtggaaggagaaggtcgcttggcctcgcctaacaaaagaagatataaagcccgtttggctgagcgttgattttgacaactggagggactgggaaggtgatgaggagatggaactcgctcatgtggagcattatgccgaactccttaaaaaagtgtctaccaaaagacctccaccagccatggatgacttggattttaccaccaccgtggtctcgtgctgccccgcagaactgcaaactgaaggctctaatggcaaaaaagaggtgctcagcggttttcaggtcgttcttgaagatacagtgttgttcccagaaggaggtgggcagcccgacgataggggtacaatcaacgacatttcagtgctgagagtgactcgaagaggcgagcaggccgatcacttcacgcagacacctcttgatccagggagtcaagtcctagtgcgagttgactgggaaagaaggtttgaccatatgcagcagcacagcggccagcatttaatcacagctgttgccgaccatctgttcaaactcaagactactagctgggaattggggagatttaggtccgccatagagttggatacacccagcatgactgcagaacaagtggccgcaattgagcagagcgtgaacgagaaaatcagagaccgactacccgttaacgtgagagagctcagtctggacgatccagaagtggaacaggtctcgggtagggggctgcccgatgaccatgctggtccaatacgggtggtgaacatcgaaggggttgatagtaatatgtgttgtggaactcacgtgtccaatttgagtgatctgcaagtgatcaaaatcttgggaactgaaaaaggaaaaaagaatcggaccaaccttatttttttgtctgggaaccgcgtcctcaagtggatggaacggagccacggaacagagaaagcccttaccgcactgctgaagtgcggcgcagaagaccatgtggaggcagtgaagaagctgcagaacagtaccaagatcctgcagaagaacaatttaaaccttctgagggatttggctgtccacatcgctcactctctgcgcaattcaccagattggggaggagtcgtaatcttgcatagaaaggagggcgattccgaatttatgaatatcattgccaacgagatagggtccgaggagacgttactctttctaaccgtgggagatgagaaaggcggtgggctctttctgcttgctgggcctcctgcatctgttgaaactctgggcccaagggtcgcagaggttttggaggggaagggtgctggcaagaagggcaggttccaaggcaaagcaactaagatgtcccggagaatggaggcccaggcgctccttcaggattacatttccacacagtcagccaaagagtag

SEQ ID NO: 213947 - DNA, 1761 bp, synthetic construct
  misc_feature 1..1761: note = Description of Artificial Sequence: Synthetic coding sequence
  source 1..1761: mol_type = other DNA
atgttttcgctgccactgaactgttccccagatcatatcagaagggggtcgtgttggggacgcccacaagatttaaagatcgccgcaccggcatggaattccaagtgtcaccccggagctggtgcagcgatggcaaggcagcatgccaggacgctctggtatgatcggcctcggtacgtgttcatggaattctgtgtggaggacagcactgacgttcatgtgctgatcgaggaccacagaatcgtgttttcttgcaaaaatgctgatggggttgagctatacaacgaaatcgagttttacgccaaggtgaattcaaaagatagtcaggataagagatcatctcgcagcatcacgtgttttgttcggaaatggaaggagaaggtcgcctggccccgtctgaccaaggaggacattaagccagtatggctcagcgttgactttgacaactggcgcgattgggaaggagacgaggaaatggaactggcccacgtcgagcattacgccgagctgctgaaaaaggtgagtacaaagcggccaccgcctgccatggacgatctggacttcacaactaccgtagtcagctgctgcccagcggaactgcagacagaaggatccaatggaaagaaagaggtgctgtctgggtttcaggtggtgttggaagatacagtcctttttcccgaaggtggcggacagccggacgacagaggtacaatcaatgatatatccgtattacgagtcacccggaggggtgaacaggccgatcactttacacagacgccactggatccgggttcacaggtgctcgttagagttgattgggaacgcagatttgatcacatgcaacagcatagcggtcagcacctcataactgccgttgcggatcatttattcaagctgaagacaactagctgggagctgggccgattcaggagcgcaatcgaactcgatacccctagcatgacggcagagcaggttgccgcaatagagcaatcggttaacgaaaagattcgcgaccggctacccgttaatgtgcgggaactatctctggacgaccctgaagtggaacaagtgagtgggcgaggcctgcccgacgatcacgcaggtcctatcagagtggtcaatattgaaggggtggactccaacatgtgctgtggcacccacgtgtcaaatctctcagaccttcaggttatcaaaatcttagggacagagaaagggaagaagaaccggaccaatttgattttcctctcgggaaaccgcgtcttgaaatggatggaaaggtcacacgggacagagaaggcacttacagcccttctgaaatgtggagctgaagatcatgtcgaggccgtcaagaagctgcagaattctactaagattctccaaaaaaacaacctcaacctccttagggacctggcagtacacattgcacactccttgcggaactcaccggattggggaggggttgtaattctgcaccgtaaggagggggattcagaattcatgaatatcatcgcaaacgaaatcgggagtgaagagaccctactattcctgacagtgggggatgagaaagggggaggcctgtttcttctggccggaccgcctgcaagcgttgagacactcggaccacgtgtggccgaggtgctggagggtaagggtgcaggtaaaaagggaaggtttcaaggcaaggcaacaaagatgtcacggaggatggaggcccaggcactgctgcaagactacatcagtacgcagagcgcaaaggaatag

SEQ ID NO: 213948 - DNA, 1239 bp, synthetic construct
  misc_feature 1..1239: note = Description of Artificial Sequence: Synthetic coding sequence
  source 1..1239: mol_type = other DNA
atggccttctggtgtcagcgcgattcctacgccagggaatttactactacagtggttagctgctgcccagccgaattacagactgaaggatccaacggaaagaaagaagtgctgagtgggtttcaggtggtcctggaggacactgttctgttccctgaggggggaggacagcccgatgatcgagggaccataaacgacatcagcgtattgagggtgactagacggggtgaacaggccgaccactttacccagacccctttggacccaggcagccaggtcctcgttcgcgtggattgggaacgcagatttgatcatatgcagcagcactctggacagcacctcattaccgcagttgctgatcacctgtttaagctgaaaactacatcctgggagcttggccgattccgttccgctatcgagcttgacacgccttcgatgactgcagagcaagttgccgcaattgagcagagcgtcaacgaaaaaattagggatcgcttgcccgtgaatgtgagagaacttagcttggatgaccctgaggtggaacaggtttctgggaggggtctgcccgacgatcatgccggtcccatccgggtggttaatatcgaaggtgtggacagcaacatgtgctgtggaacgcacgtgtcaaatctatctgacctgcaggttatcaagattctcggcacagaaaaaggaaaaaagaaccgtactaatctgatctttctttctggcaacagagtattgaagtggatggaacgatcacacggaacagagaaagcccttactgccctactgaagtgtggagctgaggatcacgtggaagccgtaaaaaaattgcagaactcgacaaaaattctgcagaaaaacaatctcaacctccttagagatctggccgtgcacattgcacacagccttagaaacagcccagactggggcggagtagttatcctgcatcgcaaggaaggagactctgaatttatgaacatcattgccaatgagattggctctgaagagacattgttgttcctcaccgtgggggacgaaaagggcggaggtctgttcctgttggcgggaccgcctgcctcggtcgaaacactcggaccacgcgtagcagaggtcctagaagggaaaggcgcaggaaagaaaggcaggttccaggggaaagccacgaagatgagccggagaatggaggctcaagccctgctgcaggactatatctcgacacagtccgccaaagaatag

SEQ ID NO: 213949 - DNA, 501 bp, synthetic construct
  misc_feature 1..501: note = Description of Artificial Sequence: Synthetic coding sequence
  source 1..501: mol_type = other DNA
atgttcagcttaccacttaattgttcccccgaccatatccgcagaggcagttgctggggtcggccacaggatctgaagattgcagcccctgcctggaactctaagtgtcaccccggtgccggagcggctatggctagacagcacgcccgtactctttggtatgacagaccaaggtatgtctttatggaattctgtgtagaggactcgacggatgttcacgtactaattgaagaccatagaatagtattttcctgcaagaacgcagacggcgtggagctgtacaacgagatcgagttttacgccaaagtgaattccaaaccagtgtggctgtccgtcgacttcgacaattggcgcgactgggagggggatgaggaaatggaactggcccatgtagagcattacgccgaactgctgaagaaggtgtcaactaagcgacctccgcctgcgatggatgacttagacgatgattcagattccgcagacgacgccacaagtaattag

SEQ ID NO: 213950 - DNA, 399 bp, synthetic construct
  misc_feature 1..399: note = Description of Artificial Sequence: Synthetic coding sequence
  source 1..399: mol_type = other DNA
atggaattctgcgttgaggactcaacagacgttcacgtgctgatcgaagatcacagaatagtgttttcttgcaaaaatgctgacggggtggaattgtataatgagattgagttctacgctaaagttaattccaaagattcccaagataaaaggtccagccgctccattacttgtttcgttaggaaatggaaggaaaaggtggcttggccgagactgactaaggaggacatcaaaccagtgtggctgagtgtcgacttcgataattggcgagactgggagggcgatgaagagatggaactagcccacgtagagcactacgcagagctgttgaagaaagtgtccaccaagagaccaccacccgcaatggacgatctggactttactaccacagtagtgtag

SEQ ID NO: 213951 - DNA, 1830 bp, synthetic construct
  misc_feature 1..1830: note = Description of Artificial Sequence: Synthetic coding sequence
  source 1..1830: mol_type = other DNA
atgaaatgggtcaccttcataagcctgctttttctcttcagcagtgcctatagcaggggagtatttaggcgtgatgcgcacaagtcggaagtggctcatcgattcaaggacctaggcgaagagaatttcaaggcactggttttgattgctttcgctcagtacctgcagcagtgcccttttgaagaccatgtcaaacttgtcaatgaggtcacggagtttgctaaaacctgtgtcgctgatgagtccgcggaaaattgtgacaaatcccttcatacactcttcggagataagctttgcacagtcgccacgctccgggaaacatacggtgaaatggcggattgttgtgccaaacaggagccagagcggaacgaatgtttcctgcagcacaaggacgataaccccaacttgccccgattggttcggccagaggtggacgtaatgtgtacagccttccacgataacgaggaaacattccttaagaagtacctttacgagatcgccagacggcatccctacttctatgccccagaactgctgttttttgctaagaggtataaagctgctttcactgagtgttgccaggcggcagacaaggcggcatgccttttacccaaactcgacgaactgcgcgacgaaggcaaagcgagctctgcaaaacaacgcctgaagtgtgcatctctgcaaaaattcggggaaagggcgttcaaggcttgggccgtggcccgtctgtcccagagattccctaaggctgagtttgccgaagtttccaagctcgtcacggacttgacgaaggtgcacacagagtgctgccacggcgatctactagagtgtgccgacgatcgcgctgaccttgccaagtatatatgcgaaaaccaagattctatctcttcgaaacttaaggagtgttgtgaaaaacccctgctagagaagtcacattgtattgcggaggtcgagaacgacgagatgcccgcagacctgccatctctggctgccgactttgtcgaatctaaagacgtgtgcaagaattacgctgaagcaaaggacgtgtttctggggatgtttctgtacgagtacgcacgccgtcaccctgattactccgtggtgctattgttgcgcttagccaagacatacgagactactctcgagaagtgctgcgccgctgccgaccctcatgagtgttatgccaaggtatttgatgaattcaagcccctggtggaagaaccccagaaccttatcaagcagaattgtgaactgttcgagcagttgggagagtataaatttcagaacgctctccttgtacggtacacaaagaaagtaccacaggtgagcacgccaactcttgtcgaggtgtcacgaaatctggggaaagttggtagcaagtgctgcaagcaccccgaggccaagaggatgccttgcgccgaagactacctatctgtggtgttgaaccagctctgtgttctacatgagaaaactcccgtgtcagaccgggtcactaagtgctgtacagagtccctggtcaacaggaggccttgtttctcagccctggaagtggacgagacgtacgtgccgaaggagttcaacgccgagacctttacttttcacgccgacatttgtacgttgtcagaaaaagagcgccagatcaagaagcagactgccctcgtggagttggttaaacacaagcctaaagctaccaaagaacaactgaaagcagtgatggacgattttgcggcttttgttgagaagtgttgcaaggccgatgataaagagacctgtttcgctgaagagggcaagaaattggttgctgccagccaagcagccctggggctttag

SEQ ID NO: 213952 - DNA, 1191 bp, synthetic construct
  misc_feature 1..1191: note = Description of Artificial Sequence: Synthetic coding sequence
  source 1..1191: mol_type = other DNA
atgaagtgggtgacattcatctccctgctttttctattttctagcgcttactcaaggggggtcttccgacgagacgcccacaaatctgaagtggctcaccgatttaaggacttaggggaagaaaactttaaagccctggtgctcattgccttcgcccaatatcttcagcagtgccccttcgaggaccatgtaaagttagtgaacgaggtgaccgagttcgcaaaaacctgcgttgctgacgaatccgccgagaactgcgataagtctttgcatacactgtttggagataagctgtgcactgtggctacacttagggaaacttacggagaaatggcagactgctgcgcgaagcaggagcccgaacgcaatgagtgctttctgcaacacaaggacgataatcctaatctgccaagactggtgcggcctgaggtggatgttatgtgcacagcttttcacgataacgaggagacgttccttaagaaatacctttacgaaacgaccttagaaaaatgttgtgctgcagcagaccctcatgagtgctacgccaaggttttcgatgaatttaaacctctagtcgaggagccccagaacctaataaaacagaattgtgagttgttcgagcagttaggcgaatacaaattccaaaacgccttgctcgtgcggtacactaaaaaagtgccccaggtcagcaccccaacgctcgttgaggtttcaagaaatttaggcaaggttgggagcaagtgctgcaagcacccggaggcgaagcggatgccgtgtgccgaagactatctcagcgtggtcctcaatcaactctgcgtgttgcacgagaaaacccctgtgtctgaccgcgtgacaaagtgctgtacggagagtttggtgaatagaagaccctgcttttccgccctggaggttgatgagacctatgtgccaaaggaatttaacgccgagactttcacttttcacgccgacatctgcaccctgagtgaaaaggagcgacagataaagaagcagaccgcactggttgaactcgtgaagcacaaacccaaagctaccaaggagcagctgaaggctgttatggacgacttcgcagctttcgtggagaaatgctgcaaggctgatgacaaggagacttgtttcgccgaggagggaaaaaagttagtggctgcatctcaggcggctttagggctgtag

SEQ ID NO: 213953 - DNA, 1254 bp, synthetic construct
  misc_feature 1..1254: note = Description of Artificial Sequence: Synthetic coding sequence
  source 1..1254: mol_type = other DNA
atgaagtgggtgacatttatctcactgttattcctgtttagttccgcctactcacgtggcgtgtttaggagggatgcacacaagtccgaggtggcgcatcgcttcaaagacttaggggaggaaaattttaaggccttggctgttgcgcgactctcgcagcggttcccaaaagccgaattcgccgaggtgagtaaattggtgactgaccttactaaggtccatactgaatgttgccatggagatctcctcgagtgcgctgacgacagggcagacctggccaagtatatctgcgagaatcaggacagcataagcagcaaacttaaggagtgttgcgagaagcctcttcttgagaagtctcattgcatcgctgaagtggagaatgacgagatgcccgcagacctgccctccctcgccgctgacttcgttgagtccaaggacgtctgtaaaaattacgccgaggcaaaggacgtttttctcggcatgttcttgtatgagtacgcccgacgccacccggattactctgtggtgctgttgctgaggctagcaaaaacttacgaaacgaccttggaaaaatgctgcgccgcagccgatcctcacgaatgctatgccaaagtttttgacgagttcaaacctctggtagaggagccccaaaacctgatcaaacagaactgcgagctttttgagcagctgggcgagtataagttccaaaacgcactgctggttcgctataccaaaaaggtgccgcaggtaagcactcccactctggtagaagtttccaggaacctaggtaaggtgggatccaaatgctgtaagcatcctgaggctaagcgaatgccatgtgcggaggactatctgtccgtagtgcttaaccaactctgcgttctccacgagaagaccccagtctctgaccgtgtcacaaaatgttgtacagagagcttggtaaaccggagaccctgtttttcggcgctggaggttgatgaaacctatgtgcccaaagagtttaatgccgaaacctttacgtttcacgcggatatctgcacgctgtctgaaaaagagaggcaaatcaagaagcagacagctttggtcgagctggtcaagcacaaacctaaagcaaccaaagaacagttgaaagctgtcatggatgatttcgcagcattcgtggaaaagtgctgtaaggccgatgacaaagagacctgcttcgcagaagaaggtaaaaagctggtggctgcctcccaggctgctcttggactatag

SEQ ID NO: 213954 - DNA, 1857 bp, synthetic construct
  misc_feature 1..1857: note = Description of Artificial Sequence: Synthetic coding sequence
  source 1..1857: mol_type = other DNA
atgaagtgggttacttttatatcactgctatttctgttttcaagtgcctactcaaggggtgtgttccgcagggacgccctgtttctcttttttttcccctgcccagataagtccgaagtggcccatagattcaaggacctaggtgaagaaaacttcaaggccctcgtgctaatcgccttcgcacaatacctgcaacagtgcccattcgaggatcatgtgaaacttgttaacgaagtcaccgaatttgccaagacttgtgtggctgacgagagcgccgagaactgcgataaatccctgcacacactgttcggagacaaattatgtaccgtggccacactgcgagagacttacggtgagatggcagactgttgcgcaaagcaggagccagaacgtaacgaatgctttctgcaacacaaagatgacaatcctaacctaccgcgactggtccggccagaagtcgacgtaatgtgcactgcgtttcacgataacgaggaaacttttctgaaaaagtacttatatgaaattgctagacgccatccatatttttatgccccagaactgctgttttttgccaagaggtacaaggcggcattcaccgaatgttgtcaagcagcagacaaagcagcttgtctgctccctaaactggatgaactcagagatgagggcaaagcctcttctgccaagcagcgcttgaagtgcgcgtccctgcaaaaattcggcgaaagagcttttaaagcatgggctgtggctcggctttctcagagattccccaaagccgaatttgcagaagtgtctaagctcgtgaccgacctgaccaaagtgcacacagaatgctgccatggtgacctactggagtgcgccgatgatcgcgctgacctggcaaaatacatctgcgaaaaccaggactccattagctccaagctgaaagagtgctgtgagaaaccccttctagagaaaagtcattgtatcgcggaagtcgagaacgacgaaatgccagccgatctacccagtctggctgccgactttgtcgaatctaaagacgtctgcaaaaactacgcggaggccaaggacgtcttcttgggaatgttcctatacgagtatgccagaaggcacccagactactctgtggtgttgttactgagactcgcaaaaacctatgaaacgaccctagaaaaatgctgtgctgcggcagacccacacgagtgttacgcaaaagtatttgatgaatttaagcctcttgtcgaggagcctcaaaatctgatcaagcagaactgcgaattatttgaacaactgggcgagtataaattccagaacgcgcttcttgttaggtatacgaagaaagtgccccaggtgtcaactccgacactggtggaggttagcaggaacttgggcaaagttgggtccaagtgctgcaagcatccagaagctaagagaatgccctgcgcagaagattatctgagcgttgtgcttaatcagttgtgcgtcctgcatgaaaaaactcccgtgagtgacagagtgaccaagtgttgcactgagtccctggtgaataggaggccctgcttctctgcacttgaagttgatgagacttacgtgccaaaggagttcaatgcggagaccttcacttttcacgcagatatatgcaccttatccgagaaggagcggcaaataaagaaacagactgcattagtggagctcgtgaagcacaaacccaaagcaaccaaagaacaactcaaagccgttatggacgatttcgccgcatttgtagaaaagtgctgtaaggccgatgacaaggagacgtgctttgctgaggagggtaagaaactggtggcagcctcccaggccgctctgggcctttag

SEQ ID NO: 213955 - DNA, 1161 bp, synthetic construct
  misc_feature 1..1161: note = Description of Artificial Sequence: Synthetic coding sequence
  source 1..1161: mol_type = other DNA
atgtttgccgagatccagatccaggacaaggacaggatgggcaccgctgggaaggtaataaagtgcaaggcagcggtcctgtgggagcaaaagcaacccttctccattgaggaaatcgaggttgctccaccaaagaccaaagaagtccgcatcaagatcctggccacggggatctgccgtaccgacgaccatgtcattaagggcactatggtgagcaagttccctgtgatcgttggacacgaggcgaccggcatagtagagagtatcggggagggggtaactacagtgaagcccggtgataaggtgatacccttgttcctacctcagtgtagagagtgtaatgcctgtcggaatccagacggcaacctatgcattcgatctgacatcaccgggcgtggcgtcctggccgatggaaccactaggttcacatgtaaaggaaaacctgttcaccactttatgaacacctccaccttcacagaatataccgtggtggatgagagtagcgtagcaaagatcgacgacgcagcccctcctgaaaaggtgtgtctgattggctgcggcttcagcacaggctatggcgctgcggtaaagacaggaaaagtgaagcctggatctacatgcgtagtttttggccttgggggagtcggcctcagtgtgatcatgggctgcaaatccgccggagcttctcgaattatcgggatagacttgaataaggacaagtttgagaaggccatggctgtgggggctaccgagtgtatatcaccaaaggacagtaccaagcccatttccgaggttctttcagaaatgaccgggaacaatgtgggctacacttttgaagttatcggccatctggaaacgatgatcgacgcattggcttcctgtcacatgaactatgggacatctgttgtggtaggggtgcccccttccgctaagatgctgacctatgaccccatgttgctgtttaccggcagaacttggaagggttgcgtgttcggtggactgaagtcacgagacgatgttcctaaactcgttacggaattcctggccaaaaagttcgatctggaccagctgataacccacgtgctgcccttcaagaaaattagcgaagggttcgaattgctgaacagtggacagtcgattaggacggttctgaccttttag

SEQ ID NO: 213956 - DNA, 1128 bp, synthetic construct
  misc_feature 1..1128: note = Description of Artificial Sequence: Synthetic coding sequence
  source 1..1128: mol_type = other DNA
atgagtacagcaggcaaagtgattaaatgtaaagccgctgttctgtgggaagtaaaaaagcccttcagcattgaggatgtcgaagttgcccctccgaaggcttacgaagtgcgtataaaaatggtggcggtgggcatctgccataccgacgaccatgtagtgtccggaaacctcgtgacacccctgcctgtgattctgggccatgaagccgcaggaattgtcgagtccgtaggtgagggagtgactaccgtaaagcccggtgataaggttattccgctctttacaccgcagtgcgggaaatgtagggtgtgtaagaacccagaatccaactattgccttaaaaacgacctgggcaatcctcgcggtacattacaagatggtaccagacggttcacttgcaggggcaaaccaatccaccattttctgggcacctcaacctttagccagtacacagtcgtggacgagaacgccgtagctaagatcgatgctgctagcccgctggagaaagtctgtcttattggctgcggcttctccactggctacggatcagcagtcaatgtggctaaggtcacccccggaagtacatgcgcagttttcgggttaggtggtgtcggcctgtctgccgtgatgggctgtaaggctgctggggcagcgcgaatcatcgcagtggacatcaacaaagataagttcgccaaggcaaaggagctgggtgccaccgagtgcattaatccccaagattataaaaaacctatacaggaagtgctgaaggaaatgactgacggtggtgtggacttctcattcgaggtcatcgggagattggacaccatgatggcttcgctgttgtgctgccacgaggcatgcgggaccagcgtaatcgtcggggttccacccgcttcacagaatctgtcgattaatccaatgcttctcttgactggcagaacctggaagggcgctgtgtacgggggattcaagtccaaagagggaatacctaagctggtggctgattttatggctaagaagttttctctggacgctctgatcacccacgtgttgccatttgagaagattaatgaggggttcgatctgctccattctgggaagtcaattagaacggtgctcactttttag

SEQ ID NO: 213957 - DNA, 1008 bp, synthetic construct
  misc_feature 1..1008: note = Description of Artificial Sequence: Synthetic coding sequence
  source 1..1008: mol_type = other DNA
atggtggcagttggcatttgtcacacggacgaccatgtggtatctggaaatctggtgactccgcttcccgttatacttggccacgaggccgcaggtatagtcgagtccgtgggcgaaggagtcacaacagtgaagcctggcgataaggtcatccctctatttaccccgcaatgcgggaagtgcagggtctgtaagaatccggaatcaaattactgtctgaagaatgatctggggaatcccaggggaactcttcaagacggaacccgcagattcacttgcagaggcaagcccattcatcactttcttggcacatccaccttctctcagtatacagtggtggatgagaatgctgtcgcaaagatcgacgccgcatccccgctcgagaaagtgtgcctgattggatgcggatttagtaccggatacggtagtgccgtgaatgtggctaaggtgacaccaggcagtacatgcgcagtgtttggtctggggggagtcggacttagtgctgtgatggggtgcaaggcagccggtgccgctcggatcatcgcggtggacattaacaaggataagtttgcaaaggcaaaagagctcggcgcaacagagtgcattaatcctcaggattacaaaaagccgatacaggaagtcctgaaggagatgacagacggaggtgtcgatttctcctttgaggtgatcgggagactggataccatgatggcatccctgttatgttgccacgaagcttgcggaacaagcgtcatcgtgggcgtgcctcccgcaagccagaaccttagtataaacccaatgttactgctgactggaaggacgtggaagggcgctgtttatggcggtttcaagtctaaagaggggatccccaaacttgtggccgactttatggctaagaaattctctctggacgcgctaataacccatgtgctgccttttgagaaaataaacgaaggatttgatctgctgcattctggtaagagcattcgcacagttctgacattctag

SEQ ID NO: 213958 - DNA, 1089 bp, synthetic construct
  misc_feature 1..1089: note = Description of Artificial Sequence: Synthetic coding sequence
  source 1..1089: mol_type = other DNA
atgagcactgctggaaaggtcatcaaatgcaaagccgctgtcctgtgggaagtgaaaaagcccttctctattgaggacgtcgaagtggcaccccctaaggcctacgaagttcgaattaagatggtcgctgtgggaatctgtcacacggacgatcatgttgtgtcagggaatctggttactccactgcccgttattcttggccatgaggccgctggcattgttgagagcgtcggagaaggcgtgacgactgtgaaacctggggataaagtcattcccctgttcactcctcagtgcggtaagtgtcgggtttgcaagaacccagaatcaaactactgcctgaagaacgatctcggcaatcccagaggaaagccgattcatcattttcttggcacatcgactttctcacaatatacagtggtggacgagaacgcagtggccaagattgacgccgcatctcctctagagaaagtgtgcctaatcggatgtgggttcagcacaggttatggatccgccgtgaatgttgccaaagtgacacctggcagtacttgcgcagtttttgggttaggcggagtgggtcttagcgcagtgatgggttgtaaagctgcaggagctgcgaggatcattgctgtggatataaataaggacaagttcgcgaaagctaaggagctgggggctacagaatgtattaacccacaagactataaaaaacccattcaggaagtactgaaggagatgacagacggaggggtggattttagctttgaggtgatagggaggctggacactatgatggcatctctactttgttgccatgaggcatgtgggacctctgttatcgttggcgtgcccccagcctctcagaacctgagcatcaatcctatgctgttgctgacaggtaggacctggaaaggagcggtgtatgggggttttaagagtaaggagggcatccccaaacttgttgcagatttcatggcaaaaaagttttcacttgacgcactgattacgcacgtactcccgtttgaaaagatcaatgaagggttcgacctgctgcattctggcaaatctattaggacggtcctgaccttctag

SEQ ID NO: 213959 - DNA, 1143 bp, synthetic construct
  misc_feature 1..1143: note = Description of Artificial Sequence: Synthetic coding sequence
  source 1..1143: mol_type = other DNA
atgggcaccaaaggcaaggtcattaagtgcaaggctgccatcgcctgggaagccggaaagccactgtgcatcgaagaggtggaggtggcaccacctaaggcccatgaagtccggattcagatcattgctaccagcctatgtcacacagacgcgactgtcattgactccaaattcgagggtcttgctttccctgtgatcgtgggccacgaggccgctggtattgtcgagagcattggcccaggggtcacgaacgtgaaaccaggagataaggtgattccattatacgcccctctgtgcagaaaatgtaagttctgtctgagccctctcactaacctctgcggcaagattagcaacttaaagtccccggcatctgatcagcagctcatggaagataaaacatccaggttcacatgtaagggtaaacctgtgtaccacttttttggtacaagcactttcagccagtatactgtggtaagtgatattaacctggcaaaaattgatgatgatgcaaatttggagagggtctgcctgctagggtgtggcttttccaccggatatggtgcagccatcaataacgccaaagtcacccccggatcaacttgtgctgtctttgggctcgggggtgtgggcctcagtgcagttatgggctgtaaagcagccggtgcctctcgaatcattgggatagacattaattccgagaagtttgtaaaggctaaagccctgggagctactgattgcctcaatccaagggaccttcacaaaccaattcaggaggtcatcatcgagctcaccaaggggggagtcgattttgccctggattgcgcaggcggatcggaaactatgaaagcggctcttgattgcacgactgccggatggggctcttgtacattcattggggtggccgctgggtccaagggcctgacaattttccccgaagaattgattataggcagaacaatcaatggcacattcttcggcggttggaaaagcgtagactcaattcccaagctagtcaccgactacaagaataagaagtttaacctcgacgcactggtgactcacactttgccatttgacaagatctccgaagccttcgacctgatgaatcaaggtaagtccgttcgcacaattctaattttctag

SEQ ID NO: 213960 - DNA, 1200 bp, synthetic construct
  misc_feature 1..1200: note = Description of Artificial Sequence: Synthetic coding sequence
  source 1..1200: mol_type = other DNA
atgcttgtcaggggccctcacttcgaactgcagagatgcaagacccatctgttctcttctaattatctcacacaggtcattaaatgcaaggccgcaattgcatgggaggccggaaagcctctgtgtattgaagaggtagaggtagcgcctcctaaggcacatgaggtgcggatacagattatcgcaaccagcctgtgccatactgacgcgaccgtgatcgattccaagttcgagggactggccttcccagtaatagtgggccacgaggcggctggaatcgttgaatctataggtcctggcgtcacaaatgtgaaaccaggggacaaggtgataccactttacgctcccttgtgccgtaaatgcaaattctgcctgagccccctcactaatctgtgtggtaagatcagcaatttgaaatctcccgcatccgaccagcagctgatggaggataagaccagtcgctttacctgcaaagggaagcccgtgtaccatttcttcgggacaagcactttctcccagtacaccgtcgtgtcagatatcaacttagccaaaatcgatgacgacgctaatctcgaacgtgtgtgcctactgggttgtggattcagcactggctatggggcagcaatcaacaatgcgaaggtgacccctgggagtacatgtgcagtcttcggacttggcggtgtcgggctgtccgccgtgatgggttgcaaagccgcaggtgcgagcagaataatcggtatcgatattaacagcgaaaaattcgttaaagcgaaggctctcggagccactgactgtttaaatccacgtgacctgcataagcccatccaggaggttattatcgagctgaccaagggcggagttgattttgccctggattgtgcaggcggttctgagacaatgaaggccgctctcgactgcactaccgctggctggggtagctgtacttttatcggagtggctgctggcagtaaaggccttactatattcccagaagaactcattattggcaggacaattaatgggactttctttgggggatggaagtcggtagacagcattcccaagttggtgactgactacaagaataaaaagtttaaccttgacgccctggtgacccacaccctgccttttgataagatctccgaggccttcgatcttatgaaccagggaaagagcgtccggacgattttgatcttctag

SEQ ID NO: 213961 - DNA, 1125 bp, synthetic construct
  misc_feature 1..1125: note = Description of Artificial Sequence: Synthetic coding sequence
  source 1..1125: mol_type = other DNA
atggctaatgaggtgatcaagtgcaaggccgctgttgcatgggaggctggcaaacctctgtctattgaggagatcgaggtggcaccccctaaggcacacgaggtgcggatcaagatcatcgccactgctgtgtgtcatacagatgcatatacactgtccggagccgaccccgagggttgctttccagtaatcctcggacacgagggggcaggcatcgtcgagtctgtgggcgagggggtgaccaaattaaaggcgggagacaccgtaattccactgtacatcccacagtgtggcgaatgcaagttttgccttaatcccaaaactaatctgtgccaaaaaatccgtgtgactcagggaaaagggctcatgccagacggcacctcccggtttacatgcaagggcaagactatccttcactatatgggcacatccacattttctgagtacactgttgtggcagatatttctgttgcaaagatcgatcctctggccccactagacaaggtttgtctgctgggatgtggtatcagtaccggctacggagctgcggtgaacacggccaagttagaaccaggatccgtttgtgccgtttttggcctagggggtgtcgggctggccgtgatcatgggctgtaaggtcgcaggggctagccgcataatcggtgtggacatcaataaagacaaatttgccagagctaaagaattcggggctaccgagtgcatcaaccctcaggacttttctaaacccatccaggaagtgctcattgagatgacagatggtggcgttgactacagttttgaatgtatcggcaatgtcaaggtcatgcgtgccgctctggaagcatgccacaagggatggggcgttagtgtggtggtgggagtcgctgcctcaggggaagaaatcgcgacgcggcctttccaattagtcacaggtcgcacatggaaggggacggccttcggcggatggaagtcggtggaatctgtgccaaaacttgtgtccgaatatatgtctaagaagattaaagtggacgaattcgtgacccacaatctttctttcgacgaaatcaacaaggcctttgaattgatgcacagcggtaagagcattcggactgttgtgaagatctag

SEQ ID NO: 213962 - DNA, 1107 bp, synthetic construct
  misc_feature 1..1107: note = Description of Artificial Sequence: Synthetic coding sequence
  source 1..1107: mol_type = other DNA
atgtgtaccaccgggcaggttattcggtgtaaagccgctatcctttggaagcctggcgcacctttctcaattgaggaggttgaggttgcccctccgaaggccaaagaggttagaatcaaggtggttgctacgggattgtgcgggacagaaatgaaggtcctgggctccaaacatttggacctactctatccaactatcctggggcacgagggcgcaggcattgtcgagtctattggagaaggggtttctaccgtcaagcccggagataaggtcatcacactgtttctgccgcagtgcggggaatgcaccagctgcttaaactcagagggaaatttctgcatccagttcaagcagtctaagacacaacttatgagtgatggtacctcccgatttacatgtaaggggaaatccatataccacttcgggaacacgagcaccttctgcgaatatacagtcattaaggagatttctgttgccaagatcgacgctgtcgcaccgctggaaaaggtgtgtctcatctcctgtggattttctaccggctttggcgctgccatcaataccgcaaaggtgacccccggttctacctgcgccgtgtttggtcttggcggtgtaggcttgagtgtcgtcatgggatgcaaagctgccggtgcagcgaggattatcggagtggatgtgaacaaagagaagtttaagaaagcccaggaattgggagcgactgagtgcctcaaccctcaggacctgaagaagcctatccaagaggtgctgtttgatatgacggatgccggaatcgatttctgcttcgaggctataggcaatttggacgtcctggcagccgcactcgcgagttgcaacgaaagctacggagtttgtgtagtagtgggtgtgctccctgcctctgtacagctcaaaataagtggacagctgtttttctcgggaagaagccttaagggctcagtcttcggagggtggaaaagcaggcagcacatcccgaagttggttgctgactatatggcagaaaagctgaacctggaccccctgataactcacacattaaacctggataagatcaacgaagcagtggaacttatgaaaacaggcaaatggtag

SEQ ID NO: 213963 - DNA, 1128 bp, synthetic construct
  misc_feature 1..1128: note = Description of Artificial Sequence: Synthetic coding sequence
  source 1..1128: mol_type = other DNA
atgtgcaccaccggccaggtgattcgttgcaaagcagctatcttatggaagccgggagcaccttttagcattgaggaggtggaggtcgcgcctcccaaggctaaagaagttaggatcaaagtggtggcgactgggctctgcggcactgagatgaaggtgcttggttccaagcatctggatctgctttaccctaccatcctgggacatgaaggtgctgggatagtggagagtattggggagggcgtctcgacggttaagcccggagataaagtcatcacactcttccttcctcaatgcggagaatgcacttcttgccttaactccgaaggtaatttctgcatccaattcaagcagtccaaaacccagctgatgagtgacggcacctccagattcacctgtaagggcaaatctatatatcatttcggcaacacctctaccttctgcgagtatacagtgattaaagaaatcagcgtcgctaaaatcgacgccgttgcccctttagaaaaggtatgccttatatcgtgcggcttttctactggtttcggcgctgctattaataccgccaaggtgacacctggcagcacatgcgcagtgttcgggctcggcggagtgggcctcagcgttgttatggggtgcaaggcggcaggagccgcacgtatcatcggagtcgacgtgaataaggagaagttcaagaaggcccaggagctgggcgctacggaatgtctgaatcctcaggacttgaaaaagcctatacaggaagtcctttttgatatgactgatgctggaattgacttctgtttcgaggcaattggcaacctcgatgttttggcggcagccttggcttcctgtaatgaatcttatggagtttgcgtggtggtgggggtcctcccagcttccgttcagctgaaaatcagcgggcagctctttttctctgggaggtcgctcaagggatccgtgttcggtgggtggaaatctcgacagcatatcccaaaactcgtcgcagattatatggccgagaagctaaaccttgacccactgattacacacacgttaaacttggataagatcaatgaggccgtagaattaatgaaaactggcaagtgcatccgctgtattttgttgctgtag

SEQ ID NO: 213964 - DNA, 501 bp, synthetic construct
  misc_feature 1..501: note = Description of Artificial Sequence: Synthetic coding sequence
  source 1..501: mol_type = other DNA
atgggctgtaaggcagctggagccgctcgtattataggagttgacgtgaataaagagaagtttaaaaaggcgcaagagttgggcgctaccgagtgtctgaacccccaggacctgaaaaaaccaatccaggaagtactgtttgatatgaccgacgcagggatcgatttctgtttcgaagcgattggaaatttggatgtcctggcagccgctttggcctcctgtaatgagagttacggagtgtgcgttgtggtcggtgtattgcctgccagcgtccagctcaagatatcagggcagctgttctttagcggtcgcagcctcaaggggagtgtcttcggaggctggaaaagtagacagcacatccctaagctggttgcagactacatggctgagaaactcaacttagacccactgatcacacacaccctcaatctggataagattaatgaagctgtagagctgatgaagactggaaaatgcatacgatgcattcttctactatag

SEQ ID NO: 213965 - DNA, 1068 bp, synthetic construct
  misc_feature 1..1068: note = Description of Artificial Sequence: Synthetic coding sequence
  source 1..1068: mol_type = other DNA
atggaacccgagaaacagactgaaatctcagagttcttccttcagggtttatccgagaagcctgaacaccagactctcctcttcactatgtttcttagtacctacctcgtgacaatcataggcaatgcattaatcattctggctattataactgattctcacctgcacacccccatgtatttctttcttttcaaccttagtctggtcgacacattgctgtcctcaaccaccgtcccgaagatgttggccaacatccaggctcaatcccgggcaatcccgtttgtcgggtgcctgactcagatgtatgcatttcacttgttcggcacgatggattcttttctactggctgtcatggccatcgacagatttgtggccatagttcatccccaacggtacctcgtgcttatgtgctcacccgtttgcggcctgttgctgggagcctcctggatgatcacaaatctgcaatccttgatccatacttgcctgatggcccagctgacattttgtgccggttcagagattagccacttcttttgcgacctcatgcctctgcttaagctgagcggctctgacacacacacgaatgagctggtgatcttcgccttcggcatcgtcgtaggcacatcacctttcagttgcatattattgtcttatatacgcatattttggaccgtgttcaagatcccatctaccagaggaaagtggaaggccttctcaacatgcggcctgcatctgaccgtggtgtccctcagctacgggaccatctttgcagtgtatctccaaccgacttctccatcatccagccagaaggataaagcagcagccttaatgtgtggggtttttattcccatgcttaatccattcatttattccattcggaataaagacatgaaagccgctctggggaagctcataggtaaggttgctgttccctgtcctcgcccagagcagctgctagatgtttatcatgtcccaggctcactgttagctgctcgcgacacggaaatgcatcctatcccctaccccggaggggtgcaatcccttgcgggaaatcgggacatggaatag

SEQ ID NO: 213966 - DNA, 1125 bp, synthetic construct
  misc_feature 1..1125: note = Description of Artificial Sequence: Synthetic coding sequence
  source 1..1125: mol_type = other DNA
atgggcaccgcaggcaaggtaattaaatgcaaggccgctgtgttgtgggaacaaaaacagcccttttccatagaggaaattgaagtggcacctccaaagaccaaagaagtgcggattaaaatcctggctaccggaatttgccgcaccgatgaccacgttattaagggtaccatggtttcaaagtttccggtcattgtgggccatgaagccaccggcatagtggagagtatcggagaaggagtgacgacagtaaaacctggcgataaagtgatcccactgttcttacctcagtgtagagagtgcaatgcctgtcgtaacccagacgggaacctgtgtatcaggagcgacatcaccggaaggggagtgctggcggatggcacaactagattcacctgcaagggtaagccagtgcaccatttcatgaacactagcaccttcacagagtacactgtggtcgacgaatcgagtgtggccaagatcgacgatgcagctccacctgagaaggtctgcctgattgggtgtggcttctctaccggatatggggctgccgtgaaaaccggaaaggttaagcctggatctacttgcgtagttttcgggcttggtggcgtggggctgagcgttattatgggatgtaagtcggccggtgcctctcgtattataggaatagatctgaataaggacaagtttgagaaggctatggcagttggcgctacggagtgcatcagccctaaggattcaaccaagcccatttctgaggtcctgtcggaaatgacaggcaataacgtgggatacacctttgaggtaattggacacctcgagacaatgatagatgccctcgccagctgtcacatgaattacggcacttcggtggttgtgggggtccccccatccgcgaagatgctcacatatgaccctatgctgttgttcactggcagaacttggaagggctgtgtgttcgggggtctaaagagcagagatgatgtccctaaactggtaaccgagttcctggcgaagaaatttgatctagaccaacttatcactcacgtactgcccttcaagaagatctccgaaggctttgagctattaaacagcgggcagtccattcgcaccgtactaacattttag

SEQ ID NO: 213967 - DNA, 1185 bp, synthetic construct
  misc_feature 1..1185: note = Description of Artificial Sequence: Synthetic coding sequence
  source 1..1185: mol_type = other DNA
atgaaatgcttagtgagccgacacacggtacgagaaacgctcgatatggtgtttcagaggatgtcggtcgaagcgggagtgatcaaatgtaaggccgctgtcctttgggaacaaaagcaacccttttcgattgaggagattgaggtagcacctcctaagacaaaggaggtgcgaataaaaatcctggctactggcatttgccgcaccgatgaccacgtgatcaaaggcacgatggtgtcgaagtttccagttatcgtggggcatgaggcaaccggcatcgtggagagtattggggagggcgtcacaacagtgaaaccgggtgacaaggtgatcccactattcctgccacagtgtcgtgagtgcaacgcctgccgaaacccagacggcaatctgtgtattagaagtgacatcaccggccgaggggttctggccgacggcactaccaggtttacatgtaaggggaaaccagtccaccacttcatgaatacctcaacttttaccgaatacactgtggtggatgaatcatccgtcgctaaaatcgacgacgcggcaccacctgaaaaggtgtgtcttattggctgtggcttttctaccggctacggcgcagcggtcaagaccgggaaagtgaaacctggaagcacatgcgttgtatttgggctcgggggagttggattatctgtgatcatgggatgcaagtcagcgggtgccagcagaatcattgggatagatttgaataaagataagtttgaaaaagcaatggcagtgggagctactgaatgcattagtcccaaggattccactaaacccatttcagaagtgctcagtgaaatgacaggcaataatgtgggctacaccttcgaggtaatcggacacctggagactatgatagacgccctcgcatcgtgtcatatgaactacgggaccagcgtggttgtgggagtacctccgagcgccaagatgctcacttatgatccgatgctcctcttcaccggacgcacctggaagggctgcgtttttgggggattgaaatccagagacgatgtgcccaagctcgtaactgaattcctggctaagaagttcgacttagaccagttaattacgcacgtcctgccattcaaaaagattagcgaaggcttcgagttgttgaacagcggccagagtatccgcaccgtcttgactttctag

SEQ ID NO: 213968 - DNA, 954 bp, synthetic construct
  misc_feature 1..954: note = Description of Artificial Sequence: Synthetic coding sequence
  source 1..954: mol_type = other DNA
atggtgagtaagttcccagtgatagtggggcacgaagcaaccggtatcgtggaatcaataggcgagggagtgacaacagtgaagcctggggataaagtgatacctctgtttctgcctcaatgtcgggaatgcaacgcatgtcggaatccagatgggaacttgtgcatccgcagtgatataacggggaggggtgtgctggctgacggaactactcggtttacttgcaagggaaagcctgtgcatcacttcatgaataccagtacatttacagaatacaccgtagtcgacgaatctagtgtggctaagattgacgatgcagcgcctcccgagaaggtgtgtttaattggctgtggtttctccaccgggtacggcgcagctgtaaagactggcaaggtgaaacccggatctacctgcgttgtgttcggcctgggcggagtgggactgtcagtaataatgggatgtaagagcgcaggcgcttcccgcatcattggcatcgaccttaataaagataagttcgagaaggcaatggccgtgggcgctaccgagtgcatctctcctaaagattccactaaacctatttctgaagttctgagcgagatgacaggaaacaacgtaggttatacttttgaggtaatcggacatctggaaactatgatagatgcactcgcctcatgtcatatgaattatggcacctccgtagttgtgggggtgcctcctagcgcaaagatgctgacgtatgacccgatgctccttttcacaggacgaacatggaaaggatgcgtgtttggcggtctgaagtcgcgggatgacgtccccaaactcgtgaccgaattcttagctaagaagtttgatctcgaccaactcataacacacgtgcttcccttcaagaaaatttccgagggcttcgaattactgaactctgggcagtcaatccggacagtgctgaccttctag

SEQ ID NO: 213969 - DNA, 912 bp, synthetic construct
  misc_feature 1..912: note = Description of Artificial Sequence: Synthetic coding sequence
  source 1..912: mol_type = other DNA
atggccgctgcagctagagctcgcgtggcctacttgctcaggcagctgcagcgagccgcttgccaatgtccgacgcattctcacacctacagtcaggcgcctgggctgtccccctctggtaagaccacagactacgctttcgaaatggccgtcagcaacatcaggtacggtgcggcagtcactaaggaggtaggcatggacctcaagaacatgggcgctaagaatgtgtgtcttatgaccgacaagaacctgtccaaactacctccggttcaggttgctatggactctttagtgaagaatggcattcctttcacagtctacgacaacgtgagggtggaacccactgatagcagcttcatggaagcaattgagttcgcgcagaagggagcttttgacgcctatgttgcagtggggggtgggtcaacaatggacacctgcaaggccgcaaatctgtatgcttcaagtccccacagcgacttcctggactacgtcagcgcccctatcggaaagggaaaaccagttagtgttcctctcaagcccctaattgccgtccccaccactagcggcactggaagcgagacaactggagtcgcaatattcgattatgagcatctgaaggtgaaaatcggtataactagccgcgcaatcaaacccaccctggggctgatcgaccccttacacactctccacatgccagcacgagttgtggcaaattccgggttcgatgtgctatgtcacgctctcgaatcttataccacactaccttaccatcttcggtctccttgcccctccaaccctatcacccgaccagcataccaaggcagtaacccaatcagcgatatatgggccattcacgcactcaggatagtcgccaaatacctgaagagagccgtgaacagtaccgacaaatag

SEQ ID NO: 213970 - DNA, 1404 bp, synthetic construct
  misc_feature 1..1404: note = Description of Artificial Sequence: Synthetic coding sequence
  source 1..1404: mol_type = other DNA
atggcggctgcagctcgcgctcgggtagcctatctgttgcggcagctccagcgcgcagcatgtcagtgccctactcattcccatacttacagccaggcccctggcctatcaccgtccggcaaaaccactgactatgctttcgagatggcagtctctaatatccgatatggcgctgctgtcaccaaagaagttggaatggacctgaaaaatatgggagcgaagaatgtgtgcctcatgaccgataaaaatctgagcaagttgccccctgtccaagttgctatggattcattagtcaagaacggcatcccattcaccgtctacgataatgtgagggtcgagcctaccgattcaagctttatggaggcaatagaattcgcccagaagggagccttcgatgcttatgtggccgtgggcggaggcagtacaatggacacttgtaaggccgcaaatctgtatgcctcttccccccatagcgatttcctggactacgtctcagcgccaatcggcaaagggaaaccagtatctgttcctcttaaaccacttattgccgttcccacaacaagcggaactggttcagaaacgacgggtgtggctattttcgactatgagcacctgaaagtgaagatagggatcacaagcagagcaataaagcccaccctgggactgatagatcctctccacactttacatatgcctgcacgggtagttgctaacagtggatttgatgttttgtgtcacgcactggagtcttataccacactgccataccacttacgatcaccatgtcccagtaatcctataacgagacccgcttaccagggatccaaccccataagcgatatttgggccattcacgctctccgaatcgtggccaaatacctgaaacgagctgtcagaaaccccgatgacctggaggctaggtctcatatgcatctggccagtgctttcgccggaatcggtttcggaaatgcaggagtgcatttgtgccatggcatgtcatatcccatcagcggattagtgaagatgtataaagccaaggattacaacgtcgatcacccgctggtcccacacggtttatcggtggtgctcacaagcccggcagttttcacttttactgctcagatgttcccagagcgccatttagaaatggccgagatcctcggggctgacacgaggaccgccagaatccaggatgctggattggttctggcagacactctgaggaagttcctgttcgacctcgacgtggacgacggcttggctgccgtgggatacagcaaagcggatattcctgctcttgttaaagggaccttgcctcaggagagagtaacaaagctcgcaccatgcccacaatctgaggaagacctggccgcattgtttgaggcgtccatgaagctgtattag

SEQ ID NO: 213971 - DNA, 2406 bp, synthetic construct
  misc_feature 1..2406: note = Description of Artificial Sequence: Synthetic coding sequence
  source 1..2406: mol_type = other DNA
atgaaaatcgctgttatcggccagtccctgtttggacaagaggtctactgtcacctgcgtaaggaaggacatgaggtggtgggcgtttttactgtgcccgacaaggacggcaaggccgatccactgggcttggaagccgagaaagacggagtgccagtatttaagtactctcgctggagagctaaaggccaagctctaccggacgttgtagccaagtatcaagctctcggggcagagctgaacgttctcccgttctgttctcagtttatccctatggagattatctccgcccctcgccacgggtctattatctatcatccaagcctgttacctagacacaggggagcctctgcaatccataactggatccgcggaaatgacaaggttcctggggcatggaccgaggcatgtgagcagaagttgacattctttaactcaactttgaatacctctggtttggtcccggaaggggacgccctcccaatccccggagctcaccgacctggggtagtcacaaaagctggcttaatcctatttgggaacgatgacaagatgctgctggtaaagaacatacagttagaggacggcaaaatgatcctggcctcgaattttttcaaaggagcagcctcatctgtgttggaattgactgaggccgagctcgtgaccgccgaggcagtgaggagcgtttggcaacgcatcctgcctaaggtgctcgaggtggaggatagcaccgacttcttcaaaagcggggctgcatcagtcgacgttgtccgacttgtggaagaggtgaaagagttgtgcgacgggcttgaactggagaacgaggacgtctacatggcctccacatttggagactttattcaattactcgttcggaagctccgcggtgacgatgaggaaggggagtgtagcatagactacgtggagatggctgtcaataagagaaccgttagaatgccccatcagctgtttattgggggagagttcgtagatgctgaaggcgcaaaaaccagcgagaccatcaatccgaccgacggttccgtgatatgtcaggtcagcttggctcaggtaacagacgtcgacaaggccgtagctgctgctaaggatgccttcgagaacgggagatggggaaagatcagcgccagagatcgcggtcgccttatgtacagactcgccgacctgatggagcagcaccaggaagagttggctaccattgaagctcttgatgccggtgccgtgtacacattagcgctgaagacacatgtcggcatgagcatccagacattccgctacttcgccggttggtgtgacaagatccagggttctaccatacccattaatcaggcccgtcccaatcgtaacctgacattaaccaggaaagagccagtcggcgtgtgtggaatcattataccatggaactatccattaatgatgttgtcctggaagactgctgcttgtctggcggcaggcaacaccgtggtgatcaaaccagctcaggtgactcccctgaccgcactgaaattcgctgaactaactttaaaggcaggcattcccaagggtgtggtcaatgtcctgccagggagtgggtcgctcgttggacaaaggctgtcagaccatcctgatgtgaggaagattggtttcacaggctccactgaggtcggtaagcacattatgaaatcttgtgccataagcaacgtcaagaaggtgagtcttgagttgggcggaaagtccccccttattatctttgcggactgtgacctcaacaaggcggtacagatgggcatgagctcagtgttttttaataaaggggagaattgtattgccgcaggacggctgttcgtggaagacagcattcatgatgagttcgtccggagagtggtcgaggaagtgaggaaaatgaaggtgggcaatccattggacagagacactgatcacggacctcagaatcatcacgcacatttagtaaagctgatggagtactgtcagcacggggtcaaagagggcgctaccttggtttgcggtggaaaccaggtgcccaggccaggatttttcttcgagcccacggtcttcacagacgttgaggaccatatgtttatcgcgaaagaggagtcattcggtcctgtgatgatcataagcagatttgccgacggagacctggacgcagttctttcccgggctaacgccaccgaattcgggctcgcctcaggagtctttactcgcgacatcaataaagccctgtatgtgtcagacaaactgcaggccggaacagtctttgtgaacacgtacaacaagacagacgttgcagcaccgttcggtgggttcaaacaatccggttttgggaaggacctcggagaagctgcactgaacgagtatctccgggttaagactgtgacctttgagtattag

SEQ ID NO: 213972 - DNA, 1506 bp, synthetic construct
  misc_feature 1..1506: note = Description of Artificial Sequence: Synthetic coding sequence
  source 1..1506: mol_type = other DNA
atgtcgagcagtggaactcctgatctgccagtcttactcaccgatttgaagatccagtacacaaagatttttatcaacaacgaatggcacgactcagtcagcggtaagaaattccctgtgttcaatcccgcaactgaagaggagctgtgccaggtagaggagggtgataaggaggatgtcgacaaggcggtgaaggcagcaagacaagcatttcagattggttctccctggagaactatggatgcttccgagcggggacgactgttatataaattagcagacttgatagaaagagaccgtttgctgctggccaccatggagagcatgaacggaggtaaactgtattcaaacgcctatctcaacgacctcgcaggatgcattaaaaccctcaggtactgcgctggatgggccgacaagatccagggacggaccattcccattgacggcaacttcttcacatatactaggcacgagccaataggcgtatgtgggcagattattccatggaattttcctctagttatgctgatttggaaaattggaccagctctcagctgtggaaacaccgtggtcgtcaagccagccgaacagacgcctcttaccgccttacacgtggccagcttgatcaaagaggccggatttccacccggagtcgtgaacattgttccagggtacggacctactgcaggagccgcaattagcagccacatggatattgataaggtggccttcacggggagtactgaggtcggcaaactgattaaagaagcggctggaaaatccaatctcaagcgtgtcacactggagctcgggggtaagtctccatgtatagtgctggccgatgctgacctcgacaacgccgtggagttcgctcatcacggcgtattttatcatcagggtcagtgttgtatcgctgcctcccgtatttttgtggaggagagcatttacgacgaatttgttcggaggagcgtggaacgtgccaagaagtacattttaggtaatccgctcacaccgggagtcacccagggaccacagatcgataaggagcagtatgacaagatcctcgacctgatcgagtctggaaagaaagagggtgcaaagctagaatgcggcggaggtccatggggaaacaagggatattttgtgcagccgacagttttcagcaatgtgactgacgaaatgagaatcgctaaagaggagatcttcggcccagtgcagcagatcatgaagttcaagtccctggatgacgtgatcaaaagggctaataacacgttctatgggctctcagcgggtgtctttaccaaagatattgataaggctatcaccattagctccgccctccaagccggaacggtctgggtaaactgttatggcgtggtgagtgcacaatgtcccttcggtggcttcaaaatgagtggaaacggcagggagctgggggaatacggctttcacgagtacaccgaggtcaaaactgtcacggtaaagataagccagaagaatagttag

SEQ ID NO: 213973 - DNA, 693 bp, synthetic construct
  misc_feature 1..693: note = Description of Artificial Sequence: Synthetic coding sequence
  source 1..693: mol_type = other DNA
atgagtagctccggcacccctgacctgccagtcctcctgaccgacttgaaaatacagtacacaaaaatattcattaacaacgaatggcatgacagtgtcagcgggaaaaagttcccggtgttcaaccctgcaaccgaagaggaactctgtcaggtggaggaaggggataaggaggacgtcgacaaggctgtaaaggctgcaaggcaggcttttcaaatcgggagtccctggagaaccatggacgcaagcgagcgagggaggctactttacaagctggcggatctgatcgagagagaccggttgcttctggctaccatggaaagcatgaacggcggtaagctgtattctaacgcatacttgaacgatctcgcagggtgtattaaaactctgagatattgtgctggctgggcagataaaatccaggggagaacaattcccatagatggcaatttttttacctacacgcgccacgagcccatcggggtttgcggtcagatcatcccttggaatttcccactagtcatgctgatctggaagatcggacccgcactgagctgtggcaatactgtggttgtaaagccagcagagcagacacccctgacggcccttcacgtcgccagcctgattaaggaagcagggtttccacctggtgtcgttaacatagttcctgggtatggagcttcagtggtctag

SEQ ID NO: 213974 - DNA, 717 bp, synthetic construct
  misc_feature 1..717: note = Description of Artificial Sequence: Synthetic coding sequence
  source 1..717: mol_type = other DNA
atgtcatcctccggcacccccgatctccccgtgctgctcaccgatctcaagatccagtacaccaagattttcattaacaacgaatggcacgatagtgtgagcggcaagaaattccctgtgtttaaccccgctaccgaggaagagctgtgccaggtggaggaaggtgataaggaggatgtggataaggcggtgaaggcagctcgacaagcatttcagattggatctccttggcgaaccatggatgccagcgagcggggacggctactctataagctggctgaccttatcgagcgagacagactgttgctagctaccatggaaagcatgaatgggggaaagttgtactccaatgcttatttgaatgacctcgcgggatgcattaaaactctgaggtactgcgccggttgggcagataaaattcagggcagaaccatccctatagacggcaatttctttacatatacgcgacacgagcccattggggtctgcggacaaatcatcccctggaacttcccactggtgatgctgatctggaagatcggtcccgcactttcctgtggaaacacagtagtggtgaagcccgctgagcagactcccctgacagcattgcatgtggcttcacttattaaagaggccggtttcccacctggagttgtgaacatcgtgcccggttacgggccaacggccggagccgcaatcagctcccacatggattag

SEQ ID NO: 213975 - DNA, 990 bp, synthetic construct
  misc_feature 1..990: note = Description of Artificial Sequence: Synthetic coding sequence
  source 1..990: mol_type = other DNA
attgccgaaccagtgacctgcgtgcctggcgctgaaagcgagatgtctagctcaggtacccccgacctgcctgtgctgctcactgatcttaagatccaatatactaagatctttattaataacgagtggcatgatagcgtgtctggaaagaagttccctgtgttcaaccctgccactgaagaggaactctgtcaagtagaagagggcgataaagaggacgtggataaggcggtaaaggctgcacggcaggcctttcagatcggtagcccgtggcgcactatggacgcatccgagcgagggcgactcctgtataaactcgcagatctcattgagcgcgaccgcctcttgctggccactatggagagcatgaacggaggaaagctgtactcaaatgcatatcttaatgacctcgcagggtgtatcaagacacttagatactgcgctggatgggctgataaaattcagggccgtacgattcctatagacgggaatttttttacctatacccgccacgagcctattggggtgtgtggacagatcatcccctggaattttcctttggttatgctgatctggaagataggaccagcattgagctgtggtaacacagtcgtcgttaagcctgctgagcaaacgcccctgaccgctttacatgtggcttccctcattaaagaggcagggttccccccaggagttgttaatattgtcccaggctacggacctactgctggggcagccatatcttcgcatatggatatagataaagtggcttttacaggcagtaccgaggtcggtaagctgattaaggaagctgcaggaaagagcaacctgaagcgcgtgacacttgagctcggaggaaagtctccgtgtatcgtgctggcagatgcagacctagataacgccgtggagtttgcacatcatggcgtgttctaccaccaggggcagtgttgtatagctgcaagccgattctgcggcaggataaatttgtag

SEQ ID NO: 213976 - DNA, 612 bp, synthetic construct
  misc_feature 1..612: note = Description of Artificial Sequence: Synthetic coding sequence
  source 1..612: mol_type = other DNA
atgtcttcgtctggaaccccagatctcccggtgttgctgaccgacctaaaaattcagtacacaaaaatctttatcaacaacgagtggcatgacagtgtgtccggcaagaaattcccggtgtttaatcccgcaactgaagaggagttgtgccaggttgaagagggagataaagaggacgtggacaaggccgtgaaggccgcaagacaagccttccagatcggctcaccttggcggactatggacgcttccgaacgtggccgtctgctgtataagttagccgatctgattgaaagagacaggcttcttctggctacgatggaatccatgaacggagggaaactctacagtaacgcctatctcaacgatttggctggttgcatcaagacccttaggtactgcgcaggctgggctgataaaattcaaggcagaacaatcccaattgatggcaattttttcacctacactcgccatgagcctattggcgtttgtggtcaaatcatcccctggaattttccactcgtgatgttgatctggaaaatcggcccagctctgtcttgcggcaacaccgtcgtcgtcaagcctgctgagcagacacccctgacagctctgtag

SEQ ID NO: 213977 - DNA, 1557 bp, synthetic construct
  misc_feature 1..1557: note = Description of Artificial Sequence: Synthetic coding sequence
  source 1..1557: mol_type = other DNA
atgacatccagtaagatcgaaatgcctggggaggttaaggcagatccggcagccctcatggcctcactgcacctgctgccgtcccccacccccaatctcgagattaagtataccaaaatctttatcaataatgagtggcagaattcagaatctgggcgtgtgttccctgtgtacaatcctgcgaccggggaacaggtatgtgaggtccaggaggctgataaggcagacattgacaaggctgtgcaagctgcgcgtctggctttctcgctcggttccgtgtggcgacggatggacgctagcgagcgcggaaggttgttggataaactggccgatctcgtggagcgggaccgcgctgtattagccactatggagtctttgaacgggggaaagcctttcctccaggccttttacgttgacctccaaggcgtgatcaaaaccttcagatattacgctggatgggccgataagattcacgggatgacaattcctgtcgacggcgactactttactttcactcgacacgagccaatcggcgtgtgcggccagattattccttggaactttccgttgctgatgtttgcctggaagatcgccccagctctctgctgtgggaacaccgtggtgatcaagcccgcagaacagacaccactctcagccttgtatatgggcgctctgattaaggaagctggattcccccctggagtgattaacattctacccggatacggtccgactgctggcgcagccatcgcctcccatatcggcatcgataaaattgcttttactggatcgactgaggtgggcaagctgatccaggaggccgcaggtagatctaacctgaagcgcgttactttggaactcggtgggaagtccccgaatattatttttgccgatgccgatcttgactacgctgttgagcaggcccaccagggagtcttcttcaaccagggccagtgttgtactgccggttcccgaatcttcgtcgaggaatccatttatgaggaatttgtacgtcggagtgtcgaacgagcgaagaggagggttgtagggagccctttcgatccgacaaccgagcagggtccacagatcgataaaaagcagtataataagattctagaactgatacagtctggcgttgccgaaggcgctaagcttgagtgcggcggtaagggcctggggaggaagggcttctttatcgagccaaccgtgttcagcaatgtgaccgatgatatgaggatcgctaaagaggaaatatttggcccagtccaggagattctgcggtttaagacaatggatgaggttattgagcgggcaaacaacagcgacttcggcctggtggcagcagtgtttaccaacgacattaacaaggccctgaccgtcagctcggctatgcaggccggaaccgtgtggatcaactgttacaatgcgctgaacgcgcagtcaccatttgggggattcaagatgtctggtaatggcagggagatgggtgagttcgggctgcgggaatatagtgaggtcaagacggtgaccgtgaagatccctcagaaaaatagttag

SEQ ID NO: 213978 - DNA, 1443 bp, synthetic construct
  misc_feature 1..1443: note = Description of Artificial Sequence: Synthetic coding sequence
  source 1..1443: mol_type = other DNA
atgaccagctctaaaattgagatgcccggtgaagtcaaggcggaccccgctgcattgatggcaagtctgcatctcctcccctctccaacaccaaatctcgagattaaatatactaagatcttcattaataatgagtggcaaaatagcgaatctggccgagttttccctgtgtacaatcccgcaactggggagcaagtctgtgaagtccaggaagccgataaggctgacatcgacaaggctgttcaagcagccagattggctttcagcctgggcagcgtttggaggagaatggacgccagcgagcgaggtcgtttactggataagctggccgatctggtggaaagggacagagcggtcctggctacaatggaaagtcttaacgggggaaagccattccttcaggccttttacgttgatcttcaaggggttattaagacttttcggtactacgcaggctgggcggataagatccatggtatgactatacccgttgacggagactacttcacctttaccaggcacgaaccaataggcgtgtgtggccagattatcccctggaacttccccctgctgatgttcgcatggaaaattgcgcctgcactgtgctgtggcaacaccgtggtcatcaagcccgcagaacagacaccattaagcgccttgtatatgggggctctgattaaagaggtagggaagctgatacaggaagccgctggacgctccaacctgaaacgcgttaccctggaattgggtggtaagtcccccaatatcatattcgctgatgccgacctggactacgccgtagagcaagcgcaccagggcgtcttcttcaatcaggggcagtgttgcacagcgggttctcgtatattcgtagaggagtccatttatgaagaatttgtccggcgaagcgtggaaagggcaaaacggcgagtagtcggctcacccttcgaccccactacagagcaaggcccacagatcgataaaaaacagtataacaaaattttggaactgattcagtctggggtggctgagggcgcaaagcttgagtgtggcggtaagggattaggtcggaaggggttcttcatcgagccaaccgtttttagtaacgttacagacgatatgcgaatcgctaaagaggagatattcggtcccgttcaggaaatcttgcgcttcaagacaatggatgaggtgattgagagggccaataattccgattttggcctggtggctgccgtgttcactaatgacattaacaaagccctcacggtctcctccgctatgcaagccggaaccgtatggatcaactgttataatgccctcaacgcccagtcacctttcggaggctttaagatgtctggcaacgggagggaaatgggcgagtttggactccgagaatactctgaggtgaagacagtcaccgtgaaaattccacagaagaactcctag

SEQ ID NO: 213979 - DNA, 1494 bp, synthetic construct
  misc_feature 1..1494: note = Description of Artificial Sequence: Synthetic coding sequence
  source 1..1494: mol_type = other DNA
atgaaaaaccagtgtgaaaccgtatggttgaaaagcccgattaaattaaagttaatcttcattaataatgagtggcagaattccgagagcggccgtgtgtttccagtgtacaaccctgctacaggtgaacaagtttgcgaggtacaggaagctgacaaggccgacatcgataaggctgtgcaggccgctcggctggcgttcagcttggggtctgtgtggagacgcatggacgcatcagaaaggggacgccttctggacaaactagcagatctcgtcgagagagatagagcggtgcttgcgaccatggagagcctcaacgggggtaaaccctttctgcaggcgttctatgtggatctccaaggtgttattaaaaccttcaggtactacgccggatgggccgataaaattcatggcatgaccataccggttgacggcgactacttcactttcacaagacacgagcctataggagtttgcggacagattataccttggaattttcctcttcttatgttcgcctggaaaatcgccccagcgctgtgttgtggaaatacagtcgtcattaagcccgctgagcagacccccttatccgccctgtacatgggcgcattgattaaagaggctggctttcctcctggggtcatcaacattcttccgggatatggcccaactgctggagcggctatcgcgtcccatatcggaatcgacaagatcgcattcaccggctccaccgaggtcggtaagcttattcaggaggccgctggaagaagcaacctgaagcgcgtgacattagaattgggcggtaagagccctaacatcatattcgccgacgcagatctggactacgcagtggagcaggcccatcaaggcgtgttctttaaccaggggcagtgctgcacagctggcagtcgtattttcgtcgaagaaagtatctacgaggaatttgtcaggcgtagtgttgagcgagctaagcgcagggtggtggggtctccgtttgacccaaccaccgagcagggccctcagatcgacaaaaagcaatacaataagattctagagctgattcagtccggggtggccgaaggcgcaaaattggagtgcggcggtaaggggttaggaaggaaggggtttttcatcgagccgaccgtgtttagtaatgtgacggacgacatgcgcatagccaaagaggagattttcgggccagtgcaggaaattctgcgcttcaaaactatggacgaggtaatcgaaagagctaacaactctgattttgggctggtggcagcggtttttactaacgatatcaacaaagcacttaccgtgtccagcgcgatgcaggccggtactgtgtggattaactgttataatgcgctaaacgcccaaagtcccttcggagggttcaagatgtccggtaacgggagggaaatgggagagtttggactgagggagtacagcgaagtgaagacagtcactgtcaagatcccccagaaaaacagctag

SEQ ID NO: 213980 - DNA, 1470 bp, synthetic construct
  misc_feature 1..1470: note = Description of Artificial Sequence: Synthetic coding sequence
  source 1..1470: mol_type = other DNA
atgaaaggtaagaattgtaacgacgttaaaatcttcatcaacaacgaatggcagaactcagagtcagggcgagtattccccgtgtacaatccagccaccggagaacaggtgtgtgaagtgcaggaggctgataaggctgatatagacaaagccgtgcaggccgcaaggctcgccttctccctcggtagcgtgtggcgcagaatggatgcttctgaacgcggacgactactggacaaactggccgacttggtggagcgggacagagctgttctggccaccatggagtctttaaacggcggtaaaccttttctgcaggccttttacgtggatctgcagggcgtgattaagacattcaggtactatgccggatgggcagacaagattcacggtatgacgattccggtcgatggcgattatttcacatttaccaggcacgagcctataggtgtgtgtgggcagattattccatggaatttccccctcctgatgtttgcatggaagatcgccccagccttatgttgtggcaatactgtggtgatcaaacccgcagagcagacacccctgtccgcactgtatatgggagcgctcatcaaagaggcgggtttcccacccggtgtcattaatatcctgccaggatatggaccaaccgccggagcagccatcgctagccacattggtattgataagatagctttcacgggctccactgaggtaggcaagttaattcaggaagccgctggtcgttccaatctcaagcgagtgacattggagctgggtggcaaatcgccaaatatcatctttgcagacgctgatctggattatgcagtcgagcaggctcaccagggggtcttcttcaatcagggccagtgttgtacagctgggtctcggatcttcgtggaagagagcatctatgaggagttcgtgcgccgatccgtagaaagagcaaagcgacgtgtggtgggatctccattcgatcctacaaccgagcagggaccacagatcgacaaaaagcagtacaataaaattttggaactgattcagtccggtgttgccgagggagcaaagctggagtgtggcggtaagggcctgggacggaagggatttttcattgaacctacagtgttcagcaatgtaactgacgacatgcgcatcgcaaaggaggaaatcttcggaccagtccaggagatactgagatttaaaaccatggacgaagtgattgaacgcgctaacaactccgactttggtctggtcgccgcagtgtttaccaatgacattaacaaggctcttactgtgtcatccgcaatgcaggcgggtaccgtatggataaattgttataatgctctcaacgcgcaaagtccattcggtgggtttaagatgtctggaaacggcagagagatgggagaattcggcctgagagaatattcagaggtgaaaaccgtgactgtgaagatccctcaaaagaactcctag

SEQ ID NO: 213981 - DNA, 30 bp, synthetic construct
  misc_feature 1..30: note = Description of Artificial Sequence: Synthetic coding sequence
  source 1..30: mol_type = other DNA
atggacgcttcagaacggggaagactgtag

SEQ ID NO: 213982 - DNA, 1470 bp, synthetic construct
  misc_feature 1..1470: note = Description of Artificial Sequence: Synthetic coding sequence
  source 1..1470: mol_type = other DNA
atgaaaggtaggaattggaagaccaccaagatttttattaacaacgagtggcagaacagcgagtccgggcgtgtgtttcctgtgtacaatccagccaccggagagcaagtgtgtgaggtccaggaagctgacaaggcagatatcgacaaggccgttcaagcagctcgcctggctttctccctcggctcggtgtggaggaggatggatgcctctgaacgcggtagactgctcgacaagctagctgacctggtggagagagatcgggctgtgttggcaaccatggagagcctgaacggtgggaaacccttcttgcaggccttctacgtggatttgcaaggcgtgatcaaaacttttcggtattatgcaggatgggcagataaaatccacggcatgacaatccccgtcgatggagattattttactttcaccaggcacgagccaataggggtctgcgggcagatcatcccttggaacttccctttgttgatgttcgcttggaagattgccccagctctgtgttgtggcaataccgtggtcatcaagcccgcagagcagacacctctgtccgccctttacatgggtgccctaatcaaagaggctggcttcccccctggcgtgatcaatatactccccggatacggaccaactgccggagccgcaatcgcgagccatataggcatcgataagatcgcctttacgggttcgactgaagtgggcaaactgatccaggaggctgccggtcgcagcaatctgaagcgggttactctggagctggggggaaagagccccaacataatattcgctgatgctgatctcgactacgccgtcgagcaggcccatcaaggggtgttctttaaccaggggcagtgctgcacagccggaagccgtatcttcgtggaggaatcaatctatgaggaatttgttaggcgaagtgtagaaagggccaaacggcgtgtagtgggatccccgttcgacccgaccaccgaacagggccctcaaattgacaaaaagcagtacaataaaatccttgagctgatccagagcggggtcgctgagggtgccaagttggaatgtgggggaaagggcttgggcagaaaagggttcttcatcgagcctacagtgttttcaaacgtgaccgatgatatgaggatcgcaaaggaggaaattttcggcccagtgcaggagatcctgagatttaaaaccatggacgaggtgattgagagagctaacaacagcgactttgggctggttgctgccgtgttcacaaatgatattaataaggcgctgacggtgtcaagcgccatgcaagcagggacagtctggattaattgctataatgccctgaacgcccagagcccctttggcggtttcaaaatgagcggtaacggccgagagatgggagagtttggcctgcgggagtacagtgaagtgaagacagtgaccgtcaaaatacctcagaaaaacagctag

SEQ ID NO: 213983 - DNA, 78 bp, synthetic construct
  misc_feature 1..78: note = Description of Artificial Sequence: Synthetic coding sequence
  source 1..78: mol_type = other DNA
atggacgcctctgagagaggacgtctcctggataaactggccgacctagtggagagggacagggcagttctggcatag

SEQ ID NO: 213984 - DNA, 1269 bp, synthetic construct
  misc_feature 1..1269: note = Description of Artificial Sequence: Synthetic coding sequence
  source 1..1269: mol_type = other DNA
atggatgccagcgagcgaggcaggctcctggacaagctcgcagatttggtggagagagatcgagccgttttggccacaatggagagcctgaatggcggaaaacctttcttgcaggcattctatgtggacttgcagggcgtgattaagacctttcggtattacgcgggttgggccgacaaaattcatggaatgaccatcccagttgacggggattatttcacttttacccggcacgaacctataggagtgtgcggacagatcatcccttggaactttccacttttgatgttcgcttggaaaatcgccccagccctctgctgtgggaacactgtcgtgattaagcctgcagagcaaactcccctgtccgcactgtatatgggagcactcattaaggaggccggttttccacccggagtcatcaatatccttccagggtatggccctacggccggagccgcaatcgcctcacacatcggtatcgacaagatcgccttcacagggagcacagaagtggggaagttgattcaggaggctgcagggcgatctaacctgaagcgtgtgaccctcgaactagggggtaagtctccaaatattatttttgccgacgccgacctggactacgcagtggaacaagcacaccagggcgtgtttttcaatcaggggcagtgctgcaccgcaggctctcgaatctttgtagaggagagtatttatgaagagtttgtaagaagaagcgtagagagggccaagaggcgagtggtgggctcccctttcgaccccaccacggaacagggaccccagattgacaaaaagcagtataacaagattctggagctaatacagagcggagtggcagagggggctaagctggagtgcggaggcaaaggcttgggcagaaagggtttctttatcgagccgactgttttcagcaacgtgacagatgatatgcggatcgcaaaggaagaaatcttcggccctgtgcaggagatacttcgcttcaagacaatggatgaggtcatcgagagagcaaacaattccgacttcggtttggtcgccgcagtgttcaccaatgatattaataaggctctaaccgtgagcagtgctatgcaggcagggacggtgtggattaattgttacaatgccctgaatgcacagtccccgttcggtggcttcaaaatgtccggaaacgggagggaaatgggcgaattcggactgcgagaatacagcgaggtcaagacagtaactgtgaaaattccccagaagaactcatag

SEQ ID NO: 213985 - DNA, 258 bp, synthetic construct
  misc_feature 1..258: note = Description of Artificial Sequence: Synthetic coding sequence
  source 1..258: mol_type = other DNA
atggatgccagtgagcggggaagattactggacaaattggcagatttagttgaacgcgatcgtgccgttttagcgactatggaatccctgaatggcggaaagccgttccttcaagcattttacgtggatctacaaggtgtcattaaaactttccggtactacgctggttgggccgataagatccatggcatgactatacccgtggatggcgactacttcaccttcaccaggcatgagcctatcggtgtgtgcggctag

SEQ ID NO: 213986 - DNA, 1539 bp, synthetic construct
  misc_feature 1..1539: note = Description of Artificial Sequence: Synthetic coding sequence
  source 1..1539: mol_type = other DNA
atggccacggcaaacggggcagtggagaacggacagcccgaccgtaagccccctgctctcccacggcctattaggaacctggaggttaaatttaccaagattttcattaacaatgagtggcacgagagcaagagtggcaaaaaatttgctacttgtaacccttccactcgggagcaaatatgcgaggtggaggagggtgacaagcctgacgttgacaaggcggtggaggctgctcaggttgcatttcagagggggtctccctggcgacgcttggacgccctgtccaggggcagattactgcatcagctggctgacctcgtggagcgggaccgtgcaacactcgctgccttagaaaccatggacacagggaaaccattcttacatgccttctttatagacctcgagggatgcatacgcactctgcgctacttcgccggatgggctgacaagattcagggcaaaacaatccctacagatgacaacgtcgtctgttttacaagacatgagcctataggcgtgtgcggagccatcaccccttggaattttcctcttctgatgttggtgtggaagctggcccctgctttgtgttgcggaaatactatggtattaaagcccgctgaacagacccctctgacagctctatatctaggctctctcataaaggaggccggatttccgcctggagtagtgaatatcgtgccgggtttcgggccaaccgtgggggctgctataagcagccacccgcaaatcaataagatagctttcactggcagcaccgaagtggggaagctggtgaaggaagcagccagtcgctcaaacctgaaaagagtgaccctcgagctggggggaaaaaacccatgtattgtgtgcgccgatgcggacctcgatttagctgtagagtgtgcacaccagggggtgttcttcaatcaaggacaatgttgcactgccgcttcgcgagtatttgtggaggagcaggtctactccgagttcgtacgccgttctgttgaatatgccaaaaagcgacccgttggggatccgttcgatgtgaagaccgaacagggacctcagattgatcagaagcagtttgataaaattctcgagctgattgaaagcggcaagaaagaaggtgccaaactggagtgtgggggtagcgctatggaggacaagggcctgtttatcaaacccaccgtgtttagtgaggtcaccgacaacatgcgtattgcgaaggaagaaatctttggacccgtccagccaatcctaaaattcaagagtatcgaagaagttataaaaagagccaatagtaccgattatggccttaccgctgcagtcttcaccaaaaacctggacaaagctctgaaactggcttccgcgctggaatctggaacagtctggatcaactgttataacgccctgtatgcccaggccccattcggcggattcaagatgtctggcaacggtcgggagctcggtgagtatgctcttgcagagtacaccgaagtcaagaccgtgactatcaaattaggtgacaagaacccttag

SEQ ID NO: 213987 - DNA, 456 bp, synthetic construct
  misc_feature 1..456: note = Description of Artificial Sequence: Synthetic coding sequence
  source 1..456: mol_type = other DNA
atggccacagccaatggagctgttgagaatgggcaacccgaccgaaaacctcctgccctgcctagacctattagaaacctcgaggtcaaattcacgaagatattcatcaacaacgagtggcatgagtcaaagtcgggtaagaagtttgctacatgcaatccatctactagagagcagatctgtgaagtggaggagggcgacaagcctgacgtggacaaagccgtcgaagccgctcaggtggcctttcagcgcggatctccatggcgcagactggacgcgctgagtcgtggccgtctgctacatcagctcgcagacctggtcgagagggaccgggcaacactagcggctctcgagaccatggacaccggaaagccttttctgcacgcgtttttcatcgacctggaaggctgtatcagaacactgcggttaataaaaagcagcagcaccaagagttag

SEQ ID NO: 213988 - DNA, 1554 bp, synthetic construct
  misc_feature 1..1554: note = Description of Artificial Sequence: Synthetic coding sequence
  source 1..1554: mol_type = other DNA
atgctgcggtttttagcacccagactcttatcactccagggcaggactgctagatatagcagcgccgcagcgctgccttctcccatccttaatcccgacataccctacaatcaactgtttattaacaatgagtggcaggacgccgtgtccaaaaaaacctttcccactgtcaaccccactacaggcgaggtgataggccacgtggcggaaggggatagggccgacgtggaccgcgctgtgaaggccgcaagggaggcctttcgcttgggatcaccttggagacgaatggacgccagtgagcgcggacgcctgcttaacagattggctgacttagtggagagagatcgtgtttacctggcctctttggaaacccttgacaacggaaagccttttcaggagagctacgccttggatcttgacgaggtgattaaggtctaccggtattttgctggctgggccgacaagtggcatgggaaaactatccctatggacggccagcatttttgctttacaagacacgaacctgtgggagtctgtggccagatcattccctggaacttcccgctggtaatgcagggctggaagctcgcccctgcacttgctaccggaaataccgtggtcatgaaggtggctgagcaaacacctctgagtgctctgtatcttgcctctctgatcaaggaggcaggatttccaccaggcgtggtgaacattattactgggtatggccctacagccggagctgcgatcgctcagcacgtcgacgttgacaaggtggcattcaccggatccaccgaggtaggtcacttaattcaaaaggccgctggcgacagtaacctcaagcgagtgactctcgaattgggagggaaatcaccaagtattgtactggccgacgcagatatggaacacgctgtcgagcagtgtcatgaagcattgttctttaatatgggacaatgctgttgtgccggtagtcgtactttcgtggaagaatccatttacaatgaattcttagagcgcactgttgagaaagccaagcaacgcaaagtcggaaacccttttgagcttgatacgcaacaaggtccccaggtcgacaaggagcagtttgaacgagtacttgggtatatacagctcgggcagaaggaaggggctaagctcttatgcgggggtgagcgtttcggagagcgaggtttcttcatcaaacctacagtgttcggaggagtacaagatgatatgagaattgctaaggaagaaatctttggtcctgtgcaaccgctctttaaattcaaaaaaatcgaggaagtcgtggagcgagccaataacactcgttacggactggcggcagccgttttcactcgtgacctcgacaaggccatgtactttacacaggccctgcaagcaggaactgtctgggttaatacatacaacatcgttacctgtcacacaccatttggcggatttaaggaatctggaaatgggagagagctaggcgaagacgggttgaaagcctataccgaagtcaaaaccgtcacaattaaagttcctcaaaaaaattcatag

SEQ ID NO: 213989 - DNA, 657 bp, synthetic construct
  misc_feature 1..657: note = Description of Artificial Sequence: Synthetic coding sequence
  source 1..657: mol_type = other DNA
atggaacacgccgttgaacagtgccacgaggccctctttttcaacatggggcagtgttgctgcgctggatctcggactttcgtggaagagtcaatatacaatgaattcttggagaggactgtggagaaagcaaaacagcggaaggtcgggaatccattcgagctagacactcaacagggaccgcaagttgataaggagcagttcgaacgtgttttgggctatattcaactgggacagaaggaaggcgcaaaactgctctgcggaggagagaggttcggcgagcggggtttcttcatcaaacccacggtgttcggcggtgtgcaagacgacatgcgcattgccaaggaggagatctttggcccagtgcagccactgttcaaattcaaaaaaatagaggaggtcgtggagagagccaataacacccggtacggtctggcagcagcagtatttactagggacttggataaggcaatgtatttcacccaagcactgcaggctggaacggtgtgggtgaatacctacaacatcgtgacatgccacactccatttggaggctttaaagagagcggcaacgggagagagctgggcgaggacggcctgaaggcctacacagaggtcaagaccgtgaccataaaggtaccccagaagaacagctag

SEQ ID NO: 213990 - DNA, 2739 bp, synthetic construct
  misc_feature 1..2739: note = Description of Artificial Sequence: Synthetic coding sequence
  source 1..2739: mol_type = other DNA
atggcaggaccaagcaatcccccagccacgatgaagattgcagtgatcgggcagtcactgtttggacaagaagtgtactgccatcttcggaaagagggacatgaagtggttggggtgttcacagtgcctgacaaggacggcaaggcagacccattggggttggaagccgaaaaagatggggttccagtctttaagtattcacgttggcgggctaaaggtcaggcactgccggatgttgtggccaaatatcaagccctaggcgctgagctgaacgtcctacctttctgtagtcagtttatacccatggagattatatcagcccctaggcacggatccattatctatcatccttctctgttgccacggcacagaggcgcttccgcaatcaactggaccctgattcacggcgataagaagggcggatttagcatcttttgggctgatgacgggctggacaccggagatctcctgctccagaaagagtgcgaggtcctccctgatgataccgtgagcaccctgtataatagatttcttttcccggaaggcataaaagggatggtgcaggcagtacgactgatagccgaaggcaaagccccaaggcttcctcagccagaggaaggtgccacgtacgagggcattcaaaaaaaggagactgccaagataaactgggaccaaccagcagaggcaatccacaattggatccgaggtaacgataaggtcccaggcgcttggactgaggcctgcgagcaaaaactgacgttctttaactctacgctcaacacaagtggcctggtgccagagggggatgcgctgcccatcccaggagcgcacagaccaggggttgtgactaaagccggtctcattctatttgggaatgacgataagatgctgctcgtgaaaaacattcagctggaggacggaaagatgattctggccagtaacttcttcaaaggtgctgctagtagcgttctggaattgacagaagccgaacttgtaactgctgaggcagtccggtccgtgtggcagagaattctgcccaaggtccttgaagtagaggacagtacggatttcttcaaaagcggggctgccagcgttgacgtggtccgcttggtagaagaggtgaaggaactgtgtgacggtctagaactcgaaaacgaagatgtctatatggcctctactttcggagactttatacagctactggttcgcaagctcagaggggatgatgaggagggcgagtgctcgattgattatgttgaaatggccgtgaacaagagaaccgttcgtatgccacaccaactctttattggcggagagttcgttgatgctgagggcgctaagactagcgaaacgattaacccaacagacggctccgtcatctgccaggtttcacttgcacaggtcaccgacgttgacaaagcagtggctgctgctaaagacgccttcgaaaatggaaggtggggaaagatctcagcccgtgacagaggtagattaatgtacagactcgcggatctcatggagcaacatcaggaggagctggccactatcgaggccctggacgcaggagccgtgtacacactggcgttaaaaacgcatgttggcatgtctatacagaccttccgttactttgccggatggtgtgacaaaatccagggttccaccatcccaattaaccaggctaggccgaacaggaacttgactcttacacgtaaagagcccgtgggggtctgtggcatcatcataccttggaactacccattgatgatgttgagctggaagacagccgcttgcctggccgcagggaacacagtggtcattaaacccgcacaggtgacacctctgactgctcttaagttcgcagagctcacgctgaaggcaggaatcccgaaaggcgtggtaaatgtcttgccgggaagtggttctctcgtcggtcagcggcttagcgatcatcccgacgtacggaaaatcggcttcacaggttccactgaagtgggcaagcacatcatgaaatcttgcgccatcagcaatgtgaagaaggtgtcgctggagctcgggggaaagtcccctctgatcatctttgctgattgcgatctcaacaaggccgtgcaaatggggatgagcagtgtcttttttaacaagggagagaattgcatcgctgctggcaggttgtttgtcgaggacagcatccacgatgaatttgtgcgcagggtggtggaagaagtgcgcaaaatgaaagtgggcaaccctcttgatagagacaccgaccacggtccccagaaccatcacgctcacctcgtgaaactgatggagtactgtcagcacggcgtcaaagaaggtgcaaccctggtctgtggagggaatcaggtgcctcggccaggcttcttcttcgagccgacagtgtttacagacgtggaagatcatatgtttatcgccaaagaggagagctttggacctgttatgattatatctagatttgccgacggggaccttgacgcagttttgtcccgcgcaaacgctaccgaatttggactggcctccggggtattcacaagagacattaataaagccctctacgtgtccgataaactgcaggccggtacggtgtttgtgaatacttataataagactgatgtcgctgccccatttggaggatttaaacagtccggttttggtaaagacctaggagaggccgcactgaacgaatatctgagagtaaaaacagtcacattcgaatattag

SEQ ID NO: 213991 - DNA, 1518 bp, synthetic construct
  misc_feature 1..1518: note = Description of Artificial Sequence: Synthetic coding sequence
  source 1..1518: mol_type = other DNA
atgaaaatcgccgtcatcggccagtctctctttggacaagaagtgtactgtcacttgcgaaaggaagggcatgaggtcgtcggtgtgtttactgtaccagacaaggatgggaaggcggaccctttaggcctggaggccgaaaaggatggggtccctgtttttaaatactctaggtggagagcaaaaggtcaggcattgcccgatgtcgtggccaaatatcaggcactgggtgctgagttgaatgttctgcccttttgttctcagttcattccgatggagattataagcgctccccgacacggcagcatcatttatcatccctcgctccttccccgacatcggggtgctagcgcaataaattggaccctcatccacggggataagaagggagggttctccattttctgggcagacgacggcctcgataccggcgacttgctactgcaaaaagagtgcgaagttctgccagacgatacagtgtcaacgctatataaccgattcctgttcccagagggcattaaaggaatggtgcaggccgtccgcttgatagctgagggtaaggctccaaggctgccccagccagaggagggcgctacatacgagggcatacagaaaaaggaaacggccaagatcaactgggaccaacctgccgaagcgattcacaactggattagagggaacgacaaggtgccaggtgcctggactgaagcatgtgaacagaaactgaccttttttaactctacactgaacacatctggcctggtccccgagggggatgccctgcccatcccaggagcgcacaggcccggagttgtgaccaaggctggactgattctctttgggaatgatgataagatgctgctcgttaaaaacatccagctggaggatgggaagatgatcttagcctcaaacttcttcaagggtgccgcttcatcagtcctcgagctgacagaagccgaactcgtgaccgctgaagcagtccggtcggtgtggcagagaattctacctaaagtgctggaggtggaggactctaccgatttctttaagagtggcgcagcttcggttgacgtggtgcgactggtggaagaagtgaaggagttgtgtgacggtctggaacttgaaaacgaagatgtctatatggctagtaccttcggagacttcatccaactcctagtgcggaagctccgaggtgatgatgaagaaggggaatgctcaatcgactacgtcgaaatggccgtgaataaaagaactgtgcgtatgccccatcagttattcatcggtggcgagttcgttgacgccgaaggcgctaaaacctccgaaacaattaaccctacagacgggtccgtaatctgtcaggtatccctggctcaagtcacggacgttgacaaggcagtcgcagctgctaaggacgctttcgagaacgggagatggggcaaaatttctgctcgcgatcgtggtagattaatgtaccgcgctccaccttcaccttctactcgtcccgatcctaccgctacctag

SEQ ID NO: 213992 - DNA, 2709 bp, synthetic construct
  misc_feature 1..2709: note = Description of Artificial Sequence: Synthetic coding sequence
  source 1..2709: mol_type = other DNA
atgaaaattgccgttattgggcagtccctgttcgggcaggaagtgtactgtcatttaagaaaggaggggcacgaggtggtcggtgtgttcacagtgcccgataaggatggcaaggcagacccactgggactggaagctgagaaggatggggtgccagtttttaagtactcaagatggagggccaaagggcaagctcttcctgatgtggttgctaagtatcaagcattgggcgcagagttgaatgttctgccgttctgctcccagttcattcccatggaaatcatctcggctccccgacacggctcaataatctatcatcccagtttgctccctcggcataggggcgctagcgcaatcaactggactctgatccatggcgataaaaaaggtggattctcaatcttctgggcggacgacgggcttgacaccggcgatcttctgctgcagaaggagtgtgaggtcctccctgatgacacagtaagcactttgtacaataggttcctgtttcccgaaggcatcaaggggatggtgcaggctgtacgactgatcgctgaaggcaaagcacccaggttgcctcagcctgaagaaggtgcgacctatgaggggatccagaaaaaagaaaccgccaaaataaattgggaccagcccgcagaggctatccacaattggatccgcggaaacgacaaggtgcctggggcttggactgaagcctgcgagcagaaacttacattcttcaactctactttgaacacctcaggtttggtgccagagggagacgccttgcccattccgggtgcgcataggcccggtgtggtcaccaaggcgggtctaatcctgtttggcaatgacgataagatgctgttggtcaaaaacattcagctagaagacggaaaaatgattcttgccagcaatttcttcaaaggggcagctagtagtgtcttagagctgaccgaggctgaattagttaccgccgaggccgttagaagtgtgtggcaacgtatcctccctaaggttcttgaggtggaggattccaccgactttttcaagtccggcgcagcctcagtggatgttgtgcgtctggtcgaggaagttaaagagctgtgtgacggcttagaattggaaaacgaagacgtgtacatggccagtactttcggagactttattcagctgcttgtgcgtaagctccggggagatgacgaagaaggcgaatgttcaatcgattacgtcgagatggccgtgaacaaacgcacagtgagaatgccccatcagttgttcataggaggtgagtttgtggatgcagagggagccaaaacctccgagacaattaacccaacggacggatctgttatttgtcaggtgagtctcgcacaggtcacagatgtagacaaggcagtggctgctgcgaaagacgcttttgagaacggcaggtggggtaagatcagcgcccgtgatcgaggcagactcatgtacagattggcagaccttatggagcaacaccaggaggagctagctacaattgaggccctcgacgccggtgccgtgtatacactcgccctgaagactcacgtgggaatgtccattcaaaccttcagatatttcgcaggatggtgtgacaagattcagggcagtacgatcccgattaatcaggctcgcccaaataggaacctgaccctcacgagaaaggaaccagtgggggtctgcggcattattataccttggaattatcctctgatgatgctgagctggaaaacagccgcttgtctggctgccggaaataccgttgtgatcaagcctgcacaagttaccccgctaacagccctcaagtttgctgagctcacacttaaggctggtattcccaagggagttgtaaacgttctgcccggatccgggagtctggtgggacagagactgagtgatcaccctgatgtgcgcaaaatcggttttacagggtccacggaggtcggtaagcacattatgaagagctgcgccataagcaatgtgaagaaagtctccctcgagttgggaggcaagtcccctctgatcatttttgccgactgtgatctaaataaggctgttcagatgggtatgagcagcgtgttcttcaataaaggcgagaattgcattgccgcaggtcgactgttcgtagaggactcgattcacgatgagttcgttcggcgagtggttgaggaggtgcgaaaaatgaaagtgggaaatcctctggaccgcgatactgatcacggtccacaaaatcatcacgcgcatttggtgaaattgatggaatactgccaacatggggtgaaggagggtgccactttagtgtgcggaggcaaccaggttcctcgacctggattcttctttgaacccaccgtgtttacagatgttgaagaccacatgttcattgccaaagaagagagtttcggcccagtgatgatcatttctagatttgccgatggagaccttgacgctgtgcttagcagggccaatgctacagaatttgggttagcctccggcgtcttcaccagagacatcaacaaagccctgtacgtgagtgacaagctgcaggctggcaccgtgttcgtcaacacttacaacaaaacagatgtcgccgctcctttcgggggtttcaagcagagcggctttggcaaagacctgggggaggccgctctcaacgagtatctgcgcgtgaagactgtgacctttgaatactag

SEQ ID NO: 213993 - DNA, 483 bp, synthetic construct
  misc_feature 1..483: note = Description of Artificial Sequence: Synthetic coding sequence
  source 1..483: mol_type = other DNA
atggttcaggcggtccgacttatcgcggagggaaaggctcctcgcctgccgcagcccgaagaaggggcaacctacgaaggcatccaaaagaaagaaactgctaagattaattgggatcaacctgctgaagctattcacaattggatccgcggaaacgacaaggttcccggagcatggactgaggcgtgcgaacagaagttgacgttctttaatagcaccctgaatacaagtggcttagtgcctgaaggcgacgcactgccaatcccaggcgctcacagacccggagtagtgactaaagcaggcctcatcctatttggaaacgatgataaaatggtgcgcgctagactttgggtgacatgcctactgaaggccacacatgcgccagttcttgggctgcggccacatcgaaagaccctgggttccagcggcgagaacgggaaaaaccagacacaggaggggactcttacgctgatttgtccatag

SEQ ID NO: 213994 - DNA, 507 bp, synthetic construct
  misc_feature 1..507: note = Description of Artificial Sequence: Synthetic coding sequence
  source 1..507: mol_type = other DNA
atgaagattgccgtgattgggcaatcactttttggacaggaggtatactgtcacttaaggaaagagggccatgaggtggtgggcgtctttaccgtccctgataaagacggtaaggccgacccattgggactggaggcggagaaagatggagtgcctgtgttcaagtatagtcgctggagggcaaaaggtcaggccctaccagatgtggtggcaaagtaccaagccctgggagccgagctcaacgtgctccccttctgttcccagtttatccccatggagatcatctcggccccaagacatgggtctattatttaccatcccagcctgctccccagacacagaggtgcttctgcaatcaactggactcttatccatggtgataagaagggaggcttctcgatcttttgggcagatgacggcctggacacaggcgatctccttttgcagaaagaatgtgaggtcctgcccgatgacaccgtaagcaccctgtacaatcggttcctttag

SEQ ID NO: 213995 - DNA, 2709 bp, synthetic construct
  misc_feature 1..2709: note = Description of Artificial Sequence: Synthetic coding sequence
  source 1..2709: mol_type = other DNA
atgaaaattgccgtgatcggccagtccctttttggccaggaagtgtactgtcacctgcgtaaagagggccacgaggtcgtgggcgtcttcacggtccccgataaagatggcaaggccgaccctctgggtctggaggcagagaaggacggagtcccagtgtttaaatatagccggtggagagcaaagggccaggccctgcccgatgttgtggcgaagtaccaagccctgggagctgagctgaacgtgctgcctttctgtagccagtttatccctatggagatcatcagtgcgccacgccatggctctattatctaccaccctagcttgctcccccgacatcggggagcatcagctatcaactggacactgattcacggggataagaaaggcggattctccatcttctgggcagacgatggtctggacaccggcgatctgctgctccagaaggagtgcgaggtgttgcccgacgacactgtcagcaccctgtacaatagatttctgttccccgagggaataaaagggatggtgcaggccgtgagactgatcgctgagggcaaagcgccacgcctaccgcaacctgaagagggcgctacgtatgagggaatacagaaaaaagaaacagcaaagatcaattgggaccagcccgcagaagctatacacaactggatcagaggcaacgataaggtgcctggagcgtggactgaggcatgcgagcagaagttgaccttttttaacagcactctgaatactagcgggctggtccctgagggagatgctctgcctattcctggagcccatcgccctggggtcgtgacgaaggctggcctcatcctgttcggtaacgacgacaagatgttgttagtgaaaaacatccaactggaagatggcaagatgatcctcgcctccaatttcttcaagggggcagcttcaagtgtgttggaactgaccgaggcagaacttgtcaccgccgaagctgtacgttcggtgtggcagcgcattctgcctaaggttctggaggtggaggattctactgacttcttcaaatctggcgcagccagcgtagatgttgtacggcttgtggaggaggttaaggaactgtgtgatgggctggaactggaaaatgaagacgtgtatatggcgtctacgttcggagacttcatccagctgctggttcgaaagctcaggggcgacgacgaggagggggagtgttccatcgattatgtagaaatggcggtaaacaagcggaccgtgagaatgccacaccagctgttcattggaggcgagtttgtggacgccgaaggcgcaaaaactagtgaaacaataaatcctacagatggtagtgtcatctgccaggtgtctcttgcgcaggtgactgacgtggacaaggccgtggccgcagccaaggacgcctttgaaaacggcaggtggggcaagattagtgcacgtgataggggcaggctgatgtataggctcgccgaccttatggagcagcatcaggaggagttagccaccatcgaggcactagacgccggagctgtttataccctggccctgaagacacatgtcggaatgagtatccaaaccttccgatattttgctggttggtgtgacaaaatccaggggagtacgatccctattaatcaggctcgacccaaccgcaacctgacactcacaagaaaagagccagttggggtgtgtggaatcataattccatggaactacccattaatgatgcttagttggaaaacggccgcatgcctcgccgctgggaacaccgtggtcatcaaaccggcacaagtgacgcccctgaccgccctgaaattcgccgaacttactctgaaggccggtataccaaagggtgttgttaatgtgttgcctgggagcggctcattggtcgggcagaggctgtccgatcaccctgatgtacgtaagattgggttcaccgggtctacagaggtggggaaacacattatgaaaagttgcgccattagcaacgtgaagaaggtatccctggagctcggcggaaagtctccactcataatctttgccgactgcgacctgaacaaagcagtgcagatgggtatgagtagcgtcttttttaacaaaggcgagaattgtatagctgcaggtcgactatttgtggaagacagtatccacgacgagtttgtccgaagagtggttgaggaggtccgtaaaatgaaagtggggaatccactggaccgggataccgatcacggccctcaaaaccatcatgctcaccttgtcaagctcatggagtattgtcaacacggggtcaaagaaggagccactttggtgtgcggcggtaatcaggtaccacgtcccggattcttcttcgagcccactgtttttactgatgtggaagaccacatgtttatcgctaaggaagagagtttcgggccagtgatgatcatcagccggttcgccgatggcgaccttgacgctgtcctttcccgcgctaacgctactgaattcggactggcctccggcgtttttacccgcgatataaacaaagccttgtatgtctcagacaaattgcaggctggcactgtgtttgtgaacacttacaacaagacagacgttgctgctccttttggcggttttaagcagtccggatttggtaaagatctgggcgaggcagcattaaatgagtatcttagggtaaaaaccgtgactttcgaatattag

SEQ ID NO: 213996 - DNA, 474 bp, synthetic construct
  misc_feature 1..474: note = Description of Artificial Sequence: Synthetic coding sequence
  source 1..474: mol_type = other DNA
atgaagatagcagtcatcggtcagagcctcttcggacaagaggtttactgccacctgcgcaaggaggggcatgaagtcgtgggagtgttcactgtacctgacaaggacgggaaggcagaccctctgggtctggaggcagagaaggacggggtgccagtgttcaaatattcaaggtggagggccaaaggtcaggcactgcccgatgtcgtggctaaatatcaggccttaggggctgaactcaatgtgctacctttctgctcacagtttattcccatggagatcatctcagctcctagacatggctctatcatctatcaccctagtcttttgcctagacacaggggcgcaagcgccattaattggaccctgatccacggagacaagaagggtggtttttcaatcttttgggctgacgatggccttgatactggggacctcctgctgcaaaaggagtgtgaagtactgccagactag

SEQ ID NO: 213997 - DNA, 534 bp, synthetic construct
  misc_feature 1..534: note = Description of Artificial Sequence: Synthetic coding sequence
  source 1..534: mol_type = other DNA
atgaagattgccgtgatcggccaatccctgttcggccaggaggtgtattgccacctgagaaaagaagggcatgaggtcgtgggagtcttcaccgtgcctgacaaagacggaaaagctgaccccttgggcctcgaagctgagaaggatggcgtgccagtgttcaagtattcccggtggagggccaaaggccaggccctcccagacgtggtggctaaataccaagctctgggggctgagctaaacgtccttccattctgttcccaattcatcccaatggaaattatctctgcaccacggcacggatctattatctatcatccaagtctgctgcccagacataggggcgcttcagcaattaactggaccctcatccatggagacaagaaggggggtttctctatcttttgggccgacgacgggctggatacaggcgaccttttgttgcagaaggaatgcgaggttttacctgatgatacagtttcaacgctgtacaaccgctttctgttcccagagggcatcaaggggatggtgtag

SEQ ID NO: 213998 - DNA, 303 bp, synthetic construct
  misc_feature 1..303: note = Description of Artificial Sequence: Synthetic coding sequence
  source 1..303: mol_type = other DNA
atgaaaattgccgttatcggacaatctttatttggacaggaagtgtactgtcacctgcgaaaggaggggcatgaagtggtgggcgtgttcaccgtccccgataaggatggcaaagctgatccattggggctggaagcagaaaaggatggtgtccccgtcttcaaatacagccgctggcgcgctaagggccaagcacttcccgatgtggtagccaaataccaggcattgggtgccgagttaaacgtccttcccttttgttcacagtttattcctatggagattatttccgctcctcgacactag

SEQ ID NO: 213999 - DNA, 2409 bp, synthetic construct
  misc_feature 1..2409: note = Description of Artificial Sequence: Synthetic coding sequence
  source 1..2409: mol_type = other DNA
atggccgcaacacgggctggacccagagccagagagattttcacatccttagagtatgggcctgtgccagaaagccacgcatgcgctttagcttggctcgatacccaggaccgctgtctcgggcattacgttaacggcaaatggctgaagcctgagcacaggaactccgtaccttgccaggacccaatcaccggcgaaaacttggcgagctgtttgcaggcccaggcggaggatgtggccgctgccgtcgaagcggctcgtatggcctttaaagggtggtccgctcatcccggtgtggtgcgcgctcagcacctgacccgcctggccgaggtcatacagaagcaccagcgcctcctatggaccctcgagagcctggttacaggcagggcggtgcgggaagtgcgggacggggatgtgcagttggcacagcagcttctgcattaccatgccatccaggcaagcactcaagaagaagccctggctgggtgggagccaatgggagtgattgggctcatcctcccccctactttctcctttcttgaaatgatgtggagaatttgtcccgctcttgccgtgggctgtacagtcgtggccttggtcccacctgcctcacccgctcccttgctcttagcccagttagcaggggagttgggcccattccccggaatactgaatgtattgagcggaccagcttctctggtccccatattggcttcccagcctggcatccggaaggtggctttctgtggtgctcctgaggagggcagggctctccgacggagtctggctggcgagtgtgcggagttggggctcgccctgggcaccgaatcgctcctactgctgacagatacagctgacgtcgatagtgcagtggaaggtgtcgtggacgctgcctggtctgaccgaggtcccggtgggctcagactgctcatccaggagagcgtctgggatgaggctatgaggagactacaggagcggatgggccgtttaagaagcggaagggggttggatggggctgtggacatgggggctcgtggagctgctgcgtgcgatctggtgcagcgattcgtgagggaggcccagtcacagggggctcaggttttccaggccggagacgtgccaagtgaaagaccattctacccacccacactggtttctaatcttcctcctgctagcccctgcgcgcaggtggaggtgccatggcccgtcgtggtggcatcaccgttccgcactgctaaggaggcattgctcgtcgccaacgggacgcctcgcggaggatctgcgagcgtctggagtgaacgcttgggtcaagcactggaactcggctacggtctacaagtgggtacagtttggatcaatgcacacggactgcgggatcctagtgtccctacgggcggatgtaaagagtctggatgttcatggcacggtggtccagacggactctatgaatacttgagacctagcgggacacccgcaaggttatcttgtttatcgaaaaatctgaattatgacacatttggtctggccgtccccagcactctgcccgcaggacccgaaattggaccctctccagccccaccatacgggctgtttgtcggcggaaggttccaggcgccaggtgcccgatcctcaagacctatccgcgattctagtggcaacttgcacggatatgtagcagaaggcggagctaaagacattaggggcgctgttgaagccgctcaccaggcattccctggctgggcgggacagtcccctggggcacgggcagcgctgctttgggctctcgcagctgcactcgaacgtcgaaagagtactctagccagcaggctggaaaggcaaggggctgagctgaaagcagccgaggccgaagtcgagctatctgctcgcagacttcgtgcctggggagccagagttcaggcccagggccacacattgcaagttgccggactcagggggcctgtactcaggctacgtgaacctctaggcgtgctggccgtagtatgccccgatgagtggccgctactggcatttgtgtccctcctggccccagctctggcttatggtaacacagtcgttatggtccccagtgcagcctgcccactgctggcattggaggtgtgccaggatatggcaaccgtgttcccggcaggacttgctaatgtggtcaccggagaccgggatcatctcaccagatgtctggctctgcaccaggatgtacaggccatgtggtactttggttccgcccagggcagtcagttcgtcgaatgggcgtctgccggaaacctgaagcccgtttgggctagtcgcggatgtccgagggcctgggaccaggaggcggagggtgcaggtccagagttgggcttacgagttgccaggacgaaggctctgtggctccccatgggagactag

SEQ ID NO: 214000 - DNA, 1914 bp, synthetic construct
  misc_feature 1..1914: note = Description of Artificial Sequence: Synthetic coding sequence
  source 1..1914: mol_type = other DNA
atgggggtgatcggcctcatccttccccctacattctcgttccttgagatgatgtggcgcatctgtccagctctggccgtcggctgtaccgtcgtcgccctggtgccaccagcctcaccagcccctcttctgctcgctcagctagcaggcgaactggggcctttccctgggatcctcaatgtactctcaggccctgccagtctagtccctattttagcaagtcagccaggcattagaaaggtggcattttgcggagctcctgaggaggggcgtgctcttcggaggagcctagcgggagaatgtgctgagttaggcctggccctcgggactgagagtctattactgctgactgacacagcagacgtagactctgcagttgaaggggtggttgatgccgcttggagcgacaggggcccaggaggactgcgtctcctcattcaggagtccgtatgggacgaggccatgcggagacttcaggagagaatggggagactgaggagtggacgcggtctcgacggggctgtagatatgggggctagaggagccgctgcatgtgatttggttcaacgcttcgtgcgcgaggctcaaagccagggggcacaggtatttcaggctggggacgtgccatctgaaagacctttttatccacccaccctagtgtccaacctgccgccagctagcccttgcgctcaggttgaggtgccctggcccgtagtggtggcatccccctttcgaaccgccaaagaggctctcctggtggctaatggcaccccgagagggggatcggcaagcgtatggtccgagcgactcggccaggccctggaactgggctacggattacaagtcggtacagtgtggatcaacgctcatgggttgcgtgatccatccgtccctacgggtggatgcaaggaatctgggtgtagttggcacggagggccagatgggttgtatgagtatcttcgtccatcagggacccccgcaaggctcagctgcctgtcaaagaacctgaattatgatacctttgggctcgcagtccctagcacactacccgcagggcctgagataggtccttcgcccgctcctccctatggcctgttcgtgggtggccgattccaggcgccaggggctaggtcatctcggcctatccgggattctagcgggaatctgcacggttacgtggctgaggggggagcgaaagacattagaggtgccgtggaagcagcccatcaagccttcccgggatgggccggtcaatcgccaggggcacgggcagccttactgtgggcccttgctgctgccctggagcgcaggaagagcacgctggcctctaggctagagagacaaggagcggagctcaaagcggctgaagctgaggtggagctgtccgcccgtagattgcgggcatggggagcacgggtccaggcacagggtcacactttacaggtggccggattacggggacccgtgctgagactccgcgagcctctcggggtacttgcagtggtgtgcccagatgaatggcctctcctggcctttgtctcactgcttgcacctgctctggcttacggcaataccgtggtaatggttccctcagctgcttgtcccctcctcgctctcgaggtgtgtcaggacatggctacggtattccccgctggtttagcaaacgtagtcacaggcgacagagaccaccttactcggtgtctcgcgctccatcaagatgttcaggcaatgtggtattttgggtcggcccagggcagccaattcgtggagtgggcttcagctggaaatcttaagccggtctgggccagccgaggttgtccacgtgcctgggatcaggaggctgagggggctggtcccgaacttggccttcgcgttgctagaacaaaagctctttggctgcctatgggagattag

SEQ ID NO: 214001 - DNA, 2256 bp, synthetic construct
  misc_feature 1..2256: note = Description of Artificial Sequence: Synthetic coding sequence
  source 1..2256: mol_type = other DNA
atggcagctacgagggccggaccacgggctcgcgaaatctttacaagcctggagtatggcccagtgcccgagtcacatgcatgcgcccttgcctggctggacacacaggatcggtgtctgggacattatgtgaacggaaaatggctcaagccagagcatagaaacagtgtgccatgccaggatcccattacgggcgaaaacctggcatcgtgcctccaggcccaggcagaggacgtggccgcagccgtggaagctgctcggatggctttcaaggggtggtctgcgcacccaggggtggtaagggcccagcacctgacccgcctagccgaagtgattcaaaaacaccagaggctgctttggaccttggaatctcttgtcacaggccgtgcggttagggaggtgcgcgacggagatgtacagcttgctcagcagctgttacattatcatgccatccaggcaagtacacaggaggaagccctcgccggatgggaaccaatgggcgtgataggcctgatacttccccctacattctcattcctggaaatgatgtggaggatctgcccggctctcgcagtgggatgtaccgttgtcgctctggtgcctcctgcctctccggctcccctgctgctcgcgcagctagccggagagctgggacctttcccaggaattctgaatgtgctgagtggaccagcatcactggttcctattctggcttcacagcctggcattagaaaagtcgccttttgtggagccccagaaggaggactgcgcctactgatacaggaaagcgtttgggacgaggcaatgcggaggctgcaagagagaatgggaagactaaggtcgggccgaggattggatggcgctgtggatatgggggcacgcggagcggctgcatgtgacctcgtgcagcgatttgtccgtgaagctcagtctcagggggctcaggttttccaggcaggtgacgtgccatctgaacgccctttttacccccctaccctcgtctccaacctgccgcctgcaagtccatgcgcccaggtggaggtgccttggcctgtcgtggtggcctccccattcagaaccgctaaggaggctcttctggtggccaatggaactcccaggggaggctctgcgtccgtgtggtccgagcgtctgggacaggctctagaattgggctacggtctccaggttggtacggtctggatcaatgcccatggactccgtgatccctcagtgcctaccgggggttgcaaggagtccggctgttcgtggcacggtgggccagatggcctttatgaatatctgagaccttctgggacccctgccagactgtcttgcctgagcaagaacctcaactacgacacttttgggctggcagtgccctccactctacctgcaggcccagagatcggcccttcacctgctccaccatacggtctgtttgtgggtgggcgtttccaagccccaggcgctaggagttctcggccaattagggactcttcaggcaacctccatggatacgttgcagagggaggagccaaagatatcagaggagcagtggaagcagcccatcaagccttccctggttgggcaggtcagtctcctggcgctcgcgctgcgctcctgtgggccctggccgcagcgctggagagaagaaaatccacattggcgagtcgactagagaggcagggagccgagctcaaggccgctgaggccgaggtcgagttgtccgctaggcgattgagagcgtggggagcgagagtgcaggctcagggacacaccctgcaggtcgctggtcttaggggacccgtgcttaggttaagagagcccctgggagtgttagctgtcgtttgcccagacgagtggccactcctggccttcgtaagcctgcttgcccctgctctggcctatggcaacactgtcgttatggtgccctcagccgcatgccctctcctcgctctggaggtgtgccaggatatggccactgtctttcctgcagggcttgctaacgtcgtaacaggtgatcgagaccacctaacacgctgtttggctcttcaccaggacgtccaggcgatgtggtacttcggctctgctcaaggctcccagttcgtggagtgggcttctgccggaaatctgaagccagtgtgggcatccagaggatgtccaagagcctgggaccaggaggccgaaggggctggaccagaactaggcctgcgagtggctagaacaaaagctctgtggcttcccatgggagattag

SEQ ID NO: 214002 - DNA, 1920 bp, synthetic construct
  misc_feature 1..1920: note = Description of Artificial Sequence: Synthetic coding sequence
  source 1..1920: mol_type = other DNA
atgagaactggtgttattgggcttatcctccctcctaccttttctttcctggagatgatgtggagaatctgcccagcccttgcagtgggttgtaccgtagttgctctggtgcccccagctagtcccgcaccgttacttctcgcgcaactggccggagaactggggccttttcctggaatcctgaacgtattgtccggccctgcctctcttgtgcctatcctggcttcccagcctggcatacgtaaagttgcattttgtggggcaccggaagaagggcgagcattgcggcgatctcttgccggagagtgcgcagagctgggcttagccctggggacagagagtctcttgcttctgacagacaccgccgacgtcgatagtgctgttgaaggcgtagtggatgctgcttggtcggatcggggacctggaggactccgcctgctgatccaggaatccgtatgggacgaagctatgcgaaggctccaagaaaggatgggacgcttgcggagtgggcgtggtttagatggtgcagtggatatgggggctcggggtgccgcagcgtgcgacctggtccagcggttcgtccgagaggcccaaagccagggggcacaagttttccaggctggagatgtaccaagtgaaagaccattttaccccccaaccctcgtctctaatctaccacctgcctctccatgcgcacaagtcgaggtgccgtggcctgtcgttgtcgcttcccccttccgaaccgccaaggaggccctcctggtagcgaacgggacaccacgtggaggcagtgcatctgtctggagtgagagactcggccaggctctcgaactggggtatggcctacaggttggcacggtgtggatcaatgcacacgggctacgggatccttcggtgcccactggcggatgcaaggagagtggttgctcatggcacgggggtccggatggtctatacgaatacttgagaccctcaggcacaccggctagactcagctgtctgagcaagaacctgaactatgacaccttcggcctcgccgtgccatcgaccctgcccgctggacctgagatcggcccatctccagcaccgccatacggactgtttgtaggaggccgtttccaggcaccaggcgctcggagcagccggccaatcagagactcatcagggaatctgcacgggtatgtggctgagggcggagctaaagacatccgaggggcagtggaggccgcacatcaggcatttcctggatgggcagggcagtccccgggagcccgagcggctttactttgggcgttggcagccgctttagagcgccgtaagtccacgctggcctctcgtctggagcggcaaggtgccgaactcaaggccgcagaagccgaagtcgaactttcagctcgtagactacgtgcatggggagccagagtacaagctcagggccacacgttgcaggtcgctggattacgagggccagtcctccggctcagagagcctctgggagtgcttgcggtggtctgtccagacgagtggccacttctggcctttgtgagtctgctggcccctgcacttgcatacgggaacacagtggtcatggtccccagtgctgcatgtccgctgctcgcactggaggtctgtcaggacatggccacagtgttccctgctggcctcgctaacgttgtgacgggagatcgcgaccacttgaccaggtgcttagccctccaccaggacgttcaggcaatgtggtatttcgggtccgcccagggcagccagttcgtcgagtgggcatccgcaggtaacctaaagccagtctgggcatccagaggatgcccccgtgcatgggatcaggaggcagagggcgcaggcccagagcttgggctcagggtcgccaggaccaaggctttgtggctgcccatgggggactag

SEQ ID NO: 214003 - DNA, 2382 bp, synthetic construct
  misc_feature 1..2382: note = Description of Artificial Sequence: Synthetic coding sequence
  source 1..2382: mol_type = other DNA
atgctctcgcaggtctatagatgtggctttcagcctttcaatcagcatcttctgccttgggtaaagtgcacgacagtgttcagatctcattgcattcaaccttccgtgatcagacatgtgaggtcatggtccaacataccgttcatcactgtccccttatcaaggacccatgggaagtcttttgcccataggtctgaactgaaacacgcaaaaagaatagtggtgaagctgggtagtgctgtggttacacggggtgacgagtgcggccttgctctgggtagactggcctccatagtagagcaggtatcggtgctgcagaatcagggaagagaaatgatgcttgtgaccagtggagcagttgcatttgggaaacaacggctgcggcacgaaatcctcctgtcccaatccgttcggcaggctttgcatagtgggcagaaccagcttaaagagatggcgataccagttctcgaggcacgcgcttgtgcagcggcaggacaatcgggtctgatggctctctacgaggcaatgttcacacagtatagtatctgtgcagcacagatcctagtcactaatctggacttccacgatgagcaaaagcgccgaaacctaaatggtaccctgcatgaacttcttcggatgaatatcgtgcccattgttaacacaaacgacgctgtcgtgccaccggcagaacccaacagcgatctgcagggtgtcatctccgtcaaggacaacgactctttagctgcaaggctcgcagtggagatgaagaccgacctattgattgtgctgagcgacgtcgagggcttgttcgatagtcctcctggctcggacgatgcgaagctgattgacatcttttaccctggtgaccagcagtctgtcacattcggtacaaaaagtcgcgtggggatggggggaatggaagccaaggtgaaagccgcactctgggctctgcagggaggaacctccgtcgtgatcgcaaacggaactcatcctaaggtgtctggacacgtaataactgacatcgtggaaggcaaaaaggtcgggacgtttttttcagaagtgaagccggctgggcctaccgtggaacagcagggcgagatggctaggagcggaggacgtatgttggccaccttagagccagagcaacgggctgaaatcatacatcaccttgcggaccttttgacagatcagcgtgacgagatactgcttgccaataaaaaggatctcgaggaggcagaaggccgactagccgcaccattactcaagagactttctctcagcacatctaaactgaattccctggcaatcggacttcggcagattgcagccagctcacaggatagtgtgggacgagtcctcagacggacccgaattgccaagaatctggaactagagcaggttacagttcctattggcgtgctcctcgttatctttgagagccggcctgactgtcttcctcaggttgccgctctggccattgcttctggaaatggactgctcctgaaagggggtaaggaggcggctcattcaaatcgcatcttgcacctgttgacacaggaggccttatctatccatggtgtcaaagaggccgtccagctggtcaatacgcgcgaagaggtggaggacttgtgccgccttgacaaaatgattgacctgattatccctagggggagctcccagctggttcgcgacatccagaaggcagctaaaggtatacccgtgatggggcattcagaagggatctgtcatatgtacgttgactctgaggccagcgtagacaaagtgaccaggctggtgagggatagcaaatgtgagtaccctgctgcctgtaacgccctcgagactctgcttatccaccgcgaccttttgcgcaccccgttgtttgaccagatcatcgacatgctgcgtgtggagcaggtcaagatccatgccggacccaaattcgcctcctacctgacattctccccttcagaggtgaaaagtctgcgcacagagtacggcgatctcgaattgtgcattgaggttgtagataatgttcaggatgcaatagaccatattcacaagtatggctcttcacacactgacgtgattgtgaccgaggatgagaatactgctgagttctttctgcagcacgtcgatagtgcatgcgtattttggaatgccagtacacgtttctccgacggatataggtttgggcttggcgcagaggtagggattagtaccagccggatccatgcaaggggacccgtagggcttgagggattgctaacaactaaatggctgcttcgaggcaaggaccacgtggtgagtgacttttctgaacatggctctctaaaatacctacacgaaaatcttccaatcccccagagaaacactaactag

SEQ ID NO: 214004 - DNA, 2388 bp, synthetic construct
  misc_feature 1..2388: note = Description of Artificial Sequence: Synthetic coding sequence
  source 1..2388: mol_type = other DNA
atgttatcgcaagtgtatagatgcggattccaacctttcaatcagcacttactgccgtgggtcaagtgcaccacagtgtttaggtctcattgcattcagcccagtgttattcggcatgtccggtcctggagtaatattccgttcatcactgttccactatctagaacacatggaaagtcctttgcccacagatccgagcttaaacacgccaaacgcattgtggtgaagctcggctctgctgtcgttactcgtggtgacgagtgcggcctagctctcggtcgcttagcttctattgtcgagcaggtgtcagtgctgcagaatcagggaagagagatgatgttggtaacctctggagcggtagccttcgggaagcagcgtctaagacacgagatccttctgagccagtcagtgcggcaggccctgcattccggccaaaaccagcttaaggaaatggccatcccggtcctcgaagccagagcctgtgcagccgcagggcagagtggtttgatggctctttacgaagccatgttcactcagtacagcatttgcgcagcccagatcctcgtcaccaacctcgactttcacgacgagcaaaagcggagaaacctcaatggcactctccatgaacttctccgcatgaatatcgttccaatcgtcaataccaatgatgctgtggtccctcctgccgaacctaacagtgatctccaaggggtcaacgtgataagcgttaaggacaatgacagccttgctgcacgcctcgcagtggagatgaagaccgatctattgatcgtgcttagtgacgtggaaggcctcttcgattctccgccagggagcgacgacgctaagttgatcgacatcttttacccaggtgaccagcagtcagtcacctttgggaccaaatctagagtcgggatgggtggcatggaggccaaagtcaaagccgctctgtgggcacttcagggcggtacatctgtggtcatcgcaaatggcacccatcctaaggtgtctgggcatgtgatcacagacattgtggagggtaagaaagtgggcacctttttctctgaggtgaagcctgcagggccaactgtggagcagcagggtgagatggcgcgatcaggcggacgaatgctcgccacccttgagcccgagcaacgggcagaaatcatccaccatctggctgatctgcttacagaccagagagatgagattctcctggccaacaagaaggatcttgaagaggcggagggacggctagctgcccctctcctaaagagactgtccttatctacttcaaagctcaactctctcgctatcggactgaggcagatcgccgcatcatcacaggatagcgtaggcagggtgctccgcagaaccagaattgccaagaacctagagttagaacaggttacagtcccaataggagtcctgttggtcatctttgagtctcgacccgattgtctcccacaagtggctgcccttgccatcgctagcgggaacgggctgttgctgaagggcggtaaggaggctgcacacagtaatcgtatcctacatctgttgacgcaggaggcactgtcaattcacggagtgaaggaagcagtccaactggttaatacccgggaggaggtggaggatctgtgcaggctggacaagatgattgatttaattataccgcgagggagctcccagctagttcgcgacatacagaaggccgcaaaggggatcccagtgatgggccattccgaaggcatctgtcatatgtacgtggattctgaagctagtgttgataaggtcacacgactcgtgcgggatagcaagtgtgagtatccagccgcatgtaacgcactggaaaccctactcatacatagagacctcctgaggacccctctcttcgatcaaataatagacatgttgcgcgtggagcaagtcaaaatccacgcaggaccgaaatttgcctcttatctcaccttctccccctctgaggtcaaatctctcaggacagagtatggcgatctagaactttgcatcgaggtggtggataacgtacaggatgccattgaccatatccacaagtacgggagcagtcacacagatgttatcgttactgaggacgaaaatactgccgaattcttcttgcaacatgtggatagtgcatgtgttttctggaacgccagtaccagattttcagatgggtataggtttgggctcggggctgaggttggcatctctaccagccgtatccacgctcgtggcccagtcggccttgaaggattgttgactactaagtggctcctccggggaaaggaccatgtggtgtcagacttttcggagcacggttcactgaaatatctgcacgaaaacttaccgatccctcagcgaaacacgaattag

SEQ ID NO: 214005 - DNA, 1554 bp, synthetic construct
  misc_feature 1..1554: note = Description of Artificial Sequence: Synthetic coding sequence
  source 1..1554: mol_type = other DNA
atgctgcgggctgccgctcgttttgggcctagacttggccgtcggttattgagtgcagccgctacgcaggctgtgccagcccctaaccaacagccagaggttttctgtaaccagattttcattaacaacgaatggcacgatgccgtcagcaggaaaactttcccgactgtgaacccaagtactggcgaggtcatttgccaagtagccgagggagataaggaagatgttgacaaagccgtcaaagcggctcgggcagctttccagctcggaagcccatggagacggatggatgcctctcatcggggtcggctgttaaaccgcttggccgacctgatcgagcgggataggacctacctcgccgctctggaaaccctcgataacgggaaaccgtatgtcatatcctacctggtggacttggatatggtattaaaatgtcttaggtactatgccggatgggccgacaagtaccatgggaaaaccattcctatagatggagactttttctcatatacgaggcacgagcccgtgggcgtctgtggacagataattccttggaactttcctctgttaatgcaggcttggaagctgggcccagccctcgctactggaaatgtggtcgtgatgaaggtcgctgaacagacacccctgaccgccctgtacgtggccaacctgattaaagaagccggttttcctcctggagtggtgaatattgtgcccggatttggccctaccgctggcgctgctattgcttcccatgaggacgtggacaaagttgccttcacaggaagtaccgagattggcagagtgatacaggttgccgcagggagctctaacctaaagagggtgaccctggagcttggcggaaagtctcctaacattatcatgagtgacgcggatatggactgggcagtcgaacaggctcacttcgcacttttcttcaatcaaggacagtgctgttgtgctggctctcgcactttcgtgcaggaagatatctatgacgaattcgtagagcgttccgttgcccgtgcgaagtcacgagtggtcggcaatccgtttgacagcaagaccgaacagggtcctcaggtggatgagacacagtttaagaaaattctgggttatattaacacggggaagcaagaaggcgctaagctcctgtgcggagggggtattgctgctgatcgtggctacttcatccagccaacagtctttggtgatgttcaggatgggatgacaatagcaaaagaggagatattcggcccagttatgcagatcctgaaattcaaaactatcgaggaggtggtgggcagagcaaataactccacatacggcctggccgctgctgtgtttactaaagacctggataaagctaactatctgtctcaggccctgcaggcgggaactgtgtgggtgaactgctacgacgtattcggcgcacagtctccatttggagggtacaagatgtcaggcagtggaagggagctcggcgagtacggattacaggcctataccgaggtaaagacagtcaccgtaaaggtcccccagaaaaacagttag

SEQ ID NO: 214006 - DNA, 1413 bp, synthetic construct
  misc_feature 1..1413: note = Description of Artificial Sequence: Synthetic coding sequence
  source 1..1413: mol_type = other DNA
atgctgagggccgcagcgaggtttggcccacgcctggggagacggctcctgtcggccgctgccactcaggctgtacccgctcctaaccagcaacctgaggtcttctgcaatcagatttttattaacaatgagtggcatgatgcggtgagtcgtaagactttcccaactgtgaatccgtctacaggcgaggtgatctgccaggtcgcagaaggcgacaaggcactcgagactctcgacaatgggaaaccttacgttatttcgtacctggtggatcttgatatggtgctgaagtgccttcgatactacgcgggatgggctgataagtaccacggcaaaaccattcccattgacggagactttttcagctacaccaggcacgaacccgttggcgtgtgcgggcaaattatcccctggaattttccactgctgatgcaggcctggaagctcggaccggctttagccaccggaaatgtggtggtgatgaaagtggctgaacaaactccccttacagccttatacgtcgcaaacctgatcaaggaagccggatttccacccggtgtcgtcaacattgtgcctggctttggaccgactgcaggtgcggcaatcgcatcgcacgaagacgttgataaggtcgctttcacgggttcaactgagattggcagagtgatccaagttgccgctgggtcgtcaaacctgaagcgcgtcactttagaacttgggggaaagagcccaaacattattatgtccgacgctgatatggactgggctgttgagcaagcccacttcgccctgtttttcaatcagggccagtgctgttgcgcgggttctcggacattcgtgcaggaagatatctatgacgagttcgtagagagatcagtggcccgtgcgaagagcagggttgtaggaaatccctttgattcaaaaactgaacagggcccacaggtcgacgaaacccagttcaagaagatcctgggctacataaatacaggtaaacaagagggggctaagctcctgtgtgggggtggcattgccgcagacagggggtactttatccagcccacagtattcggtgatgtccaggatggtatgacaatcgccaaggaggaaattttcggacctgtgatgcagatcctgaaatttaagacaatcgaagaagtggttggacgagcaaacaactctacgtatgggttggccgcagccgttttcactaaggacctggataaagctaactatctctcgcaggcccttcaggctggcacagtctgggtgaactgctatgacgttttcggagctcagtcccctttcggcggttacaaaatgtccgggagcggaagggaactgggcgaatatgggcttcaggcatataccgaggtgaagacagtaaccgtgaaagtccctcaaaagaatagctag

SEQ ID NO: 214007 - DNA, 1989 bp, synthetic construct
  misc_feature 1..1989: note = Description of Artificial Sequence: Synthetic coding sequence
  source 1..1989: mol_type = other DNA
atgcggggagcaggtccttccccgagacagagcccacgcacgctccgaccagacccaggacccgctatgtctttcttccgcagaaaggtgaaaggcaaggaacaggaaaaaacttcagatgttaaatcaatcaaagctagcattagcgtgcacagtccacagaaatccacaaagaaccacgctcttctggaagctgctgggccatcccacgtggctataaacgccatctcggctaatatggattcgttttcatccagtaggaccgctacgctgaagaaacagcctagtcacatggaagcagcgcacttcggagatctggggaggtcatgcctcgattaccagactcaggagaccaagtcctccctctcaaaaactctggagcaagtcctgcacgataccattgttctgccttactttattcagttcatggaattgcgcaggatggagcacctggtgaagttttggcttgaagcagagagtttccatagcacaacatggtcaaggattcgggcacactcacttaacacggtgaagcagtcctcgctggccgagcccgtgtcgccaagcaaaaaacatgagacaactgcttctttcctgactgacagcctggataagcgcctggaggactcaggaagtgcacagttgttcatgacccactccgaaggtattgatttaaacaataggactaattcaacccaaaaccatttactgttaagccaggagtgtgatagcgcacattctctaaggctcgaaatggcaagggcaggcacccatcaggtctctatggaaacgcaggaaagcagtagcacccttaccgtggctagccggaactccccggcaagtcccctcaaggagctatccggtaagctgatgaagagcattgagcaagatgctgtcaacacttttacaaagtacattagccctgatgctgctaaaccaatccctatcaccgaagccatgaggaatgacataatcgccagaatctgcggagaggacgggcaggtggacccaaattgttttgtcctagcgcaatctatcgtttttagtgccatggaacaggaacatttttccgaatttctgaggtctcatcacttttgcaagtaccagatcgaggtgctgaccagtgggaccgtctacctggcagatattttattctgcgagtccgcccttttttatttttctgaatatatggagaaagaggacgccgtgaatattttgcagttctggctggccgctgataacttccaaagccagctggcagcgaagaaagggcagtatgatggtcaggaggcgcagaatgacgccatgatcctgtatgataagtacttcagcctccaagccactcatccacttggattcgatgacgtggttagactggaaatcgaaagtaacatatgtcgtgaaggaggccctctccctaattgtttcaccacccctttgcggcaagcttggactaccatggagaaggtctttcttccaggctttctttccagcaacctctactacaagtatctcaatgacctgattcatagcgtccgtggcgatgagtttcttgggggaaacgtgtccttgacagcacccggatccgtcggacctcctgacgaatctcacccaggcagttcagatagctctgccagtcagtcttctgtcaaaaaagccagtataaagattctcaagaattttgacgaggcaattatagtggatgcggcaagtctggaccccgagtcactgtaccagaggacgtatgctggtaagatgacttttggccgtgtgagtgatctggggcagttcattcgagaaagcgagcccgagcccgacgtccggaaaagcaaggggtccatgtttagccaggcaatgaagaagtgggtgcaaggcaacacagatgaagcgcaggaggaactcgcatggaaaatagccaagatgattgtttctgatattatgcaacaagctcaatacgatcagcctctggagaagtcgaccaaattatag

SEQ ID NO: 214008 - DNA, 1536 bp, synthetic construct
  misc_feature 1..1536: note = Description of Artificial Sequence: Synthetic coding sequence
  source 1..1536: mol_type = other DNA
gaggttcagcggacccctcaccctacttttgaatacttcttctttctgtcacggaagttacctggtcaggagctgcaagggctgaacggtcgcgaagctggaagcctgaacacgtcccccctcggcagttgtcgaagtcgttcaccaagctatcgcgagcgactgtgtcaaaggcgccatgagcaggaccagaggggtagggaggcacgccctagaaggctgcagggtaggactcgtcctctgcagttcaggatccagcagcttgaagcactgcagagactgatccaggaacaggagcaggaactggtcggagctctggccgctgacctgcacaagaacgagtggaacgcctattacgaagaggtggtgtacgtgcttgaggaaatagaatacatgattcaaaaactccccgagtgggcagcggacgagcctgtagagaagacacctcaaacacagcaggacgagctttatatccatagtgagcccctgggcgtggtgctggtgattgggacctggaactacccattcaatctcaccattcaaccaatggtcggcgctatcgccgctggaaatagcgtcgttctcaagccttccgagctgtcagagaatatggcatccctgctggcaaccattataccacagtatctcgacaaggatctgtatccagttataaatggcggagtcccagagaccactgagctgctaaaggaacgcttcgaccacattctgtatacaggtagcaccggggtggggaagatcataatgacagctgccgctaagcacctgacacctgtaacattggagttgggcggaaagtctccttgttatgtagacaaaaattgtgatctcgatgtggcctgccggagaatcgcttgggggaagttcatgaacagtggacagacttgcgtggctcccgactatatactgtgcgaccctagtatccagaaccagattgtggagaaacttaaaaagtctcttaaagagttttacggtgaggacgccaagaagtccagggattatggtcgcatcattagtgccagacattttcagcgagtgatgggcctcatagagggccagaaggtagcttatggaggaactggcgacgccgcaacgcgatatattgctcctaccatcctgaccgacgtggatccccagtctcctgtcatgcaagaggagatctttggcccagtcctgcctattgtttgtgtgcgaagtctggaggaggcgatccagttcatcaatcaacgggagaaacccctagctctgtatatgttcagctctaatgacaaggttattaaaaaaatgatcgcagaaacgtccagcggtggcgttgccgcaaatgatgttatagtgcacataaccttacatagcctgccgtttggaggcgttgggaattcaggaatgggatcctatcacgggaaaaagtccttcgaaacattcagccacagaagaagctgtctagtcagacctctcatgaacgatgagggcttaaaggtgagataccccccttcacccgcaaagatgactcagcactag

SEQ ID NO: 214009 - DNA, 1170 bp, synthetic construct
  misc_feature 1..1170: note = Description of Artificial Sequence: Synthetic coding sequence
  source 1..1170: mol_type = other DNA
atgtcaaaaattagcgaagccgtgaagagggccagagccgctttcagttctggccgtactcgacctctacagtttaggatccagcagctagaggccttacagaggttgatccaagagcaggagcaggaattagtcggtgctctggccgctgatttgcataagaatgagtggaatgcctattatgaggaggtcgtctacgtgctggaagagatcgagtatatgatccagaagctccccgaatgggcagcagacgaaccagttgaaaagaccccgcagacccaacaagatgaactctatattcactctgaacccctgggggtcgtgctcgtcatcggcacctggaattacccattcaacctcacaatccagcctatggtcggggctattgcggctggcaacagtgtggtgctcaagcccagcgagttgagcgagaatatggcttccctattagcaaccattataccccagtacctcgacaaagatctgtatcccgtaattaacggaggagtaccagagactacggagctgttaaaagagcgcttcgatcatatcttgtataccggcagcactggggtagggaagatcattatgaccgctgcagccaagcacctcacccctgttactctcgagttgggaggcaagagcccctgttatgtcgataagaactgcgatctggatgttgcgtgcagacggatagcttggggaaagttcatgaattctggacagacctgtgtcgctccagattatatcttgtgtgaccctagcattcaaaatcagatcgtggagaagcttaagaagtctttaaaagagatatttggtccggtcttacctatcgtgtgtgtccgctccctggaagaggcgatccagttcattaatcagcgggagaaacccctggccctgtatatgttctcatcaaatgacaaggtgatcaaaaagatgattgccgaaacaagctcaggcggagtcgccgcaaacgacgtgatagtacacattacactgcattccctgcccttcgggggtgtgggcaattctggcatggggtcctaccacggcaagaagagtttcgaaactttcagccaccggaggtcttgcctggtaagaccattaatgaacgacgagggacttaaagttagataccctcctagcccggcaaaaatgacacagcactag

SEQ ID NO: 214010 - DNA, 693 bp, synthetic construct
  misc_feature 1..693: note = Description of Artificial Sequence: Synthetic coding sequence
  source 1..693: mol_type = other DNA
atgtcaaagatctcggaggctgttaaaagggctagagcggctttctcttcagggcgaacaagaccactgcaatttaggattcagcaattggaggcgctgcagcgcttgatccaggagcaggagcaagaattggtgggagctctggccgcagatctgcataaaaatgagtggaatgcctactatgaggaggtggtctatgtgctcgaagaaatcgagtacatgatacagaagcttccagaatgggctgcagatgagccagtggagaagacccctcaaacccagcaggatgaactctacattcacagtgagccacttggcgtcgtgcttgtgatcggaacttggaattaccctttcaacctcaccatccaacccatggtgggagcaattgctgcaggaaactctgtggttctgaaaccctccgagctttctgaaaatatggccagcctgcttgcaaccataatcccacaatatttagataaggacctatacccagttatcaatggcggagttccggaaacaaccgagctgctaaaggaacgctttgaccatatattatacacgggttcgaccggtgttggcaaaattatcatgacagccgctgccaaacacctaacaccagtaaccctcgaactgggagggaaaagcccctgttatgttgacaaaaactgcgacctcgacgttgcgtgcaggtag

SEQ ID NO: 214011 - DNA, 1119 bp, synthetic construct
  misc_feature 1..1119: note = Description of Artificial Sequence: Synthetic coding sequence
  source 1..1119: mol_type = other DNA
atgtcgaaaatctcagaggccgtgaagagagccagagctgctttttcctccggtcggacacgcccactgcagttcaggattcagcaattggaggctttacagcgcctgattcaagaacaagagcaagagttggtgggagctcttgcagctgacctccacaaaaatgagtggaatgcgtactatgaagaagttgtgtatgtcctggaagagattgaatacatgatccagaaactccccgaatgggccgcagatgagcccgtggagaaaacgccccagacccagcaagatgagctgtatatacactctgaacctctgggcgtggtgcttgtaattggaacttggaattacccatttaacctcactattcaaccaatggtgggagcgatagccgctggaaactccgtagtgttaaaacctagcgagctgagcgaaaacatggcgagtctgctcgctacaattattccccagtatctagacaaggatctgtaccccgttatcaatggtggagtacctgagaccaccgaactgctgaaggagcggttcgatcatattctctacacaggatcaacaggcgtgggaaaaattataatgaccgccgcagccaagcatctgaccccagtgacactggagcttggaggcaaatctccatgttacgtggataaaaactgcgatctggacgttgcttgccgcagaatcgcatgggggaaattcatgaactcaggacagacatgtgtggcccctgattatatattatgcgaccctagcattcagaaccagattgtggagaagctgaagaagtctctgaaagagttttacggggaggatgcaaagaagagccgtgactatgggaggataatctccgccagacacttccagcgcgtcatgggactgattgaaggtcagaaagtggcgtacggcggaacaggcgatgccgcaactagatatatcgctccaactatattgacagacgttgacccgcagtctcccgtaatgcaagaggaaatctttggtcccgtcctgcccatcgtgtgcgtgagaagcttagaagaggcaatacagttcataaaccagagagagaaacccctggcactttacatgttctctagcaatgacaagtag

SEQ ID NO: 214012 - DNA, 1362 bp, synthetic construct
  misc_feature 1..1362: note = Description of Artificial Sequence: Synthetic coding sequence
  source 1..1362: mol_type = other DNA
atgtcaaagatctccgaggcggtgaagcgtgctagagccgctttctctagcgggaggacaagaccccttcagtttcgaattcagcagctggaagctcttcagcgtctgattcaagaacaggaacaggaacttgtcggagcgctcgctgccgatttacataaaaatgaatggaatgcctattacgaggaagtggtctatgttctggaagagattgagtacatgatacagaagctccctgagtgggctgcagatgagccggtcgagaagacccctcagacccagcaggacgaactgtacatccacagtgagccccttggagttgttctggtgatcggcacctggaattatccattcaatctgactatccagcctatggtgggtgcaatcgcggcaggcaactccgttgtactcaaaccatcagaacttagtgaaaatatggctagcttgctcgcaacgatcatcccccaatacctcgacaaggatctctatccggtcattaacgggggagtgcctgagaccaccgagctcttaaaagaaagattcgaccacattctctacactgggagtacaggagtaggaaaaattatcatgactgctgccgctaagcatttgactcccgtgaccctagagctcggcggtaagtccccctgctatgtggacaagaactgcgacctggatgtggcctgcagacgcatcgcctgggggaagttcatgaatagtggacagacttgtgtggctccagattatatattgtgcgatccctcaattcagaatcagatcgtcgagaagctaaaaaaatcattgaaggagttctacggggaggatgctaaaaagtcgcgggactatgggaggattatctcagcacggcatttccagcgcgtgatgggtctgatcgaaggccagaaggtcgcctatggagggacaggcgatgccgctacacgctatatcgctccaactatcctgactgatgtggatccacagagcccagtcatgcaggaagaaatctttggcccagttctccctatcgtgtgtgtgagatcacttgaggaggccattcagtttattaaccagagggagaagccactcgccctttatatgttcagttctaatgataaggtgatcaagaagatgatcgcggaaacgagctccggcggagttgcggcaaacgatgttatcgttcacatcacactgcactcgctgccttttggcggagttgggaattccggcatgggttcttatcatggcaagaaatcttttgaaacattcagccatagacgctcttgtctggtacgccctctgatgaacgatgagggcctgaaggtccgctacccaccaagcccagccaagatgactcagcactag

SEQ ID NO: 214013 - DNA, 1362 bp, synthetic construct
  misc_feature 1..1362: note = Description of Artificial Sequence: Synthetic coding sequence
  source 1..1362: mol_type = other DNA
atgagtaagataagcgaggccgtgaagagagctagagcagccttcagtagtgggaggactaggcctctgcaattccgcatacagcagttagaagccctccagcggttgattcaggaacaggagcaggaactggtgggcgcacttgctgctgatctgcacaagaacgagtggaacgcatattacgaggaagtcgtctatgtgctagaggagatcgaatatatgatccagaagctacccgagtgggcagctgacgagcccgtagagaagaccccccaaactcaacaggacgaactgtacatccattctgagcccttaggagtagttctcgtcattggcacgtggaattatcctttcaacctgactattcagccaatggtgggggcaatagccgctgggaactccgttgtgctgaagccctccgagctgagcgaaaacatggccagcctgctagcgaccattatcccacaatacctcgacaaggacctttatccggtaatcaacggcggagtccccgaaaccacagagctgctgaaggaaagatttgatcacattctgtataccggttcgaccggggttggaaaaatcatcatgactgccgctgccaagcatctgaccccggtcaccttggaactcgggggtaaatctccctgctatgttgacaaaaactgcgatcttgatgtagcctgccgcaggatcgcatggggaaagttcatgaactcaggccagacttgcgtcgccccagattatatcctgtgtgacccaagcatccagaaccaaattgtcgagaaactgaaaaagagtctgaaggaattctacggagaagacgccaaaaagtcccgtgattacggaagaatcatctctgcaagacactttcagagggtgatgggactgattgagggccaaaaggttgcatatggagggactggcgacgccgcaacccggtacattgcacctaccatcctgacagacgtggatccccagagcccagtaatgcaggaagaaatctttggcccagtgttgccaatagtctgcgtgaggagcctggaagaggcgattcagttcataaaccagagggagaagcccctggccctttacatgttctctagcaatgataaagtaatcaaaaaaatgattgctgaaactagctctgggggagtcgccgctaatgatgttatagtgcacattaccctccattccttaccttttggtggcgtgggaaactcaggcatggggagttatcacggtaaaaaatctttcgaaaccttctcacatcggagatcctgccttgtgaggcctctcatgaacgatgaaggtcttaaggttcgctacccaccttcgcctgccaagatgactcaacactag

SEQ ID NO: 214014 - DNA, 1203 bp, synthetic construct
  misc_feature 1..1203: note = Description of Artificial Sequence: Synthetic coding sequence
  source 1..1203: mol_type = other DNA
atgattcagaagttgcctgagtgggccgctgacgaaccagtcgagaagactccacagacccaacaggacgagctgtatatccattccgaaccgctcggggttgtcctggttataggcacgtggaattatccttttaatctgactatccagccgatggtgggggctatcgccgcaggtaatagcgtggttctgaagcctagcgaactgagcgagaacatggccagcctgctggctaccattattccacaatatctcgataaagatctttacccagtgattaacggaggcgtccccgaaacaaccgagctgttgaaagagagattcgaccacatactatacaccggcagcacgggagtgggaaagatcatcatgaccgctgccgcaaagcatttaacaccagtcacactggagctcggcggtaagtctccatgttacgtggataaaaactgtgacctcgacgtggcctgtcggcgtatcgcatggggtaaattcatgaattcagggcagacgtgtgtagcgcctgactacatcttatgtgacccttctatacagaaccagatcgttgaaaagttgaagaagagcttgaaggaattttacggtgaagatgccaaaaagagcagggactacggccgaattatctcagcaagacactttcagcgagtcatgggccttattgagggacaaaaagtggcctatgggggaactggggacgctgctactaggtatattgcacctaccattcttaccgacgttgacccccagtctcctgtgatgcaggaggaaatcttcggaccggtcctgccgatagtgtgcgtgcgctcgctggaggaagctatccaattcatcaaccagcgcgaaaaaccacttgcattgtatatgtttagttctaatgacaaggtgatcaaaaagatgatcgccgagacttcctccggtggcgtggcagctaacgatgtcatcgtgcacatcacgctgcacagcctaccgttcggaggtgtgggaaacagtggtatggggtcctatcacggcaagaagtctttcgaaacatttagccatcggaggagctgcctcgtgagaccgctgatgaatgacgaggggctgaaagtcaggtacccgccatctcctgccaaaatgacccagcactggctatcatggccctgggaaaatcggtcctgtagcccgtcccctgcccctctcttgtgttag

SEQ ID NO: 214015 - DNA, 1458 bp, synthetic construct
  misc_feature 1..1458: note = Description of Artificial Sequence: Synthetic coding sequence
  source 1..1458: mol_type = other DNA
atggaactcgaggttcgccgtgtgcggcaggcattcctgagcggtcgctctcgacctttgaggtttcgtctgcaacagttggaagcactgcgacgcatggtgcaggagcgcgaaaaggacatactgacagctattgctgctgatttgtgcaaatcggagtttaacgtttattcacaggaggttattactgttttgggcgagatcgacttcatgctggagaacctaccagaatgggtgacagccaagcccgtgaaaaagaacgtcctgaccatgctggatgaggcttacattcagccacagccccttggcgtggttctaatcatcggggcatggaactatccgttcgtactcacaattcagccactaatcggagctatagccgcaggaaatgcggtcataattaaaccatccgagttatctgaaaacacagccaagatcctcgccaaactgcttcctcagtatctggaccaggatttatatatagttattaatggcggagtggaagagacaactgaactcttgaaacagaggttcgatcatatcttctacaccgggaacactgctgtgggcaagattgtgatggaagccgctgccaaacacctaactcctgtcacattggaactaggcggtaagagcccgtgttacatagacaaagattgtgatttagacatagtttgccggaggattacatggggcaaatacatgaattgtggccagacctgcattgccccagattatatcctgtgtgaagcaagcctccagaaccagattgtgtggaagataaaagagaccgtgaaggagttctatggagaaaacatcaaggagtcccccgattacgagagaatcatcaatctccgccatttcaagaggatccttagtctgctggaaggacagaagatcgccttcgggggtgagactgatgaagccacgcggtacattgcgccaaccgtgttgactgacgtcgaccctaagaccaaggtgatgcaggaagaaatcttcggacctattttgccgatagtcccagtgaagaatgttgacgaggccatcaatttcattaatgagcgagagaagcccctggccctttacgtcttttcccacaaccacaaactgataaagcgtatgattgacgaaacttcgtcgggcggagttaccggcaacgacgttattatgcattttaccctgaacagcttccccttcgggggagtcgggagtagtggtatgggcgcatatcacgggaaacactcattcgacactttctcacaccagagaccatgtctcctgaagagtttgaagcgggagggggcaaacaaactgcgctaccctcccaactcccaatccaaagtcgattgggggaagttctttttactgaagaggttcaacaaggaaaaactggggctgctcctcctgactttcctcgggattgttgccgctgtgctcgtgaaagcagaatattactag

SEQ ID NO: 214016 - DNA, 1527 bp, synthetic construct
  misc_feature 1..1527: note = Description of Artificial Sequence: Synthetic coding sequence
  source 1..1527: mol_type = other DNA
atggaacttgaagttcgtagggtcaggcaggcctttctgagtggcaggagtagacctcttagattccgactgcagcaactggaggcattgcgacgcatggtgcaagagagggaaaaggacatcctgacagccattgccgctgatttgtgtaagagtgaattcaacgtctactcccaggaagtgattacagtgctgggtgaaattgatttcatgcttgaaaatctgccagaatgggtgactgccaagcccgttaaaaaaaatgtactgaccatgctggatgaggcctacatccagcctcagcctctgggtgttgtccttattatcggagcctggaattatccatttgttttgacaatccaacctttgattggagcgatagccgctggcaatgctgtgatcatcaagccctccgagctgtccgagaacactgcaaagatcctggctaagctcctgcctcagtatctggaccaggatctgtacatcgttatcaacggaggggtcgaggaaacaaccgagctgctcaaacagaggttcgaccacatattctacaccggcaacaccgccgtgggtaagatcgttatggaggccgctgcaaagcacctcacaccagtgacgctcgagctgggtggcaagtctccctgttatatagataaggattgcgacctagatattgtgtgccgtagaataacctgggggaaatacatgaattgcggccagacctgtatagcccctgattacatcctgtgtgaagcttccttacagaatcaaatagtgtggaagatcaaggagaccgtgaaggaattttatggcgagaacatcaaagaaagccccgactacgaaagaatcattaatctgcgccactttaagcggatcctgagcctgctcgaagggcagaaaatcgccttcggaggagaaactgacgaagctaccagatatattgctccaaccgtactcaccgacgtggacccaaagaccaaagtcatgcaagaagaaatttttggtcccattctgcctatcgtccctgtcaaaaatgtcgacgaagcgataaattttataaatgaaagagaaaaacctttagcactctatgtgttttcccacaaccacaagctaatcaagcgcatgatcgacgagacaagctccggaggggtgaccggaaatgacgtgatcatgcatttcactctcaacagctttccattcggaggcgtggggtcctccggtatgggcgcttaccacggtaagcattcctttgacaccttctcccatcagaggccctgtctgctcaagtctctgaaaagggagggagctaacaaactccggtaccccccaaactcccagagcaaggtggattggggcaagttctttttgttgaaacgctttaacaaggaaaagttgggcctgttgctcttgactttcctcggaatcgtggcagctgtgttggtgaaaaagtatcaggccgtcctgagaagaaaggcccttctgatatttttggttgtgcatcgcctgaggtggtcaagtaagcagcgatag

SEQ ID NO: 214017 - DNA, 1458 bp, synthetic construct
  misc_feature 1..1458: note = Description of Artificial Sequence: Synthetic coding sequence
  source 1..1458: mol_type = other DNA
atggaacttgaagtccgaagagtgcgacaggccttccttagcggcagatctcgaccgctgagatttcgcttgcagcagctcgaggctctccgcagaatggtccaggagagagagaaagatatactcactgctatcgcagcagatctgtgtaagtcggaattcaacgtgtacagccaggaagttataacggtgctcggcgagatagactttatgctcgagaatttgcccgagtgggtcactgcaaagccagtgaagaagaatgtcctgaccatgctggacgaagcctacattcaaccccaacctttgggcgtggtgctcatcattggagcttggaactatcccttcgtgctcacaatccaaccattgattggcgctatagccgctggaaacgcagtgataatcaagccaagcgagctgtccgagaacaccgcaaagatcctcgctaagctgctgcctcagtatttggaccaggacctgtatattgtgatcaatggaggagtggaagagacaaccgagctgcttaagcagcggttcgaccatattttctataccggaaatactgcagtgggtaagattgtgatggaagcagctgccaagcatctgacacctgtcacgctggagctgggcggaaaatccccgtgttacatcgacaaggattgcgatttggacatcgtgtgcaggaggatcacatggggtaagtacatgaactgtgggcagacctgcatcgctcccgactacattctttgtgaagcctcactccagaaccaaattgtctggaagataaaagagactgtgaaggaattttacggggagaacataaaagagagtccagactacgagaggatcatcaacctaagacactttaaaagaatcctatccttattggaaggccaaaaaattgcatttgggggagaaacagacgaagccacccgctacattgcaccaaccgttctgacagatgttgatccgaagaccaaagtcatgcaggaagaaatttttgggcctattctcccaatcgttcctgttaaaaatgtggacgaggcaattaatttcattaacgaacgggagaagccactggctctgtacgtgttttctcataatcataagcttatcaaaaggatgattgacgagacttcttccggaggcgttaccggtaatgatgttattatgcatttcaccctgaacagtttcccctttggcggagtggggtcaagcggtatgggtgcctaccacggaaaacacagcttcgacactttttcccatcagcgaccttgtttattgaaatctctgaaacgagagggagccaacaaactcagatatccccctaacagtcagagtaaggtcgattggggtaaattcttccttctcaagcgctttaacaaagaaaagctggggcttcttctcctcacatttttgggcatcgtggccgcagtgcttgtcaaggccgagtactattag

SEQ ID NO: 214018 - DNA, 501 bp, synthetic construct
  misc_feature 1..501: note = Description of Artificial Sequence: Synthetic coding sequence
  source 1..501: mol_type = other DNA
atggaattagaagtcagacgtgtcagacaggcattcctgagcgggagaagccggccactccgattccggctgcaacagctagaggcgctgcggaggatggtccaggagagagaaaaggacatcctgacagcaattgctgccgacctgtgtaaatctgagttcaacgtgtacagtcaggaagtcatcacagtgcttggtgaaatagacttcatgctcgagaatctgccagagtgggtaaccgccaagcctgtcaagaagaatgttctgaccatgctggatgaggcatacatccaaccacagcctctgggagttgttttaatcatcggagcctggaattatcccttcgtgctaaccatccaaccactgatcggcgctatagccgctgggaacgcggtgataataaaaccgtcagaattaagtgagaacactgccaaaatcctggcgaagctcctgcctcaatacttggatcaggacttgtacattgtgataaacggcggatag

SEQ ID NO: 214019 - DNA, 1158 bp, synthetic construct
  misc_feature 1..1158: note = Description of Artificial Sequence: Synthetic coding sequence
  source 1..1158: mol_type = other DNA
atgaaagatgaaccccgatccactaacctgtttatgaagttggacagcgtttttatctggaaggaaccctttgggttagtactgatcatagctccttggaactatccattgaacctgacactcgtgctgctggtgggggctctggccgctgggagttgcgtggtccttaagccctccgaaatatctcaggggactgagaaggtgctcgcagaggtcttaccacaatacctcgaccagtcatgcttcgctgtggtgctgggcggaccccaggagacaggccagctgttagaacataagctcgattacatctttttcactggctctcccagagtaggcaagatcgtgatgacagccgcaaccaagcatctgacaccagtgactctggaactaggaggcaaaaatccctgttatgtcgacgacaactgcgatcctcagacagtggctaaccgcgtggcatggttttgctacttcaatgccggacaaacctgcgttgcccctgattatgtactgtgcagccccgagatgcaggagagactactgcctgccttgcagagtacgattacccgcttctacggggatgacccccaatcttcacctaatctcgggcacatcatcaaccagaaacaattccagaggctgcgagctttgctcggctgcagccgcgtagccatcggaggccaaagtaatgaatctgacaggtatatcgctcccactgtgctcgtcgacgtccaggaaacagagcctgtaatgcaggaggaaatattcgggcctatcttgcctatcgtcaacgtgcagagtgtggatgaggccatcaaattcatcaatcgtcaggagaagcccctagcactatacgcctttagcaatagcagccaagttgtcaaccagatgcttgaacgaacgtcatcaggatcattcggcggaaatgaaggattcacatacatcagcttgctcagtgtcccctttggcggagtaggacactccggaatgggtcgctaccacggtaaattcacattcgacaccttctcccatcaccgcacctgtctcctggccccatcaggactggagaaactcaaggagatccactacccgccttataccgactggaaccaacagcttctgcgatgggggatgggctcccaatcctgcacacttctgtag

SEQ ID NO: 214020 - DNA, 447 bp, synthetic construct
  misc_feature 1..447: note = Description of Artificial Sequence: Synthetic coding sequence
  source 1..447: mol_type = other DNA
atgaaagacgaaccacggtcaacaaatctttttatgaagttggattctgtgtttatctggaaggagccttttggcctggtgcttattattgcgccatggaattacccactgaatctcacactagtcctgctggtcggtgcccttgcagctggcagttgcgtggtcctgaaaccctctgagatttcgcaggggactgaaaaagttctcgcagaagtgctgccacaatatctcgaccagagctgttttgctgtggtgctgggtggccctcaggagaccggccaactcttagaacacaaactcgactacattttcttcacaggttcgccaagagtagggaagatagtgatgacggcggctaccaaacatttgaccccagtcactctggaactgggtggcaagaacccatgttatgtggatgacaactgcgacccccagactgtggcatag

SEQ ID NO: 214021 - DNA, 288 bp, synthetic construct
  misc_feature 1..288: note = Description of Artificial Sequence: Synthetic coding sequence
  source 1..288: mol_type = other DNA
atgaaggacgagccaagaagcaccaacctgttcatgaagctcgactcagttttcatctggaaggagccattcgggctggtgctgatcattgcaccatggaattaccctttaaacttaactcttgttctgttggttggcgcattagcagctggttcatgtgtagttctgaaaccgtctgagatcagccagggcacagagaaagttctagcggaagtacttccccagtatcttgaccagtcctgcttcgccgtcgtgctgggaggcccacaggagaccggacagctttag

SEQ ID NO: 214022 - DNA, 1158 bp, synthetic construct
  misc_feature 1..1158: note = Description of Artificial Sequence: Synthetic coding sequence
  source 1..1158: mol_type = other DNA
atgaaagacgaacccagaagcaccaatctgtttatgaagcttgactcagtcttcatttggaaggaaccctttggattagtgctaatcatcgctccctggaattatcctttgaatttgacgctggtcttgctcgtgggcgctctcgccgcaggaagctgcgtagttctcaaaccttcagaaataagtcagggtacggaaaaagttcttgcagaggtgctgccccagtatcttgaccagtcctgttttgcggtggtcctcggcggtccacaggaaacagggcagctgctagagcacaagctggattacatttttttcactgggtcccctcgtgtcggaaagatagtaatgaccgcggctaccaagcatctgaccccagtcaccctggagttgggtgggaaaaatccatgttacgtggacgataactgtgatccgcagaccgtcgcaaaccgcgttgcttggttttgctactttaacgccggacagacatgcgtggcccctgattatgtgctatgttcaccagagatgcaagagaggctgctccccgctcttcaatctaccatcacgcgtttctacggcgacgatccacagagttctcctaaccttggacacataatcaaccagaaacagttccaaagacttagagccctgctcggctgttcccgagtagctatcggagggcaatcaaatgagtcagacagatatatagcccctacggtactggtagacgtgcaagagaccgaacccgtgatgcaggaagagatcttcggtccaattctgccaatcgtaaacgttcagtctgtagacgaggccatcaaattcataaataggcaagaaaaaccactcgctctctatgctttcagcaacagttctcaagtggtgaaccaaatgctcgaacggacatccagcggctccttcggcggtaacgaaggattcacttatatttctctcctgtcggtcccattcgggggagttggtcactctggtatgggcaggtaccacggtaaattcacattcgatacattctcccaccatcggacatgccttttagctccaagcgggctagagaagctaaaggagatccattaccctccctacaccgactggaaccaacagctgcttcgatggggaatggggtcacaaagctgcacgttactgtag

SEQ ID NO: 214023 - DNA, 1692 bp, synthetic construct
  misc_feature 1..1692: note = Description of Artificial Sequence: Synthetic coding sequence
  source 1..1692: mol_type = other DNA
atgctgctccccgcacctgcactcagaagagccctgcttagcaggccatggactggcgctggcctgcgttggaagcatacgagtagcctaaaggtggccaacgagccagtactagcatttacacagggctcgccggagagggatgcattgcaaaaggccctgaaagatctgaaaggacgtatggaggccatcccttgcgtcgtcggcgacgaagaagtatggacctcagatgtccaataccaggttagtcctttcaaccacgggcacaaagtcgccaaattctgctatgctgataagtccctgctgaacaaggcaatcgaggcagccctcgcggctagaaaagaatgggacttgaaacccatagcagacagggcacagatttttctgaaggctgcagacatgttaagcggtcccaggagggccgaaatactcgctaaaactatggtggggcaaggcaagacagtgatccaagcagagattgacgcagctgctgagctcatagacttcttcagattcaacgcaaaatatgctgtggagctggaaggccagcaaccaatctcagtgcctcccagcactaactccacggtttatagaggactggagggattcgtggcagctatctccccgtttaacttcactgccatcggaggtaacctcgctggcgctcctgccctcatgggaaatgtcgtcctgtggaagccgtccgataccgctatgctggcctcttacgccgtgtatagaatactgcgtgaggccggattgcctccaaatattatccagtttgtcccagccgacggacccctattcggtgatactgtgacatcttccgagcatctttgtgggattaacttcactggtagcgtcccaacctttaagcacttgtggaaacaggtcgcccaaaacctggaccgctttcatacttttcctaggttggccggtgagtgtggcggaaagaattttcatttcgtgcaccggtcggccgatgtggagtctgtggtttcaggaaccctgagaagtgcttttgagtacggcggacaaaaatgtagtgcctgctctcggctttatgtgccccactctctatggccgcagatcaaggggcgacttttggaggaacactcgcggataaaggtaggtgacccagccgaggactttggcactttcttcagtgcagtgattgacgccaaatcttttgcacgcattaagaaatggctggagcacgctcgatctagccccagtctgacaatactagccggaggcaaatgtgatgattcagttgggtacttcgtcgagccatgtatcgtggagtccaaagatcctcaggagcccatcatgaaagaggagatttttgggcctgtgctctctgtgtacgtttatcccgacgacaagtacaaggagaccctccaactcgtggattctacaacatcatatggtttgaccggtgccgtgttctcacaagataaagatgtggtgcaagaagccactaaggtgctacgaaatgccgcagggaatttttacattaatgataagtctaccggatctattgtggggcaacaacccttcgggggagccagagcatctggtacgaatgacaagcctggagggcctcattatattctgaggtggacctccccacaggtgataaaggagacccataaacctctgggggactggtcctacgcatatatgcagtag

SEQ ID NO: 214024 - DNA, 588 bp, synthetic construct
  misc_feature 1..588: note = Description of Artificial Sequence: Synthetic coding sequence
  source 1..588: mol_type = other DNA
atggaggcaatcccttgcgtcgttggagacgaggaggtttggacatccgacgtacagtaccaggtatccccatttaatcatgggcacaaggtggccaagttctgctacgctgacaagagcttgttaaacaaagcgatcgaagccgctctggcggctcgaaaagagtgggacctcaagcctatcgccgacagggcccagatattcctcaaggctgctgacatgctgtcgggtcccaggcgcgctgaaattttagccaagactatggtgggccagggcaagactgtgatacaggctgagattgacgctgccgctgagctgatcgactttttccggttcaacgccaaatacgccgtagaacttgaaggccaacagccgatctctgtccctccaagcaccaactcaaccgtgtatcgaggccttgaaggtttcgtcgccgcaatctcccctttcaactttactgctatcggcggtaacctagcgggagctccggctttgatgctgcgcgaaggcgtggtgaccctcccactatgtcaaatgactaagctgagacataccgctgtaacctatctcgctaggttgagcgattag

SEQ ID NO: 214025 - DNA, 633 bp, synthetic construct
  misc_feature 1..633: note = Description of Artificial Sequence: Synthetic coding sequence
  source 1..633: mol_type = other DNA
atgttactgcccgcacccgctctcaggagggcactgctatccagaccctggactggtgccggacttagatggaaacacaccagttccttgaaggtggcgaacgaaccagtgctggctttcacgcaggggtcaccagagagggatgccctgcagaaggctctgaaagacctgaagggaagaatggaggcgataccttgcgttgttggcgatgaggaagtttggacaagtgacgtgcagtatcaagtatcttctctgttgaacaaagccatcgaggcagctttagcggcacgcaaagagtgggacctaaagccaattgctgatagagctcagatctttctcaaggctgccgacatgctgagtggtccccgacgcgctgagattttggccaaaaccatggtcggacaggggaagaccgtgatccaggcagaaattgacgccgcagcagagctgattgacttctttcgcttcaacgctaagtatgcagtggagctggaaggacagcagcctattagtgtccctcccagtactaattcgaccgtgtatcggggtcttgagggctttgtggccgctatctcaccctttaactttacggctatcggcggaaatctggcgggtgcgccagcgctgatgtag

SEQ ID NO: 214026 - DNA, 1692 bp, synthetic construct
  misc_feature 1..1692: note = Description of Artificial Sequence: Synthetic coding sequence
  source 1..1692: mol_type = other DNA
atgttgctaccagcacctgctctcagacgagctctgctctctcggccatggaccggggctggtcttcgctggaagcacacctcatcgttgaaggtggctaacgaacccgtcctggctttcacccaagggtctcccgaacgcgatgcacttcagaaagcgttgaaggatctgaagggtagaatggaggccataccctgtgtggtcggcgacgaagaggtgtggacatctgacgtgcaatatcaggtgtcaccctttaaccacgggcataaagtggccaagttctgctatgccgacaagtccctattaaacaaggccatagaagctgccctggcagctagaaaggagtgggacctcaagcctattgctgaccgggcacagatctttctgaaggcggcagacatgctgtcagggcctagaagggccgagattctggcaaagacaatggtggggcaagggaaaacagtcatacaggcagagatcgacgctgccgcagagttaatcgactttttccggttcaatgctaagtacgcggtggaactggaggggcagcagcctatctcagtccctccatcaaccaactccacagtctaccggggtctcgaagggtttgtcgcagcaattagtcccttcaacttcacagcaatcggcggtaatctagctggtgcgcctgctctcatggggaacgtcgtcctttggaaaccttctgacactgctatgctcgcgagctacgccgtttaccgtatcctgagggaagccggtcttcctccgaatatcattcagtttgtgcccgcagatggaccgctgtttggcgataccgttacgtcttcagagcatctttgcgggattaattttacaggaagcgtccccacttttaaacacttgtggaaacaggtggctcagaatttggatcgtttccacacgttccctagattggctggggagtgcggaggaaagaacttccatttcgtgcaccggtccgctgatgtggaatctgtggtcagcggtacgctgcgctccgcttttgagtacggtgggcagaagtgttcagcgtgttcgaggctttacgtcccacattccctgtggcctcagatcaagggacgtttgctggaagagcattcccgaatcaaggtgggggaccccgctgaagacttcggaactttctttagcgcagtgattgatgctaagtctttcgctcgtatcaaaaaatggcttgagcacgctaggagttctcctagtctcactatactcgcagggggtaagtgcgacgacagtgtaggatattttgtcgagccgtgtattgtagagtcaaaggatccgcaggaaccgattatgaaggaagagatcttcggacctgtgctatcagtgtacgtgtatcccgatgacaaatacaaggagaccctgcaattagtagatagcacaacctcatatgggctgaccggagccgtgttttcgcaggataaagatgtggtgcaggaagcgactaaggtcctgaggaatgcagctggaaacttttatatcaacgacaaaagcaccggatcaattgtgggacagcagccattcgggggtgccagggctagtgggactaatgataaaccgggtggaccacactacatcctcagatggacatccccccaagtaatcaaagaaacccacaagcctcttggcgactggagttatgcttacatgcagtag

SEQ ID NO: 214027 - DNA, 645 bp, synthetic construct
  misc_feature 1..645: note = Description of Artificial Sequence: Synthetic coding sequence
  source 1..645: mol_type = other DNA
atgctcctgccggctcctgcactacgcagagcgttattgtccaggccttggacgggcgctggcctccggtggaagcatactagttccctgaaagtcgctaatgagcccgttctggccttcactcagggctcccccgagcgggacgctctgcagaaggctttaaaagaccttaaggggaggatggaggccataccgtgtgtagtgggagacgaggaggtctggacatccgacgtgcagtatcaggtgtcaagtctgctgaataaagctatagaagctgctttggccgcaagaaaagaatgggacttgaaacccatcgccgatagggcccaaattttcctgaaggctgctgacatgctgtccggaccgagaagggccgaaatattggcaaagactatggttggccagggcaagaccgtgattcaggctgagatcgacgcagccgcagagctcatcgacttttttagattcaatgccaaatacgcagttgaactcgagggacagcaacctatctctgtcccaccatcgacaaactccacagtgtaccgcggtctcgagggttttgttgcagcaattagtccgttcaacttcacagctattggcggaaatctggctggcgcaccagccttgatggtccgatgcggctag

SEQ ID NO: 214028 - DNA, 462 bp, synthetic construct
  misc_feature 1..462: note = Description of Artificial Sequence: Synthetic coding sequence
  source 1..462: mol_type = other DNA
aataaagccatcgaggcagcattggctgccaggaaagagtgggacctgaaaccaatcgcggatcgagcccagatcttcttgaaagctgccgacatgctgtcaggccctcgcagagcagaaattcttgccaaaactatggtgggacaggggaagactgtaattcaggctgaaattgacgccgcagctgaactcatcgatttctttcgttttaacgctaaatacgcagtcgaactagaggggcagcaacctatcagcgtccctccatcaactaactcaaccgtgtatagggggctcgaggggtttgtggctgctatcagcccatttaattttactgccatcggaggcaatttagctggcgcaccggctcttatgctgcgggagggtgtggtaaccctgcctctgtgccagatgactaaactacggcacaccgccgtgacttatctggctcggctgagtgattag

SEQ ID NO: 214029 - DNA, 1512 bp, synthetic construct
  misc_feature 1..1512: note = Description of Artificial Sequence: Synthetic coding sequence
  source 1..1512: mol_type = other DNA
atggaggcaatcccatgtgtggttggcgacgaagaggtctggacctccgacgttcagtaccaggtgagccctttcaatcatggtcacaaagttgcaaagttctgctatgctgacaaatctctgctgaacaaggcaatcgaggccgctctagctgcaagaaaagaatgggacctgaaaccaattgcagacagggcccagattttcttgaaggcagccgatatgttgtcgggccctcgccgagctgaaatcctggctaaaacaatggtcggacagggtaagaccgtaatccaggcagagatcgacgccgctgcggagctgattgatttctttcgatttaacgccaaatatgccgtggagctggagggtcagcaaccaatatccgttcctccgagtaccaattctacagtatacaggggccttgagggattcgtagcagcaatctcgcccttcaacttcacagcaatcggaggaaacctcgctggggctccggctcttatgggcaacgtcgttttgtggaaaccgtctgacactgcaatgctcgcttcatacgccgtatataggattctcagagaagccggtctgccaccaaacataatacagtttgttccggctgatggtccactgttcggagatacagtaaccagcagtgagcatctctgtggcatcaattttaccggaagcgtacctacttttaaacatctctggaagcaggttgcacaaaatttagatagattccatacttttccgcgactcgctggagagtgcggcggaaaaaatttccacttcgtgcaccggagcgccgatgtggagtctgtggtgtcaggcactttaagatccgctttcgagtacggaggtcagaaatgttcggcctgctcccggctgtacgtcccacatagcctgtggccgcagatcaaaggccgactgctggaggagcactcccggataaaggtgggagatcctgccgaggattttggaacgtttttcagcgcggtcattgacgctaagtctttcgccagaattaagaagtggctggagcacgcgaggtcttccccgtccctgaccatactggcgggaggaaagtgcgacgactctgtgggctattttgttgaaccatgtatagtggaatctaaggacccgcaggagccgattatgaaagaagagattttcgggccagtcctgagtgtatatgtctaccccgatgacaagtacaaggaaacacttcaactggtagatagcactacatcctacggcctgactggggctgtcttctcccaagacaaggatgtcgttcaggaggctaccaaagttctccgcaatgccgcaggcaatttctacatcaacgacaaatccacgggttccatcgtgggacaacagccctttggtggggctcgcgcttctggcacaaacgataagcccggtgggccacactacattctcaggtggacctctccccaggtcatcaaggagacccataaaccgctgggagattggagctatgcgtatatgcagtag

SEQ ID NO: 214030 - DNA, 1539 bp, synthetic construct
  misc_feature 1..1539: note = Description of Artificial Sequence: Synthetic coding sequence
  source 1..1539: mol_type = other DNA
atgctcttacctgctccggctctgcgaagggctcttctgtccaggccttggacaggggctggcttgcggtggaagcatacgtcatctctaaaagtggcaaatgagccagtcctagcctttacacaaggtagccctgaaagagacgctctgcagaaagccttgaaagacctcaaaggcaggatggaggccatcccatgtgtcgtgggcgacgaggaggtgtggacctcggatgtacagtaccaggtgtccccattcaaccacgggcataaagttgcaaaattttgttatgcagacaagagtttattgaataaagcaatagaggctgcgttggccgctagaaaggaatgggatttaaaacccattgcggatcgggcacagatctttctcaaggcggcagacatgctctcggggcctcgaagggctgagatcctagctaagaccatggtgggtcaagggaaaactgtaatacaggcagagatcgacgctgccgcagaactaatcgattttttccggtttaatgccaaatatgcagtagaactggaaggccagcagccaatcagcgtgcctccgagtacaaattccaccgtgtatagaggactggagggattcgtagccgctatctctccattcaactttacggccatagggggaaacttagctggagccccagctctaatgggaaatgtcgtcctttggaagcccagcgacaccgccatgttggctagttacgctgtatacaggattcttagggaggccggactacccccaaacataattcagtttgtgcctgctgatgggcctcttttcggtgatacagtgaccagctctgagcacctttgcggaattaattttactggcagcgtgcccacatttaagcatttgtggaagcaggtggctcagaatttagatcgatttcacacattccccaggctggccggagagtgcggcggaaagaactttcacttcgtgcaccgaagtgcagatgtcgagagtgtcgtgtcaggaactttgcggagcgcgtttgaatacggcggtcagaagtgtagtgcctgttcacggctgtacgtgccacactccctgtggcctcaaattaagggacggctgttggaggaacatagccgaattaaggtgggggaccctgctgaggatttcggcacgttcttcagtgccgtcattgacgccaaggaaatttttggtccagttctttcggtgtatgtgtaccctgatgacaagtacaaagaaactctgcagttggtggattcaactacctcctatgggcttaccggcgcagtttttagccaagacaaggacgtggtacaagaggccaccaaagttctgcgaaatgccgctggcaacttttacataaacgataagtctactggatccattgtcggccaacagccttttggcggtgccagagccagtggtaccaacgacaagcctggtggacctcattacattctcaggtggacctcaccgcaagtgataaaggagactcacaaaccgctcggagactggtcatatgcttatatgcagtag

SEQ ID NO: 214031 - DNA, 1647 bp, synthetic construct
  misc_feature 1..1647: note = Description of Artificial Sequence: Synthetic coding sequence
  source 1..1647: mol_type = other DNA
atggccacctgcatttggctacgatcctgcggcgcacgccgtttggggagcacattccccggttgccgcctccggccacgggctggaggattggtgcccgctagcgggccagcaccaggacctgcacagctccgttgctacgcagggaggctggccggtctcagtgctgccttgttgcgcactgactctttcgtgggcggacgctggctgcccgcagctgctaccttcccagtgcaagaccccgcatccggggcagccctggggatggtggcggattgtggcgtacgagaagctcgcgctgcagttagagccgcttatgaggccttctgccgttggcgcgaggtaagtgccaaggaacgctccagtctgcttcgcaagtggtataacctgatgatacagaacaaggacgatctggcaaggattatcacagcggagtctggcaagcccctcaaggaggctcatggggagatcctctacagcgcattctttctggaatggtttagcgaggaagcgaggcgtgtctacggggatattatccatactccagctaaagatcgaagagcgctggtattgaagcagccgatcggtgtggccgcagtgatcacaccatggaactttcccagcgccatgatcacgcggaaggttggagctgccctggccgctgggtgcacagtcgtcgtaaaaccagctgaagataccccattttcagccttggcactagcagaagttaaccaaggctttttactggacctggacccactcttgctcgcctcccaggctggcatcccgtctggtgtatacaacgtgataccctgctccaggaagaatgcaaaagaggtcggggaagccatctgcacggatccactcgtctcaaaaatttcatttacaggctcaactactacaggcaagattctcttacaccacgcagcgaacagcgtcaaaagagtttcaatggagttgggtggactggcacccttcattgtatttgactcggctaatgtcgatcaagccgttgccggtgccatggcttccaaattccgaaacactgggcagacctgcgtgtgctcgaaccaatttctcgtgcagcgcggaatccatgacgcgttcgtgaaggccttcgccgaagctatgaagaaaaatttgagagtcggaaatgggttcgaagagggaacgacacaggggccattaatcaatgaaaaagcggtagagaaagtggaaaaacaagtgaatgatgctgtcagtaagggcgctacagtagtgactgggggaaagaggcaccagctcggaaagaacttttttgagccaactttgctgtgtaacgttacacaggatatgctgtgtacgcatgaggaaacgttcggtcctctagcccctgtcatcaagttcgacaccgaggaagaggcgattgccatcgccaatgctgcagacgtggggctcgcagggtatttctattctcaggatcccgctcagatttggcgcgtggcggaacagctggaggtgggtatggtgggtgttaatgagggcctcatcagtagtgtcgaatgccccttcggcggagtcaaacaatccggcctcggaagagaaggatcgaagtatggtatagatgaatacctggagttaaaatacgtctgctatggtgggctctag

SEQ ID NO: 214032 - DNA, 1608 bp, synthetic construct
  misc_feature 1..1608: note = Description of Artificial Sequence: Synthetic coding sequence
  source 1..1608: mol_type = other DNA
atggcaacatgtatttggttgagaagttgtggggcacgacgcttggggtccactttcccaggctgtcgtttgcggcctcgggcaggaggcctggtaccagcatccgggcctgctcccggacctgcccagcttagatgctacgcgggacggctggcaggcctgagcgccgctctactgcggaccgacagttttgtggggggacgatggcttcccgctgccgctaccttccccgtgcaggatcccgcaagcggagcggctctgggaatggtggcagattgcggcgtgcgtgaagcccgtgccgctgttcgggctgcatatgaagctttctgccgttggcgggaggtctccgctaaagaacgttcatcattgctgaggaagtggtacaatctgatgatccagaacaaagatgatctcgccagaataattaccgcggaaagcggcaaacccctgaaagaggctcatggtgagattctttatagcgcatttttcctggagtggtttagcgaggaggccagaagagtatatggggacatcatccacacaccagcaaaggataggcgagcactcgtgcttaagcagcccataggggttgccgctgtgattacaccttggaatttcccctcagcaatgataacgagaaaggtaggtgctgccctggcagctggatgcacagttgtggtgaagcccgctgaagataccccattttctgcactggccctcgctgagctcgcctcacaggccggaattccttcgggtgtttataacgtcatcccatgctcgcggaaaaatgccaaagaggtcggagaggcaatatgcactgatcccctggtgagtaagatttcgtttaccgggtcaacaaccactggtaagatcctgttgcaccatgcggctaatagcgtgaaacgggtgagtatggagctgggtggactcgctccatttattgtcttcgactcagccaacgtagatcaggctgtcgctggggctatggcctctaaatttaggaacacagggcaaacatgtgtctgttctaaccaattcctcgtccagcggggtatacacgacgccttcgttaaagcattcgcagaagcaatgaagaagaacctccgagtggggaacgggttcgaggaaggcacgacacaggggccactgatcaacgaaaaagccgtcgaaaaagtggagaagcaagtaaacgatgccgtctcgaaaggggcaaccgtcgtgacaggaggcaagagacaccagctgggtaaaaatttctttgaacccaccctgttatgcaacgttactcaggacatgctctgcactcacgaggaaacgttcggccctctagcccctgtgatcaaattcgatacagaggaggaagcaatcgctattgcaaatgccgctgacgtgggattggcaggctacttctatagccaggatcctgcacagatatggcgtgtagctgaacaactcgaggtggggatggttggagtgaacgaggggttaatctccagcgtggagtgtcccttcgggggtgttaaacagagtgggctcggtcgcgaaggatctaagtatggcattgacgaatatctggagctgaaatatgtgtgctatggagggctgtag

SEQ ID NO: 214033 - DNA, 1344 bp, synthetic construct
  misc_feature 1..1344: note = Description of Artificial Sequence: Synthetic coding sequence
  source 1..1344: mol_type = other DNA
atggtggccgattgtggagtgcgcgaagcacgggctgccgtgcgagccgcatatgaggctttctgtagatggagggaagtgtctgctaaggaaagaagttcattgctccgcaagtggtataacctgatgattcagaacaaagacgaccttgcacggattatcacggctgaaagtgggaaaccgctgaaggaggcccacggtgaaattttgtacagtgcattctttcttgaatggttcagtgaggaagcccgacgagtctacggtgacattatccatacccctgcgaaagacagaagagcactcgttttgaaacagccaatcggagtcgccgcagtcataactccctggaactttccctctgccatgatcacacgcaaggttggagctgccctagctgcaggctgcacagtggtcgtgaaaccagctgaggacactcccttcagcgcacttgcactcgcggaactggcgtcccaggccggtatcccatctggtgtttataatgtgataccttgtagtcgaaagaacgctaaagaggtgggcgaggccatctgtacagatcctttggtatcgaagataagctttacgggaagtaccaccacaggcaaaatactgttgcaccacgctgcaaattcagtaaagagggtctcaatggaattgggtggcctcgcgccttttatcgttttcgacagtgccaacgtggatcaggccgttgctggtgctatggcctccaaatttcgcaataccgggcagacctgtgtttgttccaaccagttcctcgtgcagcgcggaatacatgacgccttcgtaaaggcctttgcagaggccatgaagaagaaccttcgggtgggcaacggctttgaggaaggcaccactcaggggcctctcattaatgaaaaggccgttgagaaggtcgagaagcaggtcaacgatgccgttagtaaaggtgccactgtggtcacgggtgggaagaggcaccaactggggaagaacttcttcgaacccaccctcctctgtaacgtgacacaggacatgctctgcactcacgaggagacttttgggcctttggccccagttatcaagttcgatacggaagaggaggccatagccattgccaacgccgcagatgtcggtctggccggttatttttactcccaggacccagctcagatctggagagttgcagaacagctggaggtgggcatggtgggagtaaatgagggattaatctcctccgtggaatgcccctttggaggcgtcaaacagagtgggctgggccgagagggctcaaagtacggtattgacgagtacctggaacttaaatacgtgtgttacggaggcctttag

SEQ ID NO: 214034 - DNA, 1608 bp, synthetic construct
  misc_feature 1..1608: note = Description of Artificial Sequence: Synthetic coding sequence
  source 1..1608: mol_type = other DNA
atggctgccctgctagctgccgctgctgtacgggctaggatcctgcaggtcagctctaaggtgaaaagttcgccgacctggtatagcgctagtagttttagctcctcagtacctacggtgaaactctttatcggaggaaagttcgtcgagtccaagtccgataagtggatagacattcataaccctgcaaccaatgaggttatcggccgagtgcctcaggccacgaaagctgagatggatgcagcaatcgcctcctgcaaacgggctttcccagcctgggctgatacatctgtcctttctcgccagcaagtgctgctgcggtatcagcagctgatcaaggagaatctgaaagagatcgccaaactgattacactggagcaggggaagacactcgccgacgctgaaggagacgttttcagaggactgcaagtggtcgaacatgcctgcagcgtgacgtctctgatgatgggtgaaaccatgccttccataacaaaagatatggatctgtattcatacaggctgccactcggtgtgtgtgccggaattgcgcctttcaacttccccgctatgatccccctgtggatgttccccatggccatggtgtgtgggaacaccttcctaatgaagcccagcgaaagagtgcccggagccacaatgctgctggccaagctcctgcaagactccggagctccagatggaaccttaaatatcattcatggccagcatgaggccgtgaacttcatctgtgatcacccagacattaaggccatatccttcgttggtagcaacaaagccggtgagtacatctttgaacgcggttctaggcacgggaagcgagtgcaggccaacatgggagccaaaaatcacggggtggtgatgcccgatgccaataaagaaaataccttaaaccaattggttggagcagcttttggggctgctggtcagaggtgcatggctctgtctaccgccgtccttgtcggcgaggcaaagaagtggttacctgaattggtcgagcacgcaaaaaaccttagggtcaatgcaggtgaccagccaggggcagacctgggacctttgatcaccccgcaagctaaggaaagagtgtgcaatctgattgattccggcactaaagagggagcttcaatcctgcttgatggcaggaagatcaaagttaaaggctacgagaatggcaactttgtcgggcctaccattatctctaatgtgaagcccaatatgacctgctacaaagaggaaattttcggaccagttctcgttgttttggaaactgaaaccctggatgaagctatccagatcgttaacaacaacccatacggaaatggaacagccatctttaccaccaatggcgcaacagccaggaaatatgcccacctcgtagatgtgggtcaagtgggagtgaacgtgccaattcccgtccctttacccatgttctcattcactggatcaagatcaagctttaggggggacaccaacttctatgggaagcagggcatccagttctatacccagctgaagacaatcactagtcagtggaaggaggaagatgctaccctgagctcccctgccgtagtcatgcccacaatgggccgttag

SEQ ID NO: 214035 - DNA, 1620 bp, synthetic construct
  misc_feature 1..1620: note = Description of Artificial Sequence: Synthetic coding sequence
  source 1..1620: mol_type = other DNA
atgtggcgactgcctagggcactgtgcgtgcacgcagcaaaaacatctaaactaagtggaccatggtcccgcccagcggcattcatgtctacccttctaatcaatcaaccccagtacgcctggttaaaagaattaggcctaagagaagaaaatgagggcgtgtacaatggcagttgggggggacgaggggaggtgatcaccacatactgccctgctaataacgagcccatcgctcgcgtgcgccaggcttccgttgccgactacgaggaaactgtgaaaaaagctagggaggcgtggaaaatctgggcagacattccggctcccaagcgaggtgagatcgttagacagattggcgatgccctgcgcgagaaaatccaggtgctcggctcactcgtctccctggagatgggaaagattttagtggagggtgtgggggaggtgcaagagtatgtggacatttgtgattacgcagtaggtctgtctagaatgatcggcggacctatcttaccttctgagcgctcagggcacgcactgatcgagcaatggaaccctgtgggcctggttgggataattactgcattcaatttccctgtggccgtgtatggatggaataatgctattgccatgatctgtggcaacgtatgtctctggaaaggggctccgacgaccagtctcatctctgtggcagtcacaaagattattgccaaagtgctcgaggataacaaactgccaggcgctatttgcagccttacatgtgggggtgctgacatcggtaccgccatggccaaagatgaacgggtgaaccttttgtccttcaccggaagcacacaggtggggaaacaggtcggactgatggttcaagaaagattcggaaggtccctgcttgagctcggaggaaacaacgctattatagcattcgaggatgccgatctgtcattggtcgtgccctccgccctgtttgccgctgtcggaaccgcgggacagagatgcacgacggctaggcgcctgttcatccatgagtcaatacacgatgaagtggtgaatagactgaaaaaagcctatgctcagatacgcgtgggtaacccatgggacccgaacgtactttatggcccactgcacactaagcaggccgtgtcaatgttcctcggcgcagtagaggaagcaaaaaaggagggcggaactgtggtctacggaggcaaagtcatggaccgaccagggaactacgtggagccaacaatcgtgacgggactgggccacgatgcgagcatagcccatactgagacatttgccccaattctatatgtgtttaagttcaagaatgaagaagaggtcttcgcttggaacaacgaggtaaagcagggcctctcttctagtattttcactaaagatttgggacgcatttttcggtggctaggccctaaaggatcagactgcggcatagtcaacgtgaacatcccaaccagcggggcagagatcgggggagctttcggaggagaaaagcacaccggcggaggcagagagtcaggttccgacgcctggaagcaatatatgcgcaggagcacttgtactattaattactctaaggacttgcccctggctcagggtatcaaatttcagtag

SEQ ID NO: 214036 - DNA, 1044 bp, synthetic construct
  misc_feature 1..1044: note = Description of Artificial Sequence: Synthetic coding sequence
  source 1..1044: mol_type = other DNA
atgtggcgactcccacgggctctatgcgttcacgcagcaaaaacatcaaaattgagtggaccgtggagtcgacctgctgccttcatgtctacttctcttatttccgtggccgtcactaaaattatcgccaaggtgctggaagataataagctgccaggggctatttgttctcttacctgcgggggtgccgacatagggacagctatggccaaggacgaacgggttaatctactttctttcactggtagtacccaggtgggaaagcaggtcggtcttatggttcaggaacggttcggccgatcactcctggagctggggggtaataacgccatcatcgcatttgaggacgcagacctgtccctcgtggtcccctctgccttgtttgcagccgtggggacggcagggcaacgctgcaccacagcgaggagactcttcatccacgaaagcatccacgacgaggtcgtgaaccgccttaagaaagcatatgcacagattcgcgtgggaaatccgtgggatcccaacgtgctctacgggcctctgcatacgaagcaggcggtgagtatgttcctgggcgcagtggaggaggcgaagaaggaggggggaacggttgtgtacggtggcaaggtgatggataggcccggaaattatgtggaacctactatcgtgacgggccttggccacgatgcctcgattgctcacacagagaccttcgcgcctatcctgtacgtgtttaaattcaaaaacgaggaagaagtctttgcttggaataacgaagttaagcagggactgtcttcatctatcttcacgaaagacctggggaggatcttcagatggcttggaccgaagggctctgactgtggcattgtgaacgtcaacatccccacctccggagcggagataggtggagcgtttggaggtgagaaacatactggcggaggccgagagtcagggtcagacgcctggaagcaatacatgcgccgatcaacctgcacaatcaactatagcaaggatttgccactggcccaggggattaagtttcagtag

SEQ ID NO: 214037 - DNA, 1509 bp, synthetic construct
  misc_feature 1..1509: note = Description of Artificial Sequence: Synthetic coding sequence
  source 1..1509: mol_type = other DNA
atgggatctcccggtagaggggctggcctttatttcagcagctcacaaggattaggcctcattccctctcccggactttccatgtggcggctgccacgcgctctctgtgttcatgccgcaaaaactagtaaactgtccggaccctggagtaggccagcagccttcatgtcaacattgttaatcaatcagcctcagtacgcatggctgaaagagctgggtctgcgggaggaaaacgaaggcgtatacaatggctcttgggggggaaggggggaagtaattaccacctactgtccagctaataatgaacctatagcgagagttcgccaggcatctgttgccgactatgaggaaacagtcaaaaaagcacgcgaggcctggaaaatttgggccgacataccggctcctaagagaggcgagattgtgagacagattggtgacgctcttcgcgagaagattcaggtgctaggtagtttggtgtcactggagatgggaaagatcttggtggaaggagtgggcgaagtgcaggaatacgtggacatctgcgactatgctgttggcctttcaaggatgattggtggtcccatcctaccttcagaacggtccggccacgccctgatagagcagtggaatcctgtgggccttgtgggtatcatcaccgcatttaattttcctgtagctgtgtacgggtggaacaacgcgattgctatgatttgcggtaacgtctgtctttggaagggggcacccacaaccagcttaattagtgtcgccgttacgaaaatcatagcaaaagttcttgaagataataagctgccaggcgcaatctgcagtctaacttgtggaggagctgacatcggcactgcaatggccaaggatgaaagggttaacctgctgtcatttaccggatccacgcaagtcggcaaacaagttgggcttatggtgcaggagaggtttgggaggagccttcttgagttaggagggaacaatgcaattatcgccttcgaggatgccgacctgtccttggttgtacccagtgctctctttgcagccgtgggcaccgccggacaacgctgtacaaccgccagacgcctggttatggatagaccaggtaactacgtggaaccaacaatcgtcacaggtctcggacacgatgcctccatcgctcatacagagacatttgccccaattctttatgtgtttaaatttaagaacgaagaagaggtgtttgcttggaacaacgaagtgaagcaaggcctctcctcttccatattcacaaaggatctgggccgtatctttcggtggttaggtcccaagggatccgactgtggtatcgtgaatgtcaatattcctaccagcggagcagaaatcggtggtgcattcggcggtgagaagcatactggaggcggacgcgagtctggatctgatgcctggaagcagtatatgcgtcgctctacttgcaccatcaattattctaaagacctacctctcgctcaggggatcaagttccagtag

SEQ ID NO: 214038 - DNA, 1314 bp, synthetic construct
  misc_feature 1..1314: note = Description of Artificial Sequence: Synthetic coding sequence
  source 1..1314: mol_type = other DNA
atggctggcacaaatgctcttctgatgctggagaattttatagacggtaaattccttccctgttcctcatatatcgacagttacgaccccagtactggggaagtgtactgtagggtccccaactccggcaaagatgagatagaagccgctgtaaaggctgcacgggaggcattcccaagttggtccagtaggtccccccaggagaggtcccgagtactcaaccaggttgctgatctgctggagcagagcctcgaagagtttgctcaggctgaaagtaaagatcaaggcaaaaccctcgctctcgctcggacaatggacattcccagatccgtgcagaactttcgtttctttgcatcaagtagcttgcatcacacctccgagtgcacacagatggaccacctcggctgtatgcactacacagtccgggctcctgtaggcgtgggggtccctcccggagtcgtgaacattgtgttcggcaccggccctagggtaggcgaggcactggttagccatccagaagtgcctctcatctcctttaccggcagccagccaactgctgaacggatcacgcagctatctgccccacattgtaagaagcttagtctggaactgggcggaaagaatcccgctattatctttgaagatgcaaatcttgacgaatgcatccccgctactgtccgttccagttttgcaaatcaaggcgagatctgtctttgcacctcccggatctttgtgcagaagagcatatattccgaatttctgaagagattcgtggaagcaactagaaaatggaaggtcggtattccctccgaccccctggttagtataggagccctgatttctaaggcccacctcgagaaagtgaggagctatgtaaaaagagccctggccgagggggctcaaatttggtgtggggaaggagtggacaagctcagtctccccgctaggaaccaagctgggtatttcatgctgcctactgtgatcaccgacattaaagacgagtcctgttgcatgaccgaagagatcttcgggccagtgacttgcgtggtgcctttcgattccgaggaggaggtgatcgaacgcgcaaataacgtaaagtacggcctagcagccactgtctggtcttctaatgtgggcagagtgcacagagtggctaaaaagctacagtccggtctcgtttggactaactgttggcttattcgggagctgaacctgccgttcggtggaatgaaatcttcggggatcggtagggagggcgctaaggactcttacgactttttcaccgaaatcaagacgatcactgtgaaacattag

SEQ ID NO: 214039 - DNA, 1464 bp, synthetic construct
  misc_feature 1..1464: note = Description of Artificial Sequence: Synthetic coding sequence
  source 1..1464: mol_type = other DNA
atggctgggaccaacgccctcctcatgctcgagaacttcatagacggcaagttcttgccatgtagctcttatatcgacagttatgatccctcaactggagaggtgtattgtcgagttcccaatagcggtaaggacgagatagaggctgccgtaaaggccgcaagggaagcgttcccttcgtggagctccaggtcaccacaagaaagaagccgggttttgaatcaggtcgctgatctgcttgagcagagcttagaagaattcgctcaggctgagtcgaaagatcagggaaagactctggccttagcacgaacgatggatattccccgatctgtgcagaacttccggtttttcgccagttcatccctgcatcatacttctgagtgcactcagatggatcacctcgggtgtatgcactacactgtgcgggctcccgtgggtgtggccggacttattagtccgtggaatctgccactatacttgttgacatggaagatcgcaccagcgatggcagccggtaacaccgtgatcgcaaagccatccgagctcacttccgtgacggcttggatgctatgtaagttgttagacaaggccggtgtgccacctggagttgtgaacatcgttttcggtacaggaccaagggttggagaggcactggtctcacatcctgaggtgccgcttatctctttcactggctcacagccaactgcggagcgcataacacagctctccgcccctcattgtaagaaactgtcccttgagctcgggggaaaaaaccctgccatcatttttgaggatgctaatttagatgaatgtatcccagcaactgtgcgctcatcattcgcaaaccagggggagatctgcctttgcactagccgtatcttcgtgcagaaatccatctattcagaattccttaaaaggtttgtggaggctacgcgcaagtggaaagtgggcattcccagcgacccactcgtttcaatcggagcactgatttccaaggcacacctcgaaaaagttagatcctacgtgaagcgggctctggcggagggtgctcagatctggtgtggggagggtgtggataaactatctctgccagcccgaaatcaggccggttatttcatgttacccacggtgattaccgacattaaggatgaaagctgttgcatgactgaagagattttcggcccagtgacttgcgtcgtaccctttgatagtgaggaggaagtgattgagcgggcaaacaacgtcaagtatggacttgcagccactgtttggtcatcaaatgtaggaagagtgcaccgagtcgctaagaagttacagtctggtctggtttggaccaattgctggctcattcgcgagctcaaccttcccttcgggggaatgaaaagcagtggcattgggcgagagggggcaaaggactcatacgactttttcacagaaataaagacaatcactgtgaaacattag

SEQ ID NO: 214040 - DNA, 1302 bp, synthetic construct
  misc_feature 1..1302: note = Description of Artificial Sequence: Synthetic coding sequence
  source 1..1302: mol_type = other DNA
atggccggtacaaacgccttgttgatgttagagaatttcatcgacggtaaatttttgccttgcagctcttatatagacagctacgatcccagcacaggcgaggtctattgtcgagtgccaaattctggaaaggatgagatcgaggctgccgtgaaagctgcgagagaagcgtttccctcatggagctccaggtccccgcaggagcgctccagagtactcaatcaggtcgccgatctcctcgaacagagtttagaagaattcgcgcaggccgaatccaaggaccagggtaagactttggctttggctaggaccatggatataccgaggtctgtccagaatttcaggtttttcgcctcaagttctcttcaccacacttcagagtgtacccagatggatcatctaggctgtatgcactataccgttagggcaccggtcggggtggctgggcttatatctccctggaatctgccactgtatctcctgacatggaagatcgctcccgcaatggccgcaggtaacaccgtcatcgctaaaccatcagagcttacgagcgtgactgcctggatgctctgtaaactcctcgacaaagctggagtccctcccggagtcgtgaacattgtcttcggcaccggacccagggtgggggaggcactggtttcgcatccagaggtgccactcatctccttcacaggtagccagccaacggctgagcgaataacccagctatctgctccacattgtaaaaagctaagccttgaactcggagggaagaatcccgctatcatctttgaggacgcgaatctggacgaatgcattcctgcgacagttcggagctcattcgccaaccaggtcagatcatatgtgaagcgcgctttagccgagggggctcagatctggtgtggtgagggtgtggacaagttgagtcttccggctcgcaatcaggccggttattttatgctgcccacagtgatcacagacataaaggatgaatcctgctgtatgaccgaggaaatcttcgggcctgtgacttgtgttgtccccttcgactccgaagaagaggtgatcgagcgcgcaaacaatgttaagtatgggctggcggctactgtgtggtcctctaacgtagggagggtacaccgggtggctaaaaagcttcaaagtggtctcgtctggaccaactgttggttgattcgggagcttaatctgccctttggcggtatgaagtcatccggaatcggaagagaaggagctaaggactcttatgacttcttcacagagataaaaaccatcaccgtgaaacactag

SEQ ID NO: 214041 - DNA, 1557 bp, synthetic construct
  misc_feature 1..1557: note = Description of Artificial Sequence: Synthetic coding sequence
  source 1..1557: mol_type = other DNA
atgtttttacgcgctgggctcgctgcactgtctcctctgcttaggagcctccggccatcacccgttgcggctatgagtactgggacctttgtggtttctcagccccttaattatcggggtggagccagggtcgagcctgcggacgccagcggaacggagaaagctttcgaaccggcaaccggacgtgtgatcgcaactttcacttgctccggagagaaagaagtaaatctcgctgtacagaacgctaaagccgctttcaaaatttggtcgcaaaagagcggcatggagcgatgtagaattcttctggaagcggcaaggattattcgcgagagagaggacgagatcgccactatggagtgcattaataacgggaagtcaatctttgaagctcggctcgatatcgatatcagctggcaatgcctggaatactacgccggtttagctgcaagcatggcaggggagcacatacagttgcctgggggaagcttcgggtatactagacgggaacctctgggcgtttgcgtcggcattggggcatggaactatccctttcagattgctagctggaaaagtgcccctgcgctagcttgtgggaatgccatggtatttaagccgagcccttttacccctgtgagtgccttactcctggcagagatctactccgaggcaggggtccctcccggactgttcaatgtggtgcaggggggagctgctactggccagttcctctgccagcatccagatgtcgcaaaggtgagcttcacaggtagtgtgccgactggaatgaaaatcatggagatgtccgcgaaggggatcaaacccgtgaccctggaattggggggaaagagccccctcatcatcttttccgactgcgacatgaacaacgctgtgaaaggggcactcatggcaaattttctgacacagggccaggtgtgctgtaacgggactagggtgtttgtgcagaaagagatcctggacaaattcactgaggaggtggttaagcaaacccagcgtataaagattggagaccctctactcgaggacacgcgcatgggacctttgataaaccgccctcacctggagagggtgctgggatttgtgaaagtggcaaaagaacagggcgctaaggtcctgtgcggcggagatatctacgtacccgaggaccctaaattgaaggacgggtactacatgaggccctgcgttctgaccaactgtcgcgacgacatgacatgcgtgaaagaagagatcttcggaccggttatgtctatcctgagcttcgacacagaggccgaagtgcttgagcgggctaacgacaccacctttggactggctgccggtgtgtttactcgggacatccagagggcccacagggtggtcgcagaactgcaggccggtacctgctttatcaacaattataacgttagccctgtagagctccctttcggcggatacaagaagtccggcttcggacgcgaaaacggacgagttacaattgaatactactcacagctgaagaccgtgtgtgtggaaatgggagacgttgagagcgccttttag

SEQ ID NO: 214042 - DNA, 1275 bp, synthetic construct
  misc_feature 1..1275: note = Description of Artificial Sequence: Synthetic coding sequence
  source 1..1275: mol_type = other DNA
atggagcggtgccgtatcctgctggaggctgcccgaataattcgggagcgcgaggatgagatcgcaactatggagtgtatcaataacggaaagtccatattcgaggccagactggacattgatatctcctggcagtgtcttgaatactatgcaggactcgccgcttcaatggctggcgaacatattcagttgccaggaggtagcttcggttacaccaggagggaacccttaggtgtctgcgttgggataggcgcatggaactacccgtttcagattgctagttggaagtctgctcccgctctggcctgtggcaatgctatggtcttcaaaccttcaccctttacccccgtgtcagcactcctacttgccgagatctacagcgaggctggtgtcccgccaggactgtttaacgtagttcagggaggagccgctaccggacagttcctgtgccagcacccggacgtggccaaggtctcctttacagggagtgtgcctaccgggatgaaaattatggagatgtcagctaaaggtatcaagcctgtgacattggagttggggggtaaaagccctctcatcattttcagcgattgcgacatgaacaacgcagtgaagggagcactcatggccaattttctaactcagggccaggtgtgctgcaatggtacaagggttttcgtccagaaagaaatactggacaagttcactgaggaggtcgtgaagcagacccagcgcataaaaatcggggatcctctgctcgaagatacccgcatgggacccttgattaaccgaccacatctggaaagagtactgggctttgtcaaggttgctaaggaacagggagctaaagtgttgtgtggaggggacatctacgttccagaggatccaaaactgaaggatggctattacatgcggccatgcgtgctgactaactgcagggacgacatgacatgtgtgaaggaagagatttttgggcctgtcatgtccattctgtctttcgacaccgaggctgaagtcctggaacgcgcaaacgacaccaccttcggcctcgcagccggagtgtttactcgagacattcagagagcgcacagagtagtggcagagctgcaggccggaacctgtttcattaataactacaacgtgtcacctgtggaactccccttcggcggttataagaagagtggcttcggcagggaaaatggcagagttaccatcgagtattactcacagttgaagacagtttgcgtggagatgggtgacgttgagtccgccttctag

SEQ ID NO: 214043 - DNA, 4017 bp, synthetic construct
  misc_feature 1..4017: note = Description of Artificial Sequence: Synthetic coding sequence
  source 1..4017: mol_type = other DNA
atggatagggcctccgagctgctgttctacgtgaatggcagaaaagttattgagaagaacgtcgaccccgagacaatgctgctgccatatctccgcaaaaagttgagacttactggcaccaaatacggttgcggcggaggtggctgcggcgcatgtactgtcatgataagtaggtataatcctatcacgaagcgaatccgccatcatccagcaaacgcatgcctgatacctatctgctcactttatggtgccgctgttaccactgtggaaggcattggatccacacataccaggattcatccggtccaagagcggatcgccaaatgtcatgggactcagtgcgggttctgcacccccggaatggtcatgtccatttacacccttcttagaaaccacccagaaccaacattagatcaattgacagacgcgctgggtggcaacttgtgtaggtgcaccggatataggcctatcatagatgcttgtaagaccttttgtaagactagcggatgctgtcagtccaaagaaaacggcgtttgctgcctcgaccaggggattaatgggctgcccgaatttgaagagggatccaagacaagcccaaaactgtttgccgaagaggagtttctcccactggatcccacgcaggagcttatctttccacctgagctgatgatcatggctgaaaaacagtcacaaaggacccgcgtgttcggttctgagaggatgatgtggttttctcctgtcacactcaaggaattgcttgagttcaagttcaagtacccgcaggccccagtcattatggggaatacgtccgttggccctgaggtaaaattcaaaggagtgtttcatccagtgatcataagccctgatcgaatcgaggaattgtctgtcgtgaatcacgcgtataatggtctcacacttggggctgggctgagcctggctcaagtaaaggatatattggcggacgttgtccagaagctccctgaggagaagacccagatgtaccacgctcttctgaagcacttgggaaccctggcaggatcacagatccggaacatggccagtctgggtggacacatcatcagcagacacccggattccgacctgaatcctatactggccgtaggcaattgcacccttaacctattgagcaaggaaggcaagcgtcaaatccctttaaatgaacagtttctttctaagtgcccaaacgctgatttgaagcctcaggagattcttgtcagcgtcaatattccctactctcgcaagtgggaatttgtatctgccttcagacaagctcagcgccaggagaacgctcttgccatcgttaactcaggaatgcgcgtcttttttggggagggagatgggattatcagagagctctgcatctcatacggcggagttggccctgccactatctgcgccaaaaacagctgtcagaagctcatagggagacactggaacgagcagatgttagatattgcctgtcgcttaatccttaatgaggtgagtttgcttgggagcgctcccggaggcaaggtcgagttcaagagaacccttatcatctcatttctgttcaaattttacctggaggtatcgcaaatcctgaagaagatggaccctgtgcattaccctagtctggctgataaatacgagtcagcattggaggatctgcactcaaagcaccactgttcaacactcaagtaccagaacattggtcccaagcagcatcctgaggacccaataggacatccgatcatgcatctctctggagtgaagcatgcaactggcgaagctatctattgtgacgatatgccccttgtggatcaggaactgtttctgacattcgtgacttccagcagagcgcacgctaagatcgtgtccatagacctgtctgaagcattgagtatgcccggagtggttgacatcatgacagctgagcacctgtccgatgtcaacagtttttgcttcttcacagaagcggaaaagttcctggccactgacaaggtattttgtgtaggccaactcgtttgtgctgtgttagccgactcggaagtccaagccaagcgggcagccaaaagagtgaagattgtgtaccaggatctggaacctctaattttgaccattgaggagagcattcagcataattcgagctttaagcctgagcgcaaactggaatatgggaatgttgatgaggcattcaaggtggtcgaccagattctagagggcgaaatccatatggggggacaggaacatttttacatggaaacccaatccatgctggttgtgccgaagggggaggaccaagagatggatgtatacgtgagcacgcagttccccaaatatatccaggatatcgtagcttctactctgaagctacctgccaacaaagtgatgtgtcacgtgcggagagtgggtggagcatttgggggaaaagtgctcaagaccggcataatcgcagctgtaaccgcctttgccgcaaataaacacggacgcgctgttagatgtgtcctcgagagaggggaggacatgctgatcacagggggtcgccatccttatctcgggaagtacaaagcaggcttcatgaatgatggaagaatcttggcactcgatatggagcactattctaatgctggcgcatctttggacgagtccctgttcgtaatcgaaatggggctgctcaagatggacaacgcttataagtttccgaacttgcgatgtagggggtgggcatgtcgcaccaatctgcccagtaacaccgccttccgcggatttggcttccctcaagcagccctcattacagagtcctgcattactgaggtcgctgctaagtgtggactttcccctgaaaaagtcaggattattaacatgtataaggagattgatcaaacgccgtataaacaggaaattaatgcgaagaacttgatccagtgttggagggagtgtatggcgatgagctcttattccctccgcaaagtggcagtggaaaaatttaatgcggagaactactggaagaagaaagggttagcaatggtgccactcaaattcccagtaggtctggggagccgtgctgcaggacaggctgccgcactcgtccatatctatttagatggcagcgtgctggtcacccatggcggaatcgagatgggccaaggcgtacacacaaagatgatacaggtagtttctcgagaactccgaatgcccatgtcaaacgtgcacctccgcggaacctccacggaaactgtacccaatgccaatatatcgggaggtagcgtcgtggccgacctgaatggcctggctgtaaaagacgcatgtcaaacccttcttaaacgcctggagcccataataagtaaaaatccaaagggtacgtggaaagactgggcacagaccgcatttgatgaaagcataaatctttctgctgtcggctacttccggggatatgagtctgacatgaactgggaaaaaggggagggccagccatttgaatatttcgtctacggcgctgcctgctccgaagtcgagatcgactgtctgacgggggaccacaaaaacattaggaccgacattgtcatggacgtaggctgctcgatcaatccagctattgacatcggccagattgaaggcgcattcattcagggaatgggcctgtatactattgaggaactgaactattccccacagggcatattgcacacacgtggtccagatcagtataagatacctgccatctgtgatatgcccacagaactgcacattgctctgctgccaccaagccaaaattcaaacaccctgtacagttccaaaggacttggcgagtccggagtgttcttggggtgcagtgtgttttttgccatccacgacgctgtgtccgccgcaaggcaagaaagaggactccatggtcccctcacgcttaattctccactgaccccagaaaagatcagaatggcgtgtgaggataagttcacaaaaatgatccctcgcgacgagccaggcagctacgtgccatggaatgttcctatctag

SEQ ID NO: 214044 - DNA, 456 bp, synthetic construct
  misc_feature 1..456: note = Description of Artificial Sequence: Synthetic coding sequence
  source 1..456: mol_type = other DNA
atgctgctgccatatctacgtaagaagctgcggcttactggaactaagtatggctgtggtgggggtgggtgtggtgcctgcacggtcatgatttcaaggtataaccccataacaaaaaggatcagacatcatcctgcaaatgcatgcctcatacctatctgtagtctgtacggggcagccgtgaccacggtagaaggtatcggaagtacacacaccagaatccatcccgtacaagagaggatagccaaatgccatggtacacaatgtggtttttgcacccccggtatggttatgtctatctatacattgctgcgaaaccacccagaacctacactcgaccagttgactgacgctttaggcggaaacctatgtaggtgtaccggctaccgcccaatcattgacgcctgcaaaacattctgcaaaacctctgggtgttgccaatcaaaggagaactag

SEQ ID NO: 214045 - DNA, 858 bp, synthetic construct
  misc_feature 1..858: note = Description of Artificial Sequence: Synthetic coding sequence
  source 1..858: mol_type = other DNA
atggatctttcagcagccagtcacagaatcccactgtcagacggtaattctataccaatcatcggcctcggcacttattctgaacccaaaagtacccccaaaggagcctgcgccaccagcgtgaaagtagctattgacactggttacaggcacatagatggggcttacatctatcagaacgaacatgaagtcggcgaggccattcgcgaaaaaatagcggaaggtaaggtgcgcagagaagatatattctactgtggcaaactgtgggccaccaatcatgtgccagaaatggtgagacctaccctcgagcggacacttagggttctccagctggactacgtagacttgtacatcatcgaggttccgatggcttttaagccaggcgatgaaatttaccccagagacgagaatggaaaatggctatatcacaagagcaacctgtgcgctacctgggaagttgagtgtcacccgtactttacgcagcctaagctgctaaagttctgtcaacagcacgatatcgtgattacagcttattctcctctgggcacttcgcgaaatcctatctgggttaacgttagtagcccgccattgctcaaggatgctctgctaaactcccttggcaaaaggtataataaaacggctgcccagatcgttctgagattcaacatacagcgtggggtggtggtcatccctaaaagcttcaatctggagaggatcaaagagaatttccagattttcgacttttccctaactgaggaggaaatgaaagacatcgaggctctcaataagaacgtccgttttgtagaactgctgatgtggcgcgaccatcccgagtaccccttccacgatgagtactag

SEQ ID NO: 214046 - DNA, 873 bp, synthetic construct
  misc_feature 1..873: note = Description of Artificial Sequence: Synthetic coding sequence
  source 1..873: mol_type = other DNA
atggacctgagcgccgcaagccaccggatcccccttagtgacggtaatagcatccctatcatagggcttggcacttacagcgagccaaagtccacaccgaagggagcatgtgcaacatctgttaaagtggcaatcgacactgggtataggcacattgacggcgcttatatttaccaaaatgaacacgaggtaggtgaggcgattagggagaagatcgccgaaggtaaggtacgaagagaagatattttttactgcgggaagctatgggccacgaaccacgtcccagaaatggtgcgaccaaccctcgaacggacacttagagttcttcaattagactacgtggacctctatattatcgaagttcctatggcgtttaagccgggagatgagatataccctagagatgaaaatgggaagtggctgtaccacaagtcgaacctgtgtgctacttgggaggcaatggaggcctgtaaggacgccggtctcgtcaagagtctgggcgttagcaattttaaccggcgtcagctcgaactgattctgaataaacctggcctcaagcacaagcctgtttctaaccaggtggaatgccacccctacttcacgcagccaaaactactgaagttctgccaacagcatgacatcgtgattactgcctatagcccgctgggtaccagtcgtaatcctatttgggtaaacgtgtcaagcccccctttgctaaaggatgctcttttgaatagcctcggaaagcgctataacaagaccgctgctcagattgtcttgcgttttaatatccagagaggagtagtcgtgattcccaagtctttcaatctggaaagaattaaagaaaacttccaggtcgctcgcagctcttag

SEQ ID NO: 214047 - DNA, 978 bp, synthetic construct
  misc_feature 1..978: note = Description of Artificial Sequence: Synthetic coding sequence
  source 1..978: mol_type = other DNA
atggctgcttcttgcgttctgctccatacagggcagaaaatgccactgatcggattaggaacctggaaaagcgagcccggacaagtcaaagcggcagtgaaatacgccctgagcgtgggatacagacatatcgattgcgctgccatctacggtaacgagcccgaaatcggggaagcactgaaggaggacgtggggccaggtaaggccgtgccacgggaagagttgtttgtcacgtcaaaactgtggaacacaaaacaccatcctgaggacgttgagccggcacttcggaaaactttagccgatctgcagttggaatacttggatctgtatctcatgcactggccatatgcgttcgaacgcggtgacaatccttttcccaaaaacgccgacggcacgatctgttacgactccactcactacaaggagacctggaaagccctggaggccctggtcgccaaggggctggtgcaggccctgggcctgtctaattttaactcacgacaaattgatgatattctgtccgtggcaagcgtccgaccggctgtgttgcaggtcgagtgccatccctacctggctcaaaacgaacttattgcccactgccaggctcgcggactggaggtgactgcctactccccactgggatctagtgaccgggcatggcgcgaccctgacgagccagtgctgctcgaggagcccgtggtgctggcccttgcagaaaagtacggcaggagccctgcgcagatcctgctgcggtggcaggtacagagaaaagtcatttgcatccccaagagcattacaccttcgcgaattttacagaacatcaaggtgttcgactttaccttttccccggaggaaatgaagcagcttaacgctcttaacaaaaattggcgatacatagttcctatgctgactgtggacggcaagcgcgtgcctcgagatgcaggccacccattgtaccccttcaacgacccttattag

SEQ ID NO: 214048 - DNA, 978 bp, synthetic construct
  misc_feature 1..978: note = Description of Artificial Sequence: Synthetic coding sequence
  source 1..978: mol_type = other DNA
atggccgcttcatgtgtgctgctccataccgggcagaaaatgccactgatagggctgggcacctggaaaagtgagcctggccaagtgaaagctgccgttaagtacgcactctcagtaggctatcggcatattgactgcgccgcaatttatggcaacgaaccggaaatcggcgaggcactaaaggaagatgtgggacctggcaaagccgtacccagggaggagctctttgtgaccagcaagctctggaatacaaaacaccatccggaggacgtggaacccgctctccgcaagaccctggccgatctgcaactggagtatcttgatctgtacttgatgcattggccctatgcctttgagagaggcgacaacccattccctaagaatgctgacggtacaatctgctatgacagtacacactataaagaaacttggaaggccttagaggccctggtcgccaagggactggttcaggcccttggcctcagcaatttcaattcaaggcagatcgacgacatactgtctgtggcctccgtgcggccagcagtgttgcaggtcgagtgtcatccctacctcgctcagaatgaactgatcgcccactgtcaagcacggggactggaggtcaccgcatacagcccccttggttcttccgatcgcgcatggagggacccggatgaacccgtgttgctagaagaacccgtggtgctggccttggccgagaagtacggcaggagtccggctcagatattgctgcgttggcaagtgcagagaaaggtgatttgcattccaaagtcaatcacgcctagcaggatcctgcagaatattaaggtgttcgatttcaccttctcccccgaggaaatgaagcagctgaacgcgctgaataaaaattggagatatatagtgcccatgctcacggtggatgggaagcgggtgcccagagatgccggacatccattataccccttcaatgatccctattag

SEQ ID NO: 214049 - DNA, 444 bp, synthetic construct
  misc_feature 1..444: note = Description of Artificial Sequence: Synthetic coding sequence
  source 1..444: mol_type = other DNA
atggcggcatcgtgtgtattgctgcacaccggccaaaagatgcccctcattggcctcgggacctggaagagcgaacctggacaagtgaaagccgctgtcaagtacgctctgagcgtggggtacagacatatagactgtgctgctatctatggtaacgagcctgagatcggcgaggcactcaaggaggacgtcggcccaggtaaggcggttcctcgggaggagttatttgtcacctccaagttgtggaacacgaaacaccatcctgaagatgtagagccagcgctcagaaaaaccctggccgaccttcaacttgaatacctggatctgtatctcatgcattggccttatgctttcgagcgtggtgacaaccccttcccaaaaaatgccgacggcacaatctgttacgactccacacactacaaggagacctggaaggctttgtag

SEQ ID NO: 214050 - DNA, 951 bp, synthetic construct
  misc_feature 1..951: note = Description of Artificial Sequence: Synthetic coding sequence
  source 1..951: mol_type = other DNA
atggcgtcacgactgctcctgaacaacggcgcaaaaatgcccatcctggggctggggacgtggaagagcccccctggacaggtaacagaggctgtgaaagttgcgatagatgttggataccggcatatcgactgcgcccacgtttaccagaatgaaaacgaggtgggcgttgcaatccaagagaaactgcgggaacaggtggttaagagggaagaactgttcattgttagtaagctgtggtgtacttatcatgaaaaaggtttggtgaagggcgcttgccagaaaacactttcagacctgaaactggactatctggacttgtaccttatacactggcccaccggatttaaaccaggcaaagaattctttccactcgacgaatcaggaaatgtggttccctctgataccaatattctggatacgtgggctgccatggaagagctagtggatgaaggccttgtcaaggccatcggcatctctaatttcaatcacctgcaggttgagatgatcctgaataaacccggtttgaagtacaaacccgctgtgaaccagatcgagtgccacccctacctgactcaagagaaactgatccagtactgtcagagcaaaggtatagtggtcactgcatatagcccccttgggagtcccgacaggccctgggctaagcccgaggatcctagtctgcttgaagaccctaggataaaagctatcgctgcaaagcacaacaagacaaccgcacaggtactgatccggtttcccatgcagagaaacttagtggtcatccctaaaagcgtgactcccgaaagaatagctgagaactttaaggtgttcgacttcgagctgtcctcccaggacatgaccacactcctgagctacaacagaaattggcgcgtttgcgctctgctgtcttgtactagccacaaggattacccattccacgaggagttttag

SEQ ID NO: 214051 - DNA, 618 bp, synthetic construct
  misc_feature 1..618: note = Description of Artificial Sequence: Synthetic coding sequence
  source 1..618: mol_type = other DNA
atgggagtcgtttcgcttttcctttgtattgtcgaacagatatttacttcgagcaaaaaaattcagttcagaggcatatttatggcaaaagtgcctaagtccaaggcattggaggcaaccaagctggcaatcgaggctgggtttcggcatattgactctgcacatctgtataacaacgaagagcaggtgggtctggctatcaggtcgaaaatcgctgatggatcagtgaaacgcgaagatatcttctatacctccaagctctggtgcaactcacaccgccctgagctggtgagaccagccctcgagcgcagcctgaagaaccttcaactggactatgtggatctctatctgattcacttccctgtctctgtgaaacccggagaagaggtgatcccaaaagatgagaatgggaagattcttttcgataccgtcgatctctgcgccacctgggaggcagtggagaagtgcaaggacgccggactggccaaaagtattggagtgtcaaattttaataggcgccaacttgagatgatcctcaataagcctggcctgaagtacaagcccgtctgcaatcagcctcgtgacaattctatttttagcctgtccccagactggtag

SEQ ID NO: 214052 - DNA, 972 bp, synthetic construct
  misc_feature 1..972: note = Description of Artificial Sequence: Synthetic coding sequence
  source 1..972: mol_type = other DNA
atggattcaaaatatcaatgcgtgaaactcaacgatggacatttcatgccagtactgggctttgggacttatgcgcctgctgaggtcccaaagtccaaggccctggaggctaccaagctggctatcgaagccggatttaggcacattgattccgcacacttatacaacaatgaagagcaggtgggtttagcgatcagatcaaaaatagcagacggatccgtgaagcgagaggatatcttttacactagtaagctatggtgtaattcgcatcgaccagagctcgtgaggccggcactggaacgatcattgaagaacctccagctggactatgtggacctgtatcttatacactttccagtgtcagtgaaaccaggggaggaggtcatccccaaagacgagaacggcaaaatcctgttcgacaccgtggatctttgcgccacatgggaagccgtggagaagtgtaaggacgccggattggccaagtctatcggcgtttctaatttcaatcgcagacagctagagatgatccttaataagcctgggcttaagtacaagccagtatgtaatcaggtggaatgtcacccctacttcaatcagcgtaaattattggatttctgtaagtcaaaagatattgtgttggtagcttattctgccctcggttctcacagagaagaaccttgggttgaccctaattcacccgttctgctggaggaccctgtgctgtgcgctctcgctaagaaacacaaaagaactccggctttgatagccttacgttaccaactgcaacgaggcgtcgtcgtgctggctaaatcctacaacgagcagcgcattagacagaacgtacaggtcttcgaatttcagctgacctctgaagagatgaaagcgattgatggcttgaaccggaatgtgcgctatctaacccttgatattttcgctggcccacccaactatccattcagtgacgaatattag

SEQ ID NO: 214053 - DNA, 972 bp, synthetic construct
  misc_feature 1..972: note = Description of Artificial Sequence: Synthetic coding sequence
  source 1..972: mol_type = other DNA
atggacagcaagtatcagtgcgtcaaactgaatgatgggcacttcatgcccgtcttgggatttggcacctacgccccagcagaggtcccaaagagcaaggccctggaagccacaaagctggctatagaggctgggttcaggcacatcgactccgcccacctttacaacaacgaagaacaggtgggtttggccattcgcagtaagattgctgatggcagcgtgaagagggaagatatcttttacacatccaaactgtggtgcaattcccaccggcctgaactggtccgccctgctctcgagaggtccttgaagaatcttcagctggactacgtggacctgtatctgattcacttcccagtttccgttaagccaggtgaagaggtgatccccaaggatgagaacgggaaaatcctctttgacacagtggatctgtgcgcaacctgggaagccgtggagaaatgcaaagacgctggccttgctaagtcaataggagtcagtaatttcaaccggcgacagctagagatgattttgaacaagcccggattgaagtacaagcccgtatgcaaccaagttgagtgccacccatatttcaatcagcgcaagttacttgacttttgcaaaagcaaggatattgtgttagtggcatattcagccctagggtcccaccgggaagaaccttgggtcgacccaaatagtcccgtgctcctggaagacccagttctgtgcgccttagcaaagaaacacaaacgcacccccgctctcattgccctaagataccagttacagcggggagttgtcgtgcttgcgaaaagttacaacgagcaacggatcaggcagaatgtccaggtcttcgaattccagttgaccagcgaagagatgaaagcgatcgatgggctgaatcgaaatgtgcggtaccttacactcgacatctttgccggaccacctaattatccattctccgatgagtactag

SEQ ID NO: 214054 - DNA, 747 bp, synthetic construct
  misc_feature 1..747: note = Description of Artificial Sequence: Synthetic coding sequence
  source 1..747: mol_type = other DNA
tagtccaaataccagtgtgtgaaactcaatgatggccacttcatgcctgtgttgggttttggaacgtacgccccagccgaggtaggcctagccatccggagcaaaattgctgatggcagtgtgaagagggaggatattttttatacctcgaaattgtggtgtaatagccatcggccagaattggttcgcccagctcttgagcgctcgctgaaaaatctacagctagactacgtggatctgtaccttattcacttcccagtctcagtgaagcccggtgaagaagtcattcccaaagacgagaatgggaagattctctttgacaccgttgatctctgcgcaacatgggaggcagtcgaaaaatgcaaagacgccggtctggctaagtctatcggagtgagcaattttaatcggagacaacttgagatgatactgaacaagcctggcctcaagtacaaacctgtgtgtaaccaggttgagtgccatccgtatttcaaccagagaaagttgctagacttctgtaaaagtaaggacattgtcctcgttgcttactcagcccttggatcccacagggaagaaccatgggtagatccgaactccccagtacttctggaggatcccgtcctttgcgcgcttgctaagaaacataaacgcacacctgctttaatcgctctacgctaccagctgcaaaggggagtcgtggtgctcgcaaaaagctacaacgagcagagaatccggcagaatgtgtag

SEQ ID NO: 214055 - DNA, 972 bp, synthetic construct
  misc_feature 1..972: note = Description of Artificial Sequence: Synthetic coding sequence
  source 1..972: mol_type = other DNA
atggacagcaagtatcaatgcgtcaagttaaacgacggtcatttcatgccagtacttggctttgggacctacgccccagcagaggtcccaaagtccaaggcccttgaggccgtcaagttagccattgaagcaggtttccaccacatagactccgcgcatgtctacaacaatgaggagcaggtgggcctggccatcagatccaagattgctgacggatccgtgaagagggaagatattttttacacaagcaagctgtggagtaactcccataggccagaattggtaaggcccgctttggaacgttctctcaagaatctgcaactcgactacgtagacctatacttaatccactttcctgtttcggtgaaaccaggcgaagaggttattcccaaggacgaaaacggcaagatcctgtttgatacagttgatctgtgtgccacgtgggaggccatggaaaagtgcaaggatgccggactggccaaaagcattggggtgagcaactttaatcatcggctgctggaaatgatactcaacaaaccaggccttaaatacaagcccgtgtgtaaccaggtggagtgtcatccctactttaaccagagaaaactgttagacttttgtaagtccaaggacatcgtgcttgtagcctattccgcactgggcagccacagagaggagccgtgggtggacccaaattctcctgtgctgttagaagatcctgtgctgtgtgcattggctaaaaaacacaagagaacacctgccctgatcgccctcaggtaccagttgcagcggggtgtagtcgtgttggcgaagagctacaatgaacagagaattcgccagaacgtgcaggtttttgaatttcagcttacaagcgaagagatgaaggccatagacggattgaaccggaatgttaggtatttgacattggatatttttgcgggacccccaaactatccattctctgacgaatactag

SEQ ID NO: 214056 - DNA, 972 bp, synthetic construct
  misc_feature 1..972: note = Description of Artificial Sequence: Synthetic coding sequence
  source 1..972: mol_type = other DNA
atggattctaagtaccagtgcgtgaagctcaatgacggacatttcatgccagtcctaggtttcggtacatatgcaccagcagaggtccccaaaagtaaagcactcgaggcagtcaagcttgccatcgaagccggttttcaccacatagactcggcccatgtctacaataacgaagagcaggtcgggctggccatccgctcgaagatcgctgatggctcagtgaaaagggaagacattttttatacatcaaagctttggagcaacagccacagaccagaattagtgcggccagcactggagcggtctctgaagaatctgcagctggattacgttgatttgtacctgatccacttcccagtctcggttaagccgggagaggaggtcatacccaaggacgagaacggcaagatcctcttcgacacagtagacctatgcgccacatgggaggccatggagaagtgtaaagatgctgggctcgcaaaaagcattggagtgagtaactttaaccatagactcctggagatgattttgaacaagcctgggttgaagtacaaacctgtatgtaatcaggtggagtgtcatccctattttaaccagagaaagctgttagacttttgcaagtctaaagatattgtgctagttgcctattctgcccttggatcacaccgggaggaaccttgggtagatcccaacagtccagtgctgctcgaggatccggtgttatgtgccctcgcgaaaaaacacaagagaacacctgccttgatcgccctgcgctaccagctgcagagaggcgtcgtcgtgcttgccaagtcctataacgaacaaaggatacggcagaatgtgcaggttttcgagtttcagctcacctccgaggaaatgaaagctattgatgggctgaatcggaatgtacgctatctgactcttgacatttttgccggacccccaaattaccccttttccgatgagtactag

SEQ ID NO: 214057 - DNA, 894 bp, synthetic construct
  misc_feature 1..894: note = Description of Artificial Sequence: Synthetic coding sequence
  source 1..894: mol_type = other DNA
atggattcaaaatatcagtgcgtcaaactcaacgacggacattttatgcccgtcctcggattcggcacctatgcacccgcagaagtccctaagagcaaggctctcgaagcagtaaaattggccatcgaagccggatttcatcatattgacagcgcccacgtgtataataatgaggaacaggttggattggcgatcaggtcaaaaatcgccgatggttctgtaaaaagagaagacatcttctacacctccaaactgtggagtaactctcaccggccagagcttgtacggccagccctcgaaaggtcactcaagaatttacagttggactacgtcgatctctaccttattcacttcccagtgtcagttaaagccatggagaaatgtaaagatgccggtttggcaaagtccatcggcgtttccaatttcaatcaccgcttactcgagatgatattgaacaagcccggacttaaatacaaacctgtgtgcaatcaggtggagtgccacccctacttcaaccagcgtaaactgctggatttctgtaaaagtaaagatattgtactggttgcctacagcgccctgggatctcatcgcgaggaaccatgggttgatcctaatagtccggtgctgctggaggacccagtcctctgcgccttggctaagaagcacaagcgcactccggcactcatcgcattacgctaccaacttcagaggggcgtcgtggtgttagctaagagttacaacgagcagaggattagacagaatgttcaggtattcgaattccaactaaccagcgaagaaatgaaggcaatcgatggccttaaccgcaatgtgcgctacctgactctggacatattcgccggtcccccaaattatcctttttcagacgagtactag

SEQ ID NO: 214058 - DNA, 420 bp, synthetic construct
  misc_feature 1..420: note = Description of Artificial Sequence: Synthetic coding sequence
  source 1..420: mol_type = other DNA
atggacagcaaataccagtgtgttaaactgaacgacggccacttcatgcctgtgctgggattcggtacttatgcgcctgccgaggtccccaaaagtaaagccctggaggcagtaaagcttgccatcgaagccggatttcatcacattgatagtgcccatgtgtataacaatgaggagcaggttggtctcgccattaggtcgaaaatagctgatggatctgtgaaacgtgaagatatattctatacatccaaattgtggtccaatagccaccgtcctgaactggtccgccctgcgcttgaacgctcactgaagaaccttcagctggactacgttgacctgtacctgatccacttccctgtgagcgtgaaagaagacataggcattctcacctggaagaaaagtcccaaacataattcttag

SEQ ID NO: 214059 - DNA, 972 bp, synthetic construct
  misc_feature 1..972: note = Description of Artificial Sequence: Synthetic coding sequence
  source 1..972: mol_type = other DNA
atggactccaagcaccaatgcgtgaagctgaatgacggacacttcatgccagtgttaggttttgggacttacgctcccccagaagtcccccgatccaaagctctggaggtaaccaagctcgcaatagaagcagggttccgacacatcgactcggctcacttatacaacaatgaagaacaggtgggcctggcaatccgaagcaagattgctgatgggtctgtgaagagggaggatattttctacactagcaaattatggtccacatttcatcggccagaattggtccggcctgccttagagaattctcttaaaaaggcccaactggactacgtggatctctacctgattcatagtccaatgtccctcaaaccaggcgaggagttatcaccaacagacgagaacggaaaagtgattttcgatatagtggatctgtgcactacctgggaagccatggagaagtgtaaggatgcagggcttgcaaagtccataggcgtgagtaattttaatcggaggcagctcgagatgattctcaacaagccagggttgaagtacaaacctgtgtgcaaccaagtagagtgccacccatattttaacagatccaagcttttggacttttgtaaatccaaagatatcgtgttagtcgcctactccgccctggggagccagcgcgataagagatgggtggatcccaacagcccagtgctgcttgaggacccagtcttgtgcgctctggctaaaaaacacaagagaacgcccgctctaatcgctctgcggtaccagctgcagaggggtgtcgtggtcttagcaaagagctataacgaacagaggatccgccagaacgtgcaggtttttgagttccagctgactgctgaggatatgaaggccattgacggcttggataggaacttacactattttaacagtgatagtttcgcatctcatcccaactacccttactcggatgagtactag

SEQ ID NO: 214060 - DNA, 615 bp, synthetic construct
  misc_feature 1..615: note = Description of Artificial Sequence: Synthetic coding sequence
  source 1..615: mol_type = other DNA
atgtcactgaagccaggagaggaactctcccctacagacgagaatgggaaagtgatttttgatatcgtggacttatgtacaacctgggaagcaatggagaagtgtaaggacgctggcctggcgaaatcaataggcgtgagtaacttcaatcggagacagctggagatgatcctcaacaagccaggtctgaagtacaagcccgtctgcaaccaagtggagtgtcacccttattttaaccgatccaagttgctcgatttctgtaaaagtaaagacatcgtcctggtggcatattcagcattgggcagccagcgagacaaacgttgggtggaccctaacagcccggtgctgctggaggaccctgttctgtgcgcattggctaagaagcacaaacgcacccctgcactgattgcactgcgatatcagcttcaacgcggagtagtggtactagccaaaagctacaacgaacagcggatccggcagaatgtgcaggtgtttgagtttcagctgaccgctgaggacatgaaggccatcgatggtcttgaccgtaatctccactacttcaactccgattccttcgcctcccaccccaactatccttattcagatgagtactag

SEQ ID NO: 214061 - DNA, 972 bp, synthetic construct
  misc_feature 1..972: note = Description of Artificial Sequence: Synthetic coding sequence
  source 1..972: mol_type = other DNA
atggacccaaagtaccagcgggtcgaacttaatgacggccacttcatgccagtcttgggttttggcacgtacgccccaccggaagtaccgaggaaccgggcagttgaggttactaagttggcgattgaagctggttttaggcacatcgactccgcttatctgtacaataacgaagagcaggtgggcttggctatccgtagcaaaatcgccgatgggtccgtcaagcgggaggacattttttatactagtaagctgtggtgtacgttctttcagccccagatggttcagccggcactggagtctagcctgaagaagctgcagctggattatgtggacctatatttgctgcatttccccatggccctgaaacccggtgagactcccctgccaaaagatgaaaatggcaaagtcatttttgacacggtggacctgagtgctacttgggaggttatggaaaaatgtaaggacgcaggactggccaagtcaatcggcgtcagtaatttcaactgcagacaattagaaatgattctgaataagccaggactaaagtataagccagtgtgcaatcaggtggagtgtcacccctatctaaaccagtccaagctgctggacttctgtaagagcaaggacattgtgctcgttgcccactccgccctcgggacgcagcggcacaagctgtgggtcgaccccaacagtcctgtgctcctggaggatcccgtcctttgcgccctggccaaaaaacacaaacagacccccgctctgatcgccctgcgttaccaattgcaacggggagttgtcgttttggccaaaagctacaacgagcagaggataagggagaatatccaagtatttgagttccagctcacaagtgaggacatgaaagtactagacggcctcaaccggaactaccgttatgtggtgatggactttctgatggatcatcccgattacccattctcagatgagtactag

SEQ ID NO: 214062 - DNA, 972 bp, synthetic construct
  misc_feature 1..972: note = Description of Artificial Sequence: Synthetic coding sequence
  source 1..972: mol_type = other DNA
atggatcctaagtatcagcgcgtggagctgaacgatgggcatttcatgcctgtgcttggatttggtacttacgcaccaccggaggtgcctcgcaatagggccgttgaagtgactaaattggcaatcgaggcgggattcaggcatatcgacagtgcttacctatataacaacgaggaacaagttggcttggcaatacgatcgaaaatagctgacggaagcgtcaagcgggaggacatcttttacacctccaagctctggtgcaccttctttcagccacagatggtccagcccgcactagaatcttctcttaaaaaacttcagttggactatgtggatctctacttgctccatttccccatggcactgaaacccggagagaccccactccccaaggacgagaatgggaaggtgatatttgataccgtagatctctcagccacatgggaggtgatggaaaagtgtaaggatgcaggccttgccaaatcaatcggggtgtctaacttcaactgtcgccaactagagatgatccttaacaagcctggactcaaatataaaccggtctgtaaccaggtcgaatgccacccctatctcaaccaatcaaaactgctggacttctgcaaatcaaaggacattgtgcttgtggcccattccgccctgggcactcaaaggcataagctctgggtggaccccaattcccctgtcctcctcgaggaccccgtcctgtgcgctcttgccaagaaacataagcaaacccctgcacttatcgccctgcgctatcagctgcaaagaggcgtggtggttctggccaagtcttacaatgagcagaggatccgggagaacatccaggtttttgagtttcagctgacctcagaagatatgaaggttttagatggactgaataggaattacagatacgtggtgatggattttctcatggaccaccccgactatccattcagtgacgaatattag

SEQ ID NO: 214063 - DNA, 381 bp, synthetic construct
  misc_feature 1..381: note = Description of Artificial Sequence: Synthetic coding sequence
  source 1..381: mol_type = other DNA
atggaccccaaatatcagcgcgttgagttaaatgacggtcatttcatgcccgtgcttggctttggaacgtacgctcccccagaggtgccaaggaatcgggctgttgaagtaacaaagcttgctatcgaggccggtttcaggcatatcgactcagcgtatctctacaacaatgaagaacaagtaggtctggctatacggtctaagattgccgacgggtcagtaaagcgagaagacatcttttatacttccaagctgtggtgcacgttcttccaaccgcagatggttcaacctgcgttagaatcatcacttaaaaagctgcagctggactatgtagacttgtatcttctccactttccaatggctctgaaatcaacaacatag

SEQ ID NO: 214064 - DNA, 981 bp, synthetic construct
  misc_feature 1..981: note = Description of Artificial Sequence: Synthetic coding sequence
  source 1..981: mol_type = other DNA
atggatctgtcagcagcgtcgcaccggatacctctgtcagatggcaactctatacccataataggactggggacctatagcgagcccaagtcaacacccaagggggcttgtgcgaccagcgttaaggtggctatagacactggctatcggcatatcgatggtgcatacatttaccaaaatgagcacgaggtgggggaggcaatccgggagaagatcgctgaaggcaaagtcagacgtgaggacatattctactgtggcaaactttgggcaactaatcatgtcccggagatggtgagacctaccctcgagaggactctccgggtgcttcagctcgactatgtggatttatatatcattgaggtccctatggcctttaaaccaggcgacgaaatttatcccagagatgagaacggcaagtggctctatcacaagagcaacctgtgtgctacgtgggaagccatggaagcttgtaaagatgctgggctggtgaaatcgctcggcgtgtctaatttcaatcgcaggcagctcgagctcatcctgaacaagccgggactaaaacacaaacctgtctcaaatcaggttgagtgtcatccctatttcacccagcctaaactgctcaaattctgccagcagcatgacatcgtcatcacggcttatagccctctaggtacttctaggaatcctatttgggttaatgtgtcaagcccacctcttcttaaagatgcgttacttaactcccttgggaaaagatacaataaaacagccgcacagatcgtgttaaggtttaacatccaaaggggtgtagttgttatccccaagagctttaacctcgagcggatcaaagagaacttccagatctttgactttagtttgactgaggaggaaatgaaggacatcgaggctctgaataaaaacgtcaggtttgttgagctgctgatgtggcgtgaccatcccgagtacccttttcacgatgagtattag

SEQ ID NO: 214065 - DNA, 441 bp, synthetic construct
  misc_feature 1..441: note = Description of Artificial Sequence: Synthetic coding sequence
  source 1..441: mol_type = other DNA
atggccttcaagccaggcgatgaaatataccctcgggacgagaacggaaagtggctgtaccacaaatctaacttgtgcgctacctgggaggctatggaggcttgtaaggacgccggactcgtgaaaagtctgggggtgtctaattttaatagacggcaactggagttgatcctgaataagccaggactgaaacacaaaccagtgagcaaccaggtggagtgtcacccctatttcacccagcccaagctgctcaagttttgtcagcaacacgatatagtcatcaccgcctactcccccttgggcacatctaggaaccccatctggcgacagctgcacaaacttgcactgctggaccttcctatcctccgggtgacacttcactcggtgcataccttgcattcggaaaagctggtaaccggtgacctgcaatgcccaggatag

SEQ ID NO: 214066 - DNA, 672 bp, synthetic construct
  misc_feature 1..672: note = Description of Artificial Sequence: Synthetic coding sequence
  source 1..672: mol_type = other DNA
atggcacaccggtttcccgcactgactcaggagcagaagaaagattcccaggggaaactttttcggaacattttgaaggaaaagggcatcgttgtcggtatcaaactggaccagggcggagccccactcgccggaactaataaggagaccacaatacaggggctcgacggcctgagtgaacggtgcgcgcaatacaagaaagatggcgtagatttcgggaaatggagagccgtcttacgcatcgctgaccaatgtcctagctctctggcgattcaggagaatgctaacgccctggcccgatacgcttctatctgtcagcagaacggactcgtaccaattgtggagcccgaagttattcctgatggggaccatgatttagagcattgccaatatgtgacagagaaggtgctggcagctgtgtataaggctttaaacgaccaccatgtgtaccttgagggtaccctgttgaaaccaaatatggtcacggctggacacgcatgtacaaagaagtataccccagagcaggtggccatggcaacagtgactgccctccaccggaccgtccctgctgcagtgcccggtatttgctttctgtctggtggtatgtctgaggaagacgcaacgctgaacttgaacgccattccaactcgggtgcaatgtccaccagcttag

SEQ ID NO: 214067 - DNA, 1095 bp, synthetic construct
  misc_feature 1..1095: note = Description of Artificial Sequence: Synthetic coding sequence
  source 1..1095: mol_type = other DNA
atggctcataggtttccagccctgacacaggagcaaaaaaaggagctgagcgaaattgctcagagcattgttgccaacggcaagggaatactagcagctgatgagagcgtgggaacaatgggcaacagattacaacggataaaggtggagaacaccgaggagaacaggcgtcaattcagggaaatcctcttttctgtcgactcaagcatcaatcagagcatcggaggagttattctgtttcacgagactttgtatcagaaggactctcagggaaaactgtttcgcaatatcctcaaagaaaaaggtatcgtggtcggcatcaagctggaccaggggggtgcaccactggcgggtactaacaaggagacaacaattcaaggactggatgggttgtcggaacgctgcgctcagtataaaaaggatggggttgactttggcaaatggagggcagtcctacgaattgcggatcagtgcccatcctcattggcaattcaagaaaacgctaacgcccttgctcggtacgcatccatttgtcaacagaacgggctcgtgcccattgttgagccagaggtgattccagatggcgaccacgacttggagcactgtcaatatgtgaccgaaaaggtcctggccgcagtctataaggccctgaacgaccaccatgtgtacctggagggaacattgctgaagcccaacatggttacagctggacacgcatgcactaaaaagtacaccccagagcaggtggccatggcaacggtcactgcccttcatcggactgtccctgctgccgttccagggatttgttttctgagcggcggtatgagcgaagaggacgccacgctgaacttgaatgctatcaacctctgccccctccccaaaccatggaaactctccttcagttacgggagagccctccaggcttcagccttggcagcttggggaggcaaggccgctaataaggaagcaactcaggaggccttcatgaaacgcgcaatggctaattgccaagccgcaaaagggcagtatgtgcacacgggctctagtggggctgcctctacacagagcctcttcacagcatgttacacctactag

SEQ ID NO: 214068 - DNA, 951 bp, synthetic construct
  misc_feature 1..951: note = Description of Artificial Sequence: Synthetic coding sequence
  source 1..951: mol_type = other DNA
atggctcaccgatttcctgccctcacccaggagcagaaaaaagagctcagtgaaattgcgcagagcatcgtcgccaatggcaaggggattctggcggctgatgagtccgtcggcacgatgggtaaccgcctgcaaaggataaaagtggagaacacggaggagaacaggcgacagttccgggagatcctatttagcgtagatagttccattaaccaatcaattggaggggtcattttatttcacgagactctctaccaaaaggacagccagggcaagctattcaggaatatactaaaggagaaaggcatcgtggtagggatcaaactggaccagggcggagctcctctggccggtaccaacaaggagacgacaatccaagggctcgatggcttgagtgaacggtgtgcgcagtataagaaagacggagtagacttcggtaagtggcgcgcagtgctccgcatcgccgatcagtgcccctcctcactggccatacaggaaaatgccaacgccctagccagatacgcatctatttgccaacaaaacggcttagtgcccatcgttgaaccagaggtcatacccgacggagaccacgatctggaacattgccaatacgtgacagaaaaggttctcgcagctgtatataaggctctgaacgaccaccatgtctatctcgaaggaacgttgctgaaaccgaatatggtgaccgccggacatgcctgcacaaaaaagtacacccccgagcaggtggccatggcgactgtaaccgctttacaccgcacagtgcccgctgcagtgcccggaatatgctttctcagtggcggaatgtcagaagaagatgctaccctgaatttgaacgctatcaacctgtgtcccttgccaaaaccatggaagctgagcttttctggagtggccaggcttcagacgcgaaggcagccccgtcgcttgctgtag

SEQ ID NO: 214069 - DNA, 1947 bp, synthetic construct
  misc_feature 1..1947: note = Description of Artificial Sequence: Synthetic coding sequence
  source 1..1947: mol_type = other DNA
atggtaagcctcccgcctccgcagagtgatgtgacattaccagggcctacacgcctggagggcgagcgtcaaggagatctgatgcaggcccctgggctgccagggagcccagcgccacagtcaaaacacgccggtttcagctgttctagcttcgtatctgatgggcctcccgagaggaccccatcgttgcctccgcactctcctcgaatcgcctctccaggcccagaacaggtacagggtcactgtcccgcagggcctggtccaggacctttccgtctatcaccttccgataagtatcctggatttggtttcgaggaggctgcagcctcgtctccagggagatttctgaaaggatcccatgcaccctttcatccttacaaacgaccattccatgaggacgtgttcccggaggctgagacaacactggctctaaaaggtcatagttttaaaacaccaggcccacttgaggcgtttgaggaaatccccgtcgatgtagctgaagcagaggcctttctgccagggttctcggcagaggcatggtgcaatggcctaccatatccttctcaggagcatggtccacaggttctgggctccgaggtgaaggtcaaaccacccgtgttggaatcaggagcagggatgttctgttaccagccgcctctgcagcatatgtactgtagctctcaacctcctttccaccaatactcgcctggcggtggctcgtacccgataccctacttgggcagttcccactaccagtatcaaagaatggctcctcaagcttcaacagatggccaccagcctttgttccctaagccgatttactcttattccatactgatattcatggccctcaagaatagtaaaaccggcagtctgcctgtctcagagatctataatttcatgaccgagcactttccctactttaaaactgctcccgacggatggaaaaattccgtccgccataatctgtcgctgaacaagtgctttgagaaggtcgagaacaaatctggttctagctcacgtaaaggctgcctatgggcccttaaccccgctaaaatagataaaatgcaggaggaactgcagaagtggaagcgaaaggatcctatcgcagtccgaaaatccatggccaaaccagaagaactggatagtctgatcggcgacaaacgggagaagctgggctccccattgctggggtgccctcctccaggtctttcaggctctggaccaattcgcccactcgcccctccggcagggctgagcccacccctgcactctctgcatcccgctccaggtcctatacccggtaagaatcccctacaggacctcctcatgggacacacaccaagctgttatggacagacttatttgcacctaagcccgggtctggcgcctccgggtccgcctcagccattgttcccacagcctgacggacacttagagttgcgagcgcagcctggcactcctcaggacagtcctctccctgctcatacaccaccttcccattcggctaaactactggctgagccctctcccgcaaggacaatgcacgatacacttctgcctgacggagacctgggcactgacctggatgccatcaacccatcactgacagacttcgatttccaggggaatctgtgggagcagcttaaggacgactccttggcattggatcctttggtcctggtgacctcttcgccaacttcttcaagcatgcctcccccacagcctcctccacactgcttccctcctgggccatgcttaactgagacaggtagcggtgcaggcgatctggccgcacccggaagtggcggtagtggcgcactgggcgacttacatctaaccacactgtactccgcctttatggaactcgagcctacccccccaactgcacctgctggaccctcagtctatttgtccccctcttctaaaccagttgcccttgcttag

SEQ ID NO: 214070 - DNA, 1095 bp, synthetic construct
  misc_feature 1..1095: note = Description of Artificial Sequence: Synthetic coding sequence
  source 1..1095: mol_type = other DNA
atgccgcactcttaccctgctttaagcgccgagcagaaaaaagagctcagcgacatcgcactgcggatcgtggcgcctggaaaggggatccttgcagccgacgagtcagtgggatctatggccaagcgtcttagtcagataggcgtagagaacactgaagagaaccggcgactatatcgccaggtgctgttcagcgctgatgatcgagtgaagaaatgcattggaggcgtgattttcttccacgagacgctttatcaaaaggacgacaatggagtgcccttcgtccgtacaattcaggacaaaggcatcgttgtgggcatcaaggtcgacaagggggtagtgcccctagccggtacagacggggagacaaccacacagggactcgacggactgtctgagaggtgcgcccagtacaagaaggatggggcagatttcgccaaatggaggtgtgtgctgaaaatttctgagagaactccctctgccttggcaatactcgagaacgccaacgtgcttgcccgatatgcttccatttgccagcagaacggtattgtgcctatagtagaaccggaaattttgcctgacggtgatcacgatctgaagcgctgtcagtacgttacagaaaaagttctggccgcagtttacaaggctctcagcgaccatcacgtttacttggaggggactctcctaaagcccaacatggtcacaccgggtcatgcttgcccgatcaaatatacaccagaagagatagcgatggccaccgtgactgccctgaggaggaccgtcccacctgccgtgcctggagttacctttctgtcaggcggtcagtcagaggaggaagcctcattcaaccttaatgctatcaatcgctgcccattaccacggccttgggcccttacattcagctatggcagagccctgcaggcgagcgccctcaacgcgtggagagggcagagagataatgcaggcgcagcaaccgaagagttcataaaaagagccgaagtcaacgggttagcagcacagggcaaatacgaaggctccggagaggatgggggagctgcagcccagagtctctatattgctaaccacgcttactag

SEQ ID NO: 214071 - DNA, 450 bp, synthetic construct
  misc_feature 1..450: note = Description of Artificial Sequence: Synthetic coding sequence
  source 1..450: mol_type = other DNA
atgccacacagctacccggctttgagcgcagagcagaagaaggagctttctgatatagccctgaggatagtggcacctggcaagggcattctggcggctgacgaaagcgttggcagcatggccaagaggctttcccagatcggcgtggagaacaccgaggagaatcggcgactgtatcgccaggtcctgttttccgctgatgacagggtcaaaaagtgtattggaggggtaatattcttccacgagactctatatcagaaagacgacaacggtgtgcccttcgtgcgcactatccaggataaggggattgtcgtgggcatcaaggttgacaaaggggtggttccactggccggaaccgacggcgaaacaaccacacagggcttagacggcttgagcgaaaggtgtgcccaatacaaaaaggacggagcagacttcgctaagtggcgatag

SEQ ID NO: 214072 - DNA, 795 bp, synthetic construct
  misc_feature 1..795: note = Description of Artificial Sequence: Synthetic coding sequence
  source 1..795: mol_type = other DNA
atgccatcaatcttcgcttaccagtcgtcagaggttgattggtgtgaatccaattttcagtactccgagcttgtggcagagttttacaacacgttttcaaacattcccttcttcatttttggccctttgatgatgctgcttatgcacccctatgcacagaaaagatctagatacatctacgtggtgtgggtgctttttatgataatcggcctctttagtatgtacttccacatgaccctatcctttctcggacaactgctggatgagattgccattttatggttgcttggttccgggtatagtatttggatgccaagatgttatttcccatccttcctgggtggcaaccgcagccagtttatacggctggtgtttatcaccaccgtagtcagcacactcctgagctttctccgccctaccgtgaacgcgtacgctttaaacagcatagcgcttcacattctttacatcgtgtgccaggagtatcgtaagacaagtaataaggaacttagacatttaatcgaagtgagcgtcgtcctgtgggcagttgccctgacaagctggattagtgacaggctactgtgcagtttctggcagagaatccattttttttatctgcattcgatttggcatgtgctcatcagcatcacattcccctacggtatggtaaccatggctctggtagacgcaaactatgagatgccgggtgaaactttgaaagtaagatactggcctcgggatagctggccagttggtctgccttatgtagaaattcggggtgatgataaagactgctag

SEQ ID NO: 214073 - DNA, 828 bp, synthetic construct
  misc_feature 1..828: note = Description of Artificial Sequence: Synthetic coding sequence
  source 1..828: mol_type = other DNA
atgggagccccacattggtgggatcaactacaggccggatcctccgaggtcgactggtgcgaagacaactataccatcgtcccagccatcgcagagttttataacaccatctccaatgtgttattctttatcctcccacctatctgtatgtgcctgtttcgccagtatgctacatgcttcaatagcggcatttacctaatctggacactgcttgtggtggtcggaatcggatcagtctattttcatgcaacactgagcttccttgggcagatgctggacgaactggccgtgctctgggtcctgatgtgtgctctggctatgtggttccccaggagatacctgccaaaaatctttaggaacgatagaggcaggttcaaagtggttgtaagtgtcctctcggcagtgaccacctgcctcgcttttgtcaagccagctattaataacatcagcctgatgactctaggcgtgccttgcaccgccctcttgatcgccgagctgaagaggtgtgacaatatgcgagtgttcaaattgggtctattcagcggactctggtggacactggcactgttttgctggatatccgaccgggcattttgtgaactgctttcttctttcaacttcccatatctgcactgcatgtggcacatactgatctgtctggcagcctacctcgggtgcgtgtgctttgcatatttcgacgccgcaagcgaaattcccgagcagggcccagttattaagttttggccgaacgagaaatgggcctttattggagtgccatacgtgagccttctgtgtgcaaataagaagtcctctgtcaaaattacttag

SEQ ID NO: 214074 - DNA, 423 bp, synthetic construct
  misc_feature 1..423: note = Description of Artificial Sequence: Synthetic coding sequence
  source 1..423: mol_type = other DNA
atgtgcctgtttagacagtatgctacgtgtttcaactctggtatttacttaatctggacattgctggtggttgtgggcattggatcagtgtacttccacgcaacgctttccttcctgggccagatgctggacgagcttgcagtcctatgggtgctcatgtgcgctcttgcaatgtggttcccccgacggtacttaccaaagattttccggaacgaccggggacgcttcaaagtggttgtgtctgtgctgtctgctgtgaccacatgtctagcttttgtgaagcccgctatcaataacatcagtctcatgactctgggcgttccttgcactgcattgctcatcgcagaactgaagcggcacgagagaaaccagcgtcgacgccaccgtaagggcggtcagcaggggggtggagataaagtatag

SEQ ID NO: 214075 - DNA, 1587 bp, synthetic construct
  misc_feature 1..1587: note = Description of Artificial Sequence: Synthetic coding sequence
  source 1..1587: mol_type = other DNA
atgcagggtccatgggttctgctgttgctaggccttaggctccaactgagcttgggcgtcataccagctgaggaggaaaacccagcattctggaaccgccaagccgcagaagccctggacgccgctaagaaactccaaccgatccagaaggttgccaagaatctgatactatttctcggcgacggattgggagtacctaccgttaccgcgaccagaatcctgaagggccagaaaaatggaaaactaggccctgaaactccacttgcgatggatcgcttcccttacctggctctctctaagacttacaatgtagacaggcaagtgccagacagcgccgcaacggctaccgcatacctgtgtggcgtgaaggccaatttccagacgatcggccttagcgctgctgcgaggttcaatcagtgcaatacgacaaggggaaacgaagtgatctccgttatgaaccgagctaagcaggctggcaaaagcgttggcgttgtcactactaccagagtccaacacgcatcaccagccggaacctacgctcacaccgtcaaccgaaactggtacagcgatgccgacatgccagcttccgctaggcaagaaggatgtcaagatatagctactcagctgatcagcaatatggacatagacgtcatattggggggaggacgcaaatacatgtttcccatgggaacaccagacccggaataccccgcagacgcgtcgcagaatggaattcgattagacgggaaaaatctagtgcaagagtggttggccaaacaccagggcgcttggtacgtgtggaatcgcactgagctgatgcaggcctccctggatcaatcagttacacatctgatgggtctctttgaacccggagatactaaatatgagatccaccgcgaccctacacttgacccatccctgatggagatgaccgaggccgctctgagacttctgtccaggaatcctcgtggattctatctgttcgtagaaggcggaagaatcgaccacgggcatcacgaaggcgtggcatatcaggctctcaccgaagccgtaatgttcgatgatgcaatcgaaagagccggtcagttaacaagtgaggaggacacgctcaccctggtaaccgcagaccactcgcatgtcttctcctttggtggatatacattaagaggatcaagcattttcggtctagccccatccaaggctcaggacagcaaagcttacacaagcatactgtacggtaatggccctggctacgtgttcaatagcggcgtgaggcccgacgtaaatgaatccgagtccggatcaccagactatcagcagcaggctgccgtacccctttctagtgagacccatggaggtgaggacgttgctgttttcgcacgcggtccccaggcacacctcgtccacggcgtgcaggagcagtcctttgtcgcccacgtgatggcgtttgccgcttgcctagagccctacacagcttgtgatctggcaccccctgcatgcaccacagacgcggcacaccccgtggccgcttccttacctttactggcaggaacactcctgctgctgggcgcaagtgcagccccttag

SEQ ID NO: 214076 - DNA, 513 bp, synthetic construct
  misc_feature 1..513: note = Description of Artificial Sequence: Synthetic coding sequence
  source 1..513: mol_type = other DNA
atggatagggccatcggacaggcaggcagcttgacatcaagcgaagatactctgactgtggttacggctgaccattcacacgtgtttaccttcgggggatacactcctcggggtaactctattttcggactagctcctatgctgtctgacaccgataaaaaaccattcacagctatcctatacggcaatggacccggatataaggtggtggggggagagagggagaatgtctcaatggttgattatgcacacaataactatcaggcgcagtcagcagtgcccctcaggcacgaaacccacgggggtgaagatgtagccgttttctcgaaggggccaatggcgcatctactgcatggggtgcacgagcagaactacgtccctcatgtaatggcttatgccgcttgtatcggagcaaatctcggccactgcgcacctgcaagctctgccggatcactggccgcagggccactgctcctcgcgctcgcactgtacccactgtcagtgctgttttag
